United States Patent Application Publication US 2011/0183924 A1 - sequence listing, part 281

SEQ ID NO: 865437 - protein, 2223 aa, Homo sapiens
MCNEQQQEPAKISSFTSLKVSQDLDVAVIVSSSNSAVALNLNLYFRQHPGHLLCERILEDLPIQGPKGVDEDDPVNSAYNMKLAKFSFQIDRSWKAQLSSLNETIKNSKLEVSCCAPWFQDILHLESPESGNHSTSVQSWAFIPQDIMHGQYNVLQKDHAKTSDPGRSWKIMHISEQEEPIELKCVSVTGFTALFTWEVERMGYTITLWDLETQGMQCFSLGTKCIPVDSSGDQQLCFVLTENGLSLILFGLTQEEFLNRLMIHGSASTVDTLCHLNGWGRCSIPIHALEAGIENRQLDTVNFFLKSKENLFNPSSKSSVSDQFDHLSSHLYLRNVEELIPALDLLCSAIRESYSEPQSKHFSEQLLNLTLSFLNNQIKELFIHTEELDEHLQKGVNILTSYINELRTFMIKFPWKLTDAIDEYDVHENVPKVKESNIWKKLSFEEVIASAILNNKIPEAQTFFRIDSHSAQKLEELIGIGLNLVFDNLKKNNIKEASELLKNMGFDVKGQLLKICFYTTNKNIRDFLVGKGDDYIVYIFQKAWVKNLEENLGRKTLSNFNVQLISNKKKCDNPFIFFSPSSFFNDYFTFVAKEKFVLTYINSNVQNIILEMAYYLMTFFNESLIPSTTLFDNLMTFFAKVLDFLESHCFNYFLFKVEILKEKNYFSEKEKRTIDFVHQVEKLYLGHFQENMQIQSFPRYWIKEQDFFKHKSVLDSFLKYDCKDEFNKQDHRIVLNWALWWDQLTQESILLPRISPEEYKSYSPEALWRYLTARHDWLNIILWIGEFQTQHSYASLQQNKWPLLTVDVINQNTSCNNYMRNEILDKLARNGVFLASELEDFECFLLRLSRIGGVIQDTLPVQNYKTKEGWDFHSQFILYCLEHSLQHLLYVYLDCYKLSPENCPFLEKKELHEAHPWFEFLVQCRQVASNLTDPKLIFQASLANAQILIPTNQASVSSMLLEGHTLLALATTMYSPGGVSQVVQNEENENCLKKVDPQLLKMALTPYPKLKTALFPQCTPPSVLPSDITIYHLIQSLSPFDPSRLFGWQSANTLAIGDAWSHLPHFSSPDLVNKYAIVERLNFAYYLHNGRPSFAFGTFLVQELIKSKTPKQLIQQVGNEAYVIGLSSFHIPSIGAACVCFLELLGLDSLKLRVDMKVANIILSYKCRNEDAQYSFIRESVAEKLSKLADGEKTTTEELLVLLEEGTWNSIQQQEIKRLSSESSSQWALVVQFCRLHNMKLSISYLRECAKANDWLQFIIHSQLHNYHPAEVKSLIQYFSPVIQDHLRLAFENLPSVPTSKMDSDQVCNKCPQELQGSKQEMTDLFEILLQCSEEPDSWHWLLVEAVKQQAPILSVLASCLQGASAISCLCVWIITSVEDNVATEAMGHIQDSTEDHTWNLEDLSVIWRTLLTRQKSKTLIRGFQLFFKDSPLLLVMEMYELCMFFRNYKEAEAKLLEFQKSLETLNTAATKVHPVIPAMWLEDQVCFLLKLMLQQCKTQYELGKLLQLFVEREHLFSDGPDVKKLCILCQILKDTSIAINHTIITSYSIENLQHECRSIWKDCRQMDKFALARRVAELAELPVDNLVIKEITQEMQTLKHIEQWSLKQARIDFWKKCHENFKKNSISSKAASSFFSTQAHVACEHPTGWSSMEERHLLLTLAGHWLAQEDVVPLDKLEELEKQIWLCRITQHTLGRNQEETEPRFSRQISTSGELSFDSLASEFSFSKLAALNTSKYLELNSLPSKETCENRLDWKEQESLNFLIGRLLDDGCVHEASRVCRYFHFYNPDVALVLHCRALASGEASMEDLHPEIHALLQSAELLEEEAPDIPLRRVHSTSSLDSQKFVTVPSSNEVVTNLEVLTSKCLHGKNYCRQVLCLYDLAKELGCSYTDVAAQDGEAMLRKILASQQPDRCKRAQAFISTQGLKPDTVAELVAEEVTRELLTSSQGTGHKQMFNPTEESQTFLQLTTLCQDRTLVGMKLLDKISSVPHGELSCTTELLILAHHCFTLTCHMEGIIRVLQAAHMLTDNHLAPSEEYGLVVRLLTGIGRYNEMTYIFDLLHKKHYFEVLMRKKLDPSGTLKTALLDYIKRCRPGDSEKHNMIALCFSMCREIGENHEAAARIQLKLIESQPWEDSLKDGHQLKQLLLKALTLMLDAAESYAKDSCVRQAQHCQRLTKLITLEGPFWHFLWEDSRNSSTPTEKPQLLALGENYELLSMNLI

SEQ ID NO: 865438 - protein, 1835 aa, Homo sapiens
MCNEQQQEPAKISSFTSLKVSQDLDVAVIVSSSNSAVALNLNLYFRQHPGHLLCERILEDLPIQGPKGVDEDDPVNSAYNMKLAKFSFQIDRSWKAQLSSLNETIKNSKLEVSCCAPWFQDILHLESPESGNHSTSVQSWAFIPQDIMHGQYNVLQKDHAKTSDPGRSWKIMHISEQEEPIELKCVSVTGFTALFTWEVERMGYTITLWDLETQGMQCFSLGTKCIPVDSSGDQQLCFVLTENGLSLILFGLTQEEFLNRLMIHGSASTVDTLCHLNGWGRCSIPIHALEAGIENRQLDTVNFFLKSKENLFNPSSKSSVSDQFDHLSSHLYLRNVEELIPALDLLCSAIRESYSEPQSKHFSEQLLNLTLSFLNNQIKELFIHTEELDEHLQKGVNILTSYINELRTFMIKFPWKLTDAIDEYDVHENVPKVKESNIWKKLSFEEVIASAILNNKIPEAQTFFRIDSHSAQKLEELIGIGLNLVFDNLKKNNIKEASELLKNMGFDVKGQLLKICFYTTNKNIRDFLVEILKEKNYFSEKEKRTIDFVHQVEKLYLGHFQENMQIQSFPRYWIKEQDFFKHKSVLDSFLKYDCKDEFNKQDHRIVLNWALWWDQLTQESILLPRISPEEYKSYSPEALWRYLTARHDWLNIILWIGEFQTQHSYASLQQNKWPLLTVDVINQNTSCNNYMRNEILDKLARNGVFLASELEDFECFLLRLSRIGGVIQDTLPVQNYKTKEGWDFHSQFILYCLEHSLQHLLYVYLDCYKLSPENCPFLEKKELHEAHPWFEFLVQCRQVASNLTDPKLIFQASLANAQILIPTNQASVSSMLLEGHTLLALATTMYSPGGVSQVVQNEENENCLKKVDPQLLKMALTPYPKLKTALFPQCTPPSVLPSDITIYHLIQSLSPFDPSRLFGWQSANTLAIGDAWSHLPHFSSPDLVNKYAIVERLNFAYYLHNGRPSFAFGTFLVQELIKSKTPKQLIQQVGNEAYVIGLSSFHIPSIGAACVCFLELLGLDSLKLRVDMKVANIILSYKCRNEDAQYSFIRESVAEKLSKLADGEKTTTEELLVLLEEGTWNSIQQQEIKRLSSESSSQWALVVQFCRLHNMKLSISYLRECAKANDWLQFIIHSQLHNYHPAEVKSLIQYFSPVIQDHLRLAFENLPSVPTSKMDSDQVCNKCPQELQGSKQEMTDLFEILLQCSEEPDSWHWLLVEAVKQQAPILSVLASCLQGASAISCLCVWIITSVEDNVATEAMGHIQDSTEDHTWNLEDLSVIWRTLLTRQKSKTLIRGFQLFFKDSPLLLVMEMYELCMFFRNYKEAEAKLLEFQKSLETLNTAATKVHPVIPAMWLEDQVCFLLKLMLQQCKTQYELGKLLQLFVEREHLFSDGPDVKKLCILCQILKDTSIAINHTIITSYSIENLQHECRSIWKDCRQMDNSALARRVAELAELPVDNLVIKEITQEMQTLKHIEQWSLKQARIDFWKKCHENFKKNSISSKAASSFFSTQAHVACEHPTGWSSMEERHLLLTLAGHWLAQEDVVPLDKLEELEKQIWLCRITQHTLGRNQEETEPRFSRQISTSGELSFDSLASEFSFSKLAALNTSKYLELNSLPSKETCENRLDWKEQESLNFLIGRLLDDGCVHEASRVCRYFHFYNPDVALVLHCRALASGEASMEDLHPEIHALLQSAELLEEEAPDIPLRRVHSTSSLDSQKFVTVPSSNEVVTNLEVLTSKCLHGKNYCRQVLCLYDLAKELGCSYTDVAAQDGEAMLRKILASQQPDRCKRAQAFISTQGLKPDTVAELVAEEVTRELLTSSQGTGALPPGDSQPL

SEQ ID NO: 865439 - protein, 1713 aa, Homo sapiens
MCNEQQQEPAKISSFTSLKVSQDLDVAVIVSSSNSAVALNLNLYFRQHPGHLLCERILEDLPIQGPKGVDEDDPVNSAYNMKLAKFSFQIDRSWKAQLSSLNETIKNSKLEVSCCAPWFQDILHLESPESGNHSTSVQSWAFIPQDIMHGQYNVLQKDHAKTSDPGRSWKIMHISEQEEPIELKCVSVTGFTALFTWEVERMGYTITLWDLETQGMQCFSLGTKCIPVDSSGDQQLCFVLTENGLSLILFGLTQEEFLNRLMIHGSASTVDTLCHLNGWGRCSIPIHALEAGIENRQLDTVNFFLKSKENLFNPSSKSSVSDQFDHLSSHLYLRNVEELIPALDLLCSAIRESYSEPQSKHFSEQLLNLTLSFLNNQIKELFIHTEELDEHLQKGVNILTSYINELRTFMIKFPWKLTDAIDEYDVHENVPKVKESNIWKKLSFEEVIASAILNNKIPEAQTFFRIDSHSAQKLEELIGIGLNLVFDNLKKNNIKEASELLKNMGFDVKGQLLKICFYTTNKNIRDFLVEILKEKNYFSEKEKRTIDFVHQVEKLYLGHFQENMQIQSFPRYWIKEQDFFKHKSVLDSFLKYDCKDEFNKQDHRIVLNWALWWDQLTQESILLPRISPEEYKSYSPEALWRYLTARHDWLNIILWIGEFQTQHSYASLQQNKWPLLTVDVINQNTSCNNYMRNEILDKLARNGVFLASELEDFECFLLRLSRIGGVIQDTLPVQNYKTKEGWDFHSQFILYCLEHSLQHLLYVYLDCYKLSPENCPFLEKKELHEAHPWFEFLVQCRQVASNLTDPKLIFQASLANAQILIPTNQASVSSMLLEGHTLLALATTMYSPGGVSQVVQNEENENCLKKVDPQLLKMALTPYPKLKTALFPQCTPPSVLPSDITIYHLIQSLSPFDPSRLFGWQSANTLAIGDAWSHLPHFSSPDLVNKYAIVERLNFAYYLHNGRPSFAFGTFLVQELIKSKTPKQLIQQVGNEAYVIGLSSFHIPSIGAACVCFLELLGLDSLKLRVDMKVANIILSYKCRNEDAQYSFIRESVAEKLSKLADGEKTTTEELLVLLEEGTWNSIQQQEIKRLSSESSSQWALVVQFCRLHNMKLSISYLRECAKANDWLQFIIHSQLHNYHPAEVKSLIQYFSPVIQDHLRLAFENLPSVPTSKMDSDQVCNKCPQELQGSKQEMTDLFEILLQCSEEPDSWHWLLVEAVKQQAPILSVLASCLQGASAISCLCVWIITSVEDNVATEAMGHIQDSTEDHTWNLEDLSVIWRTLLTRQKSKTLIRGFQLFFKDSPLLLVMEMYELCMFFRNYKEAEAKLLEFQKSLETLNTAATKVHPVIPAMWLEDQVCFLLKLMLQQCKTQYELGKLLQLFVEREHLFSDGPDVKKLCILCQILKDTSIAINHTIITSYSIENLQHECRSIWKDCRQMDNSALARRVAELAELPVDNLVIKEITQEMQTLKHIEQWSLKQARIDFWKKCHENFKKNSISSKAASSFFSTQAHVACEHPTGWSSMEERHLLLTLAGHWLAQEDVVPLDKLEELEKQIWLCRITQHTLGRNQEETEPRFSRQISTSGELSFDSLASEFSFSKLAALNTSKYLELNSLPSKETCENRLDWKEQESLNFLIGRLLDDGCVHEASRVCRYFHFYNPDVALVLHCRALASGEASMEDLHPEIHALLQSAELLEEEAPDIPLRRVHSSK

SEQ ID NO: 865440 - protein, 535 aa, Homo sapiens
MCNEQQQEPAKISSFTSLKVSQDLDVAVIVSSSNSAVALNLNLYFRQHPGHLLCERILEDLPIQGPKGVDEDDPVNSAYNMKLAKFSFQIDRSWKAQLSSLNETIKNSKLEVSCCAPWFQDILHLESPESGNHSTSVQSWAFIPQDIMHGQYNVLQKDHAKTSDPGRSWKIMHISEQEEPIELKCVSVTGFTALFTWEVERMGYTITLWDLETQGMQCFSLGTKCIPVDSSGDQQLCFVLTENGLSLILFGLTQEEFLNRLMIHGSASTVDTLCHLNGWGRCSIPIHALEAGIENRQLDTVNFFLKSKENLFNPSSKSSVSDQFDHLSSHLYLRNVEELIPALDLLCSAIRESYSEPQSKHFSEQLLNLTLSFLNNQIKELFIHTEELDEHLQKGVNILTSYINELRTFMIKFPWKLTDAIDEYDVHENVPKVKESNIWKKLSFEEVIASAILNNKIPEAQTFFRIDSHSAQKLEELIGIGLNLVFDNLKKNNIKEASELLKNMGFDVKGQLLKICFYTTNKNIRDFLVGKGETT

SEQ ID NO: 865441 - protein, 535 aa, Homo sapiens; identical to SEQ ID NO: 865440

SEQ ID NO: 865442 - protein, 122 aa, Homo sapiens
PEFRGRLLLLNSRPRRLKTQGMQCFSLGTKCIPCRQVLCLYDLAKELGCSYTDVAAQDGEAMLRKILASQQPDRCKRAQAFISTQGLKPDTVAELVAEEVTRELLTSSQGTGALPPGDSQPL

SEQ ID NO: 865443 - protein, 2163 aa, Homo sapiens
MCNEQQQEPAKISSFTSLKVSQDLDVAVIVSSSNSAVALNLNLYFRQHPGHLLCERILEDLPIQGPKGVDEDDPVNSAYNMKLAKFSFQIDRSWKAQLSSLNETIKNSKLEVSCCAPWFQDILHLESPESGNHSTSVQSWAFIPQDIMHGQYNVLQKDHAKTSDPGRSWKIMHISEQEEPIELKCVSVTGFTALFTWEVERMGYTITLWDLETQGMQCFSLGTKCIPVDSSGDQQLCFVLTENGLSLILFGLTQEEFLNRLMIHGSASTVDTLCHLNGWGRCSIPIHALEAGIENRQLDTVNFFLKSKENLFNPSSKSSVSDQFDHLSSHLYLRNVEELIPALDLLCSAIRESYSEPQSKHFSEQLLNLTLSFLNNQIKELFIHTEELDEHLQKGVNILTSYINELRTFMIKFPWKLTDAIDEYDVHENVPKVKESNIWKKLSFEEVIASAILNNKIPEAQTFFRIDSHSAQKLEELIGIGLNLVFDNLKKNNIKEASELLKNMGFDVKGQLLKICFYTTNKNIRDFLVEILKEKNYFSEKEKRTIDFVHQVEKLYLGHFQENMQIQSFPRYWIKEQDFFKHKSVLDSFLKYDCKDEFNKQDHRIVLNWALWWDQLTQESILLPRISPEEYKSYSPEALWRYLTARHDWLNIILWIGEFQTQHSYASLQQNKWPLLTVDVINQNTSCNNYMRNEILDKLARNGVFLASELEDFECFLLRLSRIGGVIQDTLPVQNYKTKEGWDFHSQFILYCLEHSLQLFFMSTLTVTNPKLIFQASLANAQILIPTNQASVSSMLLEGHTLLALATTMYSPGGVSQVVQNEENENCLKKVDPQLLKMALTPYPKLKTALFPQCTPPSVLPSDITIYHLIQSLSPFDPSRLFGWQSANTLAIGDAWSHLPHFSSPDLVNKYAIVERLNFAYYLHNGRPSFAFGTFLVQELIKSKTPKQLIQQVGNEAYVIGLSSFHIPSIGAACVCFLELLGLDSLKLRVDMKVANIILSYKCRNEDAQYSFIRESVAEKLSKLADGEKTTTEELLVLLEEGTWNSIQQQEIKRLSSESSSQWALVVQFCRLHNMKLSISYLRECAKANDWLQFIIHSQLHNYHPAEVKSLIQYFSPVIQDHLRLAFENLPSVPTSKMDSDQVCNKCPQELQGSKQEMTDLFEILLQCSEEPDSWHWLLVEAVKQQAPILSVLASCLQGASAISCLCVWIITSVEDNVATEAMGHIQDSTEDHTWNLEDLSVIWRTLLTRQKSKTLIRGFQLFFKDSPLLLVMEMYELCMFFRNYKEAEAKLLEFQKSLETLNTAATKVHPVIPAMWLEDQVCFLLKLMLQQCKTQYELGKLLQLFVEREHLFSDGPDVKKLCILCQILKDTSIAINHTIITSYSIENLQHECRSIWKDCRQMDNSALARRVAELAELPVDNLVIKEITQEMQTLKHIEQWSLKQARIDFWKKCHENFKKNSISSKAASSFFSTQAHVACEHPTGWSSMEERHLLLTLAGHWLAQEDVVPLDKLEELEKQIWLCRITQHTLGRNQEETEPRFSRQISTSGELSFDSLASEFSFSKLAALNTSKYLELNSLPSKETCENRLDWKEQESLNFLIGRLLDDGCVHEASRVCRYFHFYNPDVALVLHCRALASGEASMEDLHPEIHALLQSAELLEEEAPDIPLRRVHSTSSLDSQKFVTVPSSNEVVTNLEVLTSKCLHGKNYCRQVLCLYDLAKELGCSYTDVAAQDGEAMLRKILASQQPDRCKRAQAFISTQGLKPDTVAELVAEEVTRELLTSSQGTGHKQMFNPTEESQTFLQLTTLCQDRTLVGMKLLDKISSVPHGELSCTTELLILAHHCFTLTCHMEGIIRVLQAAHMLTDNHLAPSEEYGLVVRLLTGIGRYNEMTYIFDLLHKKHYFEVLMRKKLDPSGTLKTALLDYIKRCRPGDSEKHNMIALCFSMCREIGENHEAAARIQLKLIESQPWEDSLKDGHQLKQLLLKALTLMLDAAESYAKDSCVRQAQHCQRLTKLITLQIHFLNTGQNTMLINLGRHKLMDCILALPRFYQASIVAEAYDFVPDWAEILYQQVILKGDFNYLEEFKQQRLLKSSIFEEISKKYKQHQPTDMVMENLKKLLTYCEDVYLYYKLAYEHKFYEIVNVLLKDPQTGCCLKDMLAG

SEQ ID NO: 865444 - protein, 2291 aa, Homo sapiens
MCNEQQQEPAKISSFTSLKVSQDLDVAVIVSSSNSAVALNLNLYFRQHPGHLLCERILEDLPIQGPKGVDEDDPVNSAYNMKLAKFSFQIDRSWKAQLSSLNETIKNSKLEVSCCAPWFQDILHLESPESGNHSTSVQSWAFIPQDIMHGQYNVLQKDHAKTSDPGRSWKIMHISEQEEPIELKCVSVTGFTALFTWEVERMGYTITLWDLETQGMQCFSLGTKCIPVDSSGDQQLCFVLTENGLSLILFGLTQEEFLNRLMIHGSASTVDTLCHLNGWGRCSIPIHALEAGIENRQLDTVNFFLKSKENLFNPSSKSSVSDQFDHLSSHLYLRNVEELIPALDLLCSAIRESYSEPQSKHFSEQLLNLTLSFLNNQIKELFIHTEELDEHLQKGVNILTSYINELRTFMIKFPWKLTDAIDEYDVHENVPKVKESNIWKKLSFEEVIASAILNNKIPEAQTFFRIDSHSAQKLEELIGIGLNLVFDNLKKNNIKEASELLKNMGFDVKGQLLKICFYTTNKNIRDFLVGKGDDYIVYIFQKAWVKNLEENLGRKTLSNFNVQLISNKKKCDNPFIFFSPSSFFNDYFTFVAKEKFVLTYINSNVQNIILEMAYYLMTFFNESLIPSTTLFDNLMTFFAKVLDFLESHCFNYFLFKVEILKEKNYFSEKEKRTIDFVHQVEKLYLGHFQENMQIQSFPRYWIKEQDFFKHKSVLDSFLKYDCKDEFNKQDHRIVLNWALWWDQLTQESILLPRISPEEYKSYSPEALWRYLTARHDWLNIILWIGEFQTQHSYASLQQNKWPLLTVDVINQNTSCNNYMRNEILDKLARNGVFLASELEDFECFLLRLSRIGGVIQDTLPVQNYKTKEGWDFHSQFILYCLEHSLQLFFMSTLTVTNPKLIFQASLANAQILIPTNQASVSSMLLEGHTLLALATTMYSPGGVSQVVQNEENENCLKKVDPQLLKMALTPYPKLKTALFPQCTPPSVLPSDITIYHLIQSLSPFDPSRLFGWQSANTLAIGDAWSHLPHFSSPDLVNKYAIVERLNFAYYLHNGRPSFAFGTFLVQELIKSKTPKQLIQQVGNEAYVIGLSSFHIPSIGAACVCFLELLGLDSLKLRVDMKVANIILSYKCRNEDAQYSFIRESVAEKLSKLADGEKTTTEELLVLLEEGTWNSIQQQEIKRLSSESSSQWALVVQFCRLHNMKLSISYLRECAKANDWLQFIIHSQLHNYHPAEVKSLIQYFSPVIQDHLRLAFENLPSVPTSKMDSDQVCNKCPQELQGSKQEMTDLFEILLQCSEEPDSWHWLLVEAVKQQAPILSVLASCLQGASAISCLCVWIITSVEDNVATEAMGHIQDSTEDHTWNLEDLSVIWRTLLTRQKSKTLIRGFQLFFKDSPLLLVMEMYELCMFFRNYKEAEAKLLEFQKSLETLNTAATKVHPVIPAMWLEDQVCFLLKLMLQQCKTQYELGKLLQLFVEREHLFSDGPDVKKLCILCQILKDTSIAINHTIITSYSIENLQHECRSIWKDCRQMDKFALARRVAELAELPVDNLVIKEITQEMQTLKHIEQWSLKQARIDFWKKCHENFKKNSISSKAASSFFSTQAHVACEHPTGWSSMEERHLLLTLAGHWLAQEDVVPLDKLEELEKQIWLCRITQHTLGRNQEETEPRFSRQISTSGELSFDSLASEFSFSKLAALNTSKYLELNSLPSKETCENRLDWKEQESLNFLIGRLLDDGCVHEASRVCRYFHFYNPDVALVLHCRALASGEASMEDLHPEIHALLQSAELLEEEAPDIPLRRVHSTSSLDSQKFVTVPSSNEVVTNLEVLTSKCLHGKNYCRQVLCLYDLAKELGCSYTDVAAQDGEAMLRKILASQQPDRCKRAQAFISTQGLKPDTVAELVAEEVTRELLTSSQGTGHKQMFNPTEESQTFLQLTTLCQDRTLVGMKLLDKISSVPHGELSCTTELLILAHHCFTLTCHMEGIIRVLQAAHMLTDNHLAPSEEYGLVVRLLTGIGRYNEMTYIFDLLHKKHYFEVLMRKKLDPSGTLKTALLDYIKRCRPGDSEKHNMIALCFSMCREIGENHEAAARIQLKLIESQPWEDSLKDGHQLKQLLLKALTLMLDAAESYAKDSCVRQAQHCQRLTKLITLQIHFLNTGQNTMLINLGRHKLMDCILALPRFYQASIVAEAYDFVPDWAEILYQQVILKGDFNYLEEFKQQRLLKSSIFEEISKKYKQHQPTDMVMENLKKLLTYCEDVYLYYKLAYEHKFYEIVNVLLKDPQTGCCLKDMLAG

SEQ ID NO: 865445 - protein, 2009 aa, Homo sapiens; identical to SEQ ID NO: 865436

SEQ ID NO: 865446 - protein, 2327 aa, Homo sapiens; identical to SEQ ID NO: 865429

SEQ ID NO: 865447 - protein, 2268 aa, Homo sapiens
MCNEQQQEPAKISSFTSLKVSQDLDVAVIVSSSNSAVALNLNLYFRQHPGHLLCERILEDLPIQGPKGVDEDDPVNSAYNMKLAKFSFQIDRSWKAQLSSLNETIKNSKLEVSCCAPWFQDILHLESPESGNHSTSVQSWAFIPQDIMHGQYNVLQKDHAKTSDPGRSWKIMHISEQEEPIELKCVSVTGFTALFTWEVERMGYTITLWDLETQGMQCFSLGTKCIPVDSSGDQQLCFVLTENGLSLILFGLTQEEFLNRLMIHGSASTVDTLCHLNGWGRCSIPIHALEAGIENRQLDTVNFFLKSKENLFNPSSKSSVSDQFDHLSSHLYLRNVEELIPALDLLCSAIRESYSEPQSKHFSEQLLNLTLSFLNNQIKELFIHTEELDEHLQKGVNILTSYINELRTFMIKFPWKLTDAIDEYDVHENVPKVKESNIWKKLSFEEVIASAILNNKIPEAQTFFRIDSHSAQKLEELIGIGLNLVFDNLKKNNIKEASELLKNMGFDVKGQLLKICFYTTNKNIRDFLVGKGDDYIVYIFQKAWVKNLEENLGRKTLSNFNVQLISNKKKCDNPFIFFSPSSFFNDYFTFVAKEKFVLTYINSNVQNIILEMAYYLMTFFNESLIPSTTLFDNLMTFFAKVLDFLESHCFNYFLFKVEILKEKNYFSEKEKRTIDFVHQVEKLYLGHFQENMQIQSFPRYWIKEQDFFKHKSVLDSFLKYDCKDEFNKQDHRIVLNWALWWDQLTQESILLPRISPEEYKSYSPEALWRYLTARHDWLNIILWIGEFQTQHSYASLQQNKWPLLTVDVINQNTSCNNYMRNEILDKLARNGVFLASELEDFECFLLRLSRIGGVIQDTLPVQNYKTKEGWDFHSQFILYCLEHSLQHLLYVYLDCYKLSPENCPFLEKKELHEAHPWFEFLVQCRQVASNLTDPKLIFQASLANAQILIPTNQASVSSMLLEGHTLLALATTMYSPGGVSQVVQNEENENCLKKVDPQLLKMALTPYPKLKTALFPQCTPPSVLPSDITIYHLIQSLSPFDPSRLFGWQSANTLAIGDAWSHLPHFSSPDLVNKYAIVERLNFAYYLHNGRPSFAFGTFLVQELIKSKTPKQLIQQVGNEAYVIGLSSFHIPSIGAACVCFLELLGLDSLKLRVDMKVANIILSYKCRNEDAQYSFIRESVAEKLSKLADGEKTTTEELLVLLEEGTWNSIQQQEIKRLSSESSSQWALVVQFCRLHNMKLSISYLRECAKANDWLQFIIHSQLHNYHPAEVKSLIQYFSPVIQDHLRLAFENLPSVPTSKMDSDQVCNKCPQELQGSKQEMTDLFEILLQCSEEPDSWHWLLVEAVKQQAPILSVLASCLQGASAISCLCVWIITSVEDNVATEAMGHIQDSTEDHTWNLEDLSVIWRTLLTRQKSKTLIRGFQLFFKDSPLLLVMEMYELCMFFRNYKEAEAKLLEFQKSLETLNTAATKVHPVIPAMWLEDQVCFLLKLMLQQCKTQYELGKLLQLFVEREHLFSDGPDVKKLCILCQILKDTSIAINHTIITSYSIENLQHECRSIWKDCRQMDKFALARRVAELAELPVDNLVIKEITQEMQTLKHIEQWSLKQARIDFWKKCHENFKKNSISSKAASSFFSTQAHVACEHPTGWSSMEERHLLLTLAGHWLAQEDVVPLDKLEELEKQIWLCRITQHTLGRNQEETEPRFSRQISTSGELSFDSLASEFSFSKLAALNTSKYLELNSLPSKETCENRLDWKEQESLNFLIGRLLDDGCVHEASRVCRYFHFYNPDVALVLHCRALASGEASMEDLHPEIHALLQSAELLEEEAPDIPLRRVHSTSSLDSQKFVTVPSSNEVVTNLEVLTSKCLHGKNYCRQVLCLYDLAKELGCSYTDVAAQDGEAMLRKILASQQPDRCKRAQAFISTQGLKPDTVAELVAEEVTRELLTSSQGTGHKQMFNPTEESQTFLQLTTLCQDRTLVGMKLLDKISSVPHGELSCTTELLILAHHCFTLTCHMEGIIRVLQAAHMLTDNHLAPSEEYGLVVRLLTGIGRYNEMTYIFDLLHKKHYFEVLMRKKLDPSGTLKTALLDYIKRCRPGDSEKHNMIALCFSMCREIGENHEAAARIQLKLIESQPWEDSLKDGHQLKQLLLKALTLMLDAAESYAKDSCVRQAQHCQRLTKLITLQIHFLNTGQNTMLINLGRHKLMDCILALPRFYQASIVAEAYDFVPDWAEILYQQVILKGDFNYLEEFKQQRLLKSSIFEEISKK

SEQ ID NO: 865448 - protein, 2137 aa, Homo sapiens; identical to SEQ ID NO: 865434

SEQ ID NO: 865449 - protein, 1853 aa, Homo sapiens
MCNEQQQEPAKISSFTSLKVSQDLDVAVIVSSSNSAVALNLNLYFRQHPGHLLCERILEDLPIQGPKGVDEDDPVNSAYNMKLAKFSFQIDRSWKAQLSSLNETIKNSKLEVSCCAPWFQDILHLESPESGNHSTSVQSWAFIPQDIMHGQYNVLQKDHAKTSDPGRSWKIMHISEQEEPIELKCVSVTGFTALFTWEVERMGYTITLWDLETQGMQCFSLGTKCIPVDSSGDQQLCFVLTENGLSLILFGLTQEEFLNRLMIHGSASTVDTLCHLNGWGRCSIPIHALEAGIENRQLDTVNFFLKSKENLFNPSSKSSVSDQFDHLSSHLYLRNVEELIPALDLLCSAIRESYSEPQSKHFSEQLLNLTLSFLNNQIKELFIHTEELDEHLQKGVNILTSYINELRTFMIKFPWKLTDAIDEYDVHENVPKVKESNIWKKLSFEEVIASAILNNKIPEAQTFFRIDSHSAQKLEELIGIGLNLVFDNLKKNNIKEASELLKNMGFDVKGQLLKICFYTTNKNIRDFLVGKGDDYIVYIFQKAWVKNLEENLGRKTLSNFNVQLISNKKKCDNPFIFFSPSSFFNDYFTFVAKEKFVLTYINSNVQNIILEMAYYLMTFFNESLIPSTTLFDNLMTFFAKVLDFLESHCFNYFLFKVEILKEKNYFSEKEKRTIDFVHQVEKLYLGHFQENMQIQSFPRYWIKEQDFFKHKSVLDSFLKYDCKDEFNKQDHRIVLNWALWWDQLTQESILLPRISPEEYKSYSPEALWRYLTARHDWLNIILWIGEFQTQHSYASLQQNKWPLLTVDVINQNTSCNNYMRNEILDKLARNGVFLASELEDFECFLLRLSRIGGVIQDTLPVQNYKTKEGWDFHSQFILYCLEHSLQHLLYVYLDCYKLSPENCPFLEKKELHEAHPWFEFLVQCRQVASNLTDPKLIFQASLANAQILIPTNQASVSSMLLEGHTLLALATTMYSPGGVSQVVQNEENENCLKKVDPQLLKMALTPYPKLKTALFPQCTPPSVLPSDITIYHLIQSLSPFDPSRLFGWQSANTLAIGDAWSHLPHFSSPDLVNKYAIVERLNFAYYLHNGRPSFAFGTFLVQELIKSKTPKQLIQQVGNEAYVIGLSSFHIPSIGAACVCFLELLGLDSLKLRVDMKVANIILSYKCRNEDAQYSFIRESVAEKLSKLADGEKTTTEELLVLLEEGTWNSIQQQEIKRLSSESSSQWALVVQFCRLHNMKLSISYLRECAKANDWLQFIIHSQLHNYHPAEVKSLIQYFSPVIQDHLRLAFENLPSVPTSKMDSDQVCNKCPQELQGSKQEMTDLFEILLQCSEEPDSWHWLLVEAVKQQAPILSVLASCLQGASAISCLCVWIITSVEDNVATEAMGHIQDSTEDHTWNLEDLSVIWRTLLTRQKSKTLIRGFQLFFKDSPLLLVMEMYELCMFFRNYKEAEAKLLEFQKSLETLNTAATKVHPVIPAMWLEDQVCFLLKLMLQQCKTQYELGKLLQLFVEREHLFSDGPDVKKLCILCQILKDTSIAINHTIITSYSIENLQHECRSIWKDCRQMDKFALARRVAELAELPVDNLVIKEITQEMQTLKHIEQWSLKQARIDFWKKCHENFKKNSISSKAASSFFSTQAHVACEHPTGWSSMEERHLLLTLAGHWLAQEDVVPLDKLEELEKQIWLCRITQHTLGRNQEETEPRFSRQISTSGELSFDSLASEFSFSKLAALNTSKYLELNSLPSKETCENRLDWKEQESLNFLIGRLLDDGCVHEASRVCRYFHFYNPDVALVLHCRALASGEASMEDLHPEIHALLQSAELLEWHAAQMSQRRAPSRKKRNSVGHDSKRT

SEQ ID NO: 865450 - protein, 535 aa, Homo sapiens; identical to SEQ ID NO: 865440

SEQ ID NO: 865451 - protein, 346 aa, Homo sapiens
MCNEQQQEPAKISSFTSLKVSQDLDVAVIVSSSNSAVALNLNLYFRQHPGHLLCERILEDLPIQGPKGVDEDDPVNSAYNMKLAKFSFQIDRSWKAQLSSLNETIKNSKLEVSCCAPWFQDILHLESPESGNHSTSVQSWAFIPQDIMHGQYNVLQKDHAKTSDPGRSWKIMHISEQEEPIELKCVSVTGFTALFTWEVERMGYTITLWDLETQGMQCFSLGTKCIPVDSSGDQQLCFVLTENGLSLILFGLTQEEFLNRLMIHGSASTVDTLCHLNGWGRCSIPIHALEAGIENRQLDTVNFFLKSKENLFNPSSKSSVSDQFDHLSSHLYLRSKWNKDFYICIY

SEQ ID NO: 865452 - protein, 595 aa, Homo sapiens
MATKARVMYDFAAEPGNNELTVNEGEIITITNPDVGGGWLEGRNIKGERGLVPTDYVEILPSDGKDQFSCGNSVADQAFLDSLSASTAQASSSAASNNHQVGSGNDPWSAWSASKSGNWESSEGWGAQPEGAGAQRNTNTPNNWDTAFGHPQAYQGPATGDDDDWDEDWDGPKSSSYFKDSESADAGGAQRGNSRASSSSMKIPLNKFPGFAKPGTEQYLLAKQLAKPKEKIPIIVGDYGPMWVYPTSTFDCVVADPRKGSKMYGLKSYIEYQLTPTNTNRSVNHRYKHFDWLYERLLVKFGSAIPIPSLPDKQVTGRFEEEFIKMRMERLQAWMTRMCRHPVISESEVFQQFLNFRDEKEWKTGKRKAERDELAGVMIFSTMEPEAPDLDLVEIEQKCEAVGKFTKAMDDGVKELLTVGQEHWKRCTGPLPKEYQKIGKALQSLATVFSSSGYQGETDLNDAITEAGKTYEEIASLVAEQPKKDLHFLMECNHEYKGFLGCFPDIIGTHKGAIEKVKESDKLVATSKITLQDKQNMVKRVSIMSYALQAEMNHFHSNRIYDYNSVIRLYLEQQVQFYETIAEKLRQALSRFPVM

SEQ ID NO: 865453 - protein, 112 aa, Homo sapiens
MATKARVMYDFAAEPGNNELTVNEGEIITITNPDVGGGWLEGRNIKGERGLVPTDYVEILPSDGKDQFSCGNSVADQAFLDSLSASTAQASSSAASNNHQVRLTSSFWMWLA

SEQ ID NO: 865454 - protein, 595 aa, Homo sapiens; identical to SEQ ID NO: 865452

SEQ ID NO: 865455 - protein, 618 aa, Homo sapiens
ACHHVRHDFAPSSPSAMIVRPPQPRGTARVMYDFAAEPGNNELTVNEGEIITITNPDVGGGWLEGRNIKGERGLVPTDYVEILPSDGKDQFSCGNSVADQAFLDSLSASTAQASSSAASNNHQVGSGNDPWSAWSASKSGNWESSEGWGAQPEGAGAQRNTNTPNNWDTAFGHPQAYQGPATGDDDDWDEDWDGPKSSSYFKDSESADAGGAQRGNSRASSSSMKIPLNKFPGFAKPGTEQYLLAKQLAKPKEKIPIIVGDYGPMWVYPTSTFDCVVADPRKGSKMYGLKSYIEYQLTPTNTNRSVNHRYKHFDWLYERLLVKFGSAIPIPSLPDKQVTGRFEEEFIKMRMERLQAWMTRMCRHPVISESEVFQQFLNFRDEKEWKTGKRKAERDELAGVMIFSTMEPEAPDLDLVEIEQKCEAVGKFTKAMDDGVKELLTVGQEHWKRCTGPLPKEYQKIGKALQSLATVFSSSGYQGETDLNDAITEAGKTYEEIASLVAEQPKKDLHFLMECNHEYKGFLGCFPDIIGTHKGAIEKVKESDKLVATSKITLQDKQNMVKRVSIMSYALQAEMNHFHSNRIYDYNSVIRLYLEQQVQFYETIAEKLRQALSRFPVM

SEQ ID NO: 865456 - protein, 595 aa, Homo sapiens; identical to SEQ ID NO: 865452

SEQ ID NO: 865457 - protein, 370 aa, Homo sapiens
MATKARVMYDFAAEPGNNELTVNEGEIITITNPDVGGGWLEGRNIKGERGLVPTDYVEILPSDGKDQFSCGNSVADQAFLDSLSASTAQASSSAASNNHQVGSGNDPWSAWSASKSGNWESSEGWGAQPEGAGAQRNTNTPNNWDTAFGHPQAYQGPATGDDDDWDEDWDGPKSSSYFKDSESADAGGAQRGNSRASSSSMKIPLNKFPGFAKPGTEQYLLAKQLAKPKEKIPIIVGDYGPMWVYPTSTFDCVVADPRKGSKMYGLKSYIEYQLTPTNTNRSVNHRYKHFDWLYERLLVKFGSAIPIPSLPDKQVTGRFEEEFIKMRMERLQAWMTRMCRHPVISESEVFQQFLNFRDEKDIFHHGTRGT

SEQ ID NO: 865458 - protein, 595 aa, Homo sapiens; identical to SEQ ID NO: 865452

SEQ ID NO: 865459 - protein, 395 aa, Homo sapiens [sequence omitted]

SEQ ID NO: 865460 - protein, 207 aa, Homo sapiens
MATKARVMYDFAAEPGNNELTVNEGEIITITNPDVGGGWLEGRNIKGERGLVPTDYVEILPSDGKDQFSCGNSVADQAFLDSLSASTAQASSSAASNNHQVGSGNDPWSAWSASKSGNWESSEGWGAQPEGAGAQRNTNTPNNWDTAFGHPQAYQGPATGDDDDWDEDWDGPKSSSYFKDSESADAGGAQRGNSRASSSSMKIPLNK

SEQ ID NO: 865461 - protein, 595 aa, Homo sapiens; identical to SEQ ID NO: 865452

SEQ ID NO: 865462 - protein, 595 aa, Homo sapiens; identical to SEQ ID NO: 865452

SEQ ID NO: 865463 - protein, 419 aa, Homo sapiens
MNSDSESADAGGAQRGNSRASSSSMKIPLNKFPGFAKPGTEQYLLAKQLAKPKEKIPIIVGDYGPMWVYPTSTFDCVVADPRKGSKMYGLKSYIEYQLTPTNTNRSVNHRYKHFDWLYERLLVKFGSAIPIPSLPDKQVTGRFEEEFIKMRMERLQAWMTRMCRHPVISESEVFQQFLNFRDEKEWKTGKRKAERDELAGVMIFSTMEPEAPDLDLVEIEQKCEAVGKFTKAMDDGVKELLTVGQEHWKRCTGPLPKEYQKIGKALQSLATVFSSSGYQGETDLNDAITEAGKTYEEIASLVAEQPKKDLHFLMECNHEYKGFLGCFPDIIGTHKGAIEKVKESDKLVATSKITLQDKQNMVKRVSIMSYALQAEMNHFHSNRIYDYNSVIRLYLEQQVQFYETIAEKLRQALSRFPVM

SEQ ID NO: 865464 - protein, 543 aa, Homo sapiens
KLLGGLKQENDLNWEAATAVSRDRATVLQPGLSETPQKKKNICQLTFQVGSGNDPWSAWSASKSGNWESSEGWGAQPEGAGAQRNTNTPNNWDTAFGHPQAYQGPATGDDDDWDEDWDGPKSSSYFKDSESADAGGAQRGNSRASSSSMKIPLNKFPGFAKPGTEQYLLAKQLAKPKEKIPIIVGDYGPMWVYPTSTFDCVVADPRKGSKMYGLKSYIEYQLTPTNTNRSVNHRYKHFDWLYERLLVKFGSAIPIPSLPDKQVTGRFEEEFIKMRMERLQAWMTRMCRHPVISESEVFQQFLNFRDEKEWKTGKRKAERDELAGVMIFSTMEPEAPDLDLVEIEQKCEAVGKFTKAMDDGVKELLTVGQEHWKRCTGPLPKEYQKIGKALQSLATVFSSSGYQGETDLNDAITEAGKTYEEIASLVAEQPKKDLHFLMECNHEYKGFLGCFPDIIGTHKGAIEKVKESDKLVATSKITLQDKQNMVKRVSIMSYALQAEMNHFHSNRIYDYNSVIRLYLEQQVQFYETIAEKLRQALSRFPVM

SEQ ID NO: 865465 - protein, 187 aa, Homo sapiens [sequence omitted]

SEQ ID NO: 865466 - protein, 711 aa, Homo sapiens
RRRPGAVFTRGAWWGGLLRQPRPNGHPEAVLSWRSGSSMSRTLASAVPLSSPDYYERLGQLQHGLRDSEKKRLDLEKKLYEYNQSDTCRVKLKYVKLKNYLKEICESEKKAHTRNQEYLKRFERVQAHVVHFTTNTEKLQKLKLEYETQIKKMLCSKDSLGLKEELTDEDREKVAVQEGINSGTAMSRGLYQPATIFMGRQMSAILSMRDFSTEHKSPQPTKNFSIPDPHSHRQTAQSSNVTDSCVVQTSNDTQCLNKSDNIDGKASLQIGEKMPVTASVLSEEEQTHCLEIGSNTRHGKSNLSEGKKSAELNSPLRERLSPENRTTDLKCDSSSGSEGEILTREHIEVEEKRASPPVSPIPVSEYCESENKWSQEKHSPWEGVSDHLAHREPKSQKPFRKMQEEEEESWSTSSDLTISISEDDLILESPEPQPNPGGKMEGEDGIEALKLIHAEQERVALSTEKNCILQTLSSPDSEKESSTNAPTREPGQTPDSDVPRAQVGQHVATLKEHDNSVKEEATALLRKALTEECGRRSAIHSSESSCSLPSILNDNSGIKEAKPAVWLNSVPTREQEVSSGCGDKSKKENVAADIPITETEAYQLLKKATLQDNTNQTENRFQKTDASVSHLSGLNIGSGAFETKTANKIASEASFSSSEGSPLSRHENKKKPVINLKSNALWDESDDSNSEIEAALRPRNHNTDDSDDFYD

SEQ ID NO: 865467 - protein, 105 aa, Homo sapiens
CLRAFSGCRSVLSPHKAAQSTRELMPWVESNPQPTEASWWISNPTPLLFTGTIWGEFCSLSGGPSRLSLACPLTARHPLVIIPFIGFLSSLCHCPHGSWDHLSSK

SEQ ID NO: 865468 - protein, 570 aa, Homo sapiens
MQLEYETQIKKMLCSKDSLGLKEELTDEDREKVAVQEGINSGTAMSRGLYQPATIFMGRQMSAILSMRDFSTEHKSPQPTKNFSIPDPHSHRQTAQSSNVTDSCVVQTSNDTQCLNKSDNIDGKASLQIGEKMPVTASVLSEEEQTHCLEIGSNTRHGKSNLSEGKKSAELNSPLRERLSPENRTTDLKCDSSSGSEGEILTREHIEVEEKRASPPVSPIPVSEYCESENKWSQEKHSPWEGVSDHLAHREPKSQKPFRKMQEEEEESWSTSSDLTISISEDDLILESPEPQPNPGGKMEGEDGIEALKLIHAEQERVALSTEKNCILQTLSSPDSEKESSTNAPTREPGQTPDSDVPRAQVGQHVATLKEHDNSVKEEATALLRKALTEECGRRSAIHSSESSCSLPSILNDNSGIKEAKPAVWLNSVPTREQEVSSGCGDKSKKENVAADIPITETEAYQLLKKATLQDNTNQTENRFQKTDASVSHLSGLNIGSGAFETKTANKIASEASFSSSEGSPLSRHENKKKPVINLKSNALWDESDDSNSEIEAALRPRNHNTDDSDDFYD

SEQ ID NO: 865469 - protein, 646 aa, Homo sapiens
GHLSEQYVPDSCVVQTSNDTQGLNKSDNIDGKASLQIGEKTPVTASVLSEEEQTHCLEIGSNTRHGKSNLSEGKKSAALEYETQIKKMLCSKDSLGLKEELTDEDREKVAVQEGINSGTAMSRGLYQPATIFMGRQMSAILSMRDFSTEHKSPQPTKNFSIPDPHSHRQTAQSSNVTDSCVVQTSNDTQCLNKSDNIDGKASLQIGEKMPVTASVLSEEEQTHCLEIGSNTRHGKSNLSEGKKSAELNSPLRERLSPENRTTDLKCDSSSGSEGEILTREHIEVEEKRASPPVSPIPVSEYCESENKWSQEKHSPWEGVSDHLAHREPKSQKPFRKMQEEEEESWSTSSDLTISISEDDLILESPEPQPNPGGKMEGEDGIEALKLIHAEQERVALSTEKNCILQTLSSPDSEKESSTNAPTREPGQTPDSDVPRAQVGQHVATLKEHDNSVKEEATALLRKALTEECGRRSAIHSSESSCSLPSILNDNSGIKEAKPAVWLNSVPTREQEVSSGCGDKSKKENVAADIPITETEAYQLLKKATLQDNTNQTENRFQKTDASVSHLSGLNIGSGAFETKTANKIASEASFSSSEGSPLSRHENKKKPVINLKSNALWDESDDSNSEIEAALRPRNHNTDDSDDFYD

SEQ ID NO: 865470 - protein, 693 aa, Homo sapiens
RRRPGAVFTRGAWWGGLLRQPRPNGHPEAVLSWRSGSSMSRTLASAVPLSSPDYYERLGQLQHGLRDSEKKRLDLEKKLYEYNQSDTCRVKLKYVKLKNYLKEICESEKKAHTRNQEYLKRFERVQAHVVHFTTNTEKLQKLKLEYETQIKKMLCSKDSLGLKEELTDEDREKVAVQEGINSGTAMSRGLYQPATIFMGRQMSAILSMRDFSTEHKSPQPTKNFSIPDPHSHRQTAQSSNVTDSCVVQTSNDTQCLNKSDNIDGKASLQIGEKMPVTASVLSEEEQTHCLEIGSNTRHGKSNLSEGKKSAELNSPLRERLSPENRTTDLKCDSSSGSEGEILTREHIEVEEKRASPPVSPIPVSEYCESENKWSQEKHSPWEGVSDHLAHREPKSQKPFRKMQEEEEESWSTSSDLTISISEDDLILESPEPQPNPGGKMEGEDGIEALKLIHAEQERVALSTEKNCILQTLSSPDSEKESSTNAPTREPGQTPDSDVPRAQATALLRKALTEECGRRSAIHSSESSCSLPSILNDNSGIKEAKPAVWLNSVPTREQEVSSGCGDKSKKENVAADIPITETEAYQLLKKATLQDNTNQTENRFQKTDASVSHLSGLNIGSGAFETKTANKIASEASFSSSEGSPLSRHENKKKPVINLKSNALWDESDDSNSEIEAALRPRNHNTDDSDDFYD

SEQ ID NO: 865471 - protein, 711 aa, Homo sapiens; identical to SEQ ID NO: 865466

SEQ ID NO: 865472 - protein, 665 aa, Homo sapiens
RRRPGAVFTRGAWWGGLLRQPRPNGHPEAVLSWRSGSSMSRTLASAVPLSSPDYYERLGQLQHGLRDSEKKRLDLEKKLYEYNQSDTCRVKLKYVKLKNYLKEICESEKKAHTRNQEYLKRFERVQAHVVHFTTNTEKLQKLKLEYETQIKKMLCSKDSLGLKEELTDEDREKVAVQEGINSGTAMSRGLYQPATIFMGRQMSAILSMRDFSTEHKSPQPTKNFSIPDPHSHRQTAQSSNVTDSCVVQTSNDTQCLNKSDNIDGKASLQIGEKMPVTASVLSEEEQTHCLEIGSNTRHGKSNLSEGKKSAELNSPLRERLSPENRTTDLKCDSSSGSEGEILTREHIEVEEKRASPPVSPIPVSEYCESENKWSQEKHSPWEGVSDHLAHREPKSQKPFRKMQEEEEESWSTSSDLTISISEDDLILESPEPQPNPGGKMEGEDGIEALKLIHAEQERVALSTEKNCILQTLSSPDSEKESSTNAPTREPGQTPDSDVPRAQVGQHVATLKEHDNSVKEEATALLRKALTEECGRRSAIHSSESSCSLPSILNDNSGIKEAKPAVWLNSVPTREQEVSSGCGDKSKKENVAADIPITETEAYQLLKKATLQDNTNQTENRFQKTDASVSHLSGLNIGSGAFETKTANKIASEASFSSSEGSPLSR

SEQ ID NO: 865473 - protein, 693 aa, Homo sapiens
RRRPGAVFTRGAWWGGLLRQPRPNGHPEAVLSWRSGSSMSRTLASAVPLSSPDYYERLGQLQHGLRDSEKKRLDLEKKLYEYNQSDTCRVKLKYVKLKNYLKEICESEKKAHTRNQEYLKRFERVQAHVVHFTTNTEKLQKLKLEYETQIKKMLCSKDSLGLKEELTDEDREKVAVQEGINSGTAMSRGLYQPATIFMGRQMSAILSMRDFSTEHKSPQPTKNFSIPDPHSHRQTAQSSNVTDSCVVQTSNDTQCLNKSDNIDGKASLQIGEKMPVTASVLSEEEQTHCLEIGSNTRHGKSNLSEGKKSAELNSPLRERLSPENRTTDLKCDSSSGSEGEILTREHIEVEEKRASPPVSPIPVSEYCESENKWSQEKHSPWEGVSDHLAHREPKSQKPFRKMQEEEEESWSTSSDLTISISEDDLILESPEPQPNPGGKMEGEDGIEALKLIHAEQERVALSTEKNCILQTLSSPDSEKESSTNAPTREPGQTPDSDVPRAQVGQHVATLKEHDNSVKEEATALLRKALTEECGRRSAIHSSESSCSLPSILNDNSGIKEAKPAVWLNSVPTREQEVSSGCGDKSKKENVAADIPITETEAYQLLKKATLQDNTNQTENRFQKTDASVSHLSGLNIGSGAFETKTANKIASEASFSSSEGSPLSRHENKKKPVINLKSNGERDNRTLDFLFLF

SEQ ID NO: 865474 - protein, 523 aa, Homo sapiens
RRRPGAVFTRGAWWGGLLRQPRPNGHPEAVLSWRSGSSMSRTLASAVPLSSPDYYERLGQLQHGLRDSEKKRLDLEKKLYEYNQSDTCRVKLKYVKLKNYLKEICESEKKAHTRNQEYLKRFERVQAHVVHFTTNTEKLQKLKLEYETQIKKMLCSKDSLGLKEELTDEDREKVAVQEGINSGTAMSRGLYQPATIFMGRQMSAILSMRDFSTEHKSPQPTKNFSIPDPHSHRQTAQSSNVTDSCVVQTSNDTQCLNKSDNIDGKASLQIGEKMPVTASVLSEEEQTHCLEIGSNTRHGKSNLSEGKKSAELNSPLRERLSPENRTTDLKCDSSSGSEGEILTREHIEVEEKRASPPVSPIPVSEYCESENKWSQEKHSPWEGVSDHLAHREPKSQKPFRKMQEEEEESWSTSSDLTISISEDDLILESPEPQPNPGGKMEGEDGIEALKLIHAEQERVALSTEKNCILQTLSSPDSEKESSTNAPTREPGQTPDSDVPRAQVGQHVATLKEHDNSVKEEVGS

SEQ ID NO: 865475 - protein, 459 aa, Homo sapiens
RTRGLFSVFICVVQTSNDTQCLNKSDNIDGKASLQIGEKMPVTASVLSEEEQTHCLEIGSNTRHGKSNLSEGKKSAELNSPLRERLSPENRTTDLKCDSSSGSEGEILTREHIEVEEKRASPPVSPIPVSEYCESENKWSQEKHSPWEGVSDHLAHREPKSQKPFRKMQEEEEESWSTSSDLTISISEDDLILESPEPQPNPGGKMEGEDGIEALKLIHAEQERVALSTEKNCILQTLSSPDSEKESSTNAPTREPGQTPDSDVPRAQATALLRKALTEECGRRSAIHSSESSCSLPSILNDNSGIKEAKPAVWLNSVPTREQEVSSGCGDKSKKENVAADIPITETEAYQLLKKATLQDNTNQTENRFQKTDASVSHLSGLNIGSGAFETKTANKIASEASFSSSEGSPLSRHENKKKPVINLKSNALWDESDDSNSEIEAALRPRNHNTDDSDDFYD

SEQ ID NO: 865476 - protein, 726 aa, Homo sapiens
RRRPGAVFTRGAWWGGLLRQPRPNGHPEAVLSWRSGSSMSRTLASAVPLSSPDYYERLGQLQHGLRDSEKKRLDLEKKLYEYNQSDTCRVKLKYVKLKNYLKEICESEKKAHTRNQEYLKRFERVQAHVVHFTTNTEKLQKLKVGFSLKQSLENRDLTLEYETQIKKMLCSKDSLGLKEELTDEDREKVAVQEGINSGTAMSRGLYQPATIFMGRQMSAILSMRDFSTEHKSPQPTKNFSIPDPHSHRQTAQSSNVTDSCVVQTSNDTQCLNKSDNIDGKASLQIGEKMPVTASVLSEEEQTHCLEIGSNTRHGKSNLSEGKKSAELNSPLRERLSPENRTTDLKCDSSSGSEGEILTREHIEVEEKRASPPVSPIPVSEYCESENKWSQEKHSPWEGVSDHLAHREPKSQKPFRKMQEEEEESWSTSSDLTISISEDDLILESPEPQPNPGGKMEGEDGIEALKLIHAEQERVALSTEKNCILQTLSSPDSEKESSTNAPTREPGQTPDSDVPRAQVGQHVATLKEHDNSVKEEATALLRKALTEECGRRSAIHSSESSCSLPSILNDNSGIKEAKPAVWLNSVPTREQEVSSGCGDKSKKENVAADIPITETEAYQLLKKATLQDNTNQTENRFQKTDASVSHLSGLNIGSGAFETKTANKIASEASFSSSEGSPLSRHENKKKPVINLKSNALWDESDDSNSEIEAALRPRNHNTDDSDDFYD

SEQ ID NO: 865477 - protein, 540 aa, Homo sapiens
MQVAVQEGINSGTAMSRGLYQPATIFMGRQMSAILSMRDFSTEHKSPQPTKNFSIPDPHSHRQTAQSSNVTDSCVVQTSNDTQCLNKSDNIDGKASLQIGEKMPVTASVLSEEEQTHCLEIGSNTRHGKSNLSEGKKSAELNSPLRERLSPENRTTDLKCDSSSGSEGEILTREHIEVEEKRASPPVSPIPVSEYCESENKWSQEKHSPWEGVSDHLAHREPKSQKPFRKMQEEEEESWSTSSDLTISISEDDLILESPEPQPNPGGKMEGEDGIEALKLIHAEQERVALSTEKNCILQTLSSPDSEKESSTNAPTREPGQTPDSDVPRAQVGQHVATLKEHDNSVKEEATALLRKALTEECGRRSAIHSSESSCSLPSILNDNSGIKEAKPAVWLNSVPTREQEVSSGCGDKSKKENVAADIPITETEAYQLLKKATLQDNTNQTENRFQKTDASVSHLSGLNIGSGAFETKTANKIASEASFSSSEGSPLSRHENKKKPVINLKSNALWDESDDSNSEIEAALRPRNHNTDDSDDFYD

SEQ ID NO: 865478 - protein, 503 aa, Homo sapiens
RRRPGAVFTRGAWWGGLLRQPRPNGHPEAVLSWRSGSSMSRTLASAVPLSSPDYYERLGQLQHGLRDSEKKRLDLEKKLYEYNQSDTCRVKLKYVKLKNYLKEICESEKKAHTRNQEYLKRFERVQAHVVHFTTNTEKLQKLKLEYETQIKKMLCSKDSLGLKEELTDEDREKVAVQEGINSGTAMSRGLYQPATIFMGRQMSAILSMRDFSTEHKSPQPTKNFSIPDPHSHRQTAQSSNVTDSCVVQTSNDTQCLNKSDNIDGKASLQIGEKMPVTASVLSEEEQTHCLEIGSNTRHGKSNLSEGKKSAELNSPLRERLSPENRTTDLKCDSSSGSEGEILTREHIEVEEKRASPPVSPIPVSEYCESENKWSQEKHSPWEGVSDHLAHREPKSQKPFRKMQEEEEESWSTSSDLTISISEDDLILESPEPQPNPGGKMEGEDGIEALKLIHAEQERVALSTEKNCILQTLSSPDSERKCGCRYPNHRNRSLSVAEEGHPSG

SEQ ID NO: 865479 - protein, 693 aa, Homo sapiens; identical to SEQ ID NO: 865473

SEQ ID NO: 865480 - protein, 693 aa, Homo sapiens; identical to SEQ ID NO: 865473

SEQ ID NO: 865481 - protein, 128 aa, Homo sapiens
MAAFMLGSLLRTFKQMVPSSASGQVRSHYVDWRMWRDVKRRKMAYEYADERLRINSLRKNTILPKILQDVADEEIAALPRDSCPVRIRNRCVMTSRPRGVKRRWRLSRIVFRHLADHGQLSGIQRATW

SEQ ID NO: 865482 - protein, 113 aa, Homo sapiens
MVPSSASGQVRSHYVDWRMWRDVKRRKMAYEYADERLRINSLRKNTILPKILQDVADEEIAALPRDSCPVRIRNRCVMTSRPRGVKRRWRLSRIVFRHLADHGQLSGIQRATW

SEQ ID NO: 865483 - protein, 128 aa, Homo sapiens; identical to SEQ ID NO: 865481

SEQ ID NO: 865484 - protein, 114 aa, Homo sapiens
MAAFMLGSLLRTFKQMVPSSASGQVRSHYVDWRMWRDVKRRKMAYEYADERLRINSLRKNTILPKILQCPVRIRNRCVMTSRPRGVKRRWRLSRIVFRHLADHGQLSGIQRATW

SEQ ID NO: 865485 - protein, 128 aa, Homo sapiens; identical to SEQ ID NO: 865481

SEQ ID NO: 865486 - protein, 128 aa, Homo sapiens; identical to SEQ ID NO: 865481

SEQ ID NO: 865487 - protein, 128 aa, Homo sapiens; identical to SEQ ID NO: 865481

SEQ ID NO: 865488 - protein, 128 aa, Homo sapiens; identical to SEQ ID NO: 865481

SEQ ID NO: 865489 - protein, 128 aa, Homo sapiens; identical to SEQ ID NO: 865481

SEQ ID NO: 865490 - protein, 141 aa, Homo sapiens
MAAFMLGSLLRTFKQMVPSSASGQVRSHYVDWRMWRDVKRRKMAYEYADERLRINSLRKNTILPKILQDVADEEIAALPRDSCPVRIRNRCVMTSRPRGVKRRWRLSRIVFRHLADHGQLSGIQRATCLNSIQLFLYFFFK

SEQ ID NO: 865491 - protein, 233 aa, Homo sapiens
MDWSELYPEFFAPLTQNQSHDDPKDKKEKRAQAQVEFADIGCGYGGLLVELSPLFPDTLILGLEIRVKVSDYVQDRIRALRAAPAGGFQNIACLRSNAMKHLPNFFYKGQLTKMFFLFPDPHFKRTKHKWRIISPTLLAEYAYVLRVGGLVYTITDVLELHDWMCTHFEEHPLFERVPLEDLSEDPVVGHLGTSTEEGKKVLRNGGKNFPAIFRRIQDPVLQAVTSQTSLPGH

SEQ ID NO: 865492 - protein, 276 aa, Homo sapiens
MAAETRNVAGAEAPPPQKRYYRQRAHSNPMADHTLRYPVKPEEMDWSELYPEFFAPLTQNQSHDDPKDKKEKRAQAQVEFADIGCGYGGLLVELSPLFPDTLILGLEIRVKVSDYVQDRIRALRAAPAGGFQNIACLRSNAMKHLPNFFYKGQLTKMFFLFPDPHFKRTKHKWRIISPTLLAEYAYVLRVGGLVYTITDVLELHDWMCTHFEEHPLFERVPLEDLSEDPVVGHLGTSTEEGKKVLRNGGKNFPAIFRRIQDPVLQAVTSQTSLPGH

SEQ ID NO: 865493 - protein, 307 aa, Homo sapiens
MAASLTCASGLRLHVDLVEKPRTGIMAAETRNVAGAEAPPPQKRYYRQRAHSNPMADHTLRYPVKPEEMDWSELYPEFFAPLTQNQSHDDPKDKKEKRAQAQVEFADIGCGYGGLLVELSPLFPDTLILGLEIRVKVSDYVQDRIRALRAAPAGGFQNIACLRSNAMKHLPNFFYKGQLTKMFFLFPDPHFKRTKHKWRIISPTLLAEYAYVLRVGGDLPMQGLVYTITDVLELHDWMCTHFEEHPLFERVPLEDLSEDPVVGHLGTSTEEGKKVLRNGGKNFPAIFRRIQDPVLQAVTSQTSLPGH

SEQ ID NO: 865494 - protein, 287 aa, Homo sapiens
MAASLTCASGLRLHVDLVEKPRTGIMAAETRNVAGAEAPPPQKRYYRQRAHSNPMADHTLRYPVKPEEMDWSELYPEFFAPLTQNQSHDDPKDKKEKRAQAQVEFADIGCGYGGLLVELSPLFPDTLILGLEIRVKVSDYVQDRIRALRAAPAGGFQNIACLRSNAMKHLPNFFYKGQRTKHKWRIISPTLLAEYAYVLRVGGLVYTITDVLELHDWMCTHFEEHPLFERVPLEDLSEDPVVGHLGTSTEEGKKVLRNGGKNFPAIFRRIQDPVLQAVTSQTSLPGH

SEQ ID NO: 865495 - protein, 180 aa, Homo sapiens
MDWSELYPEFFAPLTQNQSHDDPKDKKEKRAQAQVEFADIGCGYGGLLVELSPLFPDTLILGLEIRVKVSDYVQDRIRALRAAPAGGFQNIACLRSNAMKHLPNFFYKGQLTKMFFLFPDPHFKRTKHKWRIISPTLLAEYAYVLRVGGDFAYAGAGVYHNRCAGATRLDVHSFRRAPTV

SEQ ID NO: 865496 - protein, 301 aa, Homo sapiens
MAASLTCASGLRLHVDLVEKPRTGIMAAETRNVAGAEAPPPQKRYYRQRAHSNPMADHTLRYPVKPEEMDWSELYPEFFAPLTQNQSHDDPKDKKEKRAQAQVEFADIGCGYGGLLVELSPLFPDTLILGLEIRVKVSDYVQDRIRALRAAPAGGFQNIACLRSNAMKHLPNFFYKGQLTKMFFLFPDPHFKRTKHKWRIISPTLLAEYAYVLRVGGLVYTITDVLELHDWMCTHFEEHPLFERVPLEDLSEDPVVGHLGTSTEEGKKVLRNGGKNFPAIFRRIQDPVLQAVTSQTSLPGH

SEQ ID NO: 865497 - protein, 180 aa, Homo sapiens
MAASLTCASGLRLHVDLVEKPRTGIMAAETRNVAGAEAPPPQKRYYRQRAHSNPMADHTLRYPVKPEEMDWSELYPEFFAPLTQNQSHDDPKDKKEKRAQAQVEFADIGCGYGGLLADKDVLPLPRPTFQADKAQVANHQSHPASRICLRAKSWGAGVYHNRCAGATRLDVHSFRRAPTV

SEQ ID NO: 865498 - protein, 301 aa, Homo sapiens; identical to SEQ ID NO: 865496

SEQ ID NO: 865499 - protein, 185 aa, Homo sapiens
MELSPLFPDTLILGLEIRVKVSDYVQDRIRALRAAPAGGFQNIACLRSNAMKHLPNFFYKGQLTKMFFLFPDPHFKRTKHKWRIISPTLLAEYAYVLRVGGLVYTITDVLELHDWMCTHFEEHPLFERVPLEDLSEDPVVGHLGTSTEEGKKVLRNGGKNFPAIFRRIQDPVLQAVTSQTSLPGH

SEQ ID NO: 865500 - protein, 109 aa, Homo sapiens
MAAETRNVAGAEAPPPQKRYYRQRAHSNPMADHTLRYPVKPEEMDWSELYPEFFAPLTQNQSHDDPKDKKEKRAQAQVEFADIGCGYGGLLDTGDISMERLHLPSTLGL

SEQ ID NO: 865501 - protein, 88 aa, Homo sapiens
GRVGRGRVGPDAWVDPRVGPRTGIMAAETRNVAGAEAPPPQKRYYRQRAHSNPMADHTLRYCPSLARSHSFCPTLLFFGITGMSLNSS

SEQ ID NO: 865502 - protein, 95 aa, Homo sapiens
TGSPNSGLTPESGAEEPFLSNASSLLSLHVDLGPSILDDVLQIMDQDLDSMQIPTWTRGCLGWGPRWGPARRWGVDPALAAESGSQDPTCMVAGQ

SEQ ID NO: 865503 - protein, 1136 aa, Homo sapiens
RQFARERGAWVDGRLGAWAAGRWERKSLWDAEEARMATPSKKTSTPSPQPSKRALPRDPSSEVPSKRKNSAPQLPLLQSSGPFVEGSIVRISMENFLTYDICEVSPGPHLNMIVGANGTGKSSIVCAICLGLAGKPAFMGRADKVGFFVKRGCSRGMVEIELFRASGNLVITREIDVAKNQSFWFINKKSTTQKIVEEKVAALNIQVGNLCQFLPQDKVGEFAKLSKIELLEATEKSIGPPEMHKYHCELKNLREKEKQLETSCKEKTEYLQKMVQRNERYKQDVERFYERKRHLDLIEMLEAKRPWVEYENVRQEYEEVKLVRDRVKEEVRKLKEGQIPITCRIEEMENERHNLEARIKEKATDIKEASQKCKQKQDVIERKDKHIEELQQALIVKQNEELDRQRRIGNTRKMIEDLQNELKTTENCENLQPQIDAITNDLRRIQDEKALCEGEIIDKRRERETLEKEKKSVDDHIVRFDNLMNQKEDKLRQRFRDTYDAVLWLRNNRDKFKQRVCEPIMLTINMKDNKNAKYIENHIPSNDLRAFVFESQEDMEVFLKEVRDNKKLRVNAVIAPKSSYADKAPSRSLNELKQYGFFSYLRELFDAPDPVMSYLCCQYHIHEVPVGTEKTRERIERVIQETRLKQIYTAEEKYVVKTSFYSNKVISSNTSLKVAQFLTVTVDLEQRRHLEEQLKEIHRKLQAVDSGLIALRETSKHLEHKDNELRQKKKELLERKTKKRQLEQKISSKLGSLKLMEQDTCNLEEEERKASTKIKEINVQKAKLVTELTNLIKICTSLHIQKVDLILQNTTVISEKNKLESDYMAASSQLRLTEQHFIELDENRQRLLQKCKELMKRARQVCNLGAEQTLPQEYQTQVPTIPNGHNSSLPMVFQDLPNTLDEIDALLTEERSRASCFTGLNPTIVQEYTKREEEIEQLTEELKGKKVELDQYRENISQVKERWLNPLKELVEKINEKFSNFFSSMQCAGEVDLHTENEEDYDKYGIRIRVKFRSSTQLHELTPHHQSGGERSVSTMLYLMALQELNRCPFRVVDEINQGMDPINERRVFEMVVNTACKENTSQYFFITPKLLQNLPYSEKMTVLFVYNGPHMLEPNTWNLKAFQRRRRRITFTQPS

SEQ ID NO: 865504 - protein, 1121 aa, Homo sapiens
RQFARERGAWVDGRLGAWAAGRWERKSLWDAEEARMATPSKKTSTPSPQPSKRALPRDPSSEVPSKRKNSAPQLPLLQSSGPFVEGSIVRISMENFLTYDICEVSPGPHLNMIVGANGTGKSSIVCAICLGLAGKPAFMGRADKVGFFVKRGCSRGMVEIELFRASGNLVITREIDVAKNQSFWFINKKSTTQKIVEEKVAALNIQVGNLCQFLPQDKVGEFAKLSKIELLEATEKSIGPPEMHKYHCELKNLREKEKQLETSCKEKTEYLQKMVQRNERYKQDVERFYERKRHLDLIEMLEAKRPWVEYENVRQEYEEVKLVRDRVKEEVRKLKEGQIPITCRIEEMENERHNLEARIKEKATDIKEASQKCKQKQDVIERKDKHIEELQQALIVKQNEELDRQRRIGNTRKMIEDLQNELKTTENCENLQPQIDAITNDLRRIQDEKALCEGEIIDKRRERETLEKEKKSVDDHIVRFDNLMNQKEDKLRQRFRDTYDAVLWLRNNRDKFKQRVCEPIMLTINMKDNKNAKYIENHIPSNDLRAFVFESQEDMEVFLKEVRDNKKLRVNAVIAPKSSYADKAPSRSLNELKQYGFFSYLRELFDAPDPVMSYLCCQYHIHEVPVGTEKTRERIERVIQETRLKQIYTAEEKYVVKTSFYSNKVISSNTSLKVAQFLTVTVDLEQRRHLEEQLKEIHRKLQAVDSGLIALRETSKHLEHKDNELRQKKKELLERKTKKRQLEQKISSKLGSLKLMEQDTCNLEEEERKASTKIKEINVQKAKLVTELTNLIKICTSLHIQKVDLILQNTTVISEKNKLESDYMAASSQLRLTEQHFIELDENRQRLLQKCKELMKRARQVCNLGAEQTLPQEYQTVFQDLPNTLDEIDALLTEERSRASCFTGLNPTIVQEYTKREEEIEQLTEELKGKKVELDQYRENISQVKERWLNPLKELVEKINEKFSNFFSSMQCAGEVDLHTENEEDYDKYGIRIRVKFRSSTQLHELTPHHQSGGERSVSTMLYLMALQELNRCPFRVVDEINQGMDPINERRVFEMVVNTACKENTSQYFFITPKLLQNLPYSEKMTVLFVYNGPHMLEPNTWNLKAFQRRRRRITFTQPS

SEQ ID NO: 865505 - protein, 863 aa, Homo sapiens
MVQRNERYKQDVERFYERKRHLDLIEMLEAKRPWVEYENVRQEYEEVKLVRDRVKEEVRKLKEGQIPITCRIEEMENERHNLEARIKEKATDIKEASQKCKQKQDVIERKDKHIEELQQALIVKQNEELDRQRRIGNTRKMIEDLQNELKTTENCENLQPQIDAITNDLRRIQDEKALCEGEIIDKRRERETLEKEKKSVDDHIVRFDNLMNQKEDKLRQRFRDTYDAVLWLRNNRDKFKQRVCEPIMLTINMKDNKNAKYIENHIPSNDLRAFVFESQEDMEVFLKEVRDNKKLRVNAVIAPKSSYADKAPSRSLNELKQYGFFSYLRELFDAPDPVMSYLCCQYHIHEVPVGTEKTRERIERVIQETRLKQIYTAEEKYVVKTSFYSNKVISSNTSLKVAQFLTVTVDLEQRRHLEEQLKEIHRKLQAVDSGLIALRETSKHLEHKDNELRQKKKELLERKTKKRQLEQKISSKLGSLKLMEQDTCNLEEEERKASTKIKEINVQKAKLVTELTNLIKICTSLHIQKVDLILQNTTVISEKNKLESDYMAASSQLRLTEQHFIELDENRQRLLQKCKELMKRARQVCNLGAEQTLPQEYQTQVPTIPNGHNSSLPMVFQDLPNTLDEIDALLTEERSRASCFTGLNPTIVQEYTKREEEIEQLTEELKGKKVELDQYRENISQVKERWLNPLKELVEKINEKFSNFFSSMQCAGEVDLHTENEEDYDKYGIRIRVKFRSSTQLHELTPHHQSGGERSVSTMLYLMALQELNRCPFRVVDEINQGMDPINERRVFEMVVNTACKENTSQYFFITPKLLQNLPYSEKMTVLFVYNGPHMLEPNTWNLKAFQRRRRRITFTQPS

SEQ ID NO: 865506 - protein, 246 aa, Homo sapiens [sequence omitted]

SEQ ID NO: 865507 - protein, 1026 aa, Homo sapiens
RQFARERGAWVDGRLGAWAAGRWERKSLWDAEEARMATPSKKTSTPSPQPSKRALPRDPSSEVPSKRKNSAPQLPLLQSSGPFVEGSIVRISMENFLTYDICEVSPGPHLNMIVGANGTGKSSIVCAICLGLAGKPAFMGRADKVGFFVKRGCSRGMVEIELFRASGNLVITREIDVAKNQSFWFINKKSTTQKIVEEKVAALNIQVGNLCQFLPQDKVGEFAKLSKIELLEATEKSIGPPEMHKYHCELKNLREKEKQLETSCKEKTEYLQKMVQRNERYKQDVERFYERKRHLDLIEMLEAKRPWVEYENVRQEYEEVKLVRDRVKEEVRKLKEGQIPITCRIEEMENERHNLEARIKEKATDIKEASQKCKQKQDVIERKDKHIEELQQALIVKQNEELDRQRRIGNTRKMIEDLQNELKTTENCENLQPQIDAITNDLRRIQDEKALCEGEIIDKRRERETLEKEKKSVDDHIVRFDNLMNQKEDKLRQRFRDTYDAVLWLRNNRDKFKQRVCEPIMLTINMKDNKNAKYIENHIPSNDLRAFVFESQEDMEVFLKEVRDNKKLRVNAVIAPKSSYADKAPSRSLNELKQYGFFSYLRELFDAPDPVMSYLCCQYHIHEVPVGTEKTRERIERVIQETRLKQIYTAEEKYVVKTSFYSNKVISSNTSLKVAQFLTVTVDLEQRRHLEEQLKEIHRKLQAVDSGLIALRETSKHLEHKDNELRQKKKELLERKTKKRQLEQKISSKLGSLKLMEQDTCNLEEEERKASTKIKEINVQKAKLVTELTNLIKICTSLHIQKVDLILQNTTVISEKNKLESDYMAASSQLRLTEQHFIELDENRQRLLQKCKELMKRARQVCNLGAEQTLPQEYQTQVPTIPNGHNSSLPMVFQDLPNTLDEIDALLTEERSRASCFTGLNPTIVQEYTKREEEIEQLTEELKGKKVELDQYRENISQVKERWLNPLKELVEKINEKFSNFFSSMQCAGEVDLHTENETGKGQVLWLMPNPTFIGVSPCTRPKVDF

SEQ ID NO: 865508 - protein, 882 aa, Homo sapiens
RQFARERGAWVDGRLGAWAAGRWERKSLWDAEEARMATPSKKTSTPSPQPSKRALPRDPSSEVPSKRKNSAPQLPLLQSSGPFVEGSIVRISMENFLTYDICEVSPGPHLNMIVGANGTGKSSIVCAICLGLAGKPAFMGRADKVGFFVKRGCSRGMVEIELFRASGNLVITREIDVAKNQSFWFINKKSTTQKIVEEKVAALNIQVGNLCQFLPQDKVGEFAKLSKIELLEATEKSIGPPEMHKYHCELKNLREKEKQLETSCKEKTEYLQKMVQRNERYKQDVERFYERKRHLDLIEMLEAKRPWVEYENVRQEYEEVKLVRDRVKEEVRKLKEGQIPITCRIEEMENERHNLEARIKEKATDIKEASQKCKQKQDVIERKDKHIEELQQALIVKQNEELDRQRRIGNTRKMIEDLQNELKTTENCENLQPQIDAITNDLRRIQDEKALCEGEIIDKRRERETLEKEKKSVDDHIVRFDNLMNQKEDKLRQRFRDTYDAVLWLRNNRDKFKQRVCEPIMLTINMKDNKNAKYIENHIPSNDLRAFVFESQEDMEVFLKEVRDNKKLRVNAVIAPKSSYADKAPSRSLNELKQYGFFSYLRELFDAPDPVMSYLCCQYHIHEVPVGTEKTRERIERVIQETRLKQIYTAEEKYVVKTSFYSNKVISSNTSLKVAQFLTVTVDLEQRRHLEEQLKEIHRKLQAVDSGLIALRETSKHLEHKDNELRQKKKELLERKTKKRQLEQKISSKLGSLKLMEQDTCNLEEEERKASTKIKEINVQKAKLVTELTNLIKICTSLHIQKVDLILQNTTVISEKNKLESDYMAASSQLRLTEQHFIELDENRQRLLQKCKELMKRARQVCNLGAEQTLPQEYQTVSIKSI

SEQ ID NO: 865509 - protein, 539 aa, Homo sapiens
RQFARERGAWVDGRLGAWAAGRWERKSLWDAEEARMATPSKKTSTPSPQPSKRALPRDPSSEVPSKRKNSAPQLPLLQSSGPFVEGSIVRISMENFLTYDICEVSPGPHLNMIVGANGTGKSSIVCAICLGLAGKPAFMGRADKVGFFVKRGCSRGMVEIELFRASGNLVITREIDVAKNQSFWFINKKSTTQKIVEEKVAALNIQVGNLCQFLPQDKVGEFAKLSKIELLEATEKSIGPPEMHKYHCELKNLREKEKQLETSCKEKTEYLQKMVQRNERYKQDVERFYERKRHLDLIEMLEAKRPWVEYENVRQEYEEVKLVRDRVKEEVRKLKEGQIPITCRIEEMENERHNLEARIKEKATDIKEASQKCKQKQDVIERKDKHIEELQQALIVKQNEELDRQRRIGNTRKMIEDLQNELKTTENCENLQPQIDAITNDLRRIQDEKALCEGEIIDKRRERETLEKEKKSVDDHIVRFDNLMNQKEDKLRQRFRDTYDAVLWLRNNRDKFKQRVCEPIMLTVRNFVHLGSIGFIIVI

SEQ ID NO: 865510 - protein, 1136 aa, Homo sapiens; identical to SEQ ID NO: 865503

SEQ ID NO: 865511 - protein, 915 aa, Homo sapiens
RQFARERGAWVDGRLGAWAAGRWERKSLWDAEEARMATPSKKTSTPSPQPSKRALPRDPSSEVPSKRKNSAPQLPLLQSSGPFVEGSIVRISMENFLTYDICEVSPGPHLNMIVGANGTGKSSIVCAICLGLAGKPAFMGRADKVGFFVKRGCSRGMVEIELFRASGNLVITREIDVAKNQSFWFINKKSTTQKIVEEKVAALNIQVGNLCQFLPQDKVGEFAKLSKIELLEATEKSIGPPEMHKYHCELKNLREKEKQLETSCKEKTEYLQKMVQRNERYKQDVERFYERKRHLDLIEMLEAKRPWVEYENVRQEYEEVKLVRDRVKEEVRKLKEGQIPITCRIEEMENERHNLEARIKEKATDIKEASQKCKQKQDVIERKDKHIEELQQALIVKQNEELDRQRRIGNTRKMIEDLQNELKTTENCENLQPQIDAITNDLRRIQDEKALCEGEIIDKRRERETLEKEKKSVDDHIVRFDNLMNQKEDKLRQRFRDTYDAVLWLRNNRDKFKQRVCEPIMLTINMKDNKNAKYIENHIPSNDLRAFVFESQEDMEVFLKEVRDNKKLRVNAVIAPKSSYADKAPSRSLNELKQYGFFSYLRELFDAPDPVMSYLCCQYHIHEVPVGTEKTRERIERVIQETRLKQIYTAEEKYVVKTSFYSNKVISSNTSLKVAQFLTVTVDLEQRRHLEEQLKEIHRKLQAVDSGLIALRETSKHLEHKDNELRQKKKELLERKTKKRQLEQKISSKLGSLKLMEQDTCNLEEEERKASTKIKEINVQKAKLVTELTNLIKICTSLHIQKVDLILQNTTVISEKNKLESDYMAASSQLRLTEQHFIELDENRQRLLQKCKELMKRARQVCNLGAEQTLPQEYQTQVPTIPNGHNSSLPMVCSTHSFFPSSCFPSALLLPSHLL

SEQ ID NO: 865512 - protein, 313 aa, Homo sapiens
MAASSQLRLTEQHFIELDENRQRLLQKCKELMKRARQVCNLGAEQTLPQEYQTQVPTIPNGHNSSLPMVFQDLPNTLDEIDALLTEERSRASCFTGLNPTIVQEYTKREEEIEQLTEELKGKKVELDQYRENISQVKERWLNPLKELVEKINEKFSNFFSSMQCAGEVDLHTENEEDYDKYGIRIRVKFRSSTQLHELTPHHQSGGERSVSTMLYLMALQELNRCPFRVVDEINQGMDPINERRVFEMVVNTACKENTSQYFFITPKLLQNLPYSEKMTVLFVYNGPHMLEPNTWNLKAFQRRRRRITFTQPS

SEQ ID NO: 865513 - protein, 1136 aa, Homo sapiens; identical to SEQ ID NO: 865503

SEQ ID NO: 865514 - protein, 915 aa, Homo sapiens; identical to SEQ ID NO: 865511

SEQ ID NO: 865515 - protein, 272 aa, Homo sapiens
MDSYLLMWGLLTFIMVPGCQAELCDDDPPEIPHATFKAMAYKEGTMLNCECKRGFRRIKSGSLYMLCTGNSSHSSWDNQCQCTSSATRNTTKQVTPQPEEQKERKTTEMQSPMQPVDQASLPGHCREPPPWENEATERIYHFVVGQMVYYQCVQGYRALHRGPAESVCKMTHGKTRWTQPQLICTGEMETSQFPGEEKPQASPEGRPESETSCLVTTTDFQIQTEMAATMETSIFTTEYQVAVAGCVFLLISVLLLSGLTWQRRQRKSRRTI

SEQ ID NO: 865516 - protein, 295 aa, Homo sapiens
MDSYLLMWGLLTFIMVPGCQAELCDDDPPEIPHATFIMVPGCQAELCDDDPPEIPHATFKAMAYKEGTMLNCECKRGFRRIKSGSLYMLCTGNSSHSSWDNQCQCTSSATRNTTKQVTPQPEEQKERKTTEMQSPMQPVDQASLPGHCREPPPWENEATERIYHFVVGQMVYYQCVQGYRALHRGPAESVCKMTHGKTRWTQPQLICTGEMETSQFPGEEKPQASPEGRPESETSCLVTTTDFQIQTEMAATMETSIFTTEYQVAVAGCVFLLISVLLLSGLTWQRRQRKSRRTI

SEQ ID NO: 865517 - protein, 272 aa, Homo sapiens; identical to SEQ ID NO: 865515

SEQ ID NO: 865518 - protein, 200 aa, Homo sapiens
MDSYLLMWGLLTFIMVPGCQAELCDDDPPEIPHATFKAMAYKEGTMLNCECKRGFRRIKSGSLYMLCTGNSSHSSWDNQCQCTSSATRNTTKQVTPQPEEQKERKTTEMQSPMQPVDQASLPGEEKPQASPEGRPESETSCLVTTTDFQIQTEMAATMETSIFTTEYQVAVAGCVFLLISVLLLSGLTWQRRQRKSRRTI

SEQ ID NO: 865519 - protein, 199 aa, Homo sapiens
MDSYLLMWGLLTFIMVPGCQAELCDDDPPEIPHATFIMVPGCQAELCDDDPPEIPHATFKAMAYKEGTMLNCECKRGFRRIKSGSLYMLCTGNSSHSSWDNQCQCTSSATRNTTKQVTPQPEEQKERKTTEMQSPMQPVDQASLPDFQIQTEMAATMETSIFTTEYQVAVAGCVFLLISVLLLSGLTWQRRQRKSRRTI

SEQ ID NO: 865520 - protein, 272 aa, Homo sapiens; identical to SEQ ID NO: 865515

SEQ ID NO: 865521 - protein, 2510 aa, Homo sapiens
RHYPLRSERCGAEAAEAPRSFSTPRPDAPTPLTPREPKMDPSGVKVLETAEDIQERRQQVLDRYHRFKELSTLRRQKLEDSYRFQFFQRDAEELEKWIQEKLQIASDENYKDPTNLQGKLQKHQAFEAEVQANSGAIVKLDETGNLMISEGHFASETIRTRLMELHRQWELLLEKMREKGIKLLQAQKLVQYLRECEDVMDWINDKEAIVTSEELGQDLEHVEVLQKKFEEFQTDMAAHEERVNEVNQFAAKLIQEQHPEEELIKTKQDEVNAAWQRLKGLALQRQGKLFGAAEVQRFNRDVDETISWIKEKEQLMASDDFGRDLASVQALLRKHEGLERDLAALEDKVKALCAEADRLQQSHPLSATQIQVKREELITNWEQIRTLAAERHARLNDSYRLQRFLADFRDLTSWVTEMKALINADELASDVAGAEALLDRHQEHKGEIDAHEDSFKSADESGQALLAAGHYASDEVREKLTVLSEERAALLELWELRRQQYEQCMDLQLFYRDTEQVDNWMSKQEAFLLNEDLGDSLDSVEALLKKHEDFEKSLSAQEEKITALDEFATKLIQNNHYAMEDVATRRDALLSRRNALHERAMRRRAQLADSFHLQQFFRDSDELKSWVNEKMKTATDEAYKDPSNLQGKVQKHQAFEAELSANQSRIDALEKAGQKLIDVNHYAKDEVAARMNEVISLWKKLLEATELKGIKLREANQQQQFNRNVEDIELWLYEVEGHLASDDYGKDLTNVQNLQKKHALLEADVAAHQDRIDGITIQARQFQDAGHFDAENIKKKQEALVARYEALKEPMVARKQKLADSLRLQQLFRDVEDEETWIREKEPIAASTNRGKDLIGVQNLLKKHQALQAEIAGHEPRIKAVTQKGNAMVEEGHFAAEDVKAKLHELNQKWEALKAKASQRRQDLEDSLQAQQYFADANEAESWMREKEPIVGSTDYGKDEDSAEALLKKHEALMSDLSAYGSSIQALREQAQSCRQQVAPTDDETGKELVLALYDYQEKSPREVTMKKGDILTLLNSTNKDWWKVEVNDRQGFVPAAYVKKLDPAQSASRENLLEEQGSIALRQEQIDNQTRITKEAGSVSLRMKQVEELYHSLLELGEKRKGMLEKSCKKFMLFREANELQQWINEKEAALTSEEVGADLEQVEVLQKKFDDFQKDLKANESRLKDINKVAEDLESEGLMAEEVQAVQQQEVYGMMPRDETDSKTASPWKSARLMVHTVATFNSIKELNERWRSLQQLAEERSQLLGSAHEVQRFHRDADETKEWIEEKNQALNTDNYGHDLASVQALQRKHEGFERDLAALGDKVNSLGETAERLIQSHPESAEDLQEKCTELNQAWSSLGKRADQRKAKLGDSHDLQRFLSDFRDLMSWINGIRGLVSSDELAKDVTGAEALLERHQEHRTEIDARAGTFQAFEQFGQQLLAHGHYASPEIKQKLDILDQERADLEKAWVQRRMMLDQCLELQLFHRDCEQAENWMAAREAFLNTEDKGDSLDSVEALIKKHEDFDKAINVQEEKIAALQAFADQLIAAGHYAKGDISSRRNEVLDRWRRLKAQMIEKRSKLGESQTLQQFSRDVDEIEAWISEKLQTASDESYKDPTNIQSKHQKHQAFEAELHANADRIRGVIDMGNSLIERGACAGSEDAVKARLAALADQWQFLVQKSAEKSQKLKEANKQQNFNTGIKDFDFWLSEVEALLASEDYGKDLASVNNLLKKHQLLEADISAHEDRLKDLNSQADSLMTSSAFDTSQVKDKRDTINGRFQKIKSMAASRRAKLNESHRLHQFFRDMDDEESWIKEKKLLVGSEDYGRDLTGVQNLRKKHKRLEAELAAHEPAIQGVLDTGKKLSDDNTIGKEEIQQRLAQFVEHWKELKQLAAARGQRLEESLEYQQFVANVEEEEAWINEKMTLVASEDYGDTLAAIQGLLKKHEAFETDFTVHKDRVNDVCTNGQDLIKKNNHHEENISSKMKGLNGKVSDLEKAAAQRKAKLDENSAFLQFNWKADVVESWIGEKENSLKTDDYGRDLSSVQTLLTKQETFDAGLQAFQQEGIANITALKDQLLAAKHVQSKAIEARHASLMKRWSQLLANSAARKKKLLEAQSHFRKVEDLFLTFAKKASAFNSWFENAEEDLTDPVRCNSLEEIKALREAHDAFRSSLSSAQADFNQLAELDRQIKSFRVASNPYTWFTMEALEETWRNLQKIIKERELELQKEQRRQEENDKLRQEFAQHANAFHQWIQETRTYLLDGSCMVEESGTLESQLEATKRKHQEIRAMRSQLKKIEDLGAAMEEALILDNKYTEHSTVGLAQQWDQLDQLGMRMQHNLEQQIQARNTTGVTEEALKEFSMMFKHFDKDKSGRLNHQEFKSCLRSLGYDLPMVEEGEPDPEFEAILDTVDPNRDGHVSLQEYMAFMISRETENVKSSEEIESAFRALSSEGKPYVTKEELYQNLTREQADYCVSHMKPYVDGKGRELPTAFDYVEFTRSLFVN

SEQ ID NO: 865522 - protein, 2510 aa, Homo sapiens; identical to SEQ ID NO: 865521

SEQ ID NO: 865523 - protein, 2515 aa, Homo sapiens
RHYPLRSERCGAEAAEAPRSFSTPRPDAPTPLTPREPKMDPSGVKVLETAEDIQERRQQVLDRYHRFKELSTLRRQKLEDSYRFQFFQRDAEELEKWIQEKLQIASDENYKDPTNLQGKLQKHQAFEAEVQANSGAIVKLDETGNLMISEGHFASETIRTRLMELHRQWELLLEKMREKGIKLLQAQKLVQYLRECEDVMDWINDKEAIVTSEELGQDLEHVEVLQKKFEEFQTDMAAHEERVNEVNQFAAKLIQEQHPEEELIKTKQDEVNAAWQRLKGLALQRQGKLFGAAEVQRFNRDVDETISWIKEKEQLMASDDFGRDLASVQALLRKHEGLERDLAALEDKVKALCAEADRLQQSHPLSATQIQVKREELITNWEQIRTLAAERHARLNDSYRLQRFLADFRDLTSWVTEMKALINADELASDVAGAEALLDRHQEHKGEIDAHEDSFKSADESGQALLAAGHYASDEVREKLTVLSEERAALLELWELRRQQYEQCMDLQLFYRDTEQVDNWMSKQEAFLLNEDLGDSLDSVEALLKKHEDFEKSLSAQEEKITALDEFATKLIQNNHYAMEDVATRRDALLSRRNALHERAMRRRAQLADSFHLQQFFRDSDELKSWVNEKMKTATDEAYKDPSNLQGKVQKHQAFEAELSANQSRIDALEKAGQKLIDVNHYAKDEVAARMNEVISLWKKLLEATELKGIKLREANQQQQFNRNVEDIELWLYEVEGHLASDDYGKDLTNVQNLQKKHALLEADVAAHQDRIDGITIQARQFQDAGHFDAENIKKKQEALVARYEALKEPMVARKQKLADSLRLQQLFRDVEDEETWIREKEPIAASTNRGKDLIGVQNLLKKHQALQAEIAGHEPRIKAVTQKGNAMVEEGHFAAEDVKAKLHELNQKWEALKAKASQRRQDLEDSLQAQQYFADANEAESWMREKEPIVGSTDYGKDEDSAEALLKKHEALMSDLSAYGSSIQALREQAQSCRQQVAPTDDETGKELVLALYDYQEKSPREVTMKKGDILTLLNSTNKDWWKVEVNDRQGFVPAAYVKKLDPAQSASRENLLEEQGSIALRQEQIDNQTRITKEAGSVSLRMKQVEELYHSLLELGEKRKGMLEKSCKKFMLFREANELQQWINEKEAALTSEEVGADLEQVEVLQKKFDDFQKDLKANESRLKDINKVAEDLESEGLMAEEVQAVQQQEVYGMMPRDETDSKTASPWKSARLMVHTVATFNSIKELNERWRSLQQLAEERSQLLGSAHEVQRFHRDADETKEWIEEKNQALNTDNYGHDLASVQALQRKHEGFERDLAALGDKVNSLGETAERLIQSHPESAEDLQEKCTELNQAWSSLGKRADQRKAKLGDSHDLQRFLSDFRDLMSWINGIRGLVSSDELAKDVTGAEALLERHQEHRTEIDARAGTFQAFEQFGQQLLAHGHYASPEIKQKLDILDQERADLEKAWVQRRMMLDQCLELQLFHRDCEQAENWMAAREAFLNTEDKGDSLDSVEALIKKHEDFDKAINVQEEKIAALQAFADQLIAAGHYAKGDISSRRNEVLDRWRRLKAQMIEKRSKLGESQTLQQFSRDVDEIEAWISEKLQTASDESYKDPTNIQAFQVLSKHQKHQAFEAELHANADRIRGVIDMGNSLIERGACAGSEDAVKARLAALADQWQFLVQKSAEKSQKLKEANKQQNFNTGIKDFDFWLSEVEALLASEDYGKDLASVNNLLKKHQLLEADISAHEDRLKDLNSQADSLMTSSAFDTSQVKDKRDTINGRFQKIKSMAASRRAKLNESHRLHQFFRDMDDEESWIKEKKLLVGSEDYGRDLTGVQNLRKKHKRLEAELAAHEPAIQGVLDTGKKLSDDNTIGKEEIQQRLAQFVEHWKELKQLAAARGQRLEESLEYQQFVANVEEEEAWINEKMTLVASEDYGDTLAAIQGLLKKHEAFETDFTVHKDRVNDVCTNGQDLIKKNNHHEENISSKMKGLNGKVSDLEKAAAQRKAKLDENSAFLQFNWKADVVESWIGEKENSLKTDDYGRDLSSVQTLLTKQETFDAGLQAFQQEGIANITALKDQLLAAKHVQSKAIEARHASLMKRWSQLLANSAARKKKLLEAQSHFRKVEDLFLTFAKKASAFNSWFENAEEDLTDPVRCNSLEEIKALREAHDAFRSSLSSAQADFNQLAELDRQIKSFRVASNPYTWFTMEALEETWRNLQKIIKERELELQKEQRRQEENDKLRQEFAQHANAFHQWIQETRTYLLDGSCMVEESGTLESQLEATKRKHQEIRAMRSQLKKIEDLGAAMEEALILDNKYTEHSTVGLAQQWDQLDQLGMRMQHNLEQQIQARNTTGVTEEALKEFSMMFKHFDKDKSGRLNHQEFKSCLRSLGYDLPMVEEGEPDPEFEAILDTVDPNRDGHVSLQEYMAFMISRETENVKSSEEIESAFRALSSEGKPYVTKEELYQNLTREQADYCVSHMKPYVDGKGRELPTAFDYVEFTRSLFVN

SEQ ID NO: 865524 - protein, 2006 aa, Homo sapiens
MDLQLFYRDTEQVDNWMSKQEAFLLNEDLGDSLDSVEALLKKHEDFEKSLSAQEEKITALDEFATKLIQNNHYAMEDVATRRDALLSRRNALHERAMRRRAQLADSFHLQQFFRDSDELKSWVNEKMKTATDEAYKDPSNLQGKVQKHQAFEAELSANQSRIDALEKAGQKLIDVNHYAKDEVAARMNEVISLWKKLLEATELKGIKLREANQQQQFNRNVEDIELWLYEVEGHLASDDYGKDLTNVQNLQKKHALLEADVAAHQDRIDGITIQARQFQDAGHFDAENIKKKQEALVARYEALKEPMVARKQKLADSLRLQQLFRDVEDEETWIREKEPIAASTNRGKDLIGVQNLLKKHQALQAEIAGHEPRIKAVTQKGNAMVEEGHFAAEDVKAKLHELNQKWEALKAKASQRRQDLEDSLQAQQYFADANEAESWMREKEPIVGSTDYGKDEDSAEALLKKHEALMSDLSAYGSSIQALREQAQSCRQQVAPTDDETGKELVLALYDYQEKSPREVTMKKGDILTLLNSTNKDWWKVEVNDRQGFVPAAYVKKLDPAQSASRENLLEEQGSIALRQEQIDNQTRITKEAGSVSLRMKQVEELYHSLLELGEKRKGMLEKSCKKFMLFREANELQQWINEKEAALTSEEVGADLEQVEVLQKKFDDFQKDLKANESRLKDINKVAEDLESEGLMAEEVQAVQQQEVYGMMPRDETDSKTASPWKSARLMVHTVATFNSIKELNERWRSLQQLAEERSQLLGSAHEVQRFHRDADETKEWIEEKNQALNTDNYGHDLASVQALQRKHEGFERDLAALGDKVNSLGETAERLIQSHPESAEDLQEKCTELNQAWSSLGKRADQRKAKLGDSHDLQRFLSDFRDLMSWINGIRGLVSSDELAKDVTGAEALLERHQEHRTEIDARAGTFQAFEQFGQQLLAHGHYASPEIKQKLDILDQERADLEKAWVQRRMMLDQCLELQLFHRDCEQAENWMAAREAFLNTEDKGDSLDSVEALIKKHEDFDKAINVQEEKIAALQAFADQLIAAGHYAKGDISSRRNEVLDRWRRLKAQMIEKRSKLGESQTLQQFSRDVDEIEAWISEKLQTASDESYKDPTNIQSKHQKHQAFEAELHANADRIRGVIDMGNSLIERGACAGSEDAVKARLAALADQWQFLVQKSAEKSQKLKEANKQQNFNTGIKDFDFWLSEVEALLASEDYGKDLASVNNLLKKHQLLEADISAHEDRLKDLNSQADSLMTSSAFDTSQVKDKRDTINGRFQKIKSMAASRRAKLNESHRLHQFFRDMDDEESWIKEKKLLVGSEDYGRDLTGVQNLRKKHKRLEAELAAHEPAIQGVLDTGKKLSDDNTIGKEEIQQRLAQFVEHWKELKQLAAARGQRLEESLEYQQFVANVEEEEAWINEKMTLVASEDYGDTLAAIQGLLKKHEAFETDFTVHKDRVNDVCTNGQDLIKKNNHHEENISSKMKGLNGKVSDLEKAAAQRKAKLDENSAFLQFNWKADVVESWIGEKENSLKTDDYGRDLSSVQTLLTKQETFDAGLQAFQQEGIANITALKDQLLAAKHVQSKAIEARHASLMKRWSQLLANSAARKKKLLEAQSHFRKVEDLFLTFAKKASAFNSWFENAEEDLTDPVRCNSLEEIKALREAHDAFRSSLSSAQADFNQLAELDRQIKSFRVASNPYTWFTMEALEETWRNLQKIIKERELELQKEQRRQEENDKLRQEFAQHANAFHQWIQETRTYLLDGSCMVEESGTLESQLEATKRKHQEIRAMRSQLKKIEDLGAAMEEALILDNKYTEHSTVGLAQQWDQLDQLGMRMQHNLEQQIQARNTTGVTEEALKEFSMMFKHFDKDKSGRLNHQEFKSCLRSLGYDLPMVEEGEPDPEFEAILDTVDPNRDGHVSLQEYMAFMISRETENVKSSEEIESAFRALSSEGKPYVTKEELYQNLTREQADYCVSHMKPYVDGKGRELPTAFDYVEFTRSLFVN

SEQ ID NO: 865525 - protein, 2043 aa, Homo sapiens
MVTMPQMNLREKLTVLSEERAALLELWELRRQQYEQCMDLQLFYRDTEQVDNWMSKQEAFLLNEDLGDSLDSVEALLKKHEDFEKSLSAQEEKITALDEFATKLIQNNHYAMEDVATRRDALLSRRNALHERAMRRRAQLADSFHLQQFFRDSDELKSWVNEKMKTATDEAYKDPSNLQGKVQKHQAFEAELSANQSRIDALEKAGQKLIDVNHYAKDEVAARMNEVISLWKKLLEATELKGIKLREANQQQQFNRNVEDIELWLYEVEGHLASDDYGKDLTNVQNLQKKHALLEADVAAHQDRIDGITIQARQFQDAGHFDAENIKKKQEALVARYEALKEPMVARKQKLADSLRLQQLFRDVEDEETWIREKEPIAASTNRGKDLIGVQNLLKKHQALQAEIAGHEPRIKAVTQKGNAMVEEGHFAAEDVKAKLHELNQKWEALKAKASQRRQDLEDSLQAQQYFADANEAESWMREKEPIVGSTDYGKDEDSAEALLKKHEALMSDLSAYGSSIQALREQAQSCRQQVAPTDDETGKELVLALYDYQEKSPREVTMKKGDILTLLNSTNKDWWKVEVNDRQGFVPAAYVKKLDPAQSASRENLLEEQGSIALRQEQIDNQTRITKEAGSVSLRMKQVEELYHSLLELGEKRKGMLEKSCKKFMLFREANELQQWINEKEAALTSEEVGADLEQVEVLQKKFDDFQKDLKANESRLKDINKVAEDLESEGLMAEEVQAVQQQEVYGMMPRDETDSKTASPWKSARLMVHTVATFNSIKELNERWRSLQQLAEERSQLLGSAHEVQRFHRDADETKEWIEEKNQALNTDNYGHDLASVQALQRKHEGFERDLAALGDKVNSLGETAERLIQSHPESAEDLQEKCTELNQAWSSLGKRADQRKAKLGDSHDLQRFLSDFRDLMSWINGIRGLVSSDELAKDVTGAEALLERHQEHRTEIDARAGTFQAFEQFGQQLLAHGHYASPEIKQKLDILDQERADLEKAWVQRRMMLDQCLELQLFHRDCEQAENWMAAREAFLNTEDKGDSLDSVEALIKKHEDFDKAINVQEEKIAALQAFADQLIAAGHYAKGDISSRRNEVLDRWRRLKAQMIEKRSKLGESQTLQQFSRDVDEIEAWISEKLQTASDESYKDPTNIQSKHQKHQAFEAELHANADRIRGVIDMGNSLIERGACAGSEDAVKARLAALADQWQFLVQKSAEKSQKLKEANKQQNFNTGIKDFDFWLSEVEALLASEDYGKDLASVNNLLKKHQLLEADISAHEDRLKDLNSQADSLMTSSAFDTSQVKDKRDTINGRFQKIKSMAASRRAKLNESHRLHQFFRDMDDEESWIKEKKLLVGSEDYGRDLTGVQNLRKKHKRLEAELAAHEPAIQGVLDTGKKLSDDNTIGKEEIQQRLAQFVEHWKELKQLAAARGQRLEESLEYQQFVANVEEEEAWINEKMTLVASEDYGDTLAAIQGLLKKHEAFETDFTVHKDRVNDVCTNGQDLIKKNNHHEENISSKMKGLNGKVSDLEKAAAQRKAKLDENSAFLQFNWKADVVESWIGEKENSLKTDDYGRDLSSVQTLLTKQETFDAGLQAFQQEGIANITALKDQLLAAKHVQSKAIEARHASLMKRWSQLLANSAARKKKLLEAQSHFRKVEDLFLTFAKKASAFNSWFENAEEDLTDPVRCNSLEEIKALREAHDAFRSSLSSAQADFNQLAELDRQIKSFRVASNPYTWFTMEALEETWRNLQKIIKERELELQKEQRRQEENDKLRQEFAQHANAFHQWIQETRTYLLDGSCMVEESGTLESQLEATKRKHQEIRAMRSQLKKIEDLGAAMEEALILDNKYTEHSTVGLAQQWDQLDQLGMRMQHNLEQQIQARNTTGVTEEALKEFSMMFKHFDKDKSGRLNHQEFKSCLRSLGYDLPMVEEGEPDPEFEAILDTVDPNRDGHVSLQEYMAFMISRETENVKSSEEIESAFRALSSEGKPYVTKEELYQNLTREQADYCVSHMKPYVDGKGRELPTAFDYVEFTRSLFVN

SEQ ID NO: 865526 - protein, 2446 aa, Homo sapiens
RHYPLRSERCGAEAAEAPRSFSTPRPDAPTPLTPREPKMDPSGVKVLETAEDIQERRQQVLDRYHRFKELSTLRRQKLEDSYRFQFFQRDAEELEKWIQEKLQIASDENYKDPTNLQGKLQKHQAFEAEVQANSGAIVKLDETGNLMISEGHFASETIRTRLMELHRQWELLLEKMREKGIKLLQAQKLVQYLRECEDVMDWINDKEAIVTSEELGQDLEHVEVLQKKFEEFQTDMAAHEERVNEVNQFAAKLIQEQHPEEELIKTKQDEVNAAWQRLKGLALQRQGKLFGAAEVQRFNRDVDETISWIKEKEQLMASDDFGRDLASVQALLRKHEGLERDLAALEDKVKALCAEADRLQQSHPLSATQIQVKREELITNWEQIRTLAAERHARLNDSYRLQRFLADFRDLTSWVTEMKALINADELASDVAGAEALLDRHQEHKGEIDAHEDSFKSADESGQALLAAGHYASDEVREKLTVLSEERAALLELWELRRQQYEQCMDLQLFYRDTEQVDNWMSKQEAFLLNEDLGDSLDSVEALLKKHEDFEKSLSAQEEKITALDEFATKLIQNNHYAMEDVATRRDALLSRRNALHERAMRRRAQLADSFHLQQFFRDSDELKSWVNEKMKTATDEAYKDPSNLQGKVQKHQAFEAELSANQSRIDALEKAGQKLIDVNHYAKDEVAARMNEVISLWKKLLEATELKGIKLREANQQQQFNRNVEDIELWLYEVEGHLASDDYGKDLTNVQNLQKKHALLEADVAAHQDRIDGITIQARQFQDAGHFDAENIKKKQEALVARYEALKEPMVARKQKLADSLRLQQLFRDVEDEETWIREKEPIAASTNRGKDLIGVQNLLKKHQALQAEIAGHEPRIKAVTQKGNAMVEEGHFAAEDVKAKLHELNQKWEALKAKASQRRQDLEDSLQAQQYFADANEAESWMREKEPIVGSTDYGKDEDSAEALLKKHEALMSDLSAYGSSIQALREQAQSCRQQVAPTDDETGKELVLALYDYQEKSPREVTMKKGDILTLLNSTNKDWWKVEVNDRQGFVPAAYVKKLDPAQSASRENLLEEQGSIALRQEQIDNQTRITKEAGSVSLRMKQVEELYHSLLELGEKRKGMLEKSCKKFMLFREANELQQWINEKEAALTSEEVGADLEQVEVLQKKFDDFQKDLKANESRLKDINKVAEDLESEGLMAEEVQAVQQQEVYGMMPRDETDSKTASPWKSARLMVHTVATFNSIKELNERWRSLQQLAEERSQLLGSAHEVQRFHRDADETKEWIEEKNQALNTDNYGHDLASVQALQRKHEGFERDLAALGDKVNSLGETAERLIQSHPESAEDLQEKCTELNQAWSSLGKRADQRKAKLGDSHDLQRFLSDFRDLMSWINGIRGLVSSDELAKDVTGAEALLERHQEHRTEIDARAGTFQAFEQFGQQLLAHGHYASPEIKQKLDILDQERADLEKAWVQRRMMLDQCLELQLFHRDCEQAENWMAAREAFLNTEDKGDSLDSVEALIKKHEDFDKAINVQEEKIAALQAFADQLIAAGHYAKGDISSRRNEVLDRWRRLKAQMIEKRSKLGESQTLQQFSRDVDEIEAWISEKLQTASDESYKDPTNIQSKHQKHQAFEAELHANADRIRGVIDMGNSLIERGACAGSEDAVKARLAALADQWQFLVQKSAEKSQKLKEANKQQNFNTGIKDFDFWLSEVEALLASEDYGKDLASVNNLLKKHQLLEADISAHEDRLKDLNSQADSLMTSSAFDTSQVKDKRDTINGRFQKIKSMAASRRAKLNESHRLHQFFRDMDDEESWIKEKKLLVGSEDYGRDLTGVQNLRKKHKRLEAELAAHEPAIQGVLDTGKKLSDDNTIGKEEIQQRLAQFVEHWKELKQLAAARGQRLEESLEYQQFVANVEEEEAWINEKMTLVASEDYGDTLAAIQGLLKKHEAFETDFTVHKDRVNDVCTNGQDLIKKNNHHEENISSKMKGLNGKVSDLQAFQQEGIANITALKDQLLAAKHVQSKAIEARHASLMKRWSQLLANSAARKKKLLEAQSHFRKVEDLFLTFAKKASAFNSWFENAEEDLTDPVRCNSLEEIKALREAHDAFRSSLSSAQADFNQLAELDRQIKSFRVASNPYTWFTMEALEETWRNLQKIIKERELELQKEQRRQEENDKLRQEFAQHANAFHQWIQETRTYLLDGSCMVEESGTLESQLEATKRKHQEIRAMRSQLKKIEDLGAAMEEALILDNKYTEHSTVGLAQQWDQLDQLGMRMQHNLEQQIQARNTTGVTEEALKEFSMMFKHFDKDKSGRLNHQEFKSCLRSLGYDLPMVEEGEPDPEFEAILDTVDPNRDGHVSLQEYMAFMISRETENVKSSEEIESAFRALSSEGKPYVTKEELYQNLTREQADYCVSHMKPYVDGKGRELPTAFDYVEFTRSLFVN

SEQ ID NO: 865527 - protein, 1392 aa, Homo sapiens
MLEKSCKKFMLFREANELQQWINEKEAALTSEEVGADLEQVEVLQKKFDDFQKDLKANESRLKDINKVAEDLESEGLMAEEVQAVQQQEVYGMMPRDETDSKTASPWKSARLMVHTVATFNSIKELNERWRSLQQLAEERSQLLGSAHEVQRFHRDADETKEWIEEKNQALNTDNYGHDLASVQALQRKHEGFERDLAALGDKVNSLGETAERLIQSHPESAEDLQEKCTELNQAWSSLGKRADQRKAKLGDSHDLQRFLSDFRDLMSWINGIRGLVSSDELAKDVTGAEALLERHQEHRTEIDARAGTFQAFEQFGQQLLAHGHYASPEIKQKLDILDQERADLEKAWVQRRMMLDQCLELQLFHRDCEQAENWMAAREAFLNTEDKGDSLDSVEALIKKHEDFDKAINVQEEKIAALQAFADQLIAAGHYAKGDISSRRNEVLDRWRRLKAQMIEKRSKLGESQTLQQFSRDVDEIEAWISEKLQTASDESYKDPTNIQAFQVLSKHQKHQAFEAELHANADRIRGVIDMGNSLIERGACAGSEDAVKARLAALADQWQFLVQKSAEKSQKLKEANKQQNFNTGIKDFDFWLSEVEALLASEDYGKDLASVNNLLKKHQLLEADISAHEDRLKDLNSQADSLMTSSAFDTSQVKDKRDTINGRFQKIKSMAASRRAKLNESHRLHQFFRDMDDEESWIKEKKLLVGSEDYGRDLTGVQNLRKKHKRLEAELAAHEPAIQGVLDTGKKLSDDNTIGKEEIQQRLAQFVEHWKELKQLAAARGQRLEESLEYQQFVANVEEEEAWINEKMTLVASEDYGDTLAAIQGLLKKHEAFETDFTVHKDRVNDVCTNGQDLIKKNNHHEENISSKMKGLNGKVSDLEKAAAQRKAKLDENSAFLQFNWKADVVESWIGEKENSLKTDDYGRDLSSVQTLLTKQETFDAGLQAFQQEGIANITALKDQLLAAKHVQSKAIEARHASLMKRWSQLLANSAARKKKLLEAQSHFRKVEDLFLTFAKKASAFNSWFENAEEDLTDPVRCNSLEEIKALREAHDAFRSSLSSAQADFNQLAELDRQIKSFRVASNPYTWFTMEALEETWRNLQKIIKERELELQKEQRRQEENDKLRQEFAQHANAFHQWIQETRTYLLDGSCMVEESGTLESQLEATKRKHQEIRAMRSQLKKIEDLGAAMEEALILDNKYTEHSTVGLAQQWDQLDQLGMRMQHNLEQQIQARNTTGVTEEALKEFSMMFKHFDKDKSGRLNHQEFKSCLRSLGYDLPMVEEGEPDPEFEAILDTVDPNRDGHVSLQEYMAFMISRETENVKSSEEIESAFRALSSEGKPYVTKEELYQNLTREQADYCVSHMKPYVDGKGRELPTAFDYVEFTRSLFVN

SEQ ID NO: 865528 - protein, 2515 aa, Homo sapiens; identical to SEQ ID NO: 865523

SEQ ID NO: 865529 - protein, 1134 aa, Homo sapiens
MNYSNGDLMSWINGIRGLVSSDELAKDVTGAEALLERHQEHRTEIDARAGTFQAFEQFGQQLLAHGHYASPEIKQKLDILDQERADLEKAWVQRRMMLDQCLELQLFHRDCEQAENWMAAREAFLNTEDKGDSLDSVEALIKKHEDFDKAINVQEEKIAALQAFADQLIAAGHYAKGDISSRRNEVLDRWRRLKAQMIEKRSKLGESQTLQQFSRDVDEIEAWISEKLQTASDESYKDPTNIQAFQVLSKHQKHQAFEAELHANADRIRGVIDMGNSLIERGACAGSEDAVKARLAALADQWQFLVQKSAEKSQKLKEANKQQNFNTGIKDFDFWLSEVEALLASEDYGKDLASVNNLLKKHQLLEADISAHEDRLKDLNSQADSLMTSSAFDTSQVKDKRDTINGRFQKIKSMAASRRAKLNESHRLHQFFRDMDDEESWIKEKKLLVGSEDYGRDLTGVQNLRKKHKRLEAELAAHEPAIQGVLDTGKKLSDDNTIGKEEIQQRLAQFVEHWKELKQLAAARGQRLEESLEYQQFVANVEEEEAWINEKMTLVASEDYGDTLAAIQGLLKKHEAFETDFTVHKDRVNDVCTNGQDLIKKNNHHEENISSKMKGLNGKVSDLEKAAAQRKAKLDENSAFLQFNWKADVVESWIGEKENSLKTDDYGRDLSSVQTLLTKQETFDAGLQAFQQEGIANITALKDQLLAAKHVQSKAIEARHASLMKRWSQLLANSAARKKKLLEAQSHFRKVEDLFLTFAKKASAFNSWFENAEEDLTDPVRCNSLEEIKALREAHDAFRSSLSSAQADFNQLAELDRQIKSFRVASNPYTWFTMEALEETWRNLQKIIKERELELQKEQRRQEENDKLRQEFAQHANAFHQWIQETRTYLLDGSCMVEESGTLESQLEATKRKHQEIRAMRSQLKKIEDLGAAMEEALILDNKYTEHSTVGLAQQWDQLDQLGMRMQHNLEQQIQARNTTGVTEEALKEFSMMFKHFDKDKSGRLNHQEFKSCLRSLGYDLPMVEEGEPDPEFEAILDTVDPNRDGHVSLQEYMAFMISRETENVKSSEEIESAFRALSSEGKPYVTKEELYQNLTREQADYCVSHMKPYVDGKGRELPTAFDYVEFTRSLFVN

SEQ ID NO: 865530 - protein, 2540 aa, Homo sapiens
RHYPLRSERCGAEAAEAPRSFSTPRPDAPTPLTPREPKMDPSGVKVLETAEDIQERRQQVLDRYHRFKELSTLRRQKLEDSYRFQFFQRDAEELEKWIQEKLQIASDENYKDPTNLQGKLQKHQAFEAEVQANSGAIVKLDETGNLMISEGHFASETIRTRLMELHRQWELLLEKMREKGIKLLQAQKLVQYLRECEDVMDWINDKEAIVTSEELGQDLEHVEVLQKKFEEFQTDMAAHEERVNEVNQFAAKLIQEQHPEEELIKTKQDEVNAAWQRLKGLALQRQGKLFGAAEVQRFNRDVDETISWIKEKEQLMASDDFGRDLASVQALLRKHEGLERDLAALEDKVKALCAEADRLQQSHPLSATQIQVKREELITNWEQIRTLAAERHARLNDSYRLQRFLADFRDLTSWVTEMKALINADELASDVAGAEALLDRHQEHKGEIDAHEDSFKSADESGQALLAAGHYASDEVREKLTVLSEERAALLELWELRRQQYEQCMDLQLFYRDTEQVDNWMSKQEAFLLNEDLGDSLDSVEALLKKHEDFEKSLSAQEEKITALDEFATKLIQNNHYAMEDVATRRDALLSRRNALHERAMRRRAQLADSFHLQQFFRDSDELKSWVNEKMKTATDEAYKDPSNLQGKVQKHQAFEAELSANQSRIDALEKAGQKLIDVNHYAKDEVAARMNEVISLWKKLLEATELKGIKLREANQQQQFNRNVEDIELWLYEVEGHLASDDYGKDLTNVQNLQKKHALLEADVAAHQDRIDGITIQARQFQDAGHFDAENIKKKQEALVARYEALKEPMVARKQKLADSLRLQQLFRDVEDEETWIREKEPIAASTNRGKDLIGVQNLLKKHQALQAEIAGHEPRIKAVTQKGNAMVEEGHFAAEDVKAKLHELNQKWEALKAKASQRRQDLEDSLQAQQYFADANEAESWMREKEPIVGSTDYGKDEDSAEALLKKHEALMSDLSAYGSSIQALREQAQSCRQQVAPTDDETGKELVLALYDYQEKSPREVTMKKGDILTLLNSTNKDWWKVEVNDRQGFVPAAYVKKLDPAQSASRENLLEEQGSIALRQEQIDNQTRITKEAGSVSLRMKQVEELYHSLLELGEKRKGMLEKSCKKFMLFREANELQQWINEKEAALTSEEVGADLEQVEVLQKKFDDFQKDLKANESRLKDINKVAEDLESEGLMAEEVQAVQQQEVYGMMPRDETDSKTASPWKSARLMVHTVATFNSIKELNERWRSLQQLAEERSQLLGSAHEVQRFHRDADETKEWIEEKNQALNTDNYGHDLASVQALQRKHEGFERDLAALGDKVNSLGETAERLIQSHPESAEDLQEKCTELNQAWSSLGKRADQRKAKLGDSHDLQRFLSDFRDLMSWINGIRGLVSSDELAKDVTGAEALLERHQEHRTEIDARAGTFQAFEQFGQQLLAHGHYASPEIKQKLDILDQERADLEKAWVQRRMMLDQCLELQLFHRDCEQAENWMAAREAFLNTEDKGDSLDSVEALIKKHEDFDKAINVQEEKIAALQAFADQLIAAGHYAKGDISSRRNEVLDRWRRLKAQMIEKRSKLGESQTLQQFSRDVDEIEAWISEKLQTASDESYKDPTNIQSKHQKHQAFEAELHANADRIRGVIDMGNSLIERGACAGSEDAVKARLAALADQWQFLVQKSAEKSQKLKEANKQQNFNTGIKDFDFWLSEVEALLASEDYGKDLASVNNLLKKHQLLEADISAHEDRLKDLNSQADSLMTSSAFDTSQVKDKRDTINGRFQKIKSMAASRRAKLNESHRLHQFFRDMDDEESWIKEKKLLVGSEDYGRDLTGVQNLRKKHKRLEAELAAHEPAIQGVLDTGKKLSDDNTIGKEEIQQRLAQFVEHWKELKQLAAARGQRLEESLEYQQFVANVEEEEAWINEKMTLVASEDYGDTLAAIQGLLKKHEAFETDFTVHKDRVNDVCTNGQDLIKKNNHHEENISSKMKGLNGKVSDLEKAAAQRKAKLDENSAFLQFNWKADVVESWIGEKENSLKTDDYGRDLSSVQTLLTKQETFDAGLQAFQQEGIANITALKDQLLAAKHVQSKAIEARHASLMKRWSQLLANSAARKKKLLEAQSHFRKVEDLFLTFAKKASAFNSWFENAEEDLTDPVRCNSLEEIKALREAHDAFRSSLSSAQADFNQLAELDRQIKSFRVASNPYTWFTMEALEETWRNLQKIIKERELELQKEQRRQEENDKLRQEFAQHANAFHQWIQETRTYLLDGSCMVEESGTLESQLEATKRKHQEIRAMRSQLKKIEDLGAAMEEALILDNKYTEHSTVGLAQQWDQLDQLGMRMQHNLEQQIQARNTTGVTEEALKEFSMMFKHFDKDKSGRLNHQEFKSCLRSLGYDLPMVEEGEPDPEFEAILDTVDPNRKINYRPGAVSLCPGHPPALPAQALASPAPRDGHVSLQEYMAFMISRETENVKSSEEIESAFRALSSEGKPYVTKEELYQNLTREQADYCVSHMKPYVDGKGRELPTAFDYVEFTRSLFVN

SEQ ID NO: 865531 - protein, 2510 aa, Homo sapiens; identical to SEQ ID NO: 865521

SEQ ID NO: 865532 - protein, 508 aa, Homo sapiens
MVCLGFDVFPFYSISTEEGSIFSTLRFLGEKENSLKTDDYGRDLSSVQTLLTKQETFDAGLQAFQQEGIANITALKDQLLAAKHVQSKAIEARHASLMKRWSQLLANSAARKKKLLEAQSHFRKVEDLFLTFAKKASAFNSWFENAEEDLTDPVRCNSLEEIKALREAHDAFRSSLSSAQADFNQLAELDRQIKSFRVASNPYTWFTMEALEETWRNLQKIIKERELELQKEQRRQEENDKLRQEFAQHANAFHQWIQETRTYLLDGSCMVEESGTLESQLEATKRKHQEIRAMRSQLKKIEDLGAAMEEALILDNKYTEHSTVGLAQQWDQLDQLGMRMQHNLEQQIQARNTTGVTEEALKEFSMMFKHFDKDKSGRLNHQEFKSCLRSLGYDLPMVEEGEPDPEFEAILDTVDPNRDGHVSLQEYMAFMISRETENVKSSEEIESAFRALSSEGKPYVTKEELYQNLTREQADYCVSHMKPYVDGKGRELPTAFDYVEFTRSLFVN

SEQ ID NO: 865533 - protein, 473 aa, Homo sapiens
HANITAFLLEGLQPSVKSFRFGEERLQAFQQEGIANITALKDQLLAAKHVQSKAIEARHASLMKRWSQLLANSAARKKKLLEAQSHFRKVEDLFLTFAKKASAFNSWFENAEEDLTDPVRCNSLEEIKALREAHDAFRSSLSSAQADFNQLAELDRQIKSFRVASNPYTWFTMEALEETWRNLQKIIKERELELQKEQRRQEENDKLRQEFAQHANAFHQWIQETRTYLLDGSCMVEESGTLESQLEATKRKHQEIRAMRSQLKKIEDLGAAMEEALILDNKYTEHSTVGLAQQWDQLDQLGMRMQHNLEQQIQARNTTGVTEEALKEFSMMFKHFDKDKSGRLNHQEFKSCLRSLGYDLPMVEEGEPDPEFEAILDTVDPNRDGHVSLQEYMAFMISRETENVKSSEEIESAFRALSSEGKPYVTKEELYQNLTREQADYCVSHMKPYVDGKGRELPTAFDYVEFTRSLFVN

SEQ ID NO: 865534 - protein, 2476 aa, Homo sapiens
RHYPLRSERCGAEAAEAPRSFSTPRPDAPTPLTPREPKMDPSGVKVLETAEDIQERRQQVLDRYHRFKELSTLRRQKLEDSYRFQFFQRDAEELEKWIQEKLQIASDENYKDPTNLQGKLQKHQAFEAEVQANSGAIVKLDETGNLMISEGHFASETIRTRLMELHRQWELLLEKMREKGIKLLQAQKLVQYLRECEDVMDWINDKEAIVTSEELGQDLEHVEVLQKKFEEFQTDMAAHEERVNEVNQFAAKLIQEQHPEEELIKTKQDEVNAAWQRLKGLALQRQGKLFGAAEVQRFNRDVDETISWIKEKEQLMASDDFGRDLASVQALLRKHEGLERDLAALEDKVKALCAEADRLQQSHPLSATQIQVKREELITNWEQIRTLAAERHARLNDSYRLQRFLADFRDLTSWVTEMKALINADELASDVAGAEALLDRHQEHKGEIDAHEDSFKSADESGQALLAAGHYASDEVREKLTVLSEERAALLELWELRRQQYEQCMDLQLFYRDTEQVDNWMSKQEAFLLNEDLGDSLDSVEALLKKHEDFEKSLSAQEEKITALDEFATKLIQNNHYAMEDVATRRDALLSRRNALHERAMRRRAQLADSFHLQQFFRDSDELKSWVNEKMKTATDEAYKDPSNLQGKVQKHQAFEAELSANQSRIDALEKAGQKLIDVNHYAKDEVAARMNEVISLWKKLLEATELKGIKLREANQQQQFNRNVEDIELWLYEVEGHLASDDYGKDLTNVQNLQKKHALLEADVAAHQDRIDGITIQARQFQDAGHFDAENIKKKQEALVARYEALKEPMVARKQKLADSLRLQQLFRDVEDEETWIREKEPIAASTNRGKDLIGVQNLLKKHQALQAEIAGHEPRIKAVTQKGNAMVEEGHFAAEDVKAKLHELNQKWEALKAKASQRRQDLEDSLQAQQYFADANEAESWMREKEPIVGSTDYGKDEDSAEALLKKHEALMSDLSAYGSSIQALREQAQSCRQQVAPTDDETGKELVLALYDYQEKSPREVTMKKGDILTLLNSTNKDWWKVEVNDRQGFVPAAYVKKLDPAQSASRENLLEEQGSIALRQEQIDNQTRITKEAGSVSLRMKQVEELYHSLLELGEKRKGMLEKSCKKFMLFREANELQQWINEKEAALTSEEVGADLEQVEVLQKKFDDFQKDLKANESRLKDINKVAEDLESEGLMAEEVQAVQQQEVYGMMPRDETDSKTASPWKSARLMVHTVATFNSIKELNERWRSLQQLAEERSQLLGSAHEVQRFHRDADETKEWIEEKNQALNTDNYGHDLASVQALQRKHEGFERDLAALGDKVNSLGETAERLIQSHPESAEDLQEKCTELNQAWSSLGKRADQRKAKLGDSHDLQRFLSDFRDLMSWINGIRGLVSSDELAKDVTGAEALLERHQEHRTEIDARAGTFQAFEQFGQQLLAHGHYASPEIKQKLDILDQERADLEKAWVQRRMMLDQCLELQLFHRDCEQAENWMAAREAFLNTEDKGDSLDSVEALIKKHEDFDKAINVQEEKIAALQAFADQLIAAGHYAKGDISSRRNEVLDRWRRLKAQMIEKRSKLGESQTLQQFSRDVDEIEAWISEKLQTASDESYKDPTNIQSKHQKHQAFEAELHANADRIRGVIDMGNSLIERGACAGSEDAVKARLAALADQWQFLVQKSAEKSQKLKEANKQQNFNTGIKDFDFWLSEVEALLASEDYGKDLASVNNLLKKHQLLEADISAHEDRLKDLNSQADSLMTSSAFDTSQVKDKRDTINGRFQKIKSMAASRRAKLNESHRLHQFFRDMDDEESWIKEKKLLVGSEDYGRDLTGVQNLRKKHKRLEAELAAHEPAIQGVLDTGKKLSDDNTIGKEEIQQRLAQFVEHWKELKQLAAARGQRLEESLEYQQFVANVEEEEAWINEKMTLVASEDYGDTLAAIQGLLKKHEAFETDFTVHKDRVNDVCTNGQDLIKKNNHHEENISSKMKGLNGKVSDLEKAAAQRKAKLDENSAFLQFNWKADVVESWIGEKENSLKTDDYGRDLSSVQTLLTKQETFDAGLQAFQQEGIANITALKDQLLAAKHVQSKAIEARHASLMKRWSQLLANSAARKKKLLEAQSHFRKVEDLFLTFAKKASAFNSWFENAEEDLTDPVRCNSLEEIKALREAHDAFRSSLSSAQADFNQLAELDRQIKSFRVASNPYTWFTMEALEETWRNLQKIIKERELELQKEQRRQEENDKLRQEFAQHANAFHQWIQETRTYLLDGSCMVEESGTLESQLEATKRKHQEIRAMRSQLKKIEDLGAAMEEALILDNKYTEHSTVGLAQQWDQLDQLGMRMQHNLEQQIQARNTTGVTEEALKEFSMMFKHFDKDKSGRLNHQEFKSCLRSLGYDLPMVEEGEPDPEFEAILDTVDPNRDGHVSLQEYMAFMISRETENVKSSEEIESAFRALSSEGKPYVTKEELYQVWASGGG

SEQ ID NO: 865535 - protein, 398 aa, Homo sapiens
TGGEPKLRLRYEAPVEDLFLTFAKKASAFNSWFENAEEDLTDPVRCNSLEEIKALREAHDAFRSSLSSAQADFNQLAELDRQIKSFRVASNPYTWFTMEALEETWRNLQKIIKERELELQKEQRRQEENDKLRQEFAQHANAFHQWIQETRTYLLDGSCMVEESGTLESQLEATKRKHQEIRAMRSQLKKIEDLGAAMEEALILDNKYTEHSTVGLAQQWDQLDQLGMRMQHNLEQQIQARNTTGVTEEALKEFSMMFKHFDKDKSGRLNHQEFKSCLRSLGYDLPMVEEGEPDPEFEAILDTVDPNRDGHVSLQEYMAFMISRETENVKSSEEIESAFRALSSEGKPYVTKEELYQNLTREQADYCVSHMKPYVDGKGRELPTAFDYVEFTRSLFVN

SEQ ID NO: 865536 - protein, 2391 aa, Homo sapiens
RHYPLRSERCGAEAAEAPRSFSTPRPDAPTPLTPREPKMDPSGVKVLETAEDIQERRQQVLDRYHRFKELSTLRRQKLEDSYRFQFFQRDAEELEKWIQEKLQIASDENYKDPTNLQGKLQKHQAFEAEVQANSGAIVKLDETGNLMISEGHFASETIRTRLMELHRQWELLLEKMREKGIKLLQAQKLVQYLRECEDVMDWINDKEAIVTSEELGQDLEHVEVLQKKFEEFQTDMAAHEERVNEVNQFAAKLIQEQHPEEELIKTKQDEVNAAWQRLKGLALQRQGKLFGAAEVQRFNRDVDETISWIKEKEQLMASDDFGRDLASVQALLRKHEGLERDLAALEDKVKALCAEADRLQQSHPLSATQIQVKREELITNWEQIRTLAAERHARLNDSYRLQRFLADFRDLTSWVTEMKALINADELASDVAGAEALLDRHQEHKGEIDAHEDSFKSADESGQALLAAGHYASDEVREKLTVLSEERAALLELWELRRQQYEQCMDLQLFYRDTEQVDNWMSKQEAFLLNEDLGDSLDSVEALLKKHEDFEKSLSAQEEKITALDEFATKLIQNNHYAMEDVATRRDALLSRRNALHERAMRRRAQLADSFHLQQFFRDSDELKSWVNEKMKTATDEAYKDPSNLQGKVQKHQAFEAELSANQSRIDALEKAGQKLIDVNHYAKDEVAARMNEVISLWKKLLEATELKGIKLREANQQQQFNRNVEDIELWLYEVEGHLASDDYGKDLTNVQNLQKKHALLEADVAAHQDRIDGITIQARQFQDAGHFDAENIKKKQEALVARYEALKEPMVARKQKLADSLRLQQLFRDVEDEETWIREKEPIAASTNRGKDLIGVQNLLKKHQALQAEIAGHEPRIKAVTQKGNAMVEEGHFAAEDVKAKLHELNQKWEALKAKASQRRQDLEDSLQAQQYFADANEAESWMREKEPIVGSTDYGKDEDSAEALLKKHEALMSDLSAYGSSIQALREQAQSCRQQVAPTDDETGKELVLALYDYQEKSPREVTMKKGDILTLLNSTNKDWWKVEVNDRQGFVPAAYVKKLDPAQSASRENLLEEQGSIALRQEQIDNQTRITKEAGSVSLRMKQVEELYHSLLELGEKRKGMLEKSCKKFMLFREANELQQWINEKEAALTSEEVGADLEQVEVLQKKFDDFQKDLKANESRLKDINKVAEDLESEGLMAEEVQAVQQQEVYGMMPRDETDSKTASPWKSARLMVHTVATFNSIKELNERWRSLQQLAEERSQLLGSAHEVQRFHRDADETKEWIEEKNQALNTDNYGHDLASVQALQRKHEGFERDLAALGDKVNSLGETAERLIQSHPESAEDLQEKCTELNQAWSSLGKRADQRKAKLGDSHDLQRFLSDFRDLMSWINGIRGLVSSDELAKDVTGAEALLERHQEHRTEIDARAGTFQAFEQFGQQLLAHGHYASPEIKQKLDILDQERADLEKAWVQRRMMLDQCLELQLFHRDCEQAENWMAAREAFLNTEDKGDSLDSVEALIKKHEDFDKAINVQEEKIAALQAFADQLIAAGHYAKGDISSRRNEVLDRWRRLKAQMIEKRSKLGESQTLQQFSRDVDEIEAWISEKLQTASDESYKDPTNIQSKHQKHQAFEAELHANADRIRGVIDMGNSLIERGACAGSEDAVKARLAALADQWQFLVQKSAEKSQKLKEANKQQNFNTGIKDFDFWLSEVEALLASEDYGKDLASVNNLLKKHQLLEADISAHEDRLKDLNSQADSLMTSSAFDTSQVKDKRDTINGRFQKIKSMAASRRAKLNESHRLHQFFRDMDDEESWIKEKKLLVGSEDYGRDLTGVQNLRKKHKRLEAELAAHEPAIQGVLDTGKKLSDDNTIGKEEIQQRLAQFVEHWKELKQLAAARGQRLEESLEYQQFVANVEEEEAWINEKMTLVASEDYGDTLAAIQGLLKKHEAFETDFTVHKDRVNDVCTNGQDLIKKNNHHEENISSKMKGLNGKVSDLEKAAAQRKAKLDENSAFLQFNWKADVVESWIGEKENSLKTDDYGRDLSSVQTLLTKQETFDAGLQAFQQEGIANITALKDQLLAAKHVQSKAIEARHASLMKRWSQLLANSAARKKKLLEAQSHFRKVEDLFLTFAKKASAFNSWFENAEEDLTDPVRCNSLEEIKALREAHDAFRSSLSSAQADFNQLAELDRQIKSFRVASNPYTWFTMEALEETWRNLQKIIKERELELQKEQRRQEENDKLRQEFAQHANAFHQWIQETRTYLLDGSCMVEESGTLESQLEATKRKHQEIRAMRSQLKKIEDLGAAMEEALILDNKYTEHSTVGLAQQWDQLDQLGMRMQHNLEQQIQARNTTGVTEEALKEFSMMFKHFDKDKQGCVCLISRYSPST

SEQ ID NO: 865537 - protein, 265 aa, Homo sapiens
MGIPNQGRGLYQGVKETRTYLLDGSWLVPEAKTLESQLEATKRKHQEIRAMRSQLKKIEDLGAAMEEALILDNKYTEHSTVGLAQQWDQLDQLGMRMQHNLEQQIQARNTTGVTEEALKEFSMMFKHFDKDKSGRLNHQEFKSCLRSLGYDLPMVEEGEPDPEFEAILDTVDPNRDGHVSLQEYMAFMISRETENVKSSEEIESAFRALSSEGKPYVTKEELYQNLTREQADYCVSHMKPYVDGKGRELPTAFDYVEFTRSLFVN

SEQ ID NO: 865538 - protein, 2111 aa, Homo sapiens
RHYPLRSERCGAEAAEAPRSFSTPRPDAPTPLTPREPKMDPSGVKVLETAEDIQERRQQVLDRYHRFKELSTLRRQKLEDSYRFQFFQRDAEELEKWIQEKLQIASDENYKDPTNLQGKLQKHQAFEAEVQANSGAIVKLDETGNLMISEGHFASETIRTRLMELHRQWELLLEKMREKGIKLLQAQKLVQYLRECEDVMDWINDKEAIVTSEELGQDLEHVEVLQKKFEEFQTDMAAHEERVNEVNQFAAKLIQEQHPEEELIKTKQDEVNAAWQRLKGLALQRQGKLFGAAEVQRFNRDVDETISWIKEKEQLMASDDFGRDLASVQALLRKHEGLERDLAALEDKVKALCAEADRLQQSHPLSATQIQVKREELITNWEQIRTLAAERHARLNDSYRLQRFLADFRDLTSWVTEMKALINADELASDVAGAEALLDRHQEHKGEIDAHEDSFKSADESGQALLAAGHYASDEVREKLTVLSEERAALLELWELRRQQYEQCMDLQLFYRDTEQVDNWMSKQEAFLLNEDLGDSLDSVEALLKKHEDFEKSLSAQEEKITALDEFATKLIQNNHYAMEDVATRRDALLSRRNALHERAMRRRAQLADSFHLQQFFRDSDELKSWVNEKMKTATDEAYKDPSNLQGKVQKHQAFEAELSANQSRIDALEKAGQKLIDVNHYAKDEVAARMNEVISLWKKLLEATELKGIKLREANQQQQFNRNVEDIELWLYEVEGHLASDDYGKDLTNVQNLQKKHALLEADVAAHQDRIDGITIQARQFQDAGHFDAENIKKKQEALVARYEALKEPMVARKQKLADSLRLQQLFRDVEDEETWIREKEPIAASTNRGKDLIGVQNLLKKHQALQAEIAGHEPRIKAVTQKGNAMVEEGHFAAEDVKAKLHELNQKWEALKAKASQRRQDLEDSLQAQQYFADANEAESWMREKEPIVGSTDYGKDEDSAEALLKKHEALMSDLSAYGSSIQALREQAQSCRQQVAPTDDETGKELVLALYDYQEKSPREVTMKKGDILTLLNSTNKDWWKVEVNDRQGFVPAAYVKKLDPAQSASRENLLEEQGSIALRQEQIDNQTRITKEAGSVSLRMKQVEELYHSLLELGEKRKGMLEKSCKKFMLFREANELQQWINEKEAALTSEEVGADLEQVEVLQKKFDDFQKDLKANESRLKDINKVAEDLESEGLMAEEVQAVQQQEVYGMMPRDETDSKTASPWKSARLMVHTVATFNSIKELNERWRSLQQLAEERSQLLGSAHEVQRFHRDADETKEWIEEKNQALNTDNYGHDLASVQALQRKHEGFERDLAALGDKVNSLGETAERLIQSHPESAEDLQEKCTELNQAWSSLGKRADQRKAKLGDSHDLQRFLSDFRDLMSWINGIRGLVSSDELAKDVTGAEALLERHQEHRTEIDARAGTFQAFEQFGQQLLAHGHYASPEIKQKLDILDQERADLEKAWVQRRMMLDQCLELQLFHRDCEQAENWMAAREAFLNTEDKGDSLDSVEALIKKHEDFDKAINVQEEKIAALQAFADQLIAAGHYAKGDISSRRNEVLDRWRRLKAQMIEKRSKLGESQTLQQFSRDVDEIEAWISEKLQTASDESYKDPTNIQSKHQKHQAFEAELHANADRIRGVIDMGNSLIERGACAGSEDAVKARLAALADQWQFLVQKSAEKSQKLKEANKQQNFNTGIKDFDFWLSEVEALLASEDYGKDLASVNNLLKKHQLLEADISAHEDRLKDLNSQADSLMTSSAFDTSQVKDKRDTINGRFQKIKSMAASRRAKLNESHRLHQFFRDMDDEESWIKEKKLLVGSEDYGRDLTGVQNLRKKHKRLEAELAAHEPAIQGVLDTGKKLSDDNTIGKEEIQQRLAQFVEHWKELKQLAAARGQRLEESLEYQQFVANVEEEEAWINEKMTLVASEDYGDTLAAIQGLLKKHEAFETDFTVHKDRVNDVCTNGQDLIKKNNHHEENISSKMKGLNGKVSDLEKAAAQRKAKLDENSAFLQFNWKADVVESWIGEKENSLKTDDYGRDLSSVQTLLTKQETFDAGLQAFQQEGIANITALKDQLLAAKHVQSKAVSGPVRKLYDDVQSEAGKLA

SEQ ID NO: 865539 - protein, 2070 aa, Homo sapiens
RHYPLRSERCGAEAAEAPRSFSTPRPDAPTPLTPREPKMDPSGVKVLETAEDIQERRQQVLDRYHRFKELSTLRRQKLEDSYRFQFFQRDAEELEKWIQEKLQIASDENYKDPTNLQGKLQKHQAFEAEVQANSGAIVKLDETGNLMISEGHFASETIRTRLMELHRQWELLLEKMREKGIKLLQAQKLVQYLRECEDVMDWINDKEAIVTSEELGQDLEHVEVLQKKFEEFQTDMAAHEERVNEVNQFAAKLIQEQHPEEELIKTKQDEVNAAWQRLKGLALQRQGKLFGAAEVQRFNRDVDETISWIKEKEQLMASDDFGRDLASVQALLRKHEGLERDLAALEDKVKALCAEADRLQQSHPLSATQIQVKREELITNWEQIRTLAAERHARLNDSYRLQRFLADFRDLTSWVTEMKALINADELASDVAGAEALLDRHQEHKGEIDAHEDSFKSADESGQALLAAGHYASDEVREKLTVLSEERAALLELWELRRQQYEQCMDLQLFYRDTEQVDNWMSKQEAFLLNEDLGDSLDSVEALLKKHEDFEKSLSAQEEKITALDEFATKLIQNNHYAMEDVATRRDALLSRRNALHERAMRRRAQLADSFHLQQFFRDSDELKSWVNEKMKTATDEAYKDPSNLQGKVQKHQAFEAELSANQSRIDALEKAGQKLIDVNHYAKDEVAARMNEVISLWKKLLEATELKGIKLREANQQQQFNRNVEDIELWLYEVEGHLASDDYGKDLTNVQNLQKKHALLEADVAAHQDRIDGITIQARQFQDAGHFDAENIKKKQEALVARYEALKEPMVARKQKLADSLRLQQLFRDVEDEETWIREKEPIAASTNRGKDLIGVQNLLKKHQALQAEIAGHEPRIKAVTQKGNAMVEEGHFAAEDVKAKLHELNQKWEALKAKASQRRQDLEDSLQAQQYFADANEAESWMREKEPIVGSTDYGKDEDSAEALLKKHEALMSDLSAYGSSIQALREQAQSCRQQVAPTDDETGKELVLALYDYQEKSPREVTMKKGDILTLLNSTNKDWWKVEVNDRQGFVPAAYVKKLDPAQSASRENLLEEQGSIALRQEQIDNQTRITKEAGSVSLRMKQVEELYHSLLELGEKRKGMLEKSCKKFMLFREANELQQWINEKEAALTSEEVGADLEQVEVLQKKFDDFQKDLKANESRLKDINKVAEDLESEGLMAEEVQAVQQQEVYGMMPRDETDSKTASPWKSARLMVHTVATFNSIKELNERWRSLQQLAEERSQLLGSAHEVQRFHRDADETKEWIEEKNQALNTDNYGHDLASVQALQRKHEGFERDLAALGDKVNSLGETAERLIQSHPESAEDLQEKCTELNQAWSSLGKRADQRKAKLGDSHDLQRFLSDFRDLMSWINGIRGLVSSDELAKDVTGAEALLERHQEHRTEIDARAGTFQAFEQFGQQLLAHGHYASPEIKQKLDILDQERADLEKAWVQRRMMLDQCLELQLFHRDCEQAENWMAAREAFLNTEDKGDSLDSVEALIKKHEDFDKAINVQEEKIAALQAFADQLIAAGHYAKGDISSRRNEVLDRWRRLKAQMIEKRSKLGESQTLQQFSRDVDEIEAWISEKLQTASDESYKDPTNIQSKHQKHQAFEAELHANADRIRGVIDMGNSLIERGACAGSEDAVKARLAALADQWQFLVQKSAEKSQKLKEANKQQNFNTGIKDFDFWLSEVEALLASEDYGKDLASVNNLLKKHQLLEADISAHEDRLKDLNSQADSLMTSSAFDTSQVKDKRDTINGRFQKIKSMAASRRAKLNESHRLHQFFRDMDDEESWIKEKKLLVGSEDYGRDLTGVQNLRKKHKRLEAELAAHEPAIQGVLDTGKKLSDDNTIGKEEIQQRLAQFVEHWKELKQLAAARGQRLEESLEYQQFVANVEEEEAWINEKMTLVASEDYGDTLAAIQGLLKKHEAFETDFTVHKDRVNDVCTNGQDLIKKNNHHEENISSKMKGLNGKVSDLEKAAAQRKAKLDENSAFLQFNWKADVVESWIGEKENSLKTDDYGRDLSSVQTLLTKQETFDAGLQHMPVPA

SEQ ID NO: 865540 - protein, 171 aa, Homo sapiens
MYTEQSMKAHREKTAIHKPRREASAETSLMFKHFDKDKSGRLNHQEFKSCLRSLGYDLPMVEEGEPDPEFEAILDTVDPNRDGHVSLQEYMAFMISRETENVKSSEEIESAFRALSSEGKPYVTKEELYQNLTREQADYCVSHMKPYVDGKGRELPTAFDYVEFTRSLFVN

SEQ ID NO: 865541 - protein, 1921 aa, Homo sapiens
RHYPLRSERCGAEAAEAPRSFSTPRPDAPTPLTPREPKMDPSGVKVLETAEDIQERRQQVLDRYHRFKELSTLRRQKLEDSYRFQFFQRDAEELEKWIQEKLQIASDENYKDPTNLQGKLQKHQAFEAEVQANSGAIVKLDETGNLMISEGHFASETIRTRLMELHRQWELLLEKMREKGIKLLQAQKLVQYLRECEDVMDWINDKEAIVTSEELGQDLEHVEVLQKKFEEFQTDMAAHEERVNEVNQFAAKLIQEQHPEEELIKTKQDEVNAAWQRLKGLALQRQGKLFGAAEVQRFNRDVDETISWIKEKEQLMASDDFGRDLASVQALLRKHEGLERDLAALEDKVKALCAEADRLQQSHPLSATQIQVKREELITNWEQIRTLAAERHARLNDSYRLQRFLADFRDLTSWVTEMKALINADELASDVAGAEALLDRHQEHKGEIDAHEDSFKSADESGQALLAAGHYASDEVREKLTVLSEERAALLELWELRRQQYEQCMDLQLFYRDTEQVDNWMSKQEAFLLNEDLGDSLDSVEALLKKHEDFEKSLSAQEEKITALDEFATKLIQNNHYAMEDVATRRDALLSRRNALHERAMRRRAQLADSFHLQQFFRDSDELKSWVNEKMKTATDEAYKDPSNLQGKVQKHQAFEAELSANQSRIDALEKAGQKLIDVNHYAKDEVAARMNEVISLWKKLLEATELKGIKLREANQQQQFNRNVEDIELWLYEVEGHLASDDYGKDLTNVQNLQKKHALLEADVAAHQDRIDGITIQARQFQDAGHFDAENIKKKQEALVARYEALKEPMVARKQKLADSLRLQQLFRDVEDEETWIREKEPIAASTNRGKDLIGVQNLLKKHQALQAEIAGHEPRIKAVTQKGNAMVEEGHFAAEDVKAKLHELNQKWEALKAKASQRRQDLEDSLQAQQYFADANEAESWMREKEPIVGSTDYGKDEDSAEALLKKHEALMSDLSAYGSSIQALREQAQSCRQQVAPTDDETGKELVLALYDYQEKSPREVTMKKGDILTLLNSTNKDWWKVEVNDRQGFVPAAYVKKLDPAQSASRENLLEEQGSIALRQEQIDNQTRITKEAGSVSLRMKQVEELYHSLLELGEKRKGMLEKSCKKFMLFREANELQQWINEKEAALTSEEVGADLEQVEVLQKKFDDFQKDLKANESRLKDINKVAEDLESEGLMAEEVQAVQQQEVYGMMPRDETDSKTASPWKSARLMVHTVATFNSIKELNERWRSLQQLAEERSQLLGSAHEVQRFHRDADETKEWIEEKNQALNTDNYGHDLASVQALQRKHEGFERDLAALGDKVNSLGETAERLIQSHPESAEDLQEKCTELNQAWSSLGKRADQRKAKLGDSHDLQRFLSDFRDLMSWINGIRGLVSSDELAKDVTGAEALLERHQEHRTEIDARAGTFQAFEQFGQQLLAHGHYASPEIKQKLDILDQERADLEKAWVQRRMMLDQCLELQLFHRDCEQAENWMAAREAFLNTEDKGDSLDSVEALIKKHEDFDKAINVQEEKIAALQAFADQLIAAGHYAKGDISSRRNEVLDRWRRLKAQMIEKRSKLGESQTLQQFSRDVDEIEAWISEKLQTASDESYKDPTNIQSKHQKHQAFEAELHANADRIRGVIDMGNSLIERGACAGSEDAVKARLAALADQWQFLVQKSAEKSQKLKEANKQQNFNTGIKDFDFWLSEVEALLASEDYGKDLASVNNLLKKHQLLEADISAHEDRLKDLNSQADSLMTSSAFDTSQVKDKRDTINGRFQKIKSMAASRRAKLNESHRLHQFFRDMDDEESWIKEKKLLVGSEDYGRDLTGVQNLRKKHKRLEAELAAHEPAIQGVLDTGKKLSDDNTIGKEEIQQRLAQFVEHWKELKQLAAARGQRLEENLDSQQFVIVIAECL

SEQ ID NO: 865542 - protein, 1110 aa, Homo sapiens
RHYPLRSERCGAEAAEAPRSFSTPRPDAPTPLTPREPKMDPSGVKVLETAEDIQERRQQVLDRYHRFKELSTLRRQKLEDSYRFQFFQRDAEELEKWIQEKLQIASDENYKDPTNLQGKLQKHQAFEAEVQANSGAIVKLDETGNLMISEGHFASETIRTRLMELHRQWELLLEKMREKGIKLLQAQKLVQYLRECEDVMDWINDKEAIVTSEELGQDLEHVEVLQKKFEEFQTDMAAHEERVNEVNQFAAKLIQEQHPEEELIKTKQDEVNAAWQRLKGLALQRQGKLFGAAEVQRFNRDVDETISWIKEKEQLMASDDFGRDLASVQALLRKHEGLERDLAALEDKVKALCAEADRLQQSHPLSATQIQVKREELITNWEQIRTLAAERHARLNDSYRLQRFLADFRDLTSWVTEMKALINADELASDVAGAEALLDRHQEHKGEIDAHEDSFKSADESGQALLAAGHYASDEVREKLTVLSEERAALLELWELRRQQYEQCMDLQLFYRDTEQVDNWMSKQEAFLLNEDLGDSLDSVEALLKKHEDFEKSLSAQEEKITALDEFATKLIQNNHYAMEDVATRRDALLSRRNALHERAMRRRAQLADSFHLQQFFRDSDELKSWVNEKMKTATDEAYKDPSNLQGKVQKHQAFEAELSANQSRIDALEKAGQKLIDVNHYAKDEVAARMNEVISLWKKLLEATELKGIKLREANQQQQFNRNVEDIELWLYEVEGHLASDDYGKDLTNVQNLQKKHALLEADVAAHQDRIDGITIQARQFQDAGHFDAENIKKKQEALVARYEALKEPMVARKQKLADSLRLQQLFRDVEDEETWIREKEPIAASTNRGKDLIGVQNLLKKHQALQAEIAGHEPRIKAVTQKGNAMVEEGHFAAEDVKAKLHELNQKWEALKAKASQRRQDLEDSLQAQQYFADANEAESWMREKEPIVGSTDYGKDEDSAEALLKKHEALMSDLSAYGSSIQALREQAQSCRQQVAPTDDETGKELVLALYDYQEKSPREVTMKKGDILTLLNSTNKDWWKVEVNDRQGFVPAAYVKKLDPAQSASRENLLEEQGSIALRQEQIDNQTRITKEAGSVSLRMKQVEEL

SEQ ID NO: 865543 - protein, 1214 aa, Homo sapiens
RHYPLRSERCGAEAAEAPRSFSTPRPDAPTPLTPREPKMDPSGVKVLETAEDIQERRQQVLDRYHRFKELSTLRRQKLEDSYRFQFFQRDAEELEKWIQEKLQIASDENYKDPTNLQGKLQKHQAFEAEVQANSGAIVKLDETGNLMISEGHFASETIRTRLMELHRQWELLLEKMREKGIKLLQAQKLVQYLRECEDVMDWINDKEAIVTSEELGQDLEHVEVLQKKFEEFQTDMAAHEERVNEVNQFAAKLIQEQHPEEELIKTKQDEVNAAWQRLKGLALQRQGKLFGAAEVQRFNRDVDETISWIKEKEQLMASDDFGRDLASVQALLRKHEGLERDLAALEDKVKALCAEADRLQQSHPLSATQIQVKREELITNWEQIRTLAAERHARLNDSYRLQRFLADFRDLTSWVTEMKALINADELASDVAGAEALLDRHQEHKGEIDAHEDSFKSADESGQALLAAGHYASDEVREKLTVLSEERAALLELWELRRQQYEQCMDLQLFYRDTEQVDNWMSKQEAFLLNEDLGDSLDSVEALLKKHEDFEKSLSAQEEKITALDEFATKLIQNNHYAMEDVATRRDALLSRRNALHERAMRRRAQLADSFHLQQFFRDSDELKSWVNEKMKTATDEAYKDPSNLQGKVQKHQAFEAELSANQSRIDALEKAGQKLIDVNHYAKDEVAARMNEVISLWKKLLEATELKGIKLREANQQQQFNRNVEDIELWLYEVEGHLASDDYGKDLTNVQNLQKKHALLEADVAAHQDRIDGITIQARQFQDAGHFDAENIKKKQEALVARYEALKEPMVARKQKLADSLRLQQLFRDVEDEETWIREKEPIAASTNRGKDLIGVQNLLKKHQALQAEIAGHEPRIKAVTQKGNAMVEEGHFAAEDVKAKLHELNQKWEALKAKASQRRQDLEDSLQAQQYFADANEAESWMREKEPIVGSTDYGKDEDSAEALLKKHEALMSDLSAYGSSIQALREQAQSCRQQVAPTDDETGKELVLALYDYQEKSPREVTMKKGDILTLLNSTNKDWWKVEVNDRQGFVPAAYVKKLDPAQSASRENLLEEQGSIALRQEQIDNQYHSLLELGEKRKGMLEKSCKKFMLFREANELQQWINEKEAALTSEEVGADLEQVEVLQKKFDDFQKDLKANESRLKDINKVAEDLESEGLMAEEVQAVQQQEVYGMMPRDETDSKTANSQQPFR

SEQ ID NO: 865544 - protein, 1193 aa, Homo sapiens
RHYPLRSERCGAEAAEAPRSFSTPRPDAPTPLTPREPKMDPSGVKVLETAEDIQERRQQVLDRYHRFKELSTLRRQKLEDSYRFQFFQRDAEELEKWIQEKLQIASDENYKDPTNLQGKLQKHQAFEAEVQANSGAIVKLDETGNLMISEGHFASETIRTRLMELHRQWELLLEKMREKGIKLLQAQKLVQYLRECEDVMDWINDKEAIVTSEELGQDLEHVEVLQKKFEEFQTDMAAHEERVNEVNQFAAKLIQEQHPEEELIKTKQDEVNAAWQRLKGLALQRQGKLFGAAEVQRFNRDVDETISWIKEKEQLMASDDFGRDLASVQALLRKHEGLERDLAALEDKVKALCAEADRLQQSHPLSATQIQVKREELITNWEQIRTLAAERHARLNDSYRLQRFLADFRDLTSWVTEMKALINADELASDVAGAEALLDRHQEHKGEIDAHEDSFKSADESGQALLAAGHYASDEVREKLTVLSEERAALLELWELRRQQYEQCMDLQLFYRDTEQVDNWMSKQEAFLLNEDLGDSLDSVEALLKKHEDFEKSLSAQEEKITALDEFATKLIQNNHYAMEDVATRRDALLSRRNALHERAMRRRAQLADSFHLQQFFRDSDELKSWVNEKMKTATDEAYKDPSNLQGKVQKHQAFEAELSANQSRIDALEKAGQKLIDVNHYAKDEVAARMNEVISLWKKLLEATELKGIKLREANQQQQFNRNVEDIELWLYEVEGHLASDDYGKDLTNVQNLQKKHALLEADVAAHQDRIDGITIQARQFQDAGHFDAENIKKKQEALVARYEALKEPMVARKQKLADSLRLQQLFRDVEDEETWIREKEPIAASTNRGKDLIGVQNLLKKHQALQAEIAGHEPRIKAVTQKGNAMVEEGHFAAEDVKAKLHELNQKWEALKAKASQRRQDLEDSLQAQQYFADANEAESWMREKEPIVGSTDYGKDEDSAEALLKKHEALMSDLSAYGSSIQALREQAQSCRQQVAPTDDETGKELVLALYDYQEKSPREVTMKKGDILTLLNSTNKDWWKVEVNDRQGFVPAAYVKKLDPAQSASRENLLEEQGSIALRQEQIDNQTRITKEAGSVSLRMKQVEELYHSLLELGEKRKGMLEKSCKKFMLFREANELQQWFNTGEKVRNNEDVGADGAQQAALRKKVDKLTMKNVEATSELTGDSEHNQ

SEQ ID NO: 865545 - protein, 1073 aa, Homo sapiens
RHYPLRSERCGAEAAEAPRSFSTPRPDAPTPLTPREPKMDPSGVKVLETAEDIQERRQQVLDRYHRFKELSTLRRQKLEDSYRFQFFQRDAEELEKWIQEKLQIASDENYKDPTNLQGKLQKHQAFEAEVQANSGAIVKLDETGNLMISEGHFASETIRTRLMELHRQWELLLEKMREKGIKLLQAQKLVQYLRECEDVMDWINDKEAIVTSEELGQDLEHVEVLQKKFEEFQTDMAAHEERVNEVNQFAAKLIQEQHPEEELIKTKQDEVNAAWQRLKGLALQRQGKLFGAAEVQRFNRDVDETISWIKEKEQLMASDDFGRDLASVQALLRKHEGLERDLAALEDKVKALCAEADRLQQSHPLSATQIQVKREELITNWEQIRTLAAERHARLNDSYRLQRFLADFRDLTSWVTEMKALINADELASDVAGAEALLDRHQEHKGEIDAHEDSFKSADESGQALLAAGHYASDEVREKLTVLSEERAALLELWELRRQQYEQCMDLQLFYRDTEQVDNWMSKQEAFLLNEDLGDSLDSVEALLKKHEDFEKSLSAQEEKITALDEFATKLIQNNHYAMEDVATRRDALLSRRNALHERAMRRRAQLADSFHLQQFFRDSDELKSWVNEKMKTATDEAYKDPSNLQGKVQKHQAFEAELSANQSRIDALEKAGQKLIDVNHYAKDEVAARMNEVISLWKKLLEATELKGIKLREANQQQQFNRNVEDIELWLYEVEGHLASDDYGKDLTNVQNLQKKHALLEADVAAHQDRIDGITIQARQFQDAGHFDAENIKKKQEALVARYEALKEPMVARKQKLADSLRLQQLFRDVEDEETWIREKEPIAASTNRGKDLIGVQNLLKKHQALQAEIAGHEPRIKAVTQKGNAMVEEGHFAAEDVKAKLHELNQKWEALKAKASQRRQDLEDSLQAQQYFADANEAESWMREKEPIVGSTDYGKDEDSAEALLKKHEALMSDLSAYGSSIQALREQAQSCRQQVAPTDDETGKELVLALYDYQEKSPREVTMKKGDILTLLNSTNKDWWKVEVNDRQGFVPAAYVKKLNFLHNCLPQNL

SEQ ID NO: 865546 - protein, 897 aa, Homo sapiens
RHYPLRSERCGAEAAEAPRSFSTPRPDAPTPLTPREPKMDPSGVKVLETAEDIQERRQQVLDRYHRFKELSTLRRQKLEDSYRFQFFQRDAEELEKWIQEKLQIASDENYKDPTNLQGKLQKHQAFEAEVQANSGAIVKLDETGNLMISEGHFASETIRTRLMELHRQWELLLEKMREKGIKLLQAQKLVQYLRECEDVMDWINDKEAIVTSEELGQDLEHVEVLQKKFEEFQTDMAAHEERVNEVNQFAAKLIQEQHPEEELIKTKQDEVNAAWQRLKGLALQRQGKLFGAAEVQRFNRDVDETISWIKEKEQLMASDDFGRDLASVQALLRKHEGLERDLAALEDKVKALCAEADRLQQSHPLSATQIQVKREELITNWEQIRTLAAERHARLNDSYRLQRFLADFRDLTSWVTEMKALINADELASDVAGAEALLDRHQEHKGEIDAHEDSFKSADESGQALLAAGHYASDEVREKLTVLSEERAALLELWELRRQQYEQCMDLQLFYRDTEQVDNWMSKQEAFLLNEDLGDSLDSVEALLKKHEDFEKSLSAQEEKITALDEFATKLIQNNHYAMEDVATRRDALLSRRNALHERAMRRRAQLADSFHLQQFFRDSDELKSWVNEKMKTATDEAYKDPSNLQGKVQKHQAFEAELSANQSRIDALEKAGQKLIDVNHYAKDEVAARMNEVISLWKKLLEATELKGIKLREANQQQQFNRNVEDIELWLYEVEGHLASDDYGKDLTNVQNLQKKHALLEADVAAHQDRIDGITIQARQFQDAGHFDAENIKKKQEALVARYEALKEPMVARKQKLADSLRLQQLFRDVEDEETWIREKEPIAASTNRGKDLIGVQNLLKKHQALQAEIAGHEPRIKAVTQKVVPGYPGPPLFAA

SEQ ID NO: 865547 - protein, 572 aa, Homo sapiens
RHYPLRSERCGAEAAEAPRSFSTPRPDAPTPLTPREPKMDPSGVKVLETAEDIQERRQQVLDRYHRFKELSTLRRQKLEDSYRFQFFQRDAEELEKWIQEKLQIASDENYKDPTNLQGKLQKHQAFEAEVQANSGAIVKLDETGNLMISEGHFASETIRTRLMELHRQWELLLEKMREKGIKLLQAQKLVQYLRECEDVMDWINDKEAIVTSEELGQDLEHVEVLQKKFEEFQTDMAAHEERVNEVNQFAAKLIQEQHPEEELIKTKQDEVNAAWQRLKGLALQRQGKLFGAAEVQRFNRDVDETISWIKEKEQLMASDDFGRDLASVQALLRKHEGLERDLAALEDKVKALCAEADRLQQSHPLSATQIQVKREELITNWEQIRTLAAERHARLNDSYRLQRFLADFRDLTSWVTEMKALINADELASDVAGAEALLDRHQEHKGEIDAHEDSFKSADESGQALLAAGHYASDEVREKLTVLSEERAALLELWELRRQQYEQCMDLQLFYRDTEQVDNWMSKQEAFLLNEDLGDSLDSVEALLKKHEDFEKSLSAQEEKITVRPLLVSAFK

SEQ ID NO: 865548 - protein, 129 aa, Homo sapiens
METLTSQCILLPTHTHTHLSHMHAYTHTHTHTHTHTYTHTHTRSLSLSLSLSVSVLSVWSGGRGGSSVLQHPSARRTHAPHPPRAERSPHRPRSLPSAGSDFCSSFFRIAPAMPASRRGRKSPGSPSIA

SEQ ID NO: 865549 - protein, 2510 aa, Homo sapiens; identical to SEQ ID NO: 865521

SEQ ID NO: 865550 - protein, 2329 aa, Homo sapiens
GCQVWEDLHLHCCYPESRPANATLSKSGNTFRPEVHLLPPPSEELALNELVTLTCLARGFGPKDVLVRWLQGSQEQHPEEELIKTKQDEVNAAWQRLKGLALQRQGKLFGAAEVQRFNRDVDETISWIKEKEQLMASDDFGRDLASVQALLRKHEGLERDLAALEDKVKALCAEADRLQQSHPLSATQIQVKREELITNWEQIRTLAAERHARLNDSYRLQRFLADFRDLTSWVTEMKALINADELASDVAGAEALLDRHQEHKGEIDAHEDSFKSADESGQALLAAGHYASDEVREKLTVLSEERAALLELWELRRQQYEQCMDLQLFYRDTEQVDNWMSKQEAFLLNEDLGDSLDSVEALLKKHEDFEKSLSAQEEKITALDEFATKLIQNNHYAMEDVATRRDALLSRRNALHERAMRRRAQLADSFHLQQFFRDSDELKSWVNEKMKTATDEAYKDPSNLQGKVQKHQAFEAELSANQSRIDALEKAGQKLIDVNHYAKDEVAARMNEVISLWKKLLEATELKGIKLREANQQQQFNRNVEDIELWLYEVEGHLASDDYGKDLTNVQNLQKKHALLEADVAAHQDRIDGITIQARQFQDAGHFDAENIKKKQEALVARYEALKEPMVARKQKLADSLRLQQLFRDVEDEETWIREKEPIAASTNRGKDLIGVQNLLKKHQALQAEIAGHEPRIKAVTQKGNAMVEEGHFAAEDVKAKLHELNQKWEALKAKASQRRQDLEDSLQAQQYFADANEAESWMREKEPIVGSTDYGKDEDSAEALLKKHEALMSDLSAYGSSIQALREQAQSCRQQVAPTDDETGKELVLALYDYQEKSPREVTMKKGDILTLLNSTNKDWWKVEVNDRQGFVPAAYVKKLDPAQSASRENLLEEQGSIALRQEQIDNQTRITKEAGSVSLRMKQVEELYHSLLELGEKRKGMLEKSCKKFMLFREANELQQWINEKEAALTSEEVGADLEQVEVLQKKFDDFQKDLKANESRLKDINKVAEDLESEGLMAEEVQAVQQQEVYGMMPRDETDSKTASPWKSARLMVHTVATFNSIKELNERWRSLQQLAEERSQLLGSAHEVQRFHRDADETKEWIEEKNQALNTDNYGHDLASVQALQRKHEGFERDLAALGDKVNSLGETAERLIQSHPESAEDLQEKCTELNQAWSSLGKRADQRKAKLGDSHDLQRFLSDFRDLMSWINGIRGLVSSDELAKDVTGAEALLERHQEHRTEIDARAGTFQAFEQFGQQLLAHGHYASPEIKQKLDILDQERADLEKAWVQRRMMLDQCLELQLFHRDCEQAENWMAAREAFLNTEDKGDSLDSVEALIKKHEDFDKAINVQEEKIAALQAFADQLIAAGHYAKGDISSRRNEVLDRWRRLKAQMIEKRSKLGESQTLQQFSRDVDEIEAWISEKLQTASDESYKDPTNIQSKHQKHQAFEAELHANADRIRGVIDMGNSLIERGACAGSEDAVKARLAALADQWQFLVQKSAEKSQKLKEANKQQNFNTGIKDFDFWLSEVEALLASEDYGKDLASVNNLLKKHQLLEADISAHEDRLKDLNSQADSLMTSSAFDTSQVKDKRDTINGRFQKIKSMAASRRAKLNESHRLHQFFRDMDDEESWIKEKKLLVGSEDYGRDLTGVQNLRKKHKRLEAELAAHEPAIQGVLDTGKKLSDDNTIGKEEIQQRLAQFVEHWKELKQLAAARGQRLEESLEYQQFVANVEEEEAWINEKMTLVASEDYGDTLAAIQGLLKKHEAFETDFTVHKDRVNDVCTNGQDLIKKNNHHEENISSKMKGLNGKVSDLEKAAAQRKAKLDENSAFLQFNWKADVVESWIGEKENSLKTDDYGRDLSSVQTLLTKQETFDAGLQAFQQEGIANITALKDQLLAAKHVQSKAIEARHASLMKRWSQLLANSAARKKKLLEAQSHFRKVEDLFLTFAKKASAFNSWFENAEEDLTDPVRCNSLEEIKALREAHDAFRSSLSSAQADFNQLAELDRQIKSFRVASNPYTWFTMEALEETWRNLQKIIKERELELQKEQRRQEENDKLRQEFAQHANAFHQWIQETRTYLLDGSCMVEESGTLESQLEATKRKHQEIRAMRSQLKKIEDLGAAMEEALILDNKYTEHSTVGLAQQWDQLDQLGMRMQHNLEQQIQARNTTGVTEEALKEFSMMFKHFDKDKSGRLNHQEFKSCLRSLGYDLPMVEEGEPDPEFEAILDTVDPNRDGHVSLQEYMAFMISRETENVKSSEEIESAFRALSSEGKPYVTKEELYQNLTREQADYCVSHMKPYVDGKGRELPTAFDYVEFTRSLFVN

SEQ ID NO: 865551 - protein, 2490 aa, Homo sapiens
RHYPLRSERCGAEAAEAPRSFSTPRPDAPTPLTPREPKMDPSGVKVLETAEDIQERRQQVLDRYHRFKELSTLRRQKLEDSYRFQFFQRDAEELEKWIQEKLQIASDENYKDPTNLQGKLQKHQAFEAEVQANSGAIVKLDETGNLMISEGHFASETIRTRLMELHRQWELLLEKMREKGIKLLQAQKLVQYLRECEDVMDWINDKEAIVTSEELGQDLEHVEVLQKKFEEFQTDMAAHEERVNEVNQFAAKLIQEQHPEEELIKTKQDEVNAAWQRLKGLALQRQGKLFGAAEVQRFNRDVDETISWIKEKEQLMASDDFGRDLASVQALLRKHEGLERDLAALEDKVKALCAEADRLQQSHPLSATQIQVKREELITNWEQIRTLAAERHARLNDSYRLQRFLADFRDLTSWVTEMKALINADELASDVAGAEALLDRHQEHKGEIDAHEDSFKSADESGQALLAAGHYASDEVREKLTVLSEERAALLELWELRRQQYEQCMDLQLFYRDTEQVDNWMSKQEAFLLNEDLGDSLDSVEALLKKHEDFEKSLSAQEEKITALDEFATKLIQNNHYAMEDVATRRDALLSRRNALHERAMRRRAQLADSFHLQQFFRDSDELKSWVNEKMKTATDEAYKDPSNLQGKVQKHQAFEAELSANQSRIDALEKAGQKLIDVNHYAKDEVAARMNEVISLWKKLLEATELKGIKLREANQQQQFNRNVEDIELWLYEVEGHLASDDYGKDLTNVQNLQKKHALLEADVAAHQDRIDGITIQARQFQDAGHFDAENIKKKQEALVARYEALKEPMVARKQKLADSLRLQQLFRDVEDEETWIREKEPIAASTNRGKDLIGVQNLLKKHQALQAEIAGHEPRIKAVTQKGNAMVEEGHFAAEDVKAKLHELNQKWEALKAKASQRRQDLEDSLQAQQYFADANEAESWMREKEPIVGSTDYGKDEDSAEALLKKHEALMSDLSAYGSSIQALREQAQSCRQQVAPTDDETGKELVLALYDYQEKSPREVTMKKGDILTLLNSTNKDWWKVEVNDRQGFVPAAYVKKLDPAQSASRENLLEEQGSIALRQEQIDNQYHSLLELGEKRKGMLEKSCKKFMLFREANELQQWINEKEAALTSEEVGADLEQVEVLQKKFDDFQKDLKANESRLKDINKVAEDLESEGLMAEEVQAVQQQEVYGMMPRDETDSKTASPWKSARLMVHTVATFNSIKELNERWRSLQQLAEERSQLLGSAHEVQRFHRDADETKEWIEEKNQALNTDNYGHDLASVQALQRKHEGFERDLAALGDKVNSLGETAERLIQSHPESAEDLQEKCTELNQAWSSLGKRADQRKAKLGDSHDLQRFLSDFRDLMSWINGIRGLVSSDELAKDVTGAEALLERHQEHRTEIDARAGTFQAFEQFGQQLLAHGHYASPEIKQKLDILDQERADLEKAWVQRRMMLDQCLELQLFHRDCEQAENWMAAREAFLNTEDKGDSLDSVEALIKKHEDFDKAINVQEEKIAALQAFADQLIAAGHYAKGDISSRRNEVLDRWRRLKAQMIEKRSKLGESQTLQQFSRDVDEIEAWISEKLQTASDESYKDPTNIQSKHQKHQAFEAELHANADRIRGVIDMGNSLIERGACAGSEDAVKARLAALADQWQFLVQKSAEKSQKLKEANKQQNFNTGIKDFDFWLSEVEALLASEDYGKDLASVNNLLKKHQLLEADISAHEDRLKDLNSQADSLMTSSAFDTSQVKDKRDTINGRFQKIKSMAASRRAKLNESHRLHQFFRDMDDEESWIKEKKLLVGSEDYGRDLTGVQNLRKKHKRLEAELAAHEPAIQGVLDTGKKLSDDNTIGKEEIQQRLAQFVEHWKELKQLAAARGQRLEESLEYQQFVANVEEEEAWINEKMTLVASEDYGDTLAAIQGLLKKHEAFETDFTVHKDRVNDVCTNGQDLIKKNNHHEENISSKMKGLNGKVSDLEKAAAQRKAKLDENSAFLQFNWKADVVESWIGEKENSLKTDDYGRDLSSVQTLLTKQETFDAGLQAFQQEGIANITALKDQLLAAKHVQSKAIEARHASLMKRWSQLLANSAARKKKLLEAQSHFRKVEDLFLTFAKKASAFNSWFENAEEDLTDPVRCNSLEEIKALREAHDAFRSSLSSAQADFNQLAELDRQIKSFRVASNPYTWFTMEALEETWRNLQKIIKERELELQKEQRRQEENDKLRQEFAQHANAFHQWIQETRTYLLDGSCMVEESGTLESQLEATKRKHQEIRAMRSQLKKIEDLGAAMEEALILDNKYTEHSTVGLAQQWDQLDQLGMRMQHNLEQQIQARNTTGVTEEALKEFSMMFKHFDKDKSGRLNHQEFKSCLRSLGYDLPMVEEGEPDPEFEAILDTVDPNRDGHVSLQEYMAFMISRETENVKSSEEIESAFRALSSEGKPYVTKEELYQNLTREQADYCVSHMKPYVDGKGRELPTAFDYVEFTRSLFVN

SEQ ID NO: 865552 - protein, 2892 aa, Homo sapiens
RHYPLRSERCGAEAAEAPRSFSTPRPDAPTPLTPREPKMDPSGVKVLETAEDIQERRQQVLDRYHRFKELSTLRRQKLEDSYRFQFFQRDAEELEKWIQEKLQIASDENYKDPTNLQGKLQKHQAFEAEVQANSGAIVKLDETGNLMISEGHFASETIRTRLMELHRQWELLLEKMREKGIKLLQAQKLVQYLRECEDVMDWINDKEAIVTSEELGQDLEHVEVLQKKFEEFQTDMAAHEERVNEVNQFAAKLIQEQHPEEELIKTKQDEVNAAWQRLKGLALQRQGKLFGAAEVQRFNRDVDETISWIKEKEQLMASDDFGRDLASVQALLRKHEGLERDLAALEDKVKALCAEADRLQQSHPLSATQIQVKREELITNWEQIRTLAAERHARLNDSYRLQRFLADFRDLTSWVTEMKALINADELASDVAGAEALLDRHQEHKGEIDAHEDSFKSADESGQALLAAGHYASDEVREKLTVLSEERAALLELWELRRQQYEQCMDLQLFYRDTEQVDNWMSKQEAFLLNEDLGDSLDSVEALLKKHEDFEKSLSAQEEKITALDEFATKLIQNNHYAMEDVATRRDALLSRRNALHERAMRRRAQLADSFHLQQFFRDSDELKSWVNEKMKTATDEAYKDPSNLQGKVQKHQAFEAELSANQSRIDALEKAGQKLIDVNHYAKDEVAARMNEVISLWKKLLEATELKGIKLREANQQQQFNRNVEDIELWLYEVEGHLASDDYGKDLTNVQNLQKKHALLEADVAAHQDRIDGITIQARQFQDAGHFDAENIKKKQEALVARYEALKEPMVARKQKLADSLRLQQLFRDVEDEETWIREKEPIAASTNRGKDLIGVQNLLKKHQALQAEIAGHEPRIKAVTQKGNAMVEEGHFAAEDVKAKLHELNQKWEALKAKASQRRQDLEDSLQAQQYFADANEAESWMREKEPIVGSTDYGKDEDSAEALLKKHEALMSDLSAYGSSIQALREQAQSCRQQVAPTDDETGKELVLALYDYQEKSPREVTMKKGDILTLLNSTNKDWWKVEVNDRQGFVPAAYVKKLDPAQSASRENLLEEQGSIALRQEQIDNQTRITKEAGSVSLRMKQVEELLSRLRVLQSTNVHCYPIHSPSAASLEGLCPSRKMRWWEELPVRAAALAHKGRGRGAAVSVDDCLSHWLLPCAAVCSEWCWFSLLLVFVVDQPLSAANLKACSIVFLSRKEIICFSESALILGNSLLFYFTLGHLDLMMILVFFNFSFLLFVVFVFKDNISAFLYFSSRGLEYSLILKKSFKYTEWHRYSVLCLIFLLNLPKLSESWMYHFRNVLLIWRYNILYEDILKLSVPSPTSPQPGGSSENYKRQKNPLYTFCPASSSRLSTELHEPCVTVLSAWFQSLVVVLFKCRIGLGISVPGCSSHLVVNSTVCAYLSGCGVGTWDPRLHLITLLLGHHHYKLVAWNPHLGDTSWFAFMLDLQLTAFLVPLVTLLNSIRYHSLLELGEKRKGMLEKSCKKFMLFREANELQQWINEKEAALTSEEVGADLEQVEVLQKKFDDFQKDLKANESRLKDINKVAEDLESEGLMAEEVQAVQQQEVYGMMPRDETDSKTASPWKSARLMVHTVATFNSIKELNERWRSLQQLAEERSQLLGSAHEVQRFHRDADETKEWIEEKNQALNTDNYGHDLASVQALQRKHEGFERDLAALGDKVNSLGETAERLIQSHPESAEDLQEKCTELNQAWSSLGKRADQRKAKLGDSHDLQRFLSDFRDLMSWINGIRGLVSSDELAKDVTGAEALLERHQEHRTEIDARAGTFQAFEQFGQQLLAHGHYASPEIKQKLDILDQERADLEKAWVQRRMMLDQCLELQLFHRDCEQAENWMAAREAFLNTEDKGDSLDSVEALIKKHEDFDKAINVQEEKIAALQAFADQLIAAGHYAKGDISSRRNEVLDRWRRLKAQMIEKRSKLGESQTLQQFSRDVDEIEAWISEKLQTASDESYKDPTNIQAFQVLSKHQKHQAFEAELHANADRIRGVIDMGNSLIERGACAGSEDAVKARLAALADQWQFLVQKSAEKSQKLKEANKQQNFNTGIKDFDFWLSEVEALLASEDYGKDLASVNNLLKKHQLLEADISAHEDRLKDLNSQADSLMTSSAFDTSQVKDKRDTINGRFQKIKSMAASRRAKLNESHRLHQFFRDMDDEESWIKEKKLLVGSEDYGRDLTGVQNLRKKHKRLEAELAAHEPAIQGVLDTGKKLSDDNTIGKEEIQQRLAQFVEHWKELKQLAAARGQRLEESLEYQQFVANVEEEEAWINEKMTLVASEDYGDTLAAIQGLLKKHEAFETDFTVHKDRVNDVCTNGQDLIKKNNHHEENISSKMKGLNGKVSDLEKAAAQRKAKLDENSAFLQFNWKADVVESWIGEKENSLKTDDYGRDLSSVQTLLTKQETFDAGLQAFQQEGIANITALKDQLLAAKHVQSKAIEARHASLMKRWSQLLANSAARKKKLLEAQSHFRKVEDLFLTFAKKASAFNSWFENAEEDLTDPVRCNSLEEIKALREAHDAFRSSLSSAQADFNQLAELDRQIKSFRVASNPYTWFTMEALEETWRNLQKIIKERELELQKEQRRQEENDKLRQEFAQHANAFHQWIQETRTYLLDGSCMVEESGTLESQLEATKRKHQEIRAMRSQLKKIEDLGAAMEEALILDNKYTEHSTVGLAQQWDQLDQLGMRMQHNLEQQIQARNTTGVTEEALKEFSMMFKHFDKDKSGRLNHQEFKSCLRSLGYDLPMVEEGEPDPEFEAILDTVDPNRDGHVSLQEYMAFMISRETENVKSSEEIESAFRALSSEGKPYVTKEELYQNLTREQADYCVSHMKPYVDGKGRELPTAFDYVEFTRSLFVN

SEQ ID NO: 865553 - protein, 1537 aa, Homo sapiens
CTLHAAVALRPPRLLDLQQVAPTDDETGKELVLALYDYQEKSPREVTMKKGDILTLLNSTNKDWWKVEVNDRQGFVPAAYVKKLDPAQSASRENLLEEQGSIALRQEQIDNQTRITKEAGSVSLRMKQVEELYHSLLELGEKRKGMLEKSCKKFMLFREANELQQWINEKEAALTSEEVGADLEQVEVLQKKFDDFQKDLKANESRLKDINKVAEDLESEGLMAEEVQAVQQQEVYGMMPRDETDSKTASPWKSARLMVHTVATFNSIKELNERWRSLQQLAEERSQLLGSAHEVQRFHRDADETKEWIEEKNQALNTDNYGHDLASVQALQRKHEGFERDLAALGDKVNSLGETAERLIQSHPESAEDLQEKCTELNQAWSSLGKRADQRKAKLGDSHDLQRFLSDFRDLMSWINGIRGLVSSDELAKDVTGAEALLERHQEHRTEIDARAGTFQAFEQFGQQLLAHGHYASPEIKQKLDILDQERADLEKAWVQRRMMLDQCLELQLFHRDCEQAENWMAAREAFLNTEDKGDSLDSVEALIKKHEDFDKAINVQEEKIAALQAFADQLIAAGHYAKGDISSRRNEVLDRWRRLKAQMIEKRSKLGESQTLQQFSRDVDEIEAWISEKLQTASDESYKDPTNIQAFQVLSKHQKHQAFEAELHANADRIRGVIDMGNSLIERGACAGSEDAVKARLAALADQWQFLVQKSAEKSQKLKEANKQQNFNTGIKDFDFWLSEVEALLASEDYGKDLASVNNLLKKHQLLEADISAHEDRLKDLNSQADSLMTSSAFDTSQVKDKRDTINGRFQKIKSMAASRRAKLNESHRLHQFFRDMDDEESWIKEKKLLVGSEDYGRDLTGVQNLRKKHKRLEAELAAHEPAIQGVLDTGKKLSDDNTIGKEEIQQRLAQFVEHWKELKQLAAARGQRLEESLEYQQFVANVEEEEAWINEKMTLVASEDYGDTLAAIQGLLKKHEAFETDFTVHKDRVNDVCTNGQDLIKKNNHHEENISSKMKGLNGKVSDLEKAAAQRKAKLDENSAFLQFNWKADVVESWIGEKENSLKTDDYGRDLSSVQTLLTKQETFDAGLQAFQQEGIANITALKDQLLAAKHVQSKAIEARHASLMKRWSQLLANSAARKKKLLEAQSHFRKVEDLFLTFAKKASAFNSWFENAEEDLTDPVRCNSLEEIKALREAHDAFRSSLSSAQADFNQLAELDRQIKSFRVASNPYTWFTMEALEETWRNLQKIIKERELELQKEQRRQEENDKLRQEFAQHANAFHQWIQETRTYLLDGSCMVEESGTLESQLEATKRKHQEIRAMRSQLKKIEDLGAAMEEALILDNKYTEHSTVGLAQQWDQLDQLGMRMQHNLEQQIQARNTTGVTEEALKEFSMMFKHFDKDKSGRLNHQEFKSCLRSLGYDLPMVEEGEPDPEFEAILDTVDPNRDGHVSLQEYMAFMISRETENVKSSEEIESAFRALSSEGKPYVTKEELYQNLTREQADYCVSHMKPYVDGKGRELPTAFDYVEFTRSLFVN

SEQ ID NO: 865554 - protein, 1257 aa, Homo sapiens
MDDEESWIKEKKLLVGSEDYGRDLTGVQNLRKKHKRLEAELAAHEPAVQALQRKHEGFERDLAALGDKVNSLGETAERLIQSHPESAEDLQEKCTELNQAWSSLGKRADQRKAKLGDSHDLQRFLSDFRDLMSWINGIRGLVSSDELAKDVTGAEALLERHQEHRTEIDARAGTFQAFEQFGQQLLAHGHYASPEIKQKLDILDQERADLEKAWVQRRMMLDQCLELQLFHRDCEQAENWMAAREAFLNTEDKGDSLDSVEALIKKHEDFDKAINVQEEKIAALQAFADQLIAAGHYAKGDISSRRNEVLDRWRRLKAQMIEKRSKLGESQTLQQFSRDVDEIEAWISEKLQTASDESYKDPTNIQAFQVLSKHQKHQAFEAELHANADRIRGVIDMGNSLIERGACAGSEDAVKARLAALADQWQFLVQKSAEKSQKLKEANKQQNFNTGIKDFDFWLSEVEALLASEDYGKDLASVNNLLKKHQLLEADISAHEDRLKDLNSQADSLMTSSAFDTSQVKDKRDTINGRFQKIKSMAASRRAKLNESHRLHQFFRDMDDEESWIKEKKLLVGSEDYGRDLTGVQNLRKKHKRLEAELAAHEPAIQGVLDTGKKLSDDNTIGKEEIQQRLAQFVEHWKELKQLAAARGQRLEESLEYQQFVANVEEEEAWINEKMTLVASEDYGDTLAAIQGLLKKHEAFETDFTVHKDRVNDVCTNGQDLIKKNNHHEENISSKMKGLNGKVSDLEKAAAQRKAKLDENSAFLQFNWKADVVESWIGEKENSLKTDDYGRDLSSVQTLLTKQETFDAGLQAFQQEGIANITALKDQLLAAKHVQSKAIEARHASLMKRWSQLLANSAARKKKLLEAQSHFRKVEDLFLTFAKKASAFNSWFENAEEDLTDPVRCNSLEEIKALREAHDAFRSSLSSAQADFNQLAELDRQIKSFRVASNPYTWFTMEALEETWRNLQKIIKERELELQKEQRRQEENDKLRQEFAQHANAFHQWIQETRTYLLDGSCMVEESGTLESQLEATKRKHQEIRAMRSQLKKIEDLGAAMEEALILDNKYTEHSTVGLAQQWDQLDQLGMRMQHNLEQQIQARNTTGVTEEALKEFSMMFKHFDKDKSGRLNHQEFKSCLRSLGYDLPMVEEGEPDPEFEAILDTVDPNRDGHVSLQEYMAFMISRETENVKSSEEIESAFRALSSEGKPYVTKEELYQNLTREQADYCVSHMKPYVDGKGRELPTAFDYVEFTRSLFVN

SEQ ID NO: 865555 - protein, 1101 aa, Homo sapiens
MDDEESWIKEKKLLVGSEDYGRDLTGVQNLRKKHKRLEAELAAHEPAIQGVLDTGKKLSDDNTIGKEEIQQRLAQFVEHWKELKQLAAARGQRLEESLEYQQFVANVEEEEAWINEKMTLVASEDYGDTLAAIQGLLKKHEAFETDFTVHKDRVNDVCTNGQDLIKKRSKLGESQTLQQFSRDVDEIEAWISEKLQTASDESYKDPTNIQAFQVLSKHQKHQAFEAELHANADRIRGVIDMGNSLIERGACAGSEDAVKARLAALADQWQFLVQKSAEKSQKLKEANKQQNFNTGIKDFDFWLSEVEALLASEDYGKDLASVNNLLKKHQLLEADISAHEDRLKDLNSQADSLMTSSAFDTSQVKDKRDTINGRFQKIKSMAASRRAKLNESHRLHQFFRDMDDEESWIKEKKLLVGSEDYGRDLTGVQNLRKKHKRLEAELAAHEPAIQGVLDTGKKLSDDNTIGKEEIQQRLAQFVEHWKELKQLAAARGQRLEESLEYQQFVANVEEEEAWINEKMTLVASEDYGDTLAAIQGLLKKHEAFETDFTVHKDRVNDVCTNGQDLIKKNNHHEENISSKMKGLNGKVSDLEKAAAQRKAKLDENSAFLQFNWKADVVESWIGEKENSLKTDDYGRDLSSVQTLLTKQETFDAGLQAFQQEGIANITALKDQLLAAKHVQSKAIEARHASLMKRWSQLLANSAARKKKLLEAQSHFRKVEDLFLTFAKKASAFNSWFENAEEDLTDPVRCNSLEEIKALREAHDAFRSSLSSAQADFNQLAELDRQIKSFRVASNPYTWFTMEALEETWRNLQKIIKERELELQKEQRRQEENDKLRQEFAQHANAFHQWIQETRTYLLDGSCMVEESGTLESQLEATKRKHQEIRAMRSQLKKIEDLGAAMEEALILDNKYTEHSTVGLAQQWDQLDQLGMRMQHNLEQQIQARNTTGVTEEALKEFSMMFKHFDKDKSGRLNHQEFKSCLRSLGYDLPMVEEGEPDPEFEAILDTVDPNRDGHVSLQEYMAFMISRETENVKSSEEIESAFRALSSEGKPYVTKEELYQNLTREQADYCVSHMKPYVDGKGRELPTAFDYVEFTRSLFVN

SEQ ID NO: 865556 - protein, 861 aa, Homo sapiens
MGNSLIERGACAGSEDAVKARLAALADQWQFLVQKSAEKSQKLKEANKQQNFNTGIKDFDFWLSEVEALLASEDYGKDLASVNNLLKKHQLLEADISAHEDRLKDLNSQADSLMTSSAFDTSQVKDKRDTINGRFQKIKSMAASRRAKLNESHRLHQFFRDMDDEESWIKEKKLLVGSEDYGRDLTGVQNLRKKHKRLEAELAAHEPAIQGVLDTGKKLSDDNTIGKEEIQQRLAQFVEHWKELKQLAAARGQRLEESLEYQQFVANVEEEEAWINEKMTLVASEDYGDTLAAIQGLLKKHEAFETDFTVHKDRVNDVCTNGQDLIKKNNHHEENISSKMKGLNGKVSDLEKAAAQRKAKLDENSAFLQFNWKADVVESWIGEKENSLKTDDYGRDLSSVQTLLTKQETFDAGLQAFQQEGIANITALKDQLLAAKHVQSKAIEARHASLMKRWSQLLANSAARKKKLLEAQSHFRKVEDLFLTFAKKASAFNSWFENAEEDLTDPVRCNSLEEIKALREAHDAFRSSLSSAQADFNQLAELDRQIKSFRVASNPYTWFTMEALEETWRNLQKIIKERELELQKEQRRQEENDKLRQEFAQHANAFHQWIQETRTYLLDGSCMVEESGTLESQLEATKRKHQEIRAMRSQLKKIEDLGAAMEEALILDNKYTEHSTVGLAQQWDQLDQLGMRMQHNLEQQIQARNTTGVTEEALKEFSMMFKHFDKDKSGRLNHQEFKSCLRSLGYDLPMVEEGEPDPEFEAILDTVDPNRDGHVSLQEYMAFMISRETENVKSSEEIESAFRALSSEGKPYVTKEELYQNLTREQADYCVSHMKPYVDGKGRELPTAFDYVEFTRSLFVN

SEQ ID NO: 865557 - protein, 887 aa, Homo sapiens
MGNASENGSYECFPFSSLRSSQIEALGEGRFFIDFISFWLPSVPQARLAALADQWQFLVQKSAEKSQKLKEANKQQNFNTGIKDFDFWLSEVEALLASEDYGKDLASVNNLLKKHQLLEADISAHEDRLKDLNSQADSLMTSSAFDTSQVKDKRDTINGRFQKIKSMAASRRAKLNESHRLHQFFRDMDDEESWIKEKKLLVGSEDYGRDLTGVQNLRKKHKRLEAELAAHEPAIQGVLDTGKKLSDDNTIGKEEIQQRLAQFVEHWKELKQLAAARGQRLEESLEYQQFVANVEEEEAWINEKMTLVASEDYGDTLAAIQGLLKKHEAFETDFTVHKDRVNDVCTNGQDLIKKNNHHEENISSKMKGLNGKVSDLEKAAAQRKAKLDENSAFLQFNWKADVVESWIGEKENSLKTDDYGRDLSSVQTLLTKQETFDAGLQAFQQEGIANITALKDQLLAAKHVQSKAIEARHASLMKRWSQLLANSAARKKKLLEAQSHFRKVEDLFLTFAKKASAFNSWFENAEEDLTDPVRCNSLEEIKALREAHDAFRSSLSSAQADFNQLAELDRQIKSFRVASNPYTWFTMEALEETWRNLQKIIKERELELQKEQRRQEENDKLRQEFAQHANAFHQWIQETRTYLLDGSCMVEESGTLESQLEATKRKHQEIRAMRSQLKKIEDLGAAMEEALILDNKYTEHSTVGLAQQWDQLDQLGMRMQHNLEQQIQARNTTGVTEEALKEFSMMFKHFDKDKSGRLNHQEFKSCLRSLGYDLPMVEEGEPDPEFEAILDTVDPNRDGHVSLQEYMAFMISRETENVKSSEEIESAFRALSSEGKPYVTKEELYQNLTREQADYCVSHMKPYVDGKGRELPTAFDYVEFTRSLFVN

SEQ ID NO: 865558 - protein, 762 aa, Homo sapiens
MVSDDPCSDQADSLMTSSAFDTSQVKDKRDTINGRFQKIKSMAASRRAKLNESHRLHQFFRDMDDEESWIKEKKLLVGSEDYGRDLTGVQNLRKKHKRLEAELAAHEPAIQGVLDTGKKLSDDNTIGKEEIQQRLAQFVEHWKELKQLAAARGQRLEESLEYQQFVANVEEEEAWINEKMTLVASEDYGDTLAAIQGLLKKHEAFETDFTVHKDRVNDVCTNGQDLIKKNNHHEENISSKMKGLNGKVSDLEKAAAQRKAKLDENSAFLQFNWKADVVESWIGEKENSLKTDDYGRDLSSVQTLLTKQETFDAGLQAFQQEGIANITALKDQLLAAKHVQSKAIEARHASLMKRWSQLLANSAARKKKLLEAQSHFRKVEDLFLTFAKKASAFNSWFENAEEDLTDPVRCNSLEEIKALREAHDAFRSSLSSAQADFNQLAELDRQIKSFRVASNPYTWFTMEALEETWRNLQKIIKERELELQKEQRRQEENDKLRQEFAQHANAFHQWIQETRTYLLDGSCMVEESGTLESQLEATKRKHQEIRAMRSQLKKIEDLGAAMEEALILDNKYTEHSTVGLAQQWDQLDQLGMRMQHNLEQQIQARNTTGVTEEALKEFSMMFKHFDKDKSGRLNHQEFKSCLRSLGYDLPMVEEGEPDPEFEAILDTVDPNRDGHVSLQEYMAFMISRETENVKSSEEIESAFRALSSEGKPYVTKEELYQNLTREQADYCVSHMKPYVDGKGRELPTAFDYVEFTRSLFVN

SEQ ID NO: 865559 - protein, 780 aa, Homo sapiens
MKGDHHGQIYLLQQLMLFQQVVHRSQVLPESSDASSAFDTSQVKDKRDTINGRFQKIKSMAASRRAKLNESHRLHQFFRDMDDEESWIKEKKLLVGSEDYGRDLTGVQNLRKKHKRLEAELAAHEPAIQGVLDTGKKLSDDNTIGKEEIQQRLAQFVEHWKELKQLAAARGQRLEESLEYQQFVANVEEEEAWINEKMTLVASEDYGDTLAAIQGLLKKHEAFETDFTVHKDRVNDVCTNGQDLIKKNNHHEENISSKMKGLNGKVSDLEKAAAQRKAKLDENSAFLQFNWKADVVESWIGEKENSLKTDDYGRDLSSVQTLLTKQETFDAGLQAFQQEGIANITALKDQLLAAKHVQSKAIEARHASLMKRWSQLLANSAARKKKLLEAQSHFRKVEDLFLTFAKKASAFNSWFENAEEDLTDPVRCNSLEEIKALREAHDAFRSSLSSAQADFNQLAELDRQIKSFRVASNPYTWFTMEALEETWRNLQKIIKERELELQKEQRRQEENDKLRQEFAQHANAFHQWIQETRTYLLDGSCMVEESGTLESQLEATKRKHQEIRAMRSQLKKIEDLGAAMEEALILDNKYTEHSTVGLAQQWDQLDQLGMRMQHNLEQQIQARNTTGVTEEALKEFSMMFKHFDKDKSGRLNHQEFKSCLRSLGYDLPMVEEGEPDPEFEAILDTVDPNRDGHVSLQEYMAFMISRETENVKSSEEIESAFRALSSEGKPYVTKEELYQNLTREQADYCVSHMKPYVDGKGRELPTAFDYVEFTRSLFVN

SEQ ID NO: 865560 - protein, 2518 aa, Homo sapiens
RHYPLRSERCGAEAAEAPRSFSTPRPDAPTPLTPREPKMDPSGVKVLETAEDIQERRQQVLDRYHRFKELSTLRRQKLEDSYRFQFFQRDAEELEKWIQEKLQIASDENYKDPTNLQGKLQKHQAFEAEVQANSGAIVKLDETGNLMISEGHFASETIRTRLMELHRQWELLLEKMREKGIKLLQAQKLVQYLRECEDVMDWINDKEAIVTSEELGQDLEHVEVLQKKFEEFQTDMAAHEERVNEVNQFAAKLIQEQHPEEELIKTKQDEVNAAWQRLKGLALQRQGKLFGAAEVQRFNRDVDETISWIKEKEQLMASDDFGRDLASVQALLRKHEGLERDLAALEDKVKALCAEADRLQQSHPLSATQIQVKREELITNWEQIRTLAAERHARLNDSYRLQRFLADFRDLTSWVTEMKALINADELASDVAGAEALLDRHQEHKGEIDAHEDSFKSADESGQALLAAGHYASDEVREKLTVLSEERAALLELWELRRQQYEQCMDLQLFYRDTEQVDNWMSKQEAFLLNEDLGDSLDSVEALLKKHEDFEKSLSAQEEKITALDEFATKLIQNNHYAMEDVATRRDALLSRRNALHERAMRRRAQLADSFHLQQFFRDSDELKSWVNEKMKTATDEAYKDPSNLQGKVQKHQAFEAELSANQSRIDALEKAGQKLIDVNHYAKDEVAARMNEVISLWKKLLEATELKGIKLREANQQQQFNRNVEDIELWLYEVEGHLASDDYGKDLTNVQNLQKKHALLEADVAAHQDRIDGITIQARQFQDAGHFDAENIKKKQEALVARYEALKEPMVARKQKLADSLRLQQLFRDVEDEETWIREKEPIAASTNRGKDLIGVQNLLKKHQALQAEIAGHEPRIKAVTQKGNAMVEEGHFAAEDVKAKLHELNQKWEALKAKASQRRQDLEDSLQAQQYFADANEAESWMREKEPIVGSTDYGKDEDSAEALLKKHEALMSDLSAYGSSIQALREQAQSCRQQVAPTDDETGKELVLALYDYQEKSPREVTMKKGDILTLLNSTNKDWWKVEVNDRQGFVPAAYVKKLDPAQSASRENLLEEQGSIALRQEQIDNQTRITKEAGSVSLRMKQVEELYHSLLELGEKRKGMLEKSCKKFMLFREANELQQWINEKEAALTSEEVGADLEQVEVLQKKFDDFQKDLKANESRLKDINKVAEDLESEGLMAEEVQAVQQQEVYGMMPRDETDSKTASPWKSARLMVHTVATFNSIKELNERWRSLQQLAEERSQLLGSAHEVQRFHRDADETKEWIEEKNQALNTDNYGHDLASVQALQRKHEGFERDLAALGDKVNSLGETAERLIQSHPESAEDLQEKCTELNQAWSSLGKRADQRKAKLGDSHDLQRFLSDFRDLMSWINGIRGLVSSDELAKDVTGAEALLERHQEHRTEIDARAGTFQAFEQFGQQLLAHGHYASPEIKQKLDILDQERADLEKAWVQRRMMLDQCLELQLFHRDCEQAENWMAAREAFLNTEDKGDSLDSVEALIKKHEDFDKAINVQEEKIAALQAFADQLIAAGHYAKGDISSRRNEVLDRWRRLKAQMIEKRSKLGESQTLQQFSRDVDEIEAWISEKLQTASDESYKDPTNIQSKHQKHQAFEAELHANADRIRGVIDMGNSLIERGACAGSEDAVKARLAALADQWQFLVQKSAEKSQKLKEANKQQNFNTGIKDFDFWLSEVEALLASEDYGKDLASVNNLLKKHQLLEADISAHEDRLKDLNSQADSLMTSSAFDTSQVKDKRDTINGRFQKIKSMAASRRAKLNESHRLHQFFRDMDDEESWIKEKKLLVGSEDYGRDLTGVQNLRKKHKRLEAELAAHEPAIQGVLDTGKKLSDDNTIGKEEIQQRLAQFVEHWKELKQLAAARGQRLEESLEYQQFVANVEEEEAWINEKMTLVASEDYGDTLAAIQGLLKKHEAFETDFTVHKDRVNDVCTNGQDLIKKNNHHEENISSKMKGLNGKVSDLEKAAAQRKAKLDENSAFLQFNWKADVVESWIGEKENSLKTDDYGRDLSSVQTLLTKQETFDAGLQAFQQEGIANITALKDQLLAAKHVQSKAIEARHASLMKRWSQLLANSAARKKKLLEAQSHFRKVEDLFLTFAKKASAFNSWFENAEEDLTDPVRCNSLEEIKALREAHDAFRSSLSSAQADFNQLAELDRQIKSFRVASNPYTWFTMEALEETWRNLQKIIKERELELQKEQRRQEENDKLRQEFAQHANAFHQWIQETRTYLLDGSCMVEESGTLESQLEATKRKHQEIRAMRSQLKKIEDLGAAMEEALILDNKYTEHSTVGLAQQWDQLDQLGMRMQHNLEQQIQARNTTGVTEEALKEFSMMFKHFDKDKSGRLNHQEFKSCLRSLGYDLPMVEEGEPDPEFEAILDTVDPNRDGHVSLQEYMAFMISRETENVKSSEEIESAFRALSSEGKPYVTKEELYQNLTREQADYCVSHMKPYVSGHVAGHVPVLFPMLLNMLIFFTIDPQCLNM

SEQ ID NO: 865561 - protein, 437 aa, Homo sapiens
NDGPQLNDGPQLNDGPQLNDGPQLNDGPQLNDGPQLNDGPQLNDGPQLESLPKVEDLFLTFAKKASAFNSWFENAEEDLTDPVRCNSLEEIKALREAHDAFRSSLSSAQADFNQLAELDRQIKSFRVASNPYTWFTMEALEETWRNLQKIIKERELELQKEQRRQEENDKLRQEFAQHANAFHQWIQETRTYLLDGSCMVEESGTLESQLEATKRKHQEIRAMRSQLKKIEDLGAAMEEALILDNKYTEHSTVGLAQQWDQLDQLGMRMQHNLEQQIQARNTTGVTEEALKEFSMMFKHFDKDKSGRLNHQEFKSCLRSLGYDLPMVEEGEPDPEFEAILDTVDPNRDGHVSLQEYMAFMISRETENVKSSEEIESAFRALSSEGKPYVTKEELYQNLTREQADYCVSHMKPYVDGKGRELPTAFDYVEFTRSLFVN

SEQ ID NO: 865562 - protein, 215 aa, Homo sapiens
MRSQLKKIEDLGAAMEEALILDNKYTEHSTVGLAQQWDQLDQLGMRMQHNLEQQIQARNTTGVTEEALKEFSMMFKHFDKDKSGRLNHQEFKSCLRSLGYDLPMVEEGEPDPEFEAILDTVDPNRDGHVSLQEYMAFMISRETENVKSSEEIESAFRALSSEGKPYVTKEELYQNLTREQADYCVSHMKPYVDGKGRELPTAFDYVEFTRSLFVN

SEQ ID NO: 865563 - protein, 2188 aa, Homo sapiens
RHYPLRSERCGAEAAEAPRSFSTPRPDAPTPLTPREPKMDPSGVKVLETAEDIQERRQQVLDRYHRFKELSTLRRQKLEDSYRFQFFQRDAEELEKWIQEKLQIASDENYKDPTNLQGKLQKHQAFEAEVQANSGAIVKLDETGNLMISEGHFASETIRTRLMELHRQWELLLEKMREKGIKLLQAQKLVQYLRECEDVMDWINDKEAIVTSEELGQDLEHVEVLQKKFEEFQTDMAAHEERVNEVNQFAAKLIQEQHPEEELIKTKQDEVNAAWQRLKGLALQRQGKLFGAAEVQRFNRDVDETISWIKEKEQLMASDDFGRDLASVQALLRKHEGLERDLAALEDKVKALCAEADRLQQSHPLSATQIQVKREELITNWEQIRTLAAERHARLNDSYRLQRFLADFRDLTSWVTEMKALINADELASDVAGAEALLDRHQEHKGEIDAHEDSFKSADESGQALLAAGHYASDEVREKLTVLSEERAALLELWELRRQQYEQCMDLQLFYRDTEQVDNWMSKQEAFLLNEDLGDSLDSVEALLKKHEDFEKSLSAQEEKITALDEFATKLIQNNHYAMEDVATRRDALLSRRNALHERAMRRRAQLADSFHLQQFFRDSDELKSWVNEKMKTATDEAYKDPSNLQGKVQKHQAFEAELSANQSRIDALEKAGQKLIDVNHYAKDEVAARMNEVISLWKKLLEATELKGIKLREANQQQQFNRNVEDIELWLYEVEGHLASDDYGKDLTNVQNLQKKHALLEADVAAHQDRIDGITIQARQFQDAGHFDAENIKKKQEALVARYEALKEPMVARKQKLADSLRLQQLFRDVEDEETWIREKEPIAASTNRGKDLIGVQNLLKKHQALQAEIAGHEPRIKAVTQKGNAMVEEGHFAAEDVKAKLHELNQKWEALKAKASQRRQDLEDSLQAQQYFADANEAESWMREKEPIVGSTDYGKDEDSAEALLKKHEALMSDLSAYGSSIQALREQAQSCRQQVAPTDDETGKELVLALYDYQEKSPREVTMKKGDILTLLNSTNKDWWKVEVNDRQGFVPAAYVKKLDPAQSASRENLLEEQGSIALRQEQIDNQTRITKEAGSVSLRMKQVEELYHSLLELGEKRKGMLEKSCKKFMLFREANELQQWINEKEAALTSEEVGADLEQVEVLQKKFDDFQKDLKANESRLKDINKVAEDLESEGLMAEEVQAVQQQEVYGMMPRDETDSKTASPWKSARLMVHTVATFNSIKELNERWRSLQQLAEERSQLLGSAHEVQRFHRDADETKEWIEEKNQALNTDNYGHDLASVQALQRKHEGFERDLAALGDKVNSLGETAERLIQSHPESAEDLQEKCTELNQAWSSLGKRADQRKAKLGDSHDLQRFLSDFRDLMSWINGIRGLVSSDELAKDVTGAEALLERHQEHRTEIDARAGTFQAFEQFGQQLLAHGHYASPEIKQKLDILDQERADLEKAWVQRRMMLDQCLELQLFHRDCEQAENWMAAREAFLNTEDKGDSLDSVEALIKKHEDFDKAINVQEEKIAALQAFADQLIAAGHYAKGDISSRRNEVLDRWRRLKAQMIEKRSKLGESQTLQQFSRDVDEIEAWISEKLQTASDESYKDPTNIQSKHQKHQAFEAELHANADRIRGVIDMGNSLIERGACAGSEDAVKARLAALADQWQFLVQKSAEKSQKLKEANKQQNFNTGIKDFDFWLSEVEALLASEDYGKDLASVNNLLKKHQLLEADISAHEDRLKDLNSQADSLMTSSAFDTSQVKDKRDTINGRFQKIKSMAASRRAKLNESHRLHQFFRDMDDEESWIKEKKLLVGSEDYGRDLTGVQNLRKKHKRLEAELAAHEPAIQGVLDTGKKLSDDNTIGKEEIQQRLAQFVEHWKELKQLAAARGQRLEESLEYQQFVANVEEEEAWINEKMTLVASEDYGDTLAAIQGLLKKHEAFETDFTVHKDRVNDVCTNGQDLIKKNNHHEENISSKMKGLNGKVSDLEKAAAQRKAKLDENSAFLQFNWKADVVESWIGEKENSLKTDDYGRDLSSVQTLLTKQETFDAGLQAFQQEGIANITALKDQLLAAKHVQSKAIEARHASLMKRWSQLLANSAARKKKLLEAQSHFRKVEDLFLTFAKKASAFNSWFENAEEDLTDPVRCNSLEEIKALREAHDAFRSSLSSAPELTARP

SEQ ID NO: 865564 - protein, 143 aa, Homo sapiens
MMFKHFDKDKSGRLNHQEFKSCLRSLGYDLPMVEEGEPDPEFEAILDTVDPNRDGHVSLQEYMAFMISRETENVKSSEEIESAFRALSSEGKPYVTKEELYQNLTREQADYCVSHMKPYVDGKGRELPTAFDYVEFTRSLFVN

SEQ ID NO: 865565 - protein, 2080 aa, Homo sapiens
RHYPLRSERCGAEAAEAPRSFSTPRPDAPTPLTPREPKMDPSGVKVLETAEDIQERRQQVLDRYHRFKELSTLRRQKLEDSYRFQFFQRDAEELEKWIQEKLQIASDENYKDPTNLQGKLQKHQAFEAEVQANSGAIVKLDETGNLMISEGHFASETIRTRLMELHRQWELLLEKMREKGIKLLQAQKLVQYLRECEDVMDWINDKEAIVTSEELGQDLEHVEVLQKKFEEFQTDMAAHEERVNEVNQFAAKLIQEQHPEEELIKTKQDEVNAAWQRLKGLALQRQGKLFGAAEVQRFNRDVDETISWIKEKEQLMASDDFGRDLASVQALLRKHEGLERDLAALEDKVKALCAEADRLQQSHPLSATQIQVKREELITNWEQIRTLAAERHARLNDSYRLQRFLADFRDLTSWVTEMKALINADELASDVAGAEALLDRHQEHKGEIDAHEDSFKSADESGQALLAAGHYASDEVREKLTVLSEERAALLELWELRRQQYEQCMDLQLFYRDTEQVDNWMSKQEAFLLNEDLGDSLDSVEALLKKHEDFEKSLSAQEEKITALDEFATKLIQNNHYAMEDVATRRDALLSRRNALHERAMRRRAQLADSFHLQQFFRDSDELKSWVNEKMKTATDEAYKDPSNLQGKVQKHQAFEAELSANQSRIDALEKAGQKLIDVNHYAKDEVAARMNEVISLWKKLLEATELKGIKLREANQQQQFNRNVEDIELWLYEVEGHLASDDYGKDLTNVQNLQKKHALLEADVAAHQDRIDGITIQARQFQDAGHFDAENIKKKQEALVARYEALKEPMVARKQKLADSLRLQQLFRDVEDEETWIREKEPIAASTNRGKDLIGVQNLLKKHQALQAEIAGHEPRIKAVTQKGNAMVEEGHFAAEDVKAKLHELNQKWEALKAKASQRRQDLEDSLQAQQYFADANEAESWMREKEPIVGSTDYGKDEDSAEALLKKHEALMSDLSAYGSSIQALREQAQSCRQQVAPTDDETGKELVLALYDYQEKSPREVTMKKGDILTLLNSTNKDWWKVEVNDRQGFVPAAYVKKLDPAQSASRENLLEEQGSIALRQEQIDNQTRITKEAGSVSLRMKQVEELYHSLLELGEKRKGMLEKSCKKFMLFREANELQQWINEKEAALTSEEVGADLEQVEVLQKKFDDFQKDLKANESRLKDINKVAEDLESEGLMAEEVQAVQQQEVYGMMPRDETDSKTASPWKSARLMVHTVATFNSIKELNERWRSLQQLAEERSQLLGSAHEVQRFHRDADETKEWIEEKNQALNTDNYGHDLASVQALQRKHEGFERDLAALGDKVNSLGETAERLIQSHPESAEDLQEKCTELNQAWSSLGKRADQRKAKLGDSHDLQRFLSDFRDLMSWINGIRGLVSSDELAKDVTGAEALLERHQEHRTEIDARAGTFQAFEQFGQQLLAHGHYASPEIKQKLDILDQERADLEKAWVQRRMMLDQCLELQLFHRDCEQAENWMAAREAFLNTEDKGDSLDSVEALIKKHEDFDKAINVQEEKIAALQAFADQLIAAGHYAKGDISSRRNEVLDRWRRLKAQMIEKRSKLGESQTLQQFSRDVDEIEAWISEKLQTASDESYKDPTNIQSKHQKHQAFEAELHANADRIRGVIDMGNSLIERGACAGSEDAVKARLAALADQWQFLVQKSAEKSQKLKEANKQQNFNTGIKDFDFWLSEVEALLASEDYGKDLASVNNLLKKHQLLEADISAHEDRLKDLNSQADSLMTSSAFDTSQVKDKRDTINGRFQKIKSMAASRRAKLNESHRLHQFFRDMDDEESWIKEKKLLVGSEDYGRDLTGVQNLRKKHKRLEAELAAHEPAIQGVLDTGKKLSDDNTIGKEEIQQRLAQFVEHWKELKQLAAARGQRLEESLEYQQFVANVEEEEAWINEKMTLVASEDYGDTLAAIQGLLKKHEAFETDFTVHKDRVNDVCTNGQDLIKKNNHHEENISSKMKGLNGKVSDLEKAAAQRKAKLDENSAFLQFNWKADVVESWIGEHCQQGPEEPSQSCSLSPSVSLVFFCREETDQLWAWQRTYYQGRPLTAS

SEQ ID NO: 865566 - protein, 1633 aa, Homo sapiens
RHYPLRSERCGAEAAEAPRSFSTPRPDAPTPLTPREPKMDPSGVKVLETAEDIQERRQQVLDRYHRFKELSTLRRQKLEDSYRFQFFQRDAEELEKWIQEKLQIASDENYKDPTNLQGKLQKHQAFEAEVQANSGAIVKLDETGNLMISEGHFASETIRTRLMELHRQWELLLEKMREKGIKLLQAQKLVQYLRECEDVMDWINDKEAIVTSEELGQDLEHVEVLQKKFEEFQTDMAAHEERVNEVNQFAAKLIQEQHPEEELIKTKQDEVNAAWQRLKGLALQRQGKLFGAAEVQRFNRDVDETISWIKEKEQLMASDDFGRDLASVQALLRKHEGLERDLAALEDKVKALCAEADRLQQSHPLSATQIQVKREELITNWEQIRTLAAERHARLNDSYRLQRFLADFRDLTSWVTEMKALINADELASDVAGAEALLDRHQEHKGEIDAHEDSFKSADESGQALLAAGHYASDEVREKLTVLSEERAALLELWELRRQQYEQCMDLQLFYRDTEQVDNWMSKQEAFLLNEDLGDSLDSVEALLKKHEDFEKSLSAQEEKITALDEFATKLIQNNHYAMEDVATRRDALLSRRNALHERAMRRRAQLADSFHLQQFFRDSDELKSWVNEKMKTATDEAYKDPSNLQGKVQKHQAFEAELSANQSRIDALEKAGQKLIDVNHYAKDEVAARMNEVISLWKKLLEATELKGIKLREANQQQQFNRNVEDIELWLYEVEGHLASDDYGKDLTNVQNLQKKHALLEADVAAHQDRIDGITIQARQFQDAGHFDAENIKKKQEALVARYEALKEPMVARKQKLADSLRLQQLFRDVEDEETWIREKEPIAASTNRGKDLIGVQNLLKKHQALQAEIAGHEPRIKAVTQKGNAMVEEGHFAAEDVKAKLHELNQKWEALKAKASQRRQDLEDSLQAQQYFADANEAESWMREKEPIVGSTDYGKDEDSAEALLKKHEALMSDLSAYGSSIQALREQAQSCRQQVAPTDDETGKELVLALYDYQEKSPREVTMKKGDILTLLNSTNKDWWKVEVNDRQGFVPAAYVKKLDPAQSASRENLLEEQGSIALRQEQIDNQTRITKEAGSVSLRMKQVEELYHSLLELGEKRKGMLEKSCKKFMLFREANELQQWINEKEAALTSEEVGADLEQVEVLQKKFDDFQKDLKANESRLKDINKVAEDLESEGLMAEEVQAVQQQEVYGMMPRDETDSKTASPWKSARLMVHTVATFNSIKELNERWRSLQQLAEERSQLLGSAHEVQRFHRDADETKEWIEEKNQALNTDNYGHDLASVQALQRKHEGFERDLAALGDKVNSLGETAERLIQSHPESAEDLQEKCTELNQAWSSLGKRADQRKAKLGDSHDLQRFLSDFRDLMSWINGIRGLVSSDELAKDVTGAEALLERHQEHRTEIDARAGTFQAFEQFGQQLLAHGHYASPEIKQKLDILDQERADLEKAWVQRRMMLDQCLELQLFHRDCEQAENWMAAREAFLNTEDKGDSLDSVEALIKKHEDFDKAINVQEEKIAALQAFADQLIAAGHYAKGDISSRRNEVLDRWRRLKAQMIEKRSKLGESQTLQQFSRDVDEIEAWISEKLQTASDESYKDPTNIQAFQAAGCWS

SEQ ID NO: 865567 - protein, 1265 aa, Homo sapiens
RHYPLRSERCGAEAAEAPRSFSTPRPDAPTPLTPREPKMDPSGVKVLETAEDIQERRQQVLDRYHRFKELSTLRRQKLEDSYRFQFFQRDAEELEKWIQEKLQIASDENYKDPTNLQGKLQKHQAFEAEVQANSGAIVKLDETGNLMISEGHFASETIRTRLMELHRQWELLLEKMREKGIKLLQAQKLVQYLRECEDVMDWINDKEAIVTSEELGQDLEHVEVLQKKFEEFQTDMAAHEERVNEVNQFAAKLIQEQHPEEELIKTKQDEVNAAWQRLKGLALQRQGKLFGAAEVQRFNRDVDETISWIKEKEQLMASDDFGRDLASVQALLRKHEGLERDLAALEDKVKALCAEADRLQQSHPLSATQIQVKREELITNWEQIRTLAAERHARLNDSYRLQRFLADFRDLTSWVTEMKALINADELASDVAGAEALLDRHQEHKGEIDAHEDSFKSADESGQALLAAGHYASDEVREKLTVLSEERAALLELWELRRQQYEQCMDLQLFYRDTEQVDNWMSKQEAFLLNEDLGDSLDSVEALLKKHEDFEKSLSAQEEKITALDEFATKLIQNNHYAMEDVATRRDALLSRRNALHERAMRRRAQLADSFHLQQFFRDSDELKSWVNEKMKTATDEAYKDPSNLQGKVQKHQAFEAELSANQSRIDALEKAGQKLIDVNHYAKDEVAARMNEVISLWKKLLEATELKGIKLREANQQQQFNRNVEDIELWLYEVEGHLASDDYGKDLTNVQNLQKKHALLEADVAAHQDRIDGITIQARQFQDAGHFDAENIKKKQEALVARYEALKEPMVARKQKLADSLRLQQLFRDVEDEETWIREKEPIAASTNRGKDLIGVQNLLKKHQALQAEIAGHEPRIKAVTQKGNAMVEEGHFAAEDVKAKLHELNQKWEALKAKASQRRQDLEDSLQAQQYFADANEAESWMREKEPIVGSTDYGKDEDSAEALLKKHEALMSDLSAYGSSIQALREQAQSCRQQVAPTDDETGKELVLALYDYQEKSPREVTMKKGDILTLLNSTNKDWWKVEVNDRQGFVPAAYVKKLDPAQSASRENLLEEQGSIALRQEQIDNQYHSLLELGEKRKGMLEKSCKKFMLFREANELQQWINEKEAALTSEEVGADLEQVEVLQKKFDDFQKDLKANESRLKDINKVAEDLESEGLMAEEVQAVQQQEVYGMMPRDETDSKTASPWKELNERWRSLQQLAEERSQLLGSAHEVQRFHRDADETREGIEKQDHSSTPSRAKT

SEQ ID NO: 865568 - protein, 1123 aa, Homo sapiens
  misc_feature (1098)..(1098): Xaa can be any naturally occurring amino acid
  misc_feature (1111)..(1111): Xaa can be any naturally occurring amino acid
RHYPLRSERCGAEAAEAPRSFSTPRPDAPTPLTPREPKMDPSGVKVLETAEDIQERRQQVLDRYHRFKELSTLRRQKLEDSYRFQFFQRDAEELEKWIQEKLQIASDENYKDPTNLQGKLQKHQAFEAEVQANSGAIVKLDETGNLMISEGHFASETIRTRLMELHRQWELLLEKMREKGIKLLQAQKLVQYLRECEDVMDWINDKEAIVTSEELGQDLEHVEVLQKKFEEFQTDMAAHEERVNEVNQFAAKLIQEQHPEEELIKTKQDEVNAAWQRLKGLALQRQGKLFGAAEVQRFNRDVDETISWIKEKEQLMASDDFGRDLASVQALLRKHEGLERDLAALEDKVKALCAEADRLQQSHPLSATQIQVKREELITNWEQIRTLAAERHARLNDSYRLQRFLADFRDLTSWVTEMKALINADELASDVAGAEALLDRHQEHKGEIDAHEDSFKSADESGQALLAAGHYASDEVREKLTVLSEERAALLELWELRRQQYEQCMDLQLFYRDTEQVDNWMSKQEAFLLNEDLGDSLDSVEALLKKHEDFEKSLSAQEEKITALDEFATKLIQNNHYAMEDVATRRDALLSRRNALHERAMRRRAQLADSFHLQQFFRDSDELKSWVNEKMKTATDEAYKDPSNLQGKVQKHQAFEAELSANQSRIDALEKAGQKLIDVNHYAKDEVAARMNEVISLWKKLLEATELKGIKLREANQQQQFNRNVEDIELWLYEVEGHLASDDYGKDLTNVQNLQKKHALLEADVAAHQDRIDGITIQARQFQDAGHFDAENIKKKQEALVARYEALKEPMVARKQKLADSLRLQQLFRDVEDEETWIREKEPIAASTNRGKDLIGVQNLLKKHQALQAEIAGHEPRIKAVTQKGNAMVEEGHFAAEDVKAKLHELNQKWEALKAKASQRRQDLEDSLQAQQYFADANEAESWMREKEPIVGSTDYGKDEDSAEALLKKHEALMSDLSAYGSSIQALREQAQSCRQQVAPTDDETGKELVLALYDYQEKSPREVTMKKGDILTLLNSTNKDWWKVEVNDRQGFVPAAYVKKLDPAQSASRENLLEEQGSIALRQEQIDNQKDVLLHKXLFLTLWTSLKYLXVLISCPPPTGIL

SEQ ID NO: 865569 - protein, 1048 aa, Homo sapiens
RHYPLRSERCGAEAAEAPRSFSTPRPDAPTPLTPREPKMDPSGVKVLETAEDIQERRQQVLDRYHRFKELSTLRRQKLEDSYRFQFFQRDAEELEKWIQEKLQIASDENYKDPTNLQGKLQKHQAFEAEVQANSGAIVKLDETGNLMISEGHFASETIRTRLMELHRQWELLLEKMREKGIKLLQAQKLVQYLRECEDVMDWINDKEAIVTSEELGQDLEHVEVLQKKFEEFQTDMAAHEERVNEVNQFAAKLIQEQHPEEELIKTKQDEVNAAWQRLKGLALQRQGKLFGAAEVQRFNRDVDETISWIKEKEQLMASDDFGRDLASVQALLRKHEGLERDLAALEDKVKALCAEADRLQQSHPLSATQIQVKREELITNWEQIRTLAAERHARLNDSYRLQRFLADFRDLTSWVTEMKALINADELASDVAGAEALLDRHQEHKGEIDAHEDSFKSADESGQALLAAGHYASDEVREKLTVLSEERAALLELWELRRQQYEQCMDLQLFYRDTEQVDNWMSKQEAFLLNEDLGDSLDSVEALLKKHEDFEKSLSAQEEKITALDEFATKLIQNNHYAMEDVATRRDALLSRRNALHERAMRRRAQLADSFHLQQFFRDSDELKSWVNEKMKTATDEAYKDPSNLQGKVQKHQAFEAELSANQSRIDALEKAGQKLIDVNHYAKDEVAARMNEVISLWKKLLEATELKGIKLREANQQQQFNRNVEDIELWLYEVEGHLASDDYGKDLTNVQNLQKKHALLEADVAAHQDRIDGITIQARQFQDAGHFDAENIKKKQEALVARYEALKEPMVARKQKLADSLRLQQLFRDVEDEETWIREKEPIAASTNRGKDLIGVQNLLKKHQALQAEIAGHEPRIKAVTQKGNAMVEEGHFAAEDVKAKLHELNQKWEALKAKASQRRQDLEDSLQAQQYFADANEAESWMREKEPIVGSTDYGKDEDSAEALLKKHEALMSDLSAYGSSIQALREQAQSCRQQVAPTDDETGKELVLALYDYQEKSPREVTMKKGDILTLLNSTNKAPGTEIPC

SEQ ID NO: 865570 - protein, 420 aa, Homo sapiens
RHYPLRSERCGAEAAEAPRSFSTPRPDAPTPLTPREPKMDPSGVKVLETAEDIQERRQQVLDRYHRFKELSTLRRQKLEDSYRFQFFQRDAEELEKWIQEKLQIASDENYKDPTNLQGKLQKHQAFEAEVQANSGAIVKLDETGNLMISEGHFASETIRTRLMELHRQWELLLEKMREKGIKLLQAQKLVQYLRECEDVMDWINDKEAIVTSEELGQDLEHVEVLQKKFEEFQTDMAAHEERVNEVNQFAAKLIQEQHPEEELIKTKQDEVNAAWQRLKGLALQRQGKLFGAAEVQRFNRDVDETISWIKEKEQLMASDDFGRDLASVQALLRKHEGLERDLAALEDKVKALCAEADRLQQSHPLSATQIQVKREELITNWEQIRTLAALDAVRETAPVNSAVTLNYKDEYLMYDRGVGC

SEQ ID NO: 865571 - protein, 520 aa, Homo sapiens
MSAGEVERLVSELSGGTGGDEEEEWLYGDENEVERPEEENASANPPSGIEDETAENGVPKPKVTETEDDSDSDSDDDEDDVHVTIGDIKTGAPQYGSYGTAPVNLNIKTGGRVYGTTGTKVKGVDLDAPGSINGVPLLEVDLDSFEDKPWRKPGADLSDYFNYGFNEDTWKAYCEKQKRIRMGLEVIPVTSTTNKITVQQGRTGNSEKETALPSTKAEFTSPPSLFKTGLPPSRRLPGAIDVIGQTITISRVEGRRRANENSNIQVLSERSATEVDNNFSKPPPFFPPGAPPTHLPPPPFLPPPPTVSTAPPLIPPPGFPPPPGAPPPSLIPTIESGHSSGYDSRSARAFPYGNVAFPHLPGSAPSWPSLVDTSKQWDYYARREKDRDRERDRDRERDRDRDRERERTRERERERDHSPTPSVFNSDEERYRYREYAERGYERHRASREKEERHRERRHREKEETRHKSSRSNSRRRHESEEGDSHRRHKHKKSKRSKEGKEAGSEPAPEQESTEATPAE

SEQ ID NO: 865572 - protein, 571 aa, Homo sapiens
MSAGEVERLVSELSGGTGGDEEEEWLYGGPWDVHVHSDLAKDLDENEVERPEEENASANPPSGIEDETAENGVPKPKVTETEDDSDSDSDDDEDDVHVTIGDIKTGAPQYGSYGTAPVNLNIKTGGRVYGTTGTKVKGVDLDAPGSINGVPLLEVDLDSFEDKPWRKPGADLSDYFNYGFNEDTWKAYCEKQKRIRMGLEVIPVTSTTNKITVQQGRTGNSEKETALPSTKAEFTSPPSLFKTGLPPSRNSTSSQSQTSTASRKANSSVGKWQDRYGRAESPDLRRLPGAIDVIGQTITISRVEGRRRANENSNIQVLSERSATEVDNNFSKPPPFFPPGAPPTHLPPPPFLPPPPTVSTAPPLIPPPGFPPPPGAPPPSLIPTIESGHSSGYDSRSARAFPYGNVAFPHLPGSAPSWPSLVDTSKQWDYYARREKDRDRERDRDRERDRDRDRERERTRERERERDHSPTPSVFNSDEERYRYREYAERGYERHRASREKEERHRERRHREKEETRHKSSRSNSRRRHESEEGDSHRRHKHKKSKRSKEGKEAGSEPAPEQESTEATPAE

SEQ ID NO: 865573 - protein, 594 aa, Homo sapiens
MSAGEVERLVSELSGGTGGDEEEEWLYGGPWDVHVHSDLAKDLDENEVERPEEENASANPPSGIEDETAENGVPKPKVTETEDDSDSDSDDDEDDVHVTIGDIKTGAPQYGSYGTAPVNLNIKTGGRVYGTTGTKVKGVDLDAPGSINGVPLLEVDLDSFEDKPWRKPGADLSDYFNYGFNEDTWKAYCEKQKRIRMGLEVIPVTSTTNKITAEDCTMEVTPGAEIQDGRFNLFKVQQGRTGNSEKETALPSTKAEFTSPPSLFKTGLPPSRNSTSSQSQTSTASRKANSSVGKWQDRYGRAESPDLRRLPGAIDVIGQTITISRVEGRRRANENSNIQVLSERSATEVDNNFSKPPPFFPPGAPPTHLPPPPFLPPPPTVSTAPPLIPPPGFPPPPGAPPPSLIPTIESGHSSGYDSRSARAFPYGNVAFPHLPGSAPSWPSLVDTSKQWDYYARREKDRDRERDRDRERDRDRDRERERTRERERERDHSPTPSVFNSDEERYRYREYAERGYERHRASREKEERHRERRHREKEETRHKSSRSNSRRRHESEEGDSHRRHKHKKSKRSKEGKEAGSEPAPEQESTEATPAE

SEQ ID NO: 865574 - protein, 504 aa, Homo sapiens
MRRKSGSMAKVTETEDDSDSDSDDDEDDVHVTIGDIKTGAPQYGSYGTAPVNLNIKTGGRVYGTTGTKVKGVDLDAPGSINGVPLLEVDLDSFEDKPWRKPGADLSDYFNYGFNEDTWKAYCEKQKRIRMGLEVIPVTSTTNKITVQQGRTGNSEKETALPSTKAEFTSPPSLFKTGLPPSRNSTSSQSQTSTASRKANSSVGKWQDRYGRAESPDLRRLPGAIDVIGQTITISRVEGRRRANENSNIQVLSERSATEVDNNFSKPPPFFPPGAPPTHLPPPPFLPPPPTVSTAPPLIPPPGFPPPPGAPPPSLIPTIESGHSSGYDSRSARAFPYGNVAFPHLPGSAPSWPSLVDTSKQWDYYARREKDRDRERDRDRERDRDRDRERERTRERERERDHSPTPSVFNSDEERYRYREYAERGYERHRASREKEERHRERRHREKEETRHKSSRSNSRRRHESEEGDSHRRHKHKKSKRSKEGKEAGSEPAPEQESTEATPAE

SEQ ID NO: 865575 - protein, 552 aa, Homo sapiens
MAKADFLIEKPMQRNLHSDLAKYLEEKEVERPQEENASANPPSGIEDETAENGVPKPKVTETEDDSDSDSDDDEDDVHVTIGDIKTGAPQYGSYGTAPVNLNIKTGGRVYGTTGTKVKGVDLDAPGSINGVPLLEVDLDSFEDKPWRKPGADLSDYFNYGFNEDTWKAYCEKQKRIRMGLEVIPVTSTTNKITVQQGRTGNSEKETALPSTKAEFTSPPSLFKTGLPPSRNSTSSQSQTSTASRKANSSVGKWQDRYGRAESPDLRRLPGAIDVIGQTITISRVEGRRRANENSNIQVLSERSATEVDNNFSKPPPFFPPGAPPTHLPPPPFLPPPPTVSTAPPLIPPPGFPPPPGAPPPSLIPTIESGHSSGYDSRSARAFPYGNVAFPHLPGSAPSWPSLVDTSKQWDYYARREKDRDRERDRDRERDRDRDRERERTRERERERDHSPTPSVFNSDEERYRYREYAERGYERHRASREKEERHRERRHREKEETRHKSSRSNSRRRHESEEGDSHRRHKHKKSKRSKEGKEAGSEPAPEQESTEATPAE

SEQ ID NO: 865576 - protein, 558 aa, Homo sapiens
MSAGEVERLVSELSGGTGGDEEEEWLYGGPWDVHVHSDLAKDLDENEVERPEEENASANPPSGIEDETAENGVPKPKVTETEDDSDSDSDDDEDDVHVTIGDIKTGAPQYGSYGTAPVNLNIKTGGRVYGTTGTKVKGVDLDAPGSINGVPLLEVDLDSFEDKPWRKPGADLSDYFNYGFNEDTWKAYCEKQKRIRMGLEVIPVTSTTNKITAEDCTMEVTPGAEIQDGRFNLFKVQQGRTGNSEKETALPSTKAEFTSPPSLFKTGLPPSRRLPGAIDVIGQTITISRVEGRRRANENSNIQVLSERSATEVDNNFSKPPPFFPPGAPPTHLPPPPFLPPPPTVSTAPPLIPPPGFPPPPGAPPPSLIPTIESGHSSGYDSRSARAFPYGNVAFPHLPGSAPSWPSLVDTSKQWDYYARREKDRDRERDRDRERDRDRDRERERTRERERERDHSPTPSVFNSDEERYRYREYAERGYERHRASREKEERHRERRHREKEETRHKSSRSNSRRRHESEEGDSHRRHKHKKSKRSKEGKEAGSEPAPEQESTEATPAE

SEQ ID NO: 865577 - protein, 493 aa, Homo sapiens
LGSTLSPDSDSDDDEDDVHVTIGDIKTGAPQYGSYGTAPVNLNIKTGGRVYGTTGTKVKGVDLDAPGSINGVPLLEVDLDSFEDKPWRKPGADLSDYFNYGFNEDTWKAYCEKQKRIRMGLEVIPVTSTTNKITVQQGRTGNSEKETALPSTKAEFTSPPSLFKTGLPPSRNSTSSQSQTSTASRKANSSVGKWQDRYGRAESPDLRRLPGAIDVIGQTITISRVEGRRRANENSNIQVLSERSATEVDNNFSKPPPFFPPGAPPTHLPPPPFLPPPPTVSTAPPLIPPPGFPPPPGAPPPSLIPTIESGHSSGYDSRSARAFPYGNVAFPHLPGSAPSWPSLVDTSKQWDYYARREKDRDRERDRDRERDRDRDRERERTRERERERDHSPTPSVFNSDEERYRYREYAERGYERHRASREKEERHRERRHREKEETRHKSSRSNSRRRHESEEGDSHRRHKHKKSKRSKEGKEAGSEPAPEQESTEATPAE

SEQ ID NO: 865578 - protein, 571 aa, Homo sapiens; identical to SEQ ID NO: 865572

SEQ ID NO: 865579 - protein, 571 aa, Homo sapiens; identical to SEQ ID NO: 865572

SEQ ID NO: 865580 - protein, 205 aa, Homo sapiens [sequence omitted]

SEQ ID NO: 865581 - protein, 205 aa, Homo sapiens [sequence omitted]

SEQ ID NO: 865582 - protein, 162 aa, Homo sapiens
ILSPAAHLYSCLCLSESFWWQADILCHRGSVITVLHQVFSTAMKNDTDTGNMQKEVMSVTEQVEKKKNDIEKDDTGRKRKPDISLLEVIVDVAMKVKKEIVTGDTNTKNLKEAKKEKKRAVSLPLNRRAPKLHLQNRHGFGLLCILVPEVDTINLVIFLDNV

SEQ ID NO: 865583 - protein, 130 aa, Homo sapiens
MSAGEVERLVSELSGGTGGDEEEEWLYGGPWDVHVHSDLAKDLDENEVEFLKSLTTKQKQKLLRKLDRLEKKKKKKDRKKKKFQKSRSKHKKHKSSSSSSSSSSSSSSTETSESSSESESNNKEKKIQRK

SEQ ID NO: 865584 - protein, 580 aa, Homo sapiens
MSAGEVERLVSELSGGTGGDEEEEWLYGGPWDVHVHSDLAKDLDENEVERPEEENASANPPSGIEDETAENGVPKPKVTETEDDSDSDSDDDEDDVHVTIGDIKTGAPQYGSYGTAPVNLNIKTGGRVYGTTGTKVKGVDLDAPGSINGVPLLEVDLDSFEDKPWRKPGADLSDYFNYGFNEDTWKAYCEKQKRIRMGLEVIPVTSTTNKITVQQGRTGNSEKETALPSTKAEFTSPPSLFKTGLPPSRNSTSSQSQTSTASRKANSSVGKWQDRYGRAESPDLRRLPGAIDVIGQTITISRVEGRRRANENSNIQVLSERSATEVDNNFSKPPPFFPPGAPPTHLPPPPFLPPPPTVSTAPPLIPPPGIPITVPPPGFPPPPGAPPPSLIPTIESGHSSGYDSRSARAFPYGNVAFPHLPGSAPSWPSLVDTSKQWDYYARREKDRDRERDRDRERDRDRDRERERTRERERERDHSPTPSVFNSDEERYRYREYAERGYERHRASREKEERHRERRHREKEETRHKSSRSNSRRRHESEEGDSHRRHKHKKSKRSKEGKEAGSEPAPEQESTEATPAE

SEQ ID NO: 865585 - protein, 205 aa, Homo sapiens [sequence omitted]

SEQ ID NO: 865586 - protein, 571 aa, Homo sapiens; identical to SEQ ID NO: 865572

SEQ ID NO: 865587 - protein, 526 aa, Homo sapiens
MSAGEVERLVSELSGGTGGDEEEEWLYGGPWDVHVHSDLAKDLDENEVERPEEENASANPPSGIEDETAENGVPKPKVTETEDDSDSDSDDDEDDVHVTIGDIKTGAPQYGSYGTAPVNLNIKTGGRVYGTTGTKVKGVDLDAPGSINGVPLLEVDLDSFEDKPWRKPGADLSDYFNYGFNEDTWKAYCEKQKRIRMGLEVIPVTSTTNKITVQQGRTGNSEKETALPSTKAEFTSPPSLFKTGLPPSRNSTSSQSQTSTASRKANSSVGKWQDRYGRAESPDLRRLPGAIDVIGQTITISRVEGRRRANENSNIQVLSERSATEVDNNFSKPPPFFPPGAPPTHLPPPPFLPPPPTVSTAPPLIPPPGFPPPPGAPPPSLIPTIESGHSSGYDSRSARAFPYGNAMKNDTDTGNMQKEVMSVTEQVEKKKNDIEKDDTGRKRKPDISLLEVIVDVAMKVKKEIVTGDTNTKNLKEAKKEKKRAVSLPLNRRAPKLHLQNRHGFGLLCILVPEVDTINLVIFLDNV

SEQ ID NO: 865588 - protein, 513 aa, Homo sapiens
MSAGEVERLVSELSGGTGGDEEEEWLYGGPWDVHVHSDLAKDLDENEVERPEEENASANPPSGIEDETAENGVPKPKVTETEDDSDSDSDDDEDDVHVTIGDIKTGAPQYGSYGTAPVNLNIKTGGRVYGTTGTKVKGVDLDAPGSINGVPLLEVDLDSFEDKPWRKPGADLSDYFNYGFNEDTWKAYCEKQKRIRMGLEVIPVTSTTNKITAEDCTMEVTPGAEIQDGRFNLFKVQQGRTGNSEKETALPSTKAEFTSPPSLFKTGLPPSRRLPGAIDVIGQTITISRVEGRRRANENSNIQVLSERSATEVDNNFSKPPPFFPPGAPPTHLPPPPFLPPPPTVSTAPPLIPPPGFPPPPGAPPPSLIPTIESGHSSGYDSRSARAFPYGNAMKNDTDTGNMQKEVMSVTEQVEKKKNDIEKDDTGRKRKPDISLLEVIVDVAMKVKKEIVTGDTNTKNLKEAKKEKKRAVSLPLNRRAPKLHLQNRHGFGLLCILVPEVDTINLVIFLDNV

SEQ ID NO: 865589 - protein, 571 aa, Homo sapiens; identical to SEQ ID NO: 865572

SEQ ID NO: 865590 - protein, 135 aa, Homo sapiens [sequence omitted]

SEQ ID NO: 865591 - protein, 472 aa, Homo sapiens
MNGYGSPYLYMGGPVSQPPRAPLQRTPKCARCRNHGVLSWLKGHKRYCRFKDCTCEKCILIIERQRVMAAQVALRRQQANESLESLIPDSLRALPGPPPPGDAVAAPQPPPASQPSQPQPPRPAAELAAAAALRWTAEPQPGALQAQLAKPDLTEERLGDGKSADNTEVFSDKDTDQRSSPDVAKSKGCFTPESPEIVSVEEGGYAVQKNGGNPESRPDSPKCHAEQNHLLIEGPSGTVSLPFSLKANRPPLEVLKKIFPNQKPTVLELILKGCGGDLVSAVEVLLSSRSSVTGAERTSAEPESLALPSNGHIFEHTLSSYPISSSKWSVGSAFRVPDTLRFSADSSNVVPSPLAGPLQPPFPQPPRYPLMLRNTLARSQSSPFLPNDVTLWNTMTLQQQYQLRSQYVSPFPSNSTSVFRSSPVLPARATEDPRISIPDDGCPFVSKQSIYTEDDYDERSDSSDSRTLNTSS

SEQ ID NO: 865592 - protein, 335 aa, Homo sapiens [sequence omitted]

SEQ ID NO: 865593 - protein, 111 aa, Homo sapiens
SEHPVPGAFIGGNPPLSGPVFLGTRLWPGATNLLAPGAHTEWFKNLFQGPRPPTKFFFFFFFLRQSLAPSPMLECSGVISAHCNFRLLGSSYSPASAFQVTGITGMYHHTS

SEQ ID NO: 865594 - protein, 112 aa, Homo sapiens
SEHPVPGAFIGGNPPLSGPVFLGTPLSPVFISQGPAPTMCLYFSGSGGLTIFFFFFFFETESCSITHARVQWSDLGSLQLPPSGFKLFSCLSLPSNWDYRHVPPYQLIFLYF

SEQ ID NO: 865595 - protein, 111 aa, Homo sapiens; identical to SEQ ID NO: 865593

SEQ ID NO: 865596 - protein, 111 aa, Homo sapiens; identical to SEQ ID NO: 865593

SEQ ID NO: 865597 - protein, 111 aa, Homo sapiens; identical to SEQ ID NO: 865593

SEQ ID NO: 865598 - protein, 111 aa, Homo sapiens; identical to SEQ ID NO: 865593

SEQ ID NO: 865599 - protein, 111 aa, Homo sapiens; identical to SEQ ID NO: 865593

SEQ ID NO: 865600 - protein, 80 aa, Homo sapiens
RGGRSPGTHNPDHTAVTAAVAGAQTYHKSHKLTDGTPRGWTKAFCKATANNELTVDLNLKNIVTSLSNICKNYGIKLLMQ

SEQ ID NO: 865601 - protein, 111 aa, Homo sapiens; identical to SEQ ID NO: 865593

SEQ ID NO: 865602 - protein, 111 aa, Homo sapiens; identical to SEQ ID NO: 865593

SEQ ID NO: 865603 - protein, 111 aa, Homo sapiens; identical to SEQ ID NO: 865593

SEQ ID NO: 865604 - protein, 119 aa, Homo sapiens
MCSLDRERPNPCFPAAGARFFLWNPPHSRPVSWTLMDQCPYLLGPRAPPEWFNTLSWPAPPKIFFFFFFFLRQSLAPSPMLECSGVISAHCNFRLLGSSYSPASAFQVTGITGMYHHTS

SEQ ID NO: 865605 - protein, 111 aa, Homo sapiens; identical to SEQ ID NO: 865593

SEQ ID NO: 865606 - protein, 111 aa, Homo sapiens; identical to SEQ ID NO: 865593

SEQ ID NO: 865607 - protein, 111 aa, Homo sapiens; identical to SEQ ID NO: 865593

SEQ ID NO: 865608 - protein, 111 aa, Homo sapiens; identical to SEQ ID NO: 865593

SEQ ID NO: 865609 - protein, 111 aa, Homo sapiens; identical to SEQ ID NO: 865593

SEQ ID NO: 865610 - protein, 111 aa, Homo sapiens; identical to SEQ ID NO: 865593

SEQ ID NO: 865611 - protein, 111 aa, Homo sapiens; identical to SEQ ID NO: 865593

SEQ ID NO: 865612 - protein, 258 aa, Homo sapiens
MVGILPLCCSGCVPSLCCSSYVPSVAPTAAHSVRVPHSAGHCGQRVLACSLPQVFLKPWIFVEHFSSWLSLELFSFLRYLGTLLCACGHRLREGLLLPCLLGVGSWLLFNNWTGGSWFSLHLQQVSLSQGSHVAAFLPEAIGPGVPVPVSGESTSAQQSHAGWQLSAEADACPSVLYSEVLEWNKNINTYTSFHDFCLILGIFLFCFVLAVIGLPYIKPGLSLSVALLWQSLILLSSLVQQDSQVHTWGCLFSTFTST

SEQ ID NO: 865613 - protein, 120 aa, Homo sapiens
LVASAGAAAAVSAAGAAAAAGAAAPVAAAAAAGTATTVAAAGTAAVAAAGASAPVAAAGASAAGASASVAAAGTAAVAAAVAAAGASAAGASADVAAAETSAAASAASGTKRGEVTFGYL

SEQ ID NO: 865614 - protein, 121 aa, Homo sapiens
LVASAGAAAAVSAAGAAAAAGAAAPVAAAAAAGTATTVAAAGTAAVAAAGASAPVAAAGASAAGASASVAAAGTAAVAAAVAAAGASAAGASADVAAAETSAAASAASGTKRDGANTHYGD

SEQ ID NO: 865615 - protein, 120 aa, Homo sapiens; identical to SEQ ID NO: 865613

SEQ ID NO: 865616 - protein, 120 aa, Homo sapiens; identical to SEQ ID NO: 865613

SEQ ID NO: 865617 - protein, 120 aa, Homo sapiens; identical to SEQ ID NO: 865613

SEQ ID NO: 865618 - protein, 124 aa, Homo sapiens
ELSTLLFLADRVPIIGVFSAVMRLDGAVVPPGGWSPPLLPRAVFASCRLFARALPVIYLFVARLFLYTRWWFLVAPSVGIIYPPPLFFFFFSLSSFFFLFSFFFSFFFFFFFFFFIKDHNAIIY

SEQ ID NO: 865619 - protein, 119 aa, Homo sapiens
MGTRTLQFEISDSHEKEEDLLHKNHLMQDEIARLRLEIHTIKNQILEKKYLKDIEIIKRKHEDLQKALKQNGEKSTKTIAHYSGQLTALTDENTMLRSKLEKEKQSRQRLTKWNHTIVD

SEQ ID NO: 865620 - protein, 524 aa, Homo sapiens
CGVKLSALMVATGRARGARRAGQQPPPPLRVNVVLSGLLGKLFPGPARASQLRHEGNRLYRERQVEAALLKYNEAVKLAPNDHLLYSNRSQIYFTLESHENALHDAEIACKLRPMGFKDNLELPHCSSQEEAAARGDGSSLMDPAKVKGDGQQHHMKDQEEEEEKWDATSPKAASSKTGKCQEKKRKHCQIESQEETGMPNKASKQDPPTDQGDKPALSLPLASFDASDLECALCMRLFYEPVTTPCGHTFCLKCLERCLDHNAKCPLCKDGLSQCLASRKYSKNVIMEELIAKFLPEELKERRKLYEEEMEELSNLNKNVPIFVCTMAYPTVPCPLHIFEPCYRLMIRRCIETGTRQFGMCLGDPVKGFAEYGCILEIRNVQFFADGRSVVDSIGKRRFRVLHQSQRDGYNTADIEYIEDQKVQGEDCAELMGLHNCVYQQASLWFHSLKLSLKNRILNHFGPMPEKDADPQMNPNGPAWCWWMLAVLPLESRAQLPFLAMRSLKDRLNGIRRVLAFISRNQN

SEQ ID NO: 865621 - protein, 565 aa, Homo sapiens
CGVKLSALMVATGRARGARRAGQQPPPPLRVNVVLSGLLGKLFPGPARASQLRHEGNRLYRERQVEAALLKYNEAVKLAPNDHLLYSNRSQIYFTLESHENALHDAEIACKLRPMGFKAHFRKAQALATLGKVEEALREFLYCVSLDGKNKRARCEAQRDNLELPHCSSQEEAAARGDGSSLMDPAKVKGDGQQHHMKDQEEEEEKWDATSPKAASSKTGKCQEKKRKHCQIESQEETGMPNKASKQDPPTDQGDKPALSLPLASFDASDLECALCMRLFYEPVTTPCGHTFCLKCLERCLDHNAKCPLCKDGLSQCLASRKYSKNVIMEELIAKFLPEELKERRKLYEEEMEELSNLNKNVPIFVCTMAYPTVPCPLHIFEPCYRLMIRRCIETGTRQFGMCLGDPVKGFAEYGCILEIRNVQFFADGRSVVDSIGKRRFRVLHQSQRDGYNTADIEYIEDQKVQGEDCAELMGLHNCVYQQASLWFHSLKLSLKNRILNHFGPMPEKDADPQMNPNGPAWCWWMLAVLPLESRAQLPFLAMRSLKDRLNGIRRVLAFISRNQN

SEQ ID NO: 865622 - protein, 158 aa, Homo sapiens
HTPNVHTDNKVALSLEHSQMDDMDMDLDKEFLQDLKELKVLVADKDLLDLHKSLVCTALRGKLGVFSEMEANFKNLSRGLVNVAAKLTHNKDVRDLFVDLVEKFVEPCRSDHWPLSDVRFFLNQYSASVHSLDGFRHQALWDRYMGTLRGCLLRLYHD

SEQ ID NO: 865623 - protein, 387 aa, Homo sapiens
LGAPGSGLKAARQSRAVLAPARGAAAPGVAMTSELDIFVGNTTLIDEDVYRLWLDGYSVTDAVALRVRSGILEQTGATAAVLQSDTMDHYRTFHMLERLLHAPPKLLHQLIFQIPPSRQALLIERYYAFDEAFVREVLGKKLSKGTKKDLDDISTKTGITLKSCRRQFDNFKRVFKVVEEMRGSLVDNIQQHFLLSDRLARDYAAIVFFANNRFETGKKKLQYLSFGDFAFCAELMIQNWTLGAVDSQMDDMDMDLDKEFLQDLKELKVLVADKDLLDLHKSLVCTALRGKLGVFSEMEANFKNLSRGLVNVAAKLTHNKDVRDLFVDLVEKFVEPCRSDHWPLSDVRFFLNQYSASVHSLDGFRHQALWDRYMGTLRGCLLRLYHD

SEQ ID NO: 865624 - protein, 387 aa, Homo sapiens; identical to SEQ ID NO: 865623

SEQ ID NO: 865625 - protein, 355 aa, Homo sapiens
YRGLGWKPLRASGVGGAGPDASVRFPVTDAVALRVRSGILEQTGATAAVLQSDTMDHYRTFHMLERLLHAPPKLLHQLIFQIPPSRQALLIERYYAFDEAFVREVLGKKLSKGTKKDLDDISTKTGITLKSCRRQFDNFKRVFKVVEEMRGSLVDNIQQHFLLSDRLARDYAAIVFFANNRFETGKKKLQYLSFGDFAFCAELMIQNWTLGAVDSQMDDMDMDLDKEFLQDLKELKVLVADKDLLDLHKSLVCTALRGKLGVFSEMEANFKNLSRGLVNVAAKLTHNKDVRDLFVDLVEKFVEPCRSDHWPLSDVRFFLNQYSASVHSLDGFRHQALWDRYMGTLRGCLLRLYHD

SEQ ID NO: 865626 - protein, 456 aa, Homo sapiens
LGAPGSGLKAARQSRAVLAPARGAAAPGVAMTSELDIFVGNTTLIDEDVYRLWLDGYSVTDAVALRVRSGILEQTGATAAVLQSDTMDHYRTFHMLERLLHAPPKLLHQLIFQIPPSRQALLIERCSPCGMVETSTSLTVYPFCRLKQAQGGMGFTQPSESGEWKGSDLGPARPRQTPFPVFYGGSMVFSDSTRYYAFDEAFVREVLGKKLSKGTKKDLDDISTKTGITLKSCRRQFDNFKRVFKVVEEMRGSLVDNIQQHFLLSDRLARDYAAIVFFANNRFETGKKKLQYLSFGDFAFCAELMIQNWTLGAVDSQMDDMDMDLDKEFLQDLKELKVLVADKDLLDLHKSLVCTALRGKLGVFSEMEANFKNLSRGLVNVAAKLTHNKDVRDLFVDLVEKFVEPCRSDHWPLSDVRFFLNQYSASVHSLDGFRHQALWDRYMGTLRGCLLRLYHD

SEQ ID NO: 865627 - protein, 394 aa, Homo sapiens
LGAPGSGLKAARQSRAVLAPARGAAAPGVAMTSELDIFVGNTTLIDEDVYRLWLDGYSVTDAVALRVRSGILEQTGATAAVLQSDTMDHYRTFHMLERLLHAPPKLLHQLIFQIPPSRQALLIERYYAFDEAFVREVLGKKLSKGTKKDLDDISTKTGITLKSCRRQFDNFKRVFKVVEEMRGSLVDNIQQHFLLSDRLARDYAAIVFFANNRFETGKKKLQYLSFGDFAFCAELMIQNWTLGAVGEAPTDPDSQMDDMDMDLDKEFLQDLKELKVLVADKDLLDLHKSLVCTALRGKLGVFSEMEANFKNLSRGLVNVAAKLTHNKDVRDLFVDLVEKFVEPCRSDHWPLSDVRFFLNQYSASVHSLDGFRHQALWDRYMGTLRGCLLRLYHD

SEQ ID NO: 865628 - protein, 207 aa, Homo sapiens [sequence omitted]

SEQ ID NO: 865629 - protein, 502 aa, Homo sapiens
LGAPGSGLKAARQSRAVLAPARGAAAPGVAMTSELDIFVGNTTLIDEDVYRLWLDGYSVTDAVALRVRSGILEQTGATAAVLQSDTMDHYRTFHMLERLLHAPPKLLHQLIFQIPPSRQALLIERYYAFDEAFVREVLGKKLSKGTKKDLDDISTKTGITLKSCRRQFDNFKRVFKVVEEMRGSLVDNIQQHFLLSDRLARDYAAIVFFANNRFETGKKKLQYLSFGDFAFCAELMIQNWTLGAVGEAPTDPGAWTPPHPQDLIPHQYFSHRPSVPGIRSCSWPPPRLPLPIECFPHTHLVCRQRAHCLSVAWGMSLHLSDTPFPLLSPGEEIRWWVRKGLGYHRRGFYHPPPPPFMASQNSQMDDMDMDLDKEFLQDLKELKVLVADKDLLDLHKSLVCTALRGKLGVFSEMEANFKNLSRGLVNVAAKLTHNKDVRDLFVDLVEKFVEPCRSDHWPLSDVRFFLNQYSASVHSLDGFRHQALWDRYMGTLRGCLLRLYHD

SEQ ID NO: 865630 - protein, 375 aa, Homo sapiens
LGAPGSGLKAARQSRAVLAPARGAAAPGVAMTSELDIFVGNTTLIDEDVYRLWLDGYSVTDAVALRVRSGILEQTGATAAVLQSDTMDHYRTFHMLERLLHAPPKLLHQLIFQIPPSRQALLIERYYAFDEAFVREVLGKKLSKGTKKDLDDISTKTGITLKSCRRQFDNFKRVFKVVEEMRGSLVDNIQQHFLLSDRLARDYAAIVFFANNRFETGKKKLQYLSFGDFAFCAELMIQNWTLGAVDSQMDDMDMDLDKEFLQDLKELKVLVADKDLLDLHKSLVCTALRGKLGVFSEMEANFKLTHNKDVRDLFVDLVEKFVEPCRSDHWPLSDVRFFLNQYSASVHSLDGFRHQALWDRYMGTLRGCLLRLYHD

SEQ ID NO: 865631 - protein, 260 aa, Homo sapiens
MRRPSYCTSSSSRFRPPGRHYSSRGTMPLMRPLFGRCWARSCPKAPRKTWMTSAPKQASPSRAAGDRDYAAIVFFANNRFETGKKKLQYLSFGDFAFCAELMIQNWTLGAVGEAPTDPDSQMDDMDMDLDKEFLQDLKELKVLVADKDLLDLHKSLVCTALRGKLGVFSEMEANFKNLSRGLVNVAAKLTHNKDVRDLFVDLVEKFVEPCRSDHWPLSDVRFFLNQYSASVHSLDGFRHQALWDRYMGTLRGCLLRLYHD

SEQ ID NO: 865632 - protein, 413 aa, Homo sapiens
LGAPGSGLKAARQSRAVLAPARGAAAPGVAMTSELDIFVGNTTLIDEDVYRLWLDGYSVTDAVALRVRSGILEQTGATAAVLQSDTMDHYRTFHMLERLLHAPPKLLHQLIFQIPPSRQALLIERYYAFDEAFVREVLGKKLSKGTKKDLDDISTKTGITLKSCRRQFDNFKRVFKVVEEMRGSLVDNIQQHFLLSDRLARDYAAIVFFANNRFETGKKKLQYLSFGDFAFCAELMIQNWTLGAVDSQMDDMDMDLDKEFLQDLKELKVLVADKDLLDLHKRDLVGAHGAGPAVGAQVAIGVTLSLCSLVCTALRGKLGVFSEMEANFKNLSRGLVNVAAKLTHNKDVRDLFVDLVEKFVEPCRSDHWPLSDVRFFLNQYSASVHSLDGFRHQALWDRYMGTLRGCLLRLYHD

SEQ ID NO: 865633 - protein, 255 aa, Homo sapiens
LGAPGSGLKAARQSRAVLAPARGAAAPGVAMTSELDIFVGNTTLIDEDVYRLWLDGYSVTDAVALRVRSGILEQTGATAAVLQSDTMDHYRTFHMLERLLHAPPKLLHQLIFQIPPSRQALLIERYYAFDEAFVREVLGKKLSKGTKKDLDDISTKTGITLKSCRRQFDNFKRVFKVVEEMRGSLVDNIQQHFLLSDRLARDYAAIVFFANNRFETGKKKLQYLSFGDFAFCAELMIQNWTLGAVGLEGAQGASG

SEQ ID NO: 865634 - protein, 382 aa, Homo sapiens
LGAPGSGLKAARQSRAVLAPARGAAAPGVAMTSELDIFVGNTTLIDEDVYRLWLDGYSVTDAVALRVRSGILEQTGATAAVLQSDTMDHYRTFHMLERLLHAPPKLLHQLIFQIPPSRQALLIERYYAFDEAFVREVLGKKLSKGTKKDLDDISTKTGITLKSCRRQFDNFKRVFKVVEEMRGSLVDNIQQHFLLSDRLARDYAAIVFFANNRFETGKKKLQYLSFGDFAFCAELMIQNWTLGAVGEAPTDPDSQMDDMDMDLDKEFLQDLKELKVLVADKDLLDLHKSLVCTALRGKLGVFSEMEANFKLTHNKDVRDLFVDLVEKFVEPCRSDHWPLSDVRFFLNQYSASVHSLDGFRHQALWDRYMGTLRGCLLRLYHD

SEQ ID NO: 865635 - protein, 247 aa, Homo sapiens
LGAPGSGLKAARQSRAVLAPARGAAAPGVAMTSELDIFVGNTTLIDEDVYRLWLDGYSVTDAVALRVRSGILEQTGATAAVLQSDTMDHYRTFHMLERLLHAPPKLLHQLIFQIPPSRQALLIERYYAFDEAFVREVLGKKLSKGTKKDLDDISTKTGITLKSCRRQGMHCIHTDTASHLHFTPSLWPLAQFQPLIVAAASYLVFSSLPLSPPFFFFFFEMESCSVAQAGVQWRDLSSLQPPPPGFR

SEQ ID NO: 865636 - protein, 178 aa, Homo sapiens
LGAPGSGLKAARQSRAVLAPARGAAAPGVAMTSELDIFVGNTTLIDEDVYRLWLDGYSVTDAVALRVRSGILEQTGATAAVLQSDTMDHYRTFHMLARILNLINPPPPAQHLSCWKLFPRGGAVCTMSEMAELSELYEESSDLQMDVMPGEGDLPQMEVGSGSRELSLRPSRSGAQQL

SEQ ID NO: 865637 - protein, 186 aa, Homo sapiens
MRGSLVDNIQQHFLLSDRLARDYAAIVFFANNRFETGKKKLQYLSFGDFAFCAELMIQNWTLGAVDSQMDDMDMDLDKEFLQDLKELKVLVADKDLLDLHKSLVCTALRGKLGVFSEMEANFKRPVCGPRGEVCGTLPLRPLATQRRAVLPESVFSVCPLPRWLPTPGPLGPLHGHPPRLPPAPVS

SEQ ID NO: 865638 - protein, 357 aa, Homo sapiens
MTSELDIFVGNTTLIDEDVYRLWLDGYSVTDAVALRVRSGILEQTGATAAVLQSDTMDHYRTFHMLERLLHAPPKLLHQLIFQIPPSRQALLIERYYAFDEAFVREVLGKKLSKGTKKDLDDISTKTGITLKSCRRQFDNFKRVFKVVEEMRGSLVDNIQQHFLLSDRLARDYAAIVFFANNRFETGKKKLQYLSFGDFAFCAELMIQNWTLGAVDSQMDDMDMDLDKEFLQDLKELKVLVADKDLLDLHKSLVCTALRGKLGVFSEMEANFKNLSRGLVNVAAKLTHNKDVRDLFVDLVEKFVEPCRSDHWPLSDVRFFLNQYSASVHSLDGFRHQALWDRYMGTLRGCLLRLYHD

SEQ ID NO: 865639 - protein, 387 aa, Homo sapiens; identical to SEQ ID NO: 865623

SEQ ID NO: 865640 - protein, 413 aa, Homo sapiens
LGAPGSGLKAARQSRAVLAPARGAAAPGVAMTSELDIFVGNTTLIDEDVYRLWLDGYSVTDAVALRVRSGILEQTGATAAVLQSDTMDHYRTFHMLERLLHAPPKLLHQLIFQIPPSRQALLIERYYAFDEAFVREVLGKKLSKGTKKDLDDISTKTGITLKSCRRQFDNFKRVFKVVEEMRGSLVDNIQQHFLLSDRLARDYAAIVFFANNRFETGKKKLQYLSFGDFAFCAELMIQNWTLGAVDSQMDDMDMDLDKEFLQDLKELKVLVADKDLLDLHKSLVCTALRGKLGVFSEMEANFKNLSRGLVNVAAKLTHNKDVRDLFVDLVEKFVEPCRSDHWPLSDVRFFLNQYSASVHSLDGFRVSSPVLLSSLALPQPATCQDLASCRLKTPGPLGPLHGHPPRLPPAPVS

SEQ ID NO: 865641 - protein, 480 aa, Homo sapiens
LGAPGSGLKAARQSRAVLAPARGAAAPGVAMTSELDIFVGNTTLIDEDVYRLWLDGYSVTDAVALRVRSGILEQTGATAAVLQSDTMDHYRTFHMLERLLHAPPKLLHQLIFQIPPSRQALLIERYYAFDEAFVREVLGKKLSKGTKKDLDDISTKTGITLKSCRRQFDNFKRVFKVVEEMRGSLVDNIQQHFLLSDRLARDYAAIVFFANNRFETGKKKLQYLSFGDFAFCAELMIQNWTLGAVDSQMDDMDMDLDKEFLQDLKELKVLVADKDLLDLHKSLVCTALRGKLGVFSEMEANFKGLWSHPASDPWHLQPPVRHPYRAALPLPGIGRQVALLLPLVAADGSSSSTMGTWLMEGGGWIWGGACSSSPSFCAQLPTSGAESRAPRIPAPQNLSRGLVNVAAKLTHNKDVRDLFVDLVEKFVEPCRSDHWPLSDVRFFLNQYSASVHSLDGFRHQALWDRYMGTLRGCLLRLYHD

SEQ ID NO: 865642 - protein, 320 aa, Homo sapiens
LGAPGSGLKAARQSRAVLAPARGAAAPGVAMTSELDIFVGNTTLIDEDVYRLWLDGYSVTDAVALRVRSGILEQTGATAAVLQSDTMDHYRTFHMLERLLHAPPKLLHQLIFQIPPSRQALLIERYYAFDEAFVREVLGKKLSKGTKKDLDDISTKTGITLKSCRRQFDNFKRVFKVVEEMRGSLVDNIQQHFLLSDRLARDYAAIVFFANNRFETGKKKLQYLSFGDFAFCAELMIQNWTLGAVDSQMDDMDMDLDKEFLQDLKELKVLVADKDLLDLHKSLVCTALRGKLGVFSEMEANFKKAELQGSLPHRTCPGGW

SEQ ID NO: 865643 - protein, 253 aa, Homo sapiens
MRRPSYCTSSSSRFRPPGRHYSSRGTMPLMRPLFGRCWARSCPKAPRKTWMTSAPKQASPSRAAGDRDYAAIVFFANNRFETGKKKLQYLSFGDFAFCAELMIQNWTLGAVDSQMDDMDMDLDKEFLQDLKELKVLVADKDLLDLHKSLVCTALRGKLGVFSEMEANFKNLSRGLVNVAAKLTHNKDVRDLFVDLVEKFVEPCRSDHWPLSDVRFFLNQYSASVHSLDGFRHQALWDRYMGTLRGCLLRLYHD

SEQ ID NO: 865644 - protein, 394 aa, Homo sapiens; identical to SEQ ID NO: 865627

SEQ ID NO: 865645 - protein, 506 aa, Homo sapiens
LGAPGSGLKAARQSRAVLAPARGAAAPGVAMTSELDIFVGNTTLIDEDVYRLWLDGYSVTDAVALRVRSGILEQTGATAAVLQSDTMDHYRTFHMLERLLHAPPKLLHQLIFQIPPSRQALLIERYYAFDEAFVREVLGKKLSKGTKKDLDDISTKTGITLKSCRRQFDNFKRVFKVVEEMRGSLVDNIQQHFLLSDRLARDYAAIVFFANNRFETGKKKLQYLSFGDFAFCAELMIQNWTLGAVDSQMDDMDMDLDKEFLQDLKELKVLVADKDLLDLHKRDLVGAHGAGPAVGAQVAIGVTLSLCSLVCTALRGKLGVFSEMEANFKGLWSHPASDPWHLQPPVRHPYRAALPLPGIGRQVALLLPLVAADGSSSSTMGTWLMEGGGWIWGGACSSSPSFCAQLPTSGAESRAPRIPAPQNLSRGLVNVAAKLTHNKDVRDLFVDLVEKFVEPCRSDHWPLSDVRFFLNQYSASVHSLDGFRHQALWDRYMGTLRGCLLRLYHD

SEQ ID NO: 865646 - protein, 295 aa, Homo sapiens
KKEFQALRGPSSRLCRDYAAIVFFANNRFETGKKKLQYLSFGDFAFCAELMIQNWTLGAVDSQMDDMDMDLDKEFLQDLKELKVLVADKDLLDLHKSLVCTALRGKLGVFSEMEANFKGLWSHPASDPWHLQPPVRHPYRAALPLPGIGRQVALLLPLVAADGSSSYTMGTWLMEGGGWIWGGACSSSPSFCAQLPTSGAESRAPRIPAPQNLSRGLVNVAAKLTHNKDVRDLFVDLVEKFVEPCRSDHWPLSDVRFFLNQYSASVHSLDGFRHQALWDRYMGTLRGCLLRLYHD

SEQ ID NO: 865647 - protein, 178 aa, Homo sapiens
LGAPGSGLKAARQSRAVLAPARGAAAPGVAMTSELDIFVGNTTLIDEDVYRLWLDGYSVTDAVALRVRSGILEQTGATAAVLQSDTMDHYRTFHMLERLLHAPPKLLHQLIFQIPPSRQALLIERYYAFDEAFVREVLGKKLSKGTKKDLDDISTKTGITLKSCRRQFCHLYIVLQCW

SEQ ID NO: 865648 - protein, 272 aa, Homo sapiens
RGNNIDTTSWCIRPRYNGPTCLPINAASSQEFDSVLFQQDATLSGLVNLGCQPLSSIPFHSSNSGSTGHLLAHTPHSVHTLPHLQSMGYHCSNTGQRSLSSPVADQITGQPSSQLQPITYGPSHSGSATTASPAASHPLASSPLSGPPSPQLQPMPYQSPSSGTASSPSPATRMHSGQHSTQAQSTGQGGLSAPSSLICHSLCDPASFPPDGATVSIKPEPEDREPNFATIGLQDITLDDVETYVLASPSRKISEESRGEEPEPRAPSPREK

SEQ ID NO: 865649 - protein, 1068 aa, Homo sapiens
MTTANCGAHDELDFKLVFGEDGAPAPPPPGSRPADLEPDDCASIYIFNVDPPPSTLTTPLCLPHHGLPSHSSVLSPSFQLQSHKNYEGTCEIPESKYSPLGGPKPFECPSIQITSISPNCHQELDAHEDDLQINDPEREFLERPSRDHLYLPLEPSYRESSLSPSPASSISSRSWFSDASSCESLSHIYDDVDSELNEAAARFTLGSPLTSPGGSPGGCPGEETWHQQYGLGHSLSPRQSPCHSPRSSVTDENWLSPRPASGPSSRPTSPCGKRRHSSAEVCYAGSLSPHHSPVPSPGHSPRGSVTEDTWLNASVHGGSGLGPAVFPFQYCVETDIPLKTRKTSEDQAAILPGKLELCSDDQGSLSPARETSIDDGLGSQYPLKKDSCGDQFLSVPSPFTWSKPKPGHTPIFRTSSLPPLDWPLPAHFGQCELKIEVQPKTHHRAHYETEGSRGAVKASTGGHPVVKLLGYNEKPINLQMFIGTADDRYLRPHAFYQVHRITGKTVATASQEIIIASTKVLEIPLLPENNMSASIDCAGILKLRNSDIELRKGETDIGRKNTRVRLVFRVHIPQPSGKVLSLQIASIPVECSQRSAQELPHIEKYSINSCSVNGGHEMVVTGSNFLPESKIIFLEKGQDGRPQWEVEGKIIREKCQGAHIVLEVPPYHNPAVTAAVQVHFYLCNGKRKKSQSQRFTYTPVLMKQEHREEIDLSSVPSLPVPHPAQTQRPSSDSGCSHDSVLSGQRSLICSIPQTYASMVTSSHLPQLQCRDESVSKEQHMIPSPIVHQPFQVTPTPPVGSSYQPMQTNVVYNGPTCLPINAASSQEFDSVLFQQDATLSGLVNLGCQPLSSIPFHSSNSGSTGHLLAHTPHSVHTLPHLQSMGYHCSNTGQRSLSSPVADQITGQPSSQLQPITYGPSHSGSATTASPAASHPLASSPLSGPPSPQLQPMPYQSPSSGTASSPSPATRMHSGQHSTQAQSTGQGGLSAPSSLICHSLCDPASFPPDGATVSIKPEPEDREPNFATIGLQDITLDDDQFISDLEHQPSGSAEKWPNHSVLSCPAPFWRI

SEQ ID NO: 865650 - protein, 1068 aa, Homo sapiens; identical to SEQ ID NO: 865649

SEQ ID NO: 865651 - protein, 1075 aa, Homo sapiens
MTTANCGAHDELDFKLVFGEDGAPAPPPPGSRPADLEPDDCASIYIFNVDPPPSTLTTPLCLPHHGLPSHSSVLSPSFQLQSHKNYEGTCEIPESKYSPLGGPKPFECPSIQITSISPNCHQELDAHEDDLQINDPEREFLERPSRDHLYLPLEPSYRESSLSPSPASSISSRSWFSDASSCESLSHIYDDVDSELNEAAARFTLGSPLTSPGGSPGGCPGEETWHQQYGLGHSLSPRQSPCHSPRSSVTDENWLSPRPASGPSSRPTSPCGKRRHSSAEVCYAGSLSPHHSPVPSPGHSPRGSVTEDTWLNASVHGGSGLGPAVFPFQYCVETDIPLKTRKTSEDQAAILPGKLELCSDDQGSLSPARETSIDDGLGSQYPLKKDSCGDQFLSVPSPFTWSKPKPGHTPIFRTSSLPPLDWPLPAHFGQCELKIEVQPKTHHRAHYETEGSRGAVKASTGGHPVVKLLGYNEKPINLQMFIGTADDRYLRPHAFYQVHRITGKTVATASQEIIIASTKVLEIPLLPENNMSASIDCAGILKLRNSDIELRKGETDIGRKNTRVRLVFRVHIPQPSGKVLSLQIASIPVECSQRSAQELPHIEKYSINSCSVNGGHEMVVTGSNFLPESKIIFLEKGQDGRPQWEVEGKIIREKCQGAHIVLEVPPYHNPAVTAAVQVHFYLCNGKRKKSQSQRFTYTPVLMKQEHREEIDLSSVPSLPVPHPAQTQRPSSDSGCSHDSVLSGQRSLICSIPQTYASMVTSSHLPQLQCRDESVSKEQHMIPSPIVHQPFQVTPTPPVGSSYQPMQTNVVYNGPTCLPINAASSQEFDSVLFQQDATLSGLVNLGCQPLSSIPFHSSNSGSTGHLLAHTPHSVHTLPHLQSMGYHCSNTGQRSLSSPVADQITGQPSSQLQPITYGPSHSGSATTASPAASHPLASSPLSGPPSPQLQPMPYQSPSSGTASSPSPATRMHSGQHSTQAQSTGQGGLSAPSSLICHSLCDPASFPPDGATVSIKPEPEDREPNFATIGLQDITLDDVNEIIGRDMSQISVSQGAGVSRQAPLPSPESLDLGRSDGL

SEQ ID NO: 865652 - protein, 1105 aa, Homo sapiens
MTTANCGAHDELDFKLVFGEDGAPAPPPPGSRPADLEPDDCASIYIFNVDPPPSTLTTPLCLPHHGLPSHSSVLSPSFQLQSHKNYEGTCEIPESKYSPLGGPKPFECPSIQITSISPNCHQELDAHEDDLQINDPEREFLERPSRDHLYLPLEPSYRESSLSPSPASSISSRSWFSDASSCESLSHIYDDVDSELNEAAARFTLGSPLTSPGGSPGGCPGEETWHQQYGLGHSLSPRQSPCHSPRSSVTDENWLSPRPASGPSSRPTSPCGKRRHSSAEVCYAGSLSPHHSPVPSPGHSPRGSVTEDTWLNASVHGGSGLGPAVFPFQYCVETDIPLKTRKTSEDQAAILPGKLELCSDDQGSLSPARETSIDDGLGSQYPLKKDSCGDQFLSVPSPFTWSKPKPGHTPIFRTSSLPPLDWPLPAHFGQCELKIEVQPKTHHRAHYETEGSRGAVKASTGGHPVVKLLGYNEKPINLQMFIGTADDRYLRPHAFYQVHRITGKTVATASQEIIIASTKVLEIPLLPENNMSASIDCAGILKLRNSDIELRKGETDIGRKNTRVRLVFRVHIPQPSGKVLSLQIASIPVECSQRSAQELPHIEKYSINSCSVNGGHEMVVTGSNFLPESKIIFLEKGQDGRPQWEVEGKIIREKCQGAHIVLEVPPYHNPAVTAAVQVHFYLCNGKRKKSQSQRFTYTPVLMKQEHREEIDLSSVPSLPVPHPAQTQRPSSDSGCSHDSVLSGQRSLICSIPQTYASMVTSSHLPQLQCRDESVSKEQHMIPSPIVHQPFQVTPTPPVGSSYQPMQTNVVYNGPTCLPINAASSQEFDSVLFQQDATLSGLVNLGCQPLSSIPFHSSNSGSTGHLLAHTPHSVHTLPHLQSMGYHCSNTGQRSLSSPVADQITGQPSSQLQPITYGPSHSGSATTASPAASHPLASSPLSGPPSPQLQPMPYQSPSSGTASSPSPATRMHSGQHSTQAQSTGQGGLSAPSSLICHSLCDPASFPPDGATVSIKPEPEDREPNFATIGLQDITLDDDLFTSNNFDLASVETYVLASPSRKISEESRVNEIIGRDMSQISVSQGAGVSRQAPLPSPESLDLGRSDGL

SEQ ID NO: 865653 - protein, 596 aa, Homo sapiens
MFIGTADDRYLRPHAFYQVHRITGKTVATASQEIIIASTKVLEIPLLPENNMSASIDCAGILKLRNSDIELRKGETDIGRKNTRVRLVFRVHIPQPSGKVLSLQIASIPVECSQRSAQELPHIEKYSINSCSVNGGHEMVVTGSNFLPESKIIFLEKGQDGRPQWEVEGKIIREKCQGAHIVLEVPPYHNPAVTAAVQVHFYLCNGKRKKSQSQRFTYTPVLMKQEHREEIDLSSVPSLPVPHPAQTQRPSSDSGCSHDSVLSGQRSLICSIPQTYASMVTSSHLPQLQCRDESVSKEQHMIPSPIVHQPFQVTPTPPVGSSYQPMQTNVVYNGPTCLPINAASSQEFDSVLFQQDATLSGLVNLGCQPLSSIPFHSSNSGSTGHLLAHTPHSVHTLPHLQSMGYHCSNTGQRSLSSPVADQITGQPSSQLQPITYGPSHSGSATTASPAASHPLASSPLSGPPSPQLQPMPYQSPSSGTASSPSPATRMHSGQHSTQAQSTGQGGLSAPSSLICHSLCDPASFPPDGATVSIKPEPEDREPNFATIGLQDITLDDVNEIIGRDMSQISVSQGAGVSRQAPLPSPESLDLGRSDGL

SEQ ID NO: 865654 - protein, 682 aa, Homo sapiens
WYTSSHQNAFWTALNSSTKYGPGGSFCTFILNMSQFVDPASFPPDGATVSIKPEPEDREPNFATIGLQDITLDELLGYNEKPINLQMFIGTADDRYLRPHAFYQVHRITGKTVATASQEIIIASTKVLEIPLLPENNMSASIDCAGILKLRNSDIELRKGETDIGRKNTRVRLVFRVHIPQPSGKVLSLQIASIPVECSQRSAQELPHIEKYSINSCSVNGGHEMVVTGSNFLPESKIIFLEKGQDGRPQWEVEGKIIREKCQGAHIVLEVPPYHNPAVTAAVQVHFYLCNGKRKKSQSQRFTYTPVLMKQEHREEIDLSSVPSLPVPHPAQTQRPSSDSGCSHDSVLSGQRSLICSIPQTYASMVTSSHLPQLQCRDESVSKEQHMIPSPIVHQPFQVTPTPPVGSSYQPMQTNVVYNGPTCLPINAASSQEFDSVLFQQDATLSGLVNLGCQPLSSIPFHSSNSGSTGHLLAHTPHSVHTLPHLQSMGYHCSNTGQRSLSSPVADQITGQPSSQLQPITYGPSHSGSATTASPAASHPLASSPLSGPPSPQLQPMPYQSPSSGTASSPSPATRMHSGQHSTQAQSTGQGGLSAPSSLICHSLCDPASFPPDGATVSIKPEPEDREPNFATIGLQDITLDDVNEIIGRDMSQISVSQGAGVSRQAPLPSPESLDLGRSDGL

SEQ ID NO: 865655 - protein, 676 aa, Homo sapiens
MTTANCGAHDELDFKLVFGEDGAPAPPPPGSRPADLEPDDCASIYIFNVDPPPSTLTTPLCLPHHGLPSHSSVLSPSFQLQSHKNYEGTCEIPESKYSPLGGPKPFECPSIQITSISPNCHQELDAHEDDLQINDPEREFLERPSRDHLYLPLEPSYRESSLSPSPASSISSRSWFSDASSCESLSHIYDDVDSELNEAAARFTLGSPLTSPGGSPGGCPGEETWHQQYGLGHSLSPRQSPCHSPRSSVTDENWLSPRPASGPSSRPTSPCGKRRHSSAEVCYAGSLSPHHSPVPSPGHSPRGSVTEDTWLNASVHGGSGLGPAVFPFQYCVETDIPLKTRKTSEDQAAILPGKLELCSDDQGSLSPARETSIDDGLGSQYPLKKDSCGDQFLSVPSPFTWSKPKPGHTPIFRTSSLPPLDWPLPAHFGQCELKIEVQPKTHHRAHYETEGSRGAVKASTGGHPVVKLLGYNEKPINLQMFIGTADDRYLRPHAFYQVHRITGKTVATASQEIIIASTKVLEIPLLPENNMSASIDCAGILKLRNSDIELRKGETDIGRKNTRVRLVFRVHIPQPSGKVLSLQIASIPVECSQRSAQELPHIEKYSINSCSVNGGHEMVVTGSNFLPESKIIFLEKGQDGRPQWEVEGKIIREKCQGAHIVLEVPPYHNPAPEAFL

SEQ ID NO: 865656 - protein, 280 aa, Homo sapiens
RGNNIDTTSWCIRPRYNGPTCLPINAASSQEFDSVLFQQDATLSGLVNLGCQPLSSIPFHSSNSGSTGHLLAHTPHSVHTLPHLQSMGYHCSNTGQRSLSSPVADQITGQPSSQLQPITYGPSHSGSATTASPAASHPLASSPLSGPPSPQLQPMPYQSPSSGTASSPSPATRMHSGQHSTQAQSTGQGGLSAPSSLICHSLCDPASFPPDGATVSIKPEPEDREPNFATIGLQDITLDDVNEIIGRDMSQISVSQGAGVSRQAPLPSPESLDLGRSDGL

SEQ ID NO: 865657 - protein, 298 aa, Homo sapiens
RGNNIDTTSWCIRPRYNGPTCLPINAASSQEFDSVLFQQDATLSGLVNLGCQPLSSIPFHSSNSGSTGHLLAHTPHSVHTLPHLQSMGYHCSNTGQRSLSSPVADQITGQPSSQLQPITYGPSHSGSATTASPAASHPLASSPLSGPPSPQLQPMPYQSPSSGTASSPSPATRMHSGQHSTQAQSTGQGGLSAPSSLICHSLCDPASFPPDGATVSIKPEPEDREPNFATIGLQDITLDDVETYVLASPSRKISEESRVNEIIGRDMSQISVSQGAGVSRQAPLPSPESLDLGRSDGL

SEQ ID NO: 865658 - protein, 1075 aa, Homo sapiens; identical to SEQ ID NO: 865651

SEQ ID NO: 865659 - protein, 1075 aa, Homo sapiens; identical to SEQ ID NO: 865651

SEQ ID NO: 865660 - protein, 915 aa, Homo sapiens
MTTANCGAHDELDFKLVFGEDGAPAPPPPGSRPADLEPDDCASIYIFNVDPPPSTLTTPLCLPHHGLPSHSSVLSPSFQLQSHKNYEGTCEIPESKYSPLGGPKPFECPSIQITSISPNCHQELDAHEDDLQINDPEREFLERPSRDHLYLPLEPSYRESSLSPSPASSISSRSWFSDASSCESLSHIYDDVDSELNEAAARFTLGSPLTSPGGSPGGCPGEETWHQQYGLGHSLSPRQSPCHSPRSSVTDENWLSPRPASGPSSRPTSPCGKRRHSSAEVCYAGSLSPHHSPVPSPGHSPRGSVTEDTWLNASVHGGSGLGPAVFPFQYCVETDIPLKTRKTSEDQAAILPGKLELCSDDQGSLSPARETSIDDGLGSQYPLKKDSCGDQFLSVPSPFTWSKPKPGHTPIFRTSSLPPLDWPLPAHFGQCELKIEVQPKTHHRAHYETEGSRGAVKASTGGHPVVKLLGYNEKPINLQMFIGTADDRYLRPHAFYQVHRITGKTVATASQEIIIASTKVLEIPLLPENNMSASIDCAGILKLRNSDIELRKGETDIGRKNTRVRLVFRVHIPQPSGKVLSLQIASIPVECSQRSAQELPHIEKYSINSCSVNGGHEMVVTGSNFLPESKIIFLEKGQDGRPQWEVEGKIIREKCQGAHIVLEVPPYHNPAVTAAVQVHFYLCNGKRKKSQSQRFTYTPVLMKQEHREEIDLSSVPSLPVPHPAQTQRPSSDSGCSHDSVLSGQRSLICSIPQTYASMVTSSHLPQLQCRDESVSKEQHMIPSPIVHQPFQVTPTPPVGSSYQPMQTNVVYNGPTCLPINAASSQEFDSVLFQQDATLSGLVNLGCQPLSSIPFHSSNSGSTGHLLAHTPHSVHTLPHLQSMGYHCSNTGQRSLSSPVADQITGQPSSQMRKYGL

SEQ ID NO: 865661 - protein, 549 aa, Homo sapiens
MTTANCGAHDELDFKLVFGEDGAPAPPPPGSRPADLEPDDCASIYIFNVDPPPSTLTTPLCLPHHGLPSHSSVLSPSFQLQSHKNYEGTCEIPESKYSPLGGPKPFECPSIQITSISPNCHQELDAHEDDLQINDPEREFLERPSRDHLYLPLEPSYRESSLSPSPASSISSRSWFSDASSCESLSHIYDDVDSELNEAAARFTLGSPLTSPGGSPGGCPGEETWHQQYGLGHSLSPRQSPCHSPRSSVTDENWLSPRPASGPSSRPTSPCGKRRHSSAEVCYAGSLSPHHSPVPSPGHSPRGSVTEDTWLNASVHGGSGLGPAVFPFQYCVETDIPLKTRKTSEDQAAILPGKLELCSDDQGSLSPARETSIDDGLGSQYPLKKDSCGDQFLSVPSPFTWSKPKPGHTPIFRTSSLPPLDWPLPAHFGQCELKIEVQPKTHHRAHYETEGSRGAVKASTGGHPVVKESKIRSSFDVVFDAQLLLSMGKKKVYGKHSRYLTTLTWKLLSIITTYNFLATSSHMALLTCRSTGKSSPWLGSLSSSKLCIL

SEQ ID NO: 865662 - protein, 205 aa, Homo sapiens
MFIGTADDRYLRPHAFYQVHRITGKTVATASQEIIIASTKVLEIPLLPENNMSASIDCAGILKLRNSDIELRKGETDIGRKNTRVRLVFRVHIPQPSGKVLSLQIASIPVECSRGLSELLILGSQFHAWSVHGRCTRGGYHFPNPPFGTAMWTRREGNQRVGPVLQVLNTGAGAMGRSDAFYGRQQRVLCASQCGRHPSLVPPFW

SEQ ID NO: 865663 - protein, 1068 aa, Homo sapiens; identical to SEQ ID NO: 865649

SEQ ID NO: 865664 - protein, 1068 aa, Homo sapiens; identical to SEQ ID NO: 865649

SEQ ID NO: 865665 - protein, 1049 aa, Homo sapiens
SNPYFFLPDLEPDDCASIYIFNVDPPPSTLTTPLCLPHHGLPSHSSVLSPSFQLQSHKNYEGTCEIPESKYSPLGGPKPFECPSIQITSISPNCHQELDAHEDDLQINDPEREFLERPSRDHLYLPLEPSYRESSLSPSPASSISSRSWFSDASSCESLSHIYDDVDSELNEAAARFTLGSPLTSPGGSPGGCPGEETWHQQYGLGHSLSPRQSPCHSPRSSVTDENWLSPRPASGPSSRPTSPCGKRRHSSAEVCYAGSLSPHHSPVPSPGHSPRGSVTEDTWLNASVHGGSGLGPAVFPFQYCVETDIPLKTRKTSEDQAAILPGKLELCSDDQGSLSPARETSIDDGLGSQYPLKKDSCGDQFLSVPSPFTWSKPKPGHTPIFRTSSLPPLDWPLPAHFGQCELKIEVQPKTHHRAHYETEGSRGAVKASTGGHPVVKLLGYNEKPINLQMFIGTADDRYLRPHAFYQVHRITGKTVATASQEIIIASTKVLEIPLLPENNMSASIDCAGILKLRNSDIELRKGETDIGRKNTRVRLVFRVHIPQPSGKVLSLQIASIPVECSQRSAQELPHIEKYSINSCSVNGGHEMVVTGSNFLPESKIIFLEKGQDGRPQWEVEGKIIREKCQGAHIVLEVPPYHNPAVTAAVQVHFYLCNGKRKKSQSQRFTYTPVLMKQEHREEIDLSSVPSLPVPHPAQTQRPSSDSGCSHDSVLSGQRSLICSIPQTYASMVTSSHLPQLQCRDESVSKEQHMIPSPIVHQPFQVTPTPPVGSSYQPMQTNVVYNGPTCLPINAASSQEFDSVLFQQDATLSGLVNLGCQPLSSIPFHSSNSGSTGHLLAHTPHSVHTLPHLQSMGYHCSNTGQRSLSSPVADQITGQPSSQLQPITYGPSHSGSATTASPAASHPLASSPLSGPPSPQLQPMPYQSPSSGTASSPSPATRMHSGQHSTQAQSTGQGGLSAPSSLICHSLCDPASFPPDGATVSIKPEPEDREPNFATIGLQDITLDDVNEIIGRDMSQISVSQGAGVSRQAPLPSPESLDLGRSDGL

SEQ ID NO: 865666 - protein, 1093 aa, Homo sapiens
MTTANCGAHDELDFKLVFGEDGAPAPPPPGSRPADLEPDDCASIYIFNVDPPPSTLTTPLCLPHHGLPSHSSVLSPSFQLQSHKNYEGTCEIPESKYSPLGGPKPFECPSIQITSISPNCHQELDAHEDDLQINDPEREFLERPSRDHLYLPLEPSYRESSLSPSPASSISSRSWFSDASSCESLSHIYDDVDSELNEAAARFTLGSPLTSPGGSPGGCPGEETWHQQYGLGHSLSPRQSPCHSPRSSVTDENWLSPRPASGPSSRPTSPCGKRRHSSAEVCYAGSLSPHHSPVPSPGHSPRGSVTEDTWLNASVHGGSGLGPAVFPFQYCVETDIPLKTRKTSEDQAAILPGKLELCSDDQGSLSPARETSIDDGLGSQYPLKKDSCGDQFLSVPSPFTWSKPKPGHTPIFRTSSLPPLDWPLPAHFGQCELKIEVQPKTHHRAHYETEGSRGAVKASTGGHPVVKLLGYNEKPINLQMFIGTADDRYLRPHAFYQVHRITGKTVATASQEIIIASTKVLEIPLLPENNMSASIDCAGILKLRNSDIELRKGETDIGRKNTRVRLVFRVHIPQPSGKVLSLQIASIPVECSQRSAQELPHIEKYSINSCSVNGGHEMVVTGSNFLPESKIIFLEKGQDGRPQWEVEGKIIREKCQGAHIVLEVPPYHNPAVTAAVQVHFYLCNGKRKKSQSQRFTYTPVLMKQEHREEIDLSSVPSLPVPHPAQTQRPSSDSGCSHDSVLSGQRSLICSIPQTYASMVTSSHLPQLQCRDESVSKEQHMIPSPIVHQPFQVTPTPPVGSSYQPMQTNVVYNGPTCLPINAASSQEFDSVLFQQDATLSGLVNLGCQPLSSIPFHSSNSGSTGHLLAHTPHSVHTLPHLQSMGYHCSNTGQRSLSSPVADQITGQPSSQLQPITYGPSHSGSATTASPAASHPLASSPLSGPPSPQLQPMPYQSPSSGTASSPSPATRMHSGQHSTQAQSTGQGGLSAPSSLICHSLCDPASFPPDGATVSIKPEPEDREPNFATIGLQDITLDDVETYVLASPSRKISEESRVNEIIGRDMSQISVSQGAGVSRQAPLPSPESLDLGRSDGL

SEQ ID NO: 865667 - protein, 374 aa, Homo sapiens [sequence omitted]

SEQ ID NO: 865668 - protein, 271 aa, Homo sapiens
PACRNSLPSRHDFEKTTEGSQEFDSVLFQQDATLSGLVNLGCQPLSSIPFHSSNSGSTGHLLAHTPHSVHTLPHLQSMGYHCSNTGQRSLSSPVADQITGQPSSQLQPITYGPSHSGSATTASPAASHPLASSPLSGPPSPQLQPMPYQSPSSGTASSPSPATRMHSGQHSTQAQSTGQGGLSAPSSLICHSLCDPASFPPDGATVSIKPEPEDREPNFATIGLQDITLDDVNEIIGRDMSQISVSQGAGVSRQAPLPSPESLDLGRSDGL

SEQ ID NO: 865669 - protein, 1045 aa, Homo sapiens
MTTANCGAHDELDFKLVFGEDGAPAPPPPGSRPADLEPDDCASIYIFNVDPPPSTLTTPLCLPHHGLPSHSSVLSPSFQLQSHKNYEGTCEIPESKYSPLGGPKPFECPSIQITSISPNCHQELDAHEDDLQINDPEREFLERPSRDHLYLPLEPSYRESSLSPSPASSISSRSWFSDASSCESLSHIYDDVDSELNEAAARFTLGSPLTSPGGSPGGCPGEETWHQQYGLGHSLSPRQSPCHSPRSSVTDENWLSPRPASGPSSRPTSPCGKRRHSSAEVCYAGSLSPHHSPVPSPGHSPRGSVTEDTWLNASVHGGSGLGPAVFPFQYCVETDIPLKTRKTSEDQAAILPGKLELCSDDQGSLSPARETSIDDGLGSQYPLKKDSCGDQFLSVPSPFTWSKPKPGHTPIFRTSSLPPLDWPLPAHFGQCELKIEVQPKTHHRAHYETEGSRGAVKASTGGHPVVKLLGYNEKPINLQMFIGTADDRYLRPHAFYQVHRITGKTVATASQEIIIASTKVLEIPLLPENNMSASIDCAGILKLRNSDIELRKGETDIGRKNTRVRLVFRVHIPQPSGKVLSLQIASIPVECSQRSAQELPHIEKYSINSCSVNGGHEMVVTGSNFLPESKIIFLEKGQDGRPQWEVEGKIIREKCQGAHIVLEVPPYHNPAVTAAVQVHFYLCNGKRKKSQSQRFTYTPVLMKQEHREEIDLSSVPSLPVPHPAQTQRPSSDSGCSHDSVLSGQRSLICSIPQTYASMVTSSHLPQLQCRDESVSKEQHMIPSPIVHQPFQVTPTPPVGSSYQPMQTNVVYNGPTCLPINAASSQEFDSVLFQQDATLSGLVNLGCQPLSSIPFHSSNSGSTGHLLAHTPHSVHTLPHLQSMGYHCSNTGQRSLSSPVADQITGQPSSQLQPITYGPSHSGSATTASPAASHPLASSPLSGPPSPQLQPMPYQSPSSGTASSPSPATRMHSGQHSTQAQSTGQGGLSAPSSLICHSLCDPASFPPDGATVSIKPEPEDREPNFATIGLQDITLDDGKFISDMFLK

SEQ ID NO: 865670 - protein, 1067 aa, Homo sapiens
MTTANCGAHDELDFKLVFGEDGAPAPPPPGSRPADLEPDDCASIYIFNVDPPPSTLTTPLCLPHHGLPSHSSVLSPSFQLQSHKNYEGTCEIPESKYSPLGGPKPFECPSIQITSISPNCHQELDAHEDDLQINDPEREFLERPSRDHLYLPLEPSYRESSLSPSPASSISSRSWFSDASSCESLSHIYDDVDSELNEAAARFTLGSPLTSPGGSPGGCPGEETWHQQYGLGHSLSPRQSPCHSPRSSVTDENWLSPRPASGPSSRPTSPCGKRRHSSAEVCYAGSLSPHHSPVPSPGHSPRGSVTEDTWLNASVHGGSGLGPAVFPFQYCVETDIPLKTRKTSEDQAAILPGKLELCSDDQGSLSPARETSIDDGLGSQYPLKKDSCGDQFLSVPSPFTWSKPKPGHTPIFRTSSLPPLDWPLPAHFGQCELKIEVQPKTHHRAHYETEGSRGAVKASTGGHPVVKLLGYNEKPINLQMFIGTADDRYLRPHAFYQVHRITGKTVATASQEIIIASTKVLEIPLLPENNMSASIDCAGILKLRNSDIELRKGETDIGRKNTRVRLVFRVHIPQPSGKVLSLQIASIPVECSQRSAQELPHIEKYSINSCSVNGGHEMVVTGSNFLPESKIIFLEKGQDGRPQWEVEGKIIREKCQGAHIVLEVPPYHNPAVTAAVQVHFYLCNGKRKKSQSQRFTYTPVLMKQEHREEIDLSSVPSLPVPHPAQTQRPSSDSGCSHDSVLSGQRSLICSIPQTYASMVTSSHLPQLQCRDESVSKEQHMIPSPIVHQPFQVTPTPPVGSSYQPMQTNVVYNGPTCLPINAASSQEFDSVLFQQDATLSGLVNLGCQPLSSIPFHSSNSGSTGHLLAHTPHSVHTLPHLQSMGYHCSNTGQRSLSSPVADQITGQPSSQLQPITYGPSHSGSATTASPAASHPLASSPLSGPPSPQLQPMPYQSPSSGTASSPSPATRMHSGQHSTQAQSTGQGGLSAPSSLICHSLCDPASFPPDGATVSIKPEPEDREPNFATIGLQDITLDDVETYVLASPSRKISEESRGEEPEPRAPSPREK

SEQ ID NO: 865671 - protein, 859 aa, Homo sapiens
MTTANCGAHDELDFKLVFGEDGAPAPPPPGSRPADLEPDDCASIYIFNVDPPPSTLTTPLCLPHHGLPSHSSVLSPSFQLQSHKNYEGTCEIPESKYSPLGGPKPFECPSIQITSISPNCHQELDAHEDDLQINDPEREFLERPSRDHLYLPLEPSYRESSLSPSPASSISSRSWFSDASSCESLSHIYDDVDSELNEAAARFTLGSPLTSPGGSPGGCPGEETWHQQYGLGHSLSPRQSPCHSPRSSVTDENWLSPRPASGPSSRPTSPCGKRRHSSAEVCYAGSLSPHHSPVPSPGHSPRGSVTEDTWLNASVHGGSGLGPAVFPFQYCVETDIPLKTRKTSEDQAAILPGKLELCSDDQGSLSPARETSIDDGLGSQYPLKKDSCGDQFLSVPSPFTWSKPKPGHTPIFRTSSLPPLDWPLPAHFGQCELKIEVQPKTHHRAHYETEGSRGAVKASTGGHPVVKLLGYNEKPINLQMFIGTADDRYLRPHAFYQVHRITGKTVATASQEIIIASTKVLEIPLLPENNMSASIDCAGILKLRNSDIELRKGETDIGRKNTRVRLVFRVHIPQPSGKVLSLQIASIPVECSQRSAQELPHIEKYSINSCSVNGGHEMVVTGSNFLPESKIIFLEKGQDGRPQWEVEGKIIREKCQGAHIVLEVPPYHNPAVTAAVQVHFYLCNGKRKKSQSQRFTYTPVLMKQEHREEIDLSSVPSLPVPHPAQTQRPSSDSGCSHDSVLSGQRSLICSIPQTYASMVTSSHLPQLQCRDESVSKEQHMIPSPIVHQPFQVTPTPPVGSSYQPMQTNVVYNGPTCLPINAASSQEFDSVLFQQDDQDSRMIRTADDQQQDDQDSRMIR

SEQ ID NO: 865672 - protein, 122 aa, Homo sapiens
MVQLRPRASRAPASAEAMVDEGQLASEEEEAEHGLLLGQPSSGAAAEPLEEDEEGDDEFDDEAPEELTFASAQAEAREEERRVRETVRRDKTLLKEKRKRREERVHRTEEKHQEIARKGERS

SEQ ID NO: 865673 - protein, 128 aa, Homo sapiens
MVQLRPRASRAPASAEAMVDEGQLASEEEEAEHGLLLGQPSSGAAAEPLEEDEEGDDEFDDEAPEELTFASAQAEAREEERRVRETVRRDKTLLKEKRKRREERVHRTEEKKTPSRHYFGEVNHSFTD

SEQ ID NO: 865674 - protein, 128 aa, Homo sapiens; identical to SEQ ID NO: 865673

SEQ ID NO: 865675 - protein, 128 aa, Homo sapiens; identical to SEQ ID NO: 865673

SEQ ID NO: 865676 - protein, 128 aa, Homo sapiens; identical to SEQ ID NO: 865673

SEQ ID NO: 865677 - protein, 128 aa, Homo sapiens; identical to SEQ ID NO: 865673

SEQ ID NO: 865678 - protein, 110 aa, Homo sapiens [sequence omitted]

SEQ ID NO: 865679 - protein, 128 aa, Homo sapiens; identical to SEQ ID NO: 865673

SEQ ID NO: 865680 - protein, 128 aa, Homo sapiens; identical to SEQ ID NO: 865673

SEQ ID NO: 865681 - protein, 128 aa, Homo sapiens; identical to SEQ ID NO: 865673

SEQ ID NO: 865682 - protein, 128 aa, Homo sapiens; identical to SEQ ID NO: 865673

SEQ ID NO: 865683 - protein, 128 aa, Homo sapiens; identical to SEQ ID NO: 865673

SEQ ID NO: 865684 - protein, 81 aa, Homo sapiens
LLLCPSPYLVSRIDFITKFWVPASGVPDETKRLLVLHPRCYFQNSGLVVWSLHCSMSLLSNLESSVFLPSGLSSTFHRLSF

SEQ ID NO: 865685 - protein, 550 aa, Homo sapiens
MPPPRTGRGLLWLGLVLSSVCVALGSETQANSTTDALNVLLIIVDDLRPSLGCYGDKLVRSPNIDQLASHSLLFQNAFAQQAVCAPSRVSFLTGRRPDTTRLYDFNSYWRVHAGNFSTIPQYFKENGYVTMSVGKVFHPGISSNHTDDSPYSWSFPPYHPSSEKYENTKTCRGPDGELHANLLCPVDVLDVPEGTLPDKQSTEQAIQLLEKMKTSASPFFLAVGYHKPHIPFRYPKEFQKLYPLENITLAPDPEVPDGLPPVAYNPWMDIRQREDVQALNISVPYGPIPVDFQRKIRQSYFASVSYLDTQVGRLLSALDDLQLANSTIIAFTSDHGWALGEHGEWAKYSNFDVATHVPLIFYVPGRTASLPEAGEKLFPYLDPFDSASQLMEPGRQSMDLVELVSLFPTLAGLAGLQVPPRCPVPSFHVELCREGKNLLKHFRFRDLEEDPYLPGNPRELIAYSQYPRPSDIPQWNSDKPSLKDIKIMGYSIRTIDYRYTVWVGFNPDEFLANFSDIHAGELYFVDSDPLQDHNMYNDSQGGDLFQLLMP

SEQ ID NO: 865686 - protein, 550 aa, Homo sapiens; identical to SEQ ID NO: 865685

SEQ ID NO: 865687 - protein, 492 aa, Homo sapiens
MPPPRTGRGLLWLGLVLSSVCVALGSETQANSTTDALNVLLIIVDDLRPSLGCYGDKLVRSPNIDQLASHSLLFQNAFAQQAVCAPSRVSFLTGRRPDTTRLYDFNSYWRVHAGNFSTIPQYFKENGYVTMSVGKVFHPGISSNHTDDSPYSWSFPPYHPSSEKYENTKTCRGPDGELHANLLCPVDVLDVPEGTLPDKQSTEQAIQLLEKMKTSASPFFLAVGYHKPHIPFRYPKEFQKLYPLENITLAPDPEVPDGLPPVAYNPWMDIRQREDVQALNISVPYGPIPVDFQRKIRQSYFASVSYLDTQVGRLLSALDDLQLANSTIIAFTSDHGRQSMDLVELVSLFPTLAGLAGLQVPPRCPVPSFHVELCREGKNLLKHFRFRDLEEDPYLPGNPRELIAYSQYPRPSDIPQWNSDKPSLKDIKIMGYSIRTIDYRYTVWVGFNPDEFLANFSDIHAGELYFVDSDPLQDHNMYNDSQGGDLFQLLMP

SEQ ID NO: 865688 - protein, 550 aa, Homo sapiens; identical to SEQ ID NO: 865685

SEQ ID NO: 865689 - protein, 550 aa, Homo sapiens; identical to SEQ ID NO: 865685

SEQ ID NO: 865690 - protein, 339 aa, Homo sapiens
MKTSASPFFLAVGYHKPHIPFRYPKEFQKLYPLENITLAPDPEVPDGLPPVAYNPWMDIRQREDVQALNISVPYGPIPVDFQRKIRQSYFASVSYLDTQVGRLLSALDDLQLANSTIIAFTSDHGWALGEHGEWAKYSNFDVATHVPLIFYVPGRTASLPEAGEKLFPYLDPFDSASQLMEPGRQSMDLVELVSLFPTLAGLAGLQVPPRCPVPSFHVELCREGKNLLKHFRFRDLEEDPYLPGNPRELIAYSQYPRPSDIPQWNSDKPSLKDIKIMGYSIRTIDYRYTVWVGFNPDEFLANFSDIHAGELYFVDSDPLQDHNMYNDSQGGDLFQLLMP

SEQ ID NO: 865691 - protein, 550 aa, Homo sapiens; identical to SEQ ID NO: 865685

SEQ ID NO: 865692 - protein, 339 aa, Homo sapiens; identical to SEQ ID NO: 865690

SEQ ID NO: 865693 - protein, 339 aa, Homo sapiens; identical to SEQ ID NO: 865690

SEQ ID NO: 865694 - protein, 176 aa, Homo sapiens
RGLYQFGSSPDSASQLMEPGRQSMDLVELVSLFPTLAGLAGLQVPPRCPVPSFHVELCREGKNLLKHFRFRDLEEDPYLPGNPRELIAYSQYPRPSDIPQWNSDKPSLKDIKIMGYSIRTIDYRYTVWVGFNPDEFLANFSDIHAGELYFVDSDPLQDHNMYNDSQGGDLFQLLMP

SEQ ID NO: 865695 - protein, 550 aa, Homo sapiens; identical to SEQ ID NO: 865685

SEQ ID NO: 865696 - protein, 550 aa, Homo sapiens; identical to SEQ ID NO: 865685

SEQ ID NO: 865697 - protein, 312 aa, Homo sapiens
MPPPRTGRGLLWLGLVLSSVCVALGSETQANSTTDALNVLLIIVDDLRPSLGCYGDKLVRSPNIDQLASHSLLFQNAFAQQAVCAPSRVSFLTGRRPDTTRLYDFNSYWRVHAGNFSTIPQYFKENGYVTMSVGKVFHPGISSNHTDDSPYSWSFPPYHPSSEKYENTKTCRGPDGELHANLLCPVDVLDVPEGTLPDKQSTEQAIQLLEKMKTSASPFFLAVGYHKPHIPFRYPKEFQKLYPLENITLAPDPEVPDGLPPVAYNPWMDIRQREDVQALNISVPYGPIPVDFQEDQSSTGFRLKTSSTRKYK

SEQ ID NO: 865698 - protein, 355 aa, Homo sapiens
MPPPRTGRGLLWLGLVLSSVCVALGSETQANSTTDALNVLLIIVDDLRPSLGCYGDKLVRSPNIDQLASHSLLFQNAFAQQAVCAPSRVSFLTGRRPDTTRLYDFNSYWRVHAGNFSTIPQYFKENGYVTMSVGKVFHPGISSNHTDDSPYSWSFPPYHPSSEKYENTKTCRGPDGELHANLLCPVDVLDVPEGTLPDKQSTEQAIQLLEKMKTSASPFFLAVGYHKPHIPFRYPKEFQKLYPLENITLAPDPEVPDGLPPVAYNPWMDIRQREDVQALNISVPYGPIPVDFQNPALLLPHECCGRQAIADGRWQCFQSVHPGLPALEFLGGLVGNAKSWPTQIYTIGSWRWNLT

SEQ ID NO: 865699 - protein, 83 aa, Homo sapiens
LATRRRCSVYRILSRASQPGQGRGARDRQPRPRTGRRKRNRREEEEGRDETTRQESKLSRGDLTAPPVSSPRGHRSSKKGGNT

SEQ ID NO: 865700 - protein, 83 aa, Homo sapiens; identical to SEQ ID NO: 865699

SEQ ID NO: 865701 - protein, 83 aa, Homo sapiens; identical to SEQ ID NO: 865699

SEQ ID NO: 865702 - protein, 215 aa, Homo sapiens
DARQPTRPRPGDLETGSLDEEPEGGKGTGGRKISRIDFITKFWVPASGVPDETKRLLVLHPRCYFQNSGLVVWSLHCSMSLLSNLESSVFLPSVRCAYFSLEKLEEAGMLEMRPSTPCLHGAALHLHSGHGSGSRLTNSSCFPGTRRLLALQFTQQTGTVGHPTWQPVIRAGVIGMTDLPWLSVHPSSEFSHLSKSWVCSSDFAARPLPGSGATL

SEQ ID NO: 865703 - protein, 117 aa, Homo sapiens
MPPPRTGRGLLWLGLVLSSVCVALGSETQANSTTGAAHALPAISSPFLPPFLPPSFFPSFFVYIHSFYPSSLLPFLLSSIIRSLPPFFTPSYRPFIPPFPLSIYSSIHLLSLRASLP

SEQ ID NO: 865704 - protein, 67 aa, Homo sapiens
SHRVAASREALGGHIRAPFSNSLSCSSLSLLGVLGSGVQCARRCTLSLGGSEQQRSDLWSDDERKCK

SEQ ID NO: 865705 - protein, 83 aa, Homo sapiens; identical to SEQ ID NO: 865699

SEQ ID NO: 865706 - protein, 550 aa, Homo sapiens; identical to SEQ ID NO: 865685

SEQ ID NO: 865707 - protein, 550 aa, Homo sapiens; identical to SEQ ID NO: 865685

SEQ ID NO: 865708 - protein, 550 aa, Homo sapiens; identical to SEQ ID NO: 865685

SEQ ID NO: 865709 - protein, 550 aa, Homo sapiens; identical to SEQ ID NO: 865685

SEQ ID NO: 865710 - protein, 584 aa, Homo sapiens
MPPPRTGRGLLWLGLVLSSVCVALGSETQANSTTDALNVLLIIVDDLRPSLGCYGDKLVRSPNIDQLASHSLLFQNAFAQQAVCAPSRVSFLTGRRPDTTRLYDFNSYWRVHAGNFSTIPQYFKENGYVTMSVGKVFHPALVGTHFSAEFCSQDLFLLALGLLQDDSSHHCVPGISSNHTDDSPYSWSFPPYHPSSEKYENTKTCRGPDGELHANLLCPVDVLDVPEGTLPDKQSTEQAIQLLEKMKTSASPFFLAVGYHKPHIPFRYPKEFQKLYPLENITLAPDPEVPDGLPPVAYNPWMDIRQREDVQALNISVPYGPIPVDFQRKIRQSYFASVSYLDTQVGRLLSALDDLQLANSTIIAFTSDHGWALGEHGEWAKYSNFDVATHVPLIFYVPGRTASLPEAGEKLFPYLDPFDSASQLMEPGRQSMDLVELVSLFPTLAGLAGLQVPPRCPVPSFHVELCREGKNLLKHFRFRDLEEDPYLPGNPRELIAYSQYPRPSDIPQWNSDKPSLKDIKIMGYSIRTIDYRYTVWVGFNPDEFLANFSDIHAGELYFVDSDPLQDHNMYNDSQGGDLFQLLMP

SEQ ID NO: 865711 - protein, 460 aa, Homo sapiens
MPLRRRPDTTRLYDFNSYWRVHAGNFSTIPQYFKENGYVTMSVGKVFHPGISSNHTDDSPYSWSFPPYHPSSEKYENTKTCRGPDGELHANLLCPVDVLDVPEGTLPDKQSTEQAIQLLEKMKTSASPFFLAVGYHKPHIPFRYPKEFQKLYPLENITLAPDPEVPDGLPPVAYNPWMDIRQREDVQALNISVPYGPIPVDFQRKIRQSYFASVSYLDTQVGRLLSALDDLQLANSTIIAFTSDHGWALGEHGEWAKYSNFDVATHVPLIFYVPGRTASLPEAGEKLFPYLDPFDSASQLMEPGRQSMDLVELVSLFPTLAGLAGLQVPPRCPVPSFHVELCREGKNLLKHFRFRDLEEDPYLPGNPRELIAYSQYPRPSDIPQWNSDKPSLKDIKIMGYSIRTIDYRYTVWVGFNPDEFLANFSDIHAGELYFVDSDPLQDHNMYNDSQGGDLFQLLMP

SEQ ID NO: 865712 - protein, 153 aa, Homo sapiens
MDLVELVSLFPTLAGLAGLQVPPRCPVPSFHVELCREGKNLLKHFRFRDLEEDPYLPGNPRELIAYSQYPRPSDIPQWNSDKPSLKDIKIMGYSIRTIDYRYTVWVGFNPDEFLANFSDIHAGELYFVDSDPLQDHNMYNDSQGGDLFQLLMP

SEQ ID NO: 865713 - protein, 550 aa, Homo sapiens; identical to SEQ ID NO: 865685

SEQ ID NO: 865714 - protein, 343 aa, Homo sapiens
MPPPRTGRGLLWLGLVLSSVCVALGSETQANSTTDALNVLLIIVDDLRPSLGCYGDKLVRSPNIDQLASHSLLFQNAFAQQAVCAPSRVSFLTGRRPDTTRLYDFNSYWRVHAGNFSTIPQYFKENGYVTMSVGKVFHPGISSNHTDDSPYSWSFPPYHPSSEKYENTKTCRGPDGELHANLLCPVDVLDVPEGTLPDKQSTEQAIQLLEKMKTSASPFFLAVGYHKPHIPFRYPKEFQKLYPLENITLAPDPEVPDGLPPVAYNPWMDIRQREDVQALNISVPYGPIPVDFQRKIRQSYFASVSYLDTQVGRLLSALDDLQLANSTIIAFTSDHGFLMRTNT

SEQ ID NO: 865715 - protein, 382 aa, Homo sapiens
MPPPRTGRGLLWLGLVLSSVCVALGSETQANSTTDALNVLLIIVDDLRPSLGCYGDKLVRSPNIDQLASHSLLFQNAFAQQAVCAPSRVSFLTGRRPDTTRLYDFNSYWRVHAGNFSTIPQYFKENGYVTMSVGKVFHPGISSNHTDDSPYSWSFPPYHPSSEKYENTKTCRGPDGELHANLLCPVDVLDVPEGTLPDKQSTEQAIQLLEKMKTSASPFFLAVGYHKPHIPFRYPKEFQKLYPLENITLAPDPEVPDGLPPVAYNPWMDIRQREDVQALNISVPYGPIPVDFQRKIRQSYFASVSYLDTQVGRLLSALDDLQLANSTIIAFTSDHGWALGEHGEWAKYSNFDVATHVPLIFYVPGRTASLPEAGTGRRGRHL

SEQ ID NO: 865716 - protein, 371 aa, Homo sapiens
MPPPRTGRGLLWLGLVLSSVCVALGSETQANSTTDALNVLLIIVDDLRPSLGCYGDKLVRSPNIDQLASHSLLFQNAFAQQAVCAPSRVSFLTGRRPDTTRLYDFNSYWRVHAGNFSTIPQYFKENGYVTMSVGKVFHPGISSNHTDDSPYSWSFPPYHPSSEKYENTKTCRGPDGELHANLLCPVDVLDVPEGTLPDKQSTEQAIQLLEKMKTSASPFFLAVGYHKPHIPFRYPKEFQKLYPLENITLAPDPEVPDGLPPVAYNPWMDIRQREDVQALNISVPYGPIPVDFQRKIRQSYFASVSYLDTQVGRLLSALDDLQLANSTIIAFTSDHEKLSGRVFPPLAVKQLSPPYSGPPQRLHGMDLSQPN

SEQ ID NO: 865717 - protein, 191 aa, Homo sapiens
LATRRRCSVYRILSRASQPGQGRGARDRQPRPRTGRRKRNRREEEEGRDETTRQESKLSRGDLTAPPVSSPRGHRSSKKGGNIDWGPCSSRLSLAGLSPPGLLSCVLAAPSVPASGVQRDRFFNASFAVRCAYFSLEKLEEAEMLEMSCSSLSLLGVLGSGVQCARRCTLSLGGSEQQRSDLWSDDERKCK

SEQ ID NO: 865718 - protein, 80 aa, Homo sapiens
AWVAFGSFGGLPFGGPIGLRFVCCVCGLLSLFVLSLCFSCLTESCFVRSSCVAPWFAFSLTPRFALRVLDPLVSIVVSLP

SEQ ID NO: 865719 - protein, 179 aa, Homo sapiens
MPPPRTGRGLLWLGLVLSSVCVALGSETQANSTTDALNVLLIIVDDLRPSLGCYGDKLVRSPNIDQLASHSLLFQNAFAQQAVCAPSRVSFLTGRRPDTTRLYDFNSYWRVHAGNFSTIPQYFKENGYVTMSVGKVFHPGTAPCPESGFSWFVVSESSIPILGMGLSLQSPLLAGRVPR

SEQ ID NO: 865720 - protein, 83 aa, Homo sapiens; identical to SEQ ID NO: 865699

SEQ ID NO: 865721 - protein, 215 aa, Homo sapiens; identical to SEQ ID NO: 865702

SEQ ID NO: 865722 - protein, 115 aa, Homo sapiens
MADMFCCGDAYLCFCSQQQAVCAPSRVSFLTGRRPDTTRLYDFNSYWRVHAGNFSTIPQYFKENGYVTMSVGKVFHPGTAPCPESGFSWFVVSESSIPILGMGLSLQSPLLAGRV

SEQ ID NO: 865723 - protein, 229 aa, Homo sapiens
MAPHGPGSLTTLVPWAAALLLALGVERALALPEICTQCPGSVQNLSKVAFYCKTTRELMLHARCCLNQKGTILGLDLQNCSLEDPGPNFHQAHTTVIIDLQANPLKGDLANTFRGFTQLQTLILPQHVNCPGGINAWNTITSYIDNQICQGQKNLCNNTGDPEMCPENGSCVPDGPGLLQCVCADGFHGYKCMRQGSFSLLMFFGILGATTLSVSILLWATQRRKAKTS

SEQ ID NO: 865724 - protein, 192 aa, Homo sapiens
  misc_feature (25)..(25): Xaa can be any naturally occurring amino acid
PSKGSRIPSSGRQSSKAVYRPRLIXCPFCLNQKDLLGLDLQNCSLEDPGPNFHQAHTTVIIDLQANPLKGDLANTFRGFTQLQTLILPQHVNCPGGINAWNTITSYIDNQICQGQKNLCNNTGDPEMCPENGSCVPDGPGLLQCVCADGFHGYKCMRQGSFSLLMFFGILGATTLSVSILLWATQRRKAKTS

SEQ ID NO: 865725 - protein, 229 aa, Homo sapiens; identical to SEQ ID NO: 865723

SEQ ID NO: 865726 - protein, 229 aa, Homo sapiens; identical to SEQ ID NO: 865723

SEQ ID NO: 865727 - protein, 205 aa, Homo sapiens [sequence omitted]

SEQ ID NO: 865728 - protein, 173 aa, Homo sapiens
MHPMSRERAKFVKSGLLLLDLQNCSLEDPGPNFHQAHTTVIIDLQANPLKGDLANTFRGFTQLQTLILPQHVNCPGGINAWNTITSYIDNQICQGQKNLCNNTGDPEMCPENGSCVPDGPGLLQCVCADGFHGYKCMRQGSFSLLMFFGILGATTLSVSILLWATQRRKAKTS

SEQ ID NO: 865729 - protein, 229 aa, Homo sapiens; identical to SEQ ID NO: 865723

SEQ ID NO: 865730 - protein, 205 aa, Homo sapiens
MAPHGPGSLTTLVPWAAALLLALGVERALALPEICTQCPGSVQNLSKVAFYCKTTRELMLHARCCLNQKGTILGLDLQNCSLEDPGPNFHQAHTTVIIDLQANPLKGDLANTFRGFTQLQTLILPQHVNCPGGINAWNTITSYIDNQICQGQKNLCNNTGDPEMCPENGSCVPDGPGLFFGILGATTLSVSILLWATQRRKAKTS

SEQ ID NO: 865731 - protein, 171 aa, Homo sapiens
MLHARCCLNQKGTILGLDLQNCSLEDPGPNFHQAHTTVIIDLQANPLKGDLANTFRGFTQLQTLILPQHVNCPGGINAWNTITSYIDNQICQGQKNLCNNTGDPEMCPENGSCVPDGPGLLQCVCADGFHGYKCMRQGSFSLLMFFGILGATTLSVSILLWATQRRKAKTS

SEQ ID NO: 865732 - protein, 229 aa, Homo sapiens; identical to SEQ ID NO: 865723

SEQ ID NO: 865733 - protein, 229 aa, Homo sapiens; identical to SEQ ID NO: 865723

SEQ ID NO: 865734 - protein, 203 aa, Homo sapiens
MFLSLLQICTQCPGSVQNLSKVAFYCKTTRELMLHARCCLNQKGTILGLDLQNCSLEDPGPNFHQAHTTVIIDLQANPLKGDLANTFRGFTQLQTLILPQHVNCPGGINAWNTITSYIDNQICQGQKNLCNNTGDPEMCPENGSCVPDGPGLLQCVCADGFHGYKCMRQGSFSLLMFFGILGATTLSVSILLWATQRRKAKTS

SEQ ID NO: 865735 - protein, 311 aa, Homo sapiens
WRGPSFCEAATSASGRGEHRAEGVCSRLREAARRRGRPSLKGKRKRGSASIPERGLGRMKTSAELHEQEKPPSSPRATGPGRLGHARGRGPDALRGGAAGPGRASSGAPRERKMAPHGPGSLTTLVPWAAALLLALGVERALALPEICTQCPGSVQNLSKVAFYCKTTRELMLHARCCLNQKGTILGLDLQNCSLEDPGPNFHQAHTTVIIDLQANPLKGDLANTFRGFTQLQTLILPQHVNCPGGINAWNTITSYIDNQICQGQKNLCNNTGDPEMCPENGSCVPDGPGLLQCVCADGFHGYKCMRQVRN

SEQ ID NO: 865736 - protein, 211 aa, Homo sapiens
MAPHGPGSLTTLVPWAAALLLALGVERALALPEICTQCPGSVQNLSKVAFYCKTTRELMLHARCCLNQKGTILGLDLQNCSLEDPGPNFHQAHTTVIIDLQANPLKGDLANTFRGFTQLQTLILPQHVNCPGGINAWNTITSYIDNQICQGPCVPDGPGLLQCVCADGFHGYKCMRQGSFSLLMFFGILGATTLSVSILLWATQRRKAKTS

SEQ ID NO: 865737 - protein, 462 aa, Homo sapiens
MAATVNLELDPIFLKALGFLHSKSKDSAEKLKALLDESLARGIDSSYRPSQKDVEPPKISSTKNISIKQEPKISSSLPSGNNNGKVLTTEKVKKEAEKRPADKMKSDITEGVDIPKKPRLEKPETQSSPITVQSSKDLPMADLSSFEETSADDFAMEMGLACVVCRQMMVASGNQLVECQECHNLYHRDCHKPQVTDKEANDPRLVWYCARCTRQMKRMAQKTQKPPQKPAPAVVSVTPAVKDPLVKKPETKLKQETTFLAFKRTEVKTSTVISGNSSSASVSSSVTSGLTGWAAFAAKTSSAGPSTAKLSSTTQNNTGKPATSSANQKPVGLTGLATSSKGGIGSKIGSNNSTTPTVPLKPPPPLTLGKTGLSRSVSCDNVSKVGLPSPSSLVPGSSSQLSGNGNSGTSGPSGSTTSKTTSESSSSPSASLKGPTSQESQLNAMKRLQMVKKKAAQKKLKK

SEQ ID NO: 865738 - protein, 235 aa, Homo sapiens
MAATVNLELDPIFLKALGFLHSKSKDSAEKLKALLDESLARGIDSSYRPSQKDVEPPKISSTKNISIKQEPKISSSLPSGNNNGKVLTTEKVKKEAEKRPADKMKSDITEGVDIPKKPRLEKPETQSSPITVQSSKDLPMADLSSFEETSADDFAMEMGLACVVCRQMMVASGNQLVECQECHNLYHRDCHKPQVTDKEANDPRLVWYCARCTRQMKRMVNKLRKPRRNQPCSGL

SEQ ID NO: 865739 - protein, 462 aa, Homo sapiens; identical to SEQ ID NO: 865737

SEQ ID NO: 865740 - protein, 581 aa, Homo sapiens
MWKILAPAVIHNPADRKKGSNVTSYCRTAKRFPRPYCGNLCFPAFGAGQCGNRFRRDHREQTDRQGGAERSTQLHQVADLFMTAVESKLLSLYGYLPVKEGKVTEIREGNRKGGVKAFAMAATVNLELDPIFLKALGFLHSKSKDSAEKLKALLDESLARGIDSSYRPSQKDVEPPKISSTKNISIKQEPKISSSLPSGNNNGKVLTTEKVKKEAEKRPADKMKSDITEGVDIPKKPRLEKPETQSSPITVQSSKDLPMADLSSFEETSADDFAMEMGLACVVCRQMMVASGNQLVECQECHNLYHRDCHKPQVTDKEANDPRLVWYCARCTRQMKRMAQKTQKPPQKPAPAVVSVTPAVKDPLVKKPETKLKQETTFLAFKRTEVKTSTVISGNSSSASVSSSVTSGLTGWAAFAAKTSSAGPSTAKLSSTTQNNTGKPATSSANQKPVGLTGLATSSKGGIGSKIGSNNSTTPTVPLKPPPPLTLGKTGLSRSVSCDNVSKVGLPSPSSLVPGSSSQLSGNGNSGTSGPSGSTTSKTTSESSSSPSASLKGPTSQESQLNAMKRLQMVKKKAAQKKLKK

SEQ ID NO: 865741 - protein, 462 aa, Homo sapiens; identical to SEQ ID NO: 865737

SEQ ID NO: 865742 - protein, 444 aa, Homo sapiens
MAATVNLELDPIFLKALGFLHSKSKDSAEKLKALLDESLARGIDSSYRPSQKDVEPPKISSTKNISIKQEPKISSSLPSGNNNGKVLTTEKVKKEAEKRPADKKPETQSSPITVQSSKDLPMADLSSFEETSADDFAMEMGLACVVCRQMMVASGNQLVECQECHNLYHRDCHKPQVTDKEANDPRLVWYCARCTRQMKRMAQKTQKPPQKPAPAVVSVTPAVKDPLVKKPETKLKQETTFLAFKRTEVKTSTVISGNSSSASVSSSVTSGLTGWAAFAAKTSSAGPSTAKLSSTTQNNTGKPATSSANQKPVGLTGLATSSKGGIGSKIGSNNSTTPTVPLKPPPPLTLGKTGLSRSVSCDNVSKVGLPSPSSLVPGSSSQLSGNGNSGTSGPSGSTTSKTTSESSSSPSASLKGPTSQESQLNAMKRLQMVKKKAAQKKLKK

SEQ ID NO: 865743 - protein, 233 aa, Homo sapiens
MAATVNLELDPIFLKALGFLHSKSKDSAEKLKALLDESLARGIDSSYRPSQKDVEPPKISSTKNISIKQEPKISSSLPSGNNNGKVLTTEKVKKEAEKRPADKMKSDITEGVDIPKKPRLEKPETQSSPITVQSSKDLPMADLSSFEETSADDFAMEMGLACVVCRQMMVASGNQLVECQECHNLYHRDCHKPQVTDKEANDPSKNQKPTEKTSPELVLELPVVKDPGLRNQK

SEQ ID NO: 865744 - protein, 462 aa, Homo sapiens; identical to SEQ ID NO: 865737

SEQ ID NO: 865745 - protein, 462 aa, Homo sapiens; identical to SEQ ID NO: 865737

SEQ ID NO: 865746 - protein, 584 aa, Homo sapiens
MAGDGRRAEAVREGWGVYVTPRAPIREGRGRLAPQNGGSSDAPAYRTPPSRQGRREVRFSDEPPEVYGDFEPLVAKERSPVGKRTRLEEFRSDSAKEEVRESAYYLRSRQRRQPRPQETEEMKTRRTTRLQQQHSEQPPLQPSPVMTRRGLRDSHSSEEDEASSQTDLSQTISKKTVRSIQEAPAVSEDLVIRLRRPPLRYPRYEATSVQQKVNFSEEGETEEDDQDSSHSSVTTVKARSRDSDESGDKTTRSSSQYIESFWQSSQSQNFTAHDKQPSVLSSGYQKTPQEWAPQTARIRTRMQNDSILKSELGNQSPSTSSRQVTGQPQNASFVKRNRWWLLPLIAALASGSFWFFSTPEVETTAVQEFQNQMNQLKNKYQGQDEKLWKRSQTFLEKHLNSSHPRSQPAILLLTAARDAEEALRCLSEQIADAYSSFRSVRAIRIDGTDKATQDSDTVKLEVDQELSNGFKNGQNAAVVHRFESFPAGSTLIFYKYCDHENAAFKDVALVLTVLLEEETLGTSLGLKEVEEKVRDFLKVKFTNSNTPNSYNHMDPDKLNGLWSRISHLVLPVQPENALKRGICL

SEQ ID NO: 865747 - protein, 284 aa, Homo sapiens
MAGDGRRAEAVREGWGVYVTPRAPIREGRGRLAPQNGGSSDAPAYRTPPSRQGRREVRFSDEPPEVYGDFEPLVAKERSPVGKRTRLEEFRSDSAKEEVRESAYYLRSRQRRQPRPQETEEMKTRRTTRLQQQHSEQPPLQPSPVMTRRGLRDSHSSEEDEASSQTDLSQTISKKTVRSIQEAPAVSEDLVIRLRRPPLRYPRYEATSVQQKVNFSEEGETEEDDQDSSHSSVTTVKARSRDSDESGDKTTRSSSQYIESFWQSSQSQNFTAHDKQPSVLSALL

SEQ ID NO: 865748 - protein, 584 aa, Homo sapiens; identical to SEQ ID NO: 865746

SEQ ID NO: 865749 - protein, 584 aa, Homo sapiens; identical to SEQ ID NO: 865746

SEQ ID NO: 865750 - protein, 584 aa, Homo sapiens; identical to SEQ ID NO: 865746

SEQ ID NO: 865751 - protein, 584 aa, Homo sapiens; identical to SEQ ID NO: 865746

SEQ ID NO: 865752 - protein, 584 aa, Homo sapiens; identical to SEQ ID NO: 865746

SEQ ID NO: 865753 - protein, 584 aa, Homo sapiens; identical to SEQ ID NO: 865746

SEQ ID NO: 865754 - protein, 584 aa, Homo sapiens; identical to SEQ ID NO: 865746

SEQ ID NO: 865755 - protein, 584 aa, Homo sapiens; identical to SEQ ID NO: 865746

SEQ ID NO: 865756 - protein, 782 aa, Homo sapiens
MEVRKLSISWQFLIVLVLILQILSALDFDPYRVLGVSRTASQADIKKAYKKLAREWHPDKNKDPGAEDKFIQISKAYEILSNEEKRSNYDQYGDAGENQGYQKQQQQREYRFRHFHENFYFDESFFHFPFNSERRDSIDEKYLLHFSHYVNEVVPDSFKKPYLIKITSDWCFSCIHIEPVWKEVIQELEELGVGIGVVHAGYERRLAHHLGAHSTPSILGIINGKISFFHNAVVRENLRQFVESLLPGNLVEKVTNKNYVRFLSGWQQENKPHVLLFDQTPIVPLLYKLTAFAYKDYLSFGYVYVGLRGTEEMTRRYNINIYAPTLLVFKEHINRPADVIQARGMKKQIIDDFITRNKYLLAARLTSQKLFHELCPVKRSHRQRKYCVVLLTAETTKLSKPFEAFLSFALANTQDTVRFVHVYSNRQQEFADTLLPDSEAFQGKSAVSILERRNTAGRVVYKTLEDPWIGSESDKFILLGYLDQLRKDPALLSSEAVLPDLTDELAPVFLLRWFYSASDYISDCWDSIFHNNWREMMPLLSLIFSALFILFGTVIVQAFSDSNDERESSPPEKEEAQEKTGKTEPSFTKENSSKIPKKGFVEVTELTDVTYTSNLVRLRPGHMNVVLILSNSTKTSLLQKFALEVYTFTGSSCLHFSFLSLDKHREWLEYLLEFAQDAAPIPNQYDKHFMERDYTGYVLALNGHKKYFCLFKPQKTVEEEEAIGSCSDVDSSLYLGESRGKPSCGLGSRPIKGKLSKLSLWMERLLEGSLQRFYIPSWPELD

SEQ ID NO: 865757 - protein, 782 aa, Homo sapiens; identical to SEQ ID NO: 865756

SEQ ID NO: 865758 - protein, 782 aa, Homo sapiens; identical to SEQ ID NO: 865756

SEQ ID NO: 865759 - protein, 782 aa, Homo sapiens; identical to SEQ ID NO: 865756

SEQ ID NO: 865760 - protein, 782 aa, Homo sapiens; identical to SEQ ID NO: 865756

SEQ ID NO: 865761 - protein, 595 aa, Homo sapiens
MEVRKLSISWQFLIVLVLILQILSALDFDPYRVLGVSRTASQADIKKAYKKLAREWHPDKNKDPGAEDKFIQISKAYEILSNEEKRSNYDQYGDAGENQGYQKQQQQREYRFRHFHENFYFDESFFHFPFNSERRDSIDEKYLLHFSHYVNEVVPDSFKKPYLIKITSDWCFSCIHIEPVWKEVIQELEELGVGIGVVHAGYERRLAHHLGAHSTPSILGIINGKISFFHNAVVRENLRQFVESLLPGNLVEKVTNKNYVRFLSGWQQENKPHVLLFDQTPIVPLLYKLTAFAYKDYLSFGYVYVGLRGTEEMTRRYNINIYAPTLLVFKEHINRPADVIQARGMKKQIIDDFITRNKYLLAARLTSQKLFHELCPVKRSHRQRKYCVVLLTAETTKLSKPFEAFLSFALANTQDTVRFVHVYSNRQQEFADTLLPDSEAFQGKSAVSILERRNTAGRVVYKTLEDPWIGSESDKFILLGYLDQLRKDPALLSSEAVLPDLTDELAPVFLLRWFYSASDYISDCWDSIFHNNWREMMPLLSLIFSALFILFGTVIVQAFSDSNDERESSPPEKEEAQEKTGKTEPSFTKENSRFL

SEQ ID NO: 865762 - protein, 199 aa, Homo sapiens
MKAEGKKPISKIPKKGFVEVTELTDVTYTSNLVRLRPGHMNVVLILSNSTKTSLLQKFALEVYTFTGSSCLHFSFLSLDKHREWLEYLLEFAQDAAPIPNQYDKHFMERDYTGYVLALNGHKKYFCLFKPQKTVEEEEAIGSCSDVDSSLYLGESRGKPSCGLGSRPIKGKLSKLSLWMERLLEGSLQRFYIPSWPELD

SEQ ID NO: 865763 - protein, 160 aa, Homo sapiens [sequence omitted]

SEQ ID NO: 865764 - protein, 407 aa, Homo sapiens
MEVRKLSISWQFLIVLVLILQILSALDFDPYRVLGVSRTASQADIKKAYKKLAREWHPDKNKDPGAEDKFIQISKAYEILSNEEKRSNYDQYGDAGENQGYQKQQQQREYRFRHFHENFYFDESFFHFPFNSERRDSIDEKYLLHFSHYVNEVVPDSFKKPYLIKITSDWCFSCIHIEPVWKEVIQELEELGVGIGVVHAGYERRLAHHLGAHSTPSILGIINGKISFFHNAVVRENLRQFVESLLPGNLVEKVTNKNYVRFLSGWQQENKPHVLLFDQTPIVPLLYKLTAFAYKDYLSFGYVYVGLRGTEEMTRRYNINIYAPTLLVFKEHINRPADVIQARGMKKQIIDDFITRNKYLLAARLTSQKLFHELCPVKRSHRQRNPGHFSTKLSDVPACPSGQRRFP

SEQ ID NO: 865765 - protein, 782 aa, Homo sapiens; identical to SEQ ID NO: 865756

SEQ ID NO: 865766 - protein, 782 aa, Homo sapiens; identical to SEQ ID NO: 865756

SEQ ID NO: 865767 - protein, 782 aa, Homo sapiens; identical to SEQ ID NO: 865756

SEQ ID NO: 865768 - protein, 782 aa, Homo sapiens; identical to SEQ ID NO: 865756

SEQ ID NO: 865769 - protein, 782 aa, Homo sapiens; identical to SEQ ID NO: 865756

SEQ ID NO: 865770 - protein, 782 aa, Homo sapiens; identical to SEQ ID NO: 865756

SEQ ID NO: 865771 - protein, 74 aa, Homo sapiens
ISAIESTRRRNCSWPLGGASFTDLMESSLGGPSVATSRLPGHFDTIQASCEEEVSTAVPTGRLSDAASTKEYTD

SEQ ID NO: 865772 - protein, 131 aa, Homo sapiens
LRVIDRPYRTTHYPPCHSQLLSPVSFPSFLQDPGTWVMVTLSHTTSAVILSDFAFHREIPAKPWTAHSMTSSFLGIVFLHPNSSTLPYSHAQDLFTQVTALCYLNSKNPTFQPPLLIFSLPIPKIIDPSIN

SEQ ID NO: 865773 - protein, 632 aa, Homo sapiens
METPAAAAPAGSLFPSFLLLACGTLVAALLGAAHRLGLFYQLLHKVDKASVRHGGENVAAVLRAHGVRFIFTLVGGHISPLLVACEKLGIRVVDTRHEVTAVFAADAMARLSGTVGVAAVTAGPGLTNTVTAVKNAQMAQSPILLLGGAASTLLQNRGALQAVDQLSLFRPLCKFCVSVRRVRDIVPTLRAAMAAAQSGTPGPVFVELPVDVLYPYFMVQKEMVPAKPPKGLVGRVVSWYLENYLANLFAGAWEPQPEGPLPLDIPQASPQQVQRCVEILSRAKRPLMVLGSQALLTPTSADKLRAAVETLGVPCFLGGMARGLLGRNHPLHIRENRSAALKKADVIVLAGTVCDFRLSYGRVLSHSSKIIIVNRNREEMLLNSDIFWKPQEAVQGDVGSFVLKLVEGLQGQTWAPDWVEELREADRQKEQTFREKAAMPVAQHLNPVQVLQLVEETLPDNSILVVDGGDFVGTAAHLVQPRGPLRWLDPGAFGTLGVGAGFALGAKLCRPDAEVWCLFGDGAFGYSLIEFDTFVRHKIPVMALVGNDAGWTQISREQVPSLGSNVACGLAYTDYHKAAMGLGARGLLLSRENEDQVVKVLHDAQQQCRDGHPVVVNILIGRTDFRDGSIAV

SEQ ID NO: 865774 - protein, 127 aa, Homo sapiens
GEAWLHPEPRRTKGVVWQGWGRGRTETGGKGRGPGSCCEKGRDFFWRGSLSRPSLGSALSLLGTTSWRPPRPPPPLGAYSPPSCSWPAGRWWPPCWAPLTAWGSSISCCTRWTRQASGMAERTWPLC

SEQ ID NO: 865775 - protein, 632 aa, Homo sapiens; identical to SEQ ID NO: 865773

SEQ ID NO: 865776 - protein, 525 aa, Homo sapiens
MARLSGTVGVAAVTAGPGLTNTVTAVKNAQMAQSPILLLGGAASTLLQNRGALQAVDQLSLFRPLCKFCVSVRRVRDIVPTLRAAMAAAQSGTPGPVFVELPVDVLYPYFMVQKEMVPAKPPKGLVGRVVSWYLENYLANLFAGAWEPQPEGPLPLDIPQASPQQVQRCVEILSRAKRPLMVLGSQALLTPTSADKLRAAVETLGVPCFLGGMARGLLGRNHPLHIRENRSAALKKADVIVLAGTVCDFRLSYGRVLSHSSKIIIVNRNREEMLLNSDIFWKPQEAVQGDVGSFVLKLVEGLQGQTWAPDWVEELREADRQKEQTFREKAAMPVAQHLNPVQVLQLVEETLPDNSILVVDGGDFVGTAAHLVQPRGPLRWLDPGAFGTLGVGAGFALGAKLCRPDAEVWCLFGDGAFGYSLIEFDTFVRHKIPVMALVGNDAGWTQISREQVPSLGSNVACGLAYTDYHKAAMGLGARGLLLSRENEDQVVKVLHDAQQQCRDGHPVVVNILIGRTDFRDGSIAV

SEQ ID NO: 865777 - protein, 686 aa, Homo sapiens
METPAAAAPAGSLFPSFLLLACGTLVAALLGAAHRLGLFYQLLHKVDKASVRHGGENVAAVLRAHGVRFIFTLVGGHISPLLVACEKLGIRVVDTRHEVTAVFAADAMARLSGTVGVAAVTAGPGLTNTVTAVKNAQMAQSPILLLGGAASTLLQNRGALQAVDQLSLFRPLCKFCVSVRRVRDIVPTLRAAMAAAQSGTPGPVFVELPVDVLYPYFMVQKEMVPAKPPKGLVGRVVSWYLENYLANLFAGAWEPQPEGPLPLDIPQASPQQVQRCVEILSRAKRPLMVLGSQALLTPTSADKLRAAVETLGVPCFLGGMARGLLGRNHPLHIRENRSAALKKADVIVLAGTVCDFRLSYGRVLSHSSKIIIVNRNREEMLLNSDIFWKPQEAVQGDVGSFVLKLVEGLQGQTWAPDWVEELREADRQKEQTFREKAAMPVAQHLNPVQVLQLVEETLPDNSILVVDGGDFVGTAAHLVQPRGPLRWLDPGKEGPPPGAVGTIHQDAFTTHLLLVLLGAFGTLGVGAGFALGAKLCRPDAEVRHWSWETCCSLGPDATLTILGPLPTEVWCLFGDGAFGYSLIEFDTFVRHKIPVMALVGNDAGWTQISREQVPSLGSNVACGLAYTDYHKAAMGLGARGLLLSRENEDQVVKVLHDAQQQCRDGHPVVVNILIGRTDFRDGSIAV

SEQ ID NO: 865778 - protein, 495 aa, Homo sapiens
MAQSPILLLGGAASTLLQNRGALQAVDQLSLFRPLCKFCVSVRRVRDIVPTLRAAMAAAQSGTPGPVFVELPVDVLYPYFMVQKEMVPAKPPKGLVGRVVSWYLENYLANLFAGAWEPQPEGPLPLDIPQASPQQVQRCVEILSRAKRPLMVLGSQALLTPTSADKLRAAVETLGVPCFLGGMARGLLGRNHPLHIRENRSAALKKADVIVLAGTVCDFRLSYGRVLSHSSKIIIVNRNREEMLLNSDIFWKPQEAVQGDVGSFVLKLVEGLQGQTWAPDWVEELREADRQKEQTFREKAAMPVAQHLNPVQVLQLVEETLPDNSILVVDGGDFVGTAAHLVQPRGPLRWLDPGAFGTLGVGAGFALGAKLCRPDAEVWCLFGDGAFGYSLIEFDTFVRHKIPVMALVGNDAGWTQISREQVPSLGSNVACGLAYTDYHKAAMGLGARGLLLSRENEDQVVKVLHDAQQQCRDGHPVVVNILIGRTDFRDGSIAV

SEQ ID NO: 865779 - protein, 507 aa, Homo sapiens
METPAAAAPAGSLFPSFLLLACGTLVAALLGAAHRLGLFYQLLHKVDKASVRHGGENVAAVLRAHGVRFIFTLVGGHISPLLVACEKLGIRVVDTRHEVTAVFAADAMARLSGTVGVAAVTAGPGLTNTVTAVKNAQMAQSPILLLGGAASTLLQNRGALQAVDQLSLFRPLCKFCVSVRRVRDIVPTLRAAMAAAQSGTPGPVFVELPVDVLYPYFMVQKEMVPAKPPKGLVGRVVSWYLENYLANLFAGAWEPQPEGPLPLDIPQASPQQVQRCVEILSRAKRPLMVLGSQALLTPTSADKLRAAVETLGVPCFLGGMARGLLGRNHPLHIRENRSAALKKADVIVLAGTVCDFRLSYGRVLSHSSKIIIVNRNREEMLLNSDIFWKPQEAVQGDVGSFVLKLVEGLQGQTWAPDWVEELREADRQKEQTFREKAAMPVAQHLNPVQVLQLVEETLPDNSILVVDGGDFVGTAAHLVQPRGPLRWLDPGLVPVWGRSFWLQPHRI

SEQ ID NO: 865780 - protein, 366 aa, Homo sapiens
METPAAAAPAGSLFPSFLLLACGTLVAALLGAAHRLGLFYQLLHKVDKASVRHGGENVAAVLRAHGVRFIFTLVGGHISPLLVACEKLGIRVVDTRHEVTAVFAADAMARLSGTVGVAAVTAGPGLTNTVTAVKNAQMAQSPILLLGGAASTLLQNRGALQAVDQLSLFRPLCKFCVSVRRVRDIVPTLRAAMAAAQSGTPGPVFVELPVDVLYPYFMVQKEMVPAKPPKGLVGRVVSWYLENYLANLFAGAWEPQPEGPLPLDIPQASPQQVQRCVEILSRAKRPLMVLGSQALLTPTSADKLRAAVETLGVPCFLGGMARGLLGRNHPLHIRENRSAALKALHKLQHEGTHISLHSLLGLPEDV

SEQ ID NO: 865781 - protein, 632 aa, Homo sapiens; identical to SEQ ID NO: 865773

SEQ ID NO: 865782 - protein, 383 aa, Homo sapiens
GEAWLHPEPRRTKGVVWQGWGRGRTETGGKGRGPWILLREGARFLLERFPVAPKSGKCPFSLRYHLMETPAAAAPAGSLFPSFLLLACGTLVAALLGAAHRLGLFYQLLHKVDKASVRHGGENVAAVLRAHGVRFIFTLVGGHISPLLVACEKLGIRVVDTRHEVTAVFAADAMARLSGTVGVAAVTAGPGLTNTVTAVKNAQMAQSPILLLGGAASTLLQNRGALQAVDQLSLFRPLCKFCVSVRRVRDIVPTLRAAMAAAQSGTPGPVFVELPVDVLYPYFMVQKEMVPAKPPKGLVGRVVSWYLENYWQLFEELELRPRTWPGFPSSAEAHRGRRRGKAEGEERGPIGNRGDGPLGDRRNPRTGKTQHPHQMDNTGRGRR

SEQ ID NO: 865783 - protein, 698 aa, Homo sapiens
GEAWLHPEPRRTKGVVWQGWGRGRTETGGKGRGPWILLREGARFLLERFPVAPKSGKCPFSLRYHLMETPAAAAPAGSLFPSFLLLACGTLVAALLGAAHRLGLFYQLLHKVDKASVRHGGENVAAVLRAHGVRFIFTLVGGHISPLLVACEKLGIRVVDTRHEVTAVFAADAMARLSGTVGVAAVTAGPGLTNTVTAVKNAQMAQSPILLLGGAASTLLQNRGALQAVDQLSLFRPLCKFCVSVRRVRDIVPTLRAAMAAAQSGTPGPVFVELPVDVLYPYFMVQKEMVPAKPPKGLVGRVVSWYLENYLANLFAGAWEPQPEGPLPLDIPQASPQQVQRCVEILSRAKRPLMVLGSQALLTPTSADKLRAAVETLGVPCFLGGMARGLLGRNHPLHIRENRSAALKKADVIVLAGTVCDFRLSYGRVLSHSSKIIIVNRNREEMLLNSDIFWKPQEAVQGDVGSFVLKLVEGLQGQTWAPDWVEELREADRQKEQTFREKAAMPVAQHLNPVQVLQLVEETLPDNSILVVDGGDFVGTAAHLVQPRGPLRWLDPGAFGTLGVGAGFALGAKLCRPDAEVWCLFGDGAFGYSLIEFDTFVRHKIPVMALVGNDAGWTQISREQVPSLGSNVACGLAYTDYHKAAMGLGARGLLLSRENEDQVVKVLHDAQQQCRDGHPVVVNILIGRTDFRDGSIAV

SEQ ID NO: 865784 - protein, 632 aa, Homo sapiens; identical to SEQ ID NO: 865773

SEQ ID NO: 865785 - protein, 613 aa, Homo sapiens
  misc_feature (1)..(1): Xaa can be any naturally occurring amino acid
XYGLSRPGIKKRQIMASAFLYMSETIVDKASVRHGGENVAAVLRAHGVRFIFTLVGGHISPLLVACEKLGIRVVDTRHEVTAVFAADAMARLSGTVGVAAVTAGPGLTNTVTAVKNAQMAQSPILLLGGAASTLLQNRGALQAVDQLSLFRPLCKFCVSVRRVRDIVPTLRAAMAAAQSGTPGPVFVELPVDVLYPYFMVQKEMVPAKPPKGLVGRVVSWYLENYLANLFAGAWEPQPEGPLPLDIPQASPQQVQRCVEILSRAKRPLMVLGSQALLTPTSADKLRAAVETLGVPCFLGGMARGLLGRNHPLHIRENRSAALKKADVIVLAGTVCDFRLSYGRVLSHSSKIIIVNRNREEMLLNSDIFWKPQEAVQGDVGSFVLKLVEGLQGQTWAPDWVEELREADRQKEQTFREKAAMPVAQHLNPVQVLQLVEETLPDNSILVVDGGDFVGTAAHLVQPRGPLRWLDPGAFGTLGVGAGFALGAKLCRPDAEVWCLFGDGAFGYSLIEFDTFVRHKIPVMALVGNDAGWTQISREQVPSLGSNVACGLAYTDYHKAAMGLGARGLLLSRENEDQVVKVLHDAQQQCRDGHPVVVNILIGRTDFRDGSIAV

SEQ ID NO: 865786 - protein, 632 aa, Homo sapiens; identical to SEQ ID NO: 865773

SEQ ID NO: 865787 - protein, 256 aa, Homo sapiens
MLEEQEEASSPQLCPLPSPGDVGSFVLKLVEGLQGQTWAPDWVEELREADRQKEQTFREKAAMPVAQHLNPVQVLQLVEETLPDNSILVVDGGDFVGTAAHLVQPRGPLRWLDPGAFGTLGVGAGFALGAKLCRPDAEVWCLFGDGAFGYSLIEFDTFVRHKIPVMALVGNDAGWTQISREQVPSLGSNVACGLAYTDYHKAAMGLGARGLLLSRENEDQVVKVLHDAQQQCRDGHPVVVNILIGRTDFRDGSIAV

SEQ ID NO: 865788 - protein, 34 aa, Homo sapiens
MGPLPTAFLSPTPGTVCDFRLSYGRVLSHSSKII

SEQ ID NO: 865789 - protein, 268 aa, Homo sapiens
MLLKEYRICMPLTVDEYKIGQLYMISKHSHEQSDRGEGVEVVQNEPFEDPHHGNGQFTEKRVYLNSKLPSWARAVVPKIFYVTEKAWNYYPYTITEYTCSFLPKFSIHIETKYEDNKGSNDTIFDNEAKDVEREVCFIDIACDEIPERYYKESEDPKHFKSEKTGRGQLREGWRDSHQPIMCSYKLVTVKFEVWGLQTRVEQFVHKVVRDILLIGHRQAFAWVDEWYDMTMDDVREYEKNMHEQTNIKVCNQHSSPVDDIESHAQTST

SEQ ID NO: 865790 - protein, 228 aa, Homo sapiens
MLLKEYRICMPLTVDEYKIGQLYMISKHSHEQSDRGEGVEVVQNEPFEDPHHGNGQFTEKRVYLNSKLPSWARAVVPKIFYVTEKAWNYYPYTITEYTCSFLPKFSIHIETKYEDNKGSNDTIFDNEAKDVEREVCFIDIACDEIPERYYKESEDPKHFKSEKTGRGQLREGWRDSHQPIMCSYKLVTVKFEVWGLQTRVEQFVHKVVRDILLIGHRQAFAWVDEWYT

SEQ ID NO: 865791 - protein, 228 aa, Homo sapiens; identical to SEQ ID NO: 865790

SEQ ID NO: 865792 - protein, 245 aa, Homo sapiens
MISKHSHEQSDRGEGVEVVQNEPFEDPHHGNGQFTEKRVYLNSKLPSWARAVVPKIFYVTEKAWNYYPYTITEYTCSFLPKFSIHIETKYEDNKGSNDTIFDNEAKDVEREVCFIDIACDEIPERYYKESEDPKHFKSEKTGRGQLREGWRDSHQPIMCSYKLVTVKFEVWGLQTRVEQFVHKVVRDILLIGHRQAFAWVDEWYDMTMDDVREYEKNMHEQTNIKVCNQHSSPVDDIESHAQTST

SEQ ID NO: 865793 - protein, 245 aa, Homo sapiens; identical to SEQ ID NO: 865792

SEQ ID NO: 865794 - protein, 175 aa, Homo sapiens [sequence omitted]

SEQ ID NO: 865795 - protein, 180 aa, Homo sapiens
NKGTCVFCNCVGIIVPSLLCHIKYFGDNKGSNDTIFDNEAKDVEREVCFIDIACDEIPERYYKESEDPKHFKSEKTGRGQLREGWRDSHQPIMCSYKLVTVKFEVWGLQTRVEQFVHKVVRDILLIGHRQAFAWVDEWYDMTMDDVREYEKNMHEQTNIKVCNQHSSPVDDIESHAQTST

SEQ ID NO: 865796 - protein, 104 aa, Homo sapiens [sequence omitted]

SEQ ID NO: 865797 - protein, 104 aa, Homo sapiens [sequence omitted]

SEQ ID NO: 865798 - protein, 57 aa, Homo sapiens
MLLKEYRICMPLTVDEVSAAPGPASPAPGPPPLPPPPGRRAPGERQETQVDVTPQTR

SEQ ID NO: 865799 - protein, 268 aa, Homo sapiens; identical to SEQ ID NO: 865789

SEQ ID NO: 865800 - protein, 245 aa, Homo sapiens; identical to SEQ ID NO: 865792

SEQ ID NO: 865801 - protein, 245 aa, Homo sapiens; identical to SEQ ID NO: 865792

SEQ ID NO: 865802 - protein, 168 aa, Homo sapiens
MLLKEYRICMPLTVDEYKIGQLYMISKHSHEQSDRGEGVEVVQNEPFEDPHHGNGQFTEKRVYLNSKLPSWARAVVPKIFYVTEKAWNYYPYTITEYTCSFLPKFSIHIETKYEDNKGSNDTIFDNEAKDVEREVCFIDIACDEIPERYYKESEDPELFKSAYTGQRG

SEQ ID NO: 865803 - protein, 104 aa, Homo sapiens [sequence omitted]

SEQ ID NO: 865804 - protein, 104 aa, Homo sapiens [sequence omitted]

SEQ ID NO: 865805 - protein, 259 aa, Homo sapiens
KANSLVMYHSTTYQLCARYFCGVPSPLRDMFPVRPLDTEPPAASHTANPKVPEGDSIADVSIMYSEELGTQILIHQESLTDYCSMSSYSSSPPRQAARSPSSLPSSPASSSSVPFSTDCEDSDMLHTPGAASDRSEHDLTPMDGETFSQHLQAVKILAVRDLIWVPRRGGDVIVIGLEKDSGAQRGRVIAVLKARELTPHGVLVDAAVVAKDTVVCTFENENTEWCLAVWRGWGAREFDIFYQSYEELGRLEACTRKRR

SEQ ID NO: 865806 - protein, 259 aa, Homo sapiens; identical to SEQ ID NO: 865805

SEQ ID NO: 865807 - protein, 259 aa, Homo sapiens; identical to SEQ ID NO: 865805

SEQ ID NO: 865808 - protein, 395 aa, Homo sapiens
MMAAKVVPMPPKPKQSFILRVPPDSKLGQDLLRDATNGPKTIHQLVLEHFLTFLPKPSLVQPSQKVKETLVIMKDVSSSLQNRVHPRPLVKLLPKGVQKEQETVSLYLKANPEELVVFEDLNVFHCQEECVSLDPTQQLTSEKEDDSSVGEMMLLAVNGSNPEGEDPEREPVENEDYREKSSDDDEMDSSLVSQQPPDNQEKERLNTSIPQKRKMRNLLVTIENDTPLEELSKYVDISIIALTRNRRTRRWYTCPLCGKQFNESSYLISHQRTHTGEKPYDCNHCGKSFNHKTNLNKHERIHTGEKPYSCSQCGKNFRQNSHRSRHEGIHIREKIFKCPECGKTFPKNEEFVLHLQSHEAERPYGCKKCGRRFGRLSNCTRHEKTHSACKTRKQK

SEQ ID NO: 865809 - protein, 395 aa, Homo sapiens; identical to SEQ ID NO: 865808

SEQ ID NO: 865810 - protein, 108 aa, Homo sapiens
MMAAKVVPMPPKPKQSFILRVPPDSKLGQDLLRDATNGPKTIHQLVLEHFLTFLPKPSLVQPSQKVKETLVIMKDVSSSLQNRGEKHMLVSLEEEEEVLESKIGFCVS

SEQ ID NO: 865811 - protein, 395 aa, Homo sapiens; identical to SEQ ID NO: 865808

SEQ ID NO: 865812 - protein, 103 aa, Homo sapiens
MNKTKFNLRLITREIDYKTAFKSLQEQNSHDAMDSYYDYIWDVTILEYLTYLHHKRGETDKRQIAIKAIGQTELNASNPEEVLQLAAQRRKKKFLQAMAKLYF

SEQ ID NO: 865813 - protein, 995 aa, Homo sapiens
MSAEAADREAATSSRPCTPPQTCWFEFLLEESLLEKHLRKPCPDPAPVQLIVQFLEQASKPSVNEQNQVQPPPDNKRNRILKLLALKVAAHLKWDLDILEKSLSVPVLNMLLNELLCISKVPPGTKHVDMDLATLPPTTAMAVLLYNRWAIRTIVQSSFPVKQAKPGPPQLSVMNQMQQEKELTENILKVLKEQAADSIWVLEAALKLNKDLYVHTMRTLDLLAMEPGMVNGETESSTAGLKVKTEEMQCQVCYDLGAAYFQQGSTNSAVYENAREKFFRTKELIAEIGSLSLHCTIDEKRLAGYCQACDVLVPSSDSTSQQLTPYSQVHICLRSGNYQEVIQIFIEDNLTLSLPVQFRQSVLRELFKKAQQGNEALDEICFKVCACNTVRDILEGRTISVQFNQLFLRPNKEKIDFLLEVCSRSVNLEKASESLKGNMAAFLKNVCLGLEDLQYVFMISSHELFITLLKDEERKLLVDQMRKRSPRVNLCIKPVTSFYDIPASASVNIGQLEHQLILSVDPWRIRQILIELHGMTSERQFWTVSNKWEVPSVYSGVILGIKDNLTRDLVYILMAKGLHCSTVKDFSHAKQLFAACLELVTEFSPKLRQVMLNEMLLLDIHTHEAGTGQAGERPPSDLISRVRGYLEMRLPDIPLRQVIAEECVAFMLNWRENEYLTLQVPAFLLQSNPYVKLGQLLAATCKELPGPKESRRTAKDLWEVVVQICSVSSQHKRGNDGRVSLIKQRESTLGIMYRSELLSFIKKLREPLVLTIILSLFVKLHNVREDIVNDITAEHISIWPSSIPNLQSVDFEAVAITVKELVRYTLSINPNNHSWLIIQADIYFATNQYSAALHYYLQAGAVCSDFFNKAVPPDVYTDQVIKRMIKCCSLLNCHTQVAILCQFLREIDYKTAFKSLQEQNSHDAMDSYYDYIWDVTILEYLTYLHHKRGETDKRQIAIKAIGQTELNASNPEEVLQLAAQRRKKKFLQAMAKLYF

SEQ ID NO: 865814 - protein, 777 aa, Homo sapiens
MSAEAADREAATSSRPCTPPQTCWFEFLLEESLLEKHLRKPCPDPAPVQLIVQFLEQASKPSVNEQNQVQPPPDNKRNRILKLLALKVAAHLKWDLDILEKSLSVPVLNMLLNELLCISKVPPGTKHVDMDLATLPPTTAMAVLLYNRWAIRTIVQSSFPVKQAKPGPPQLSVMNQMQQEKELTENILKVLKEQAADSIWVLEAALKLNKDLYVHTMRTLDLLAMEPGMVNGETESSTAGLKVKTEEMQCQVCYDLGAAYFQQGSTNSAVYENAREKFFRTKELIAEIGSLSLHCTIDEKRLAGYCQACDVLVPSSDSTSQQLTPYSQVHICLRSGNYQEVIQIFIEDNLTLSLPVQFRQSVLRELFKKAQQGNEALDEICFKVCACNTVRDILEGRTISVQFNQLFLRPNKEKIDFLLEVCSRSVNLEKASESLKGNMAAFLKNVCLGLEDLQYVFMISSHELFITLLKDEERKLLVDQMRKRSPRVNLCIKPVTSFYDIPASASVNIGQLEHQLILSVDPWRIRQILIELHGMTSERQFWTVSNKWEVPSVYSGVILGIKDNLTRDLVYILMAKGLHCSTVKDFSHAKQLFAACLELVTEFSPKLRQVMLNEMLLLDIHTHEAGTGQAGERPPSDLISRVRGYLEMRLPDIPLRQVIAEECVAFMLNWRENEYLTLQVPAFLLQSNPYVKLGQLLAATCKELPGPKESRRTAKDLWEVVVQICSVSSQHKRGNDGRVSLIKQRESTLGIMYRSELLSFIKKLRGQGLDLSPKLEC

SEQ ID NO: 865815 - protein, 922 aa, Homo sapiens
MSAEAADREAATSSRPCTPPQTCWFEFLLEESLLEKHLRKPCPDPAPVQLIVQFLEQASKPSVNEQNQVQPPPDNKRNRILKLLALKVAAHLKWDLDILEKSLSVPVLNMLLNELLCISKVPPGTKHVDMDLATLPPTTAMAVLLYNRWAIRTIVQSSFPVKQAKPGPPQLSVMNQMQQEKELTENILKVLKEQAADSIWVLEAALKLNKDLYVHTMRTLDLLAMEPGMVNGETESSTAGLKVKTEEMQCQVCYDLGAAYFQQGSTNSAVYENAREKFFRTKELIAEIGSLSLHCTIDEKRLAGYCQACDVLVPSSDSTSQQLTPYSQVHICLRSGNYQEVIQIFIEDNLTLSLPVQFRQSVLRELFKKAQQGNEALDEICFKVCACNTVRDILEGRTISVQFNQLFLRPNKEKIDFLLEVCSRSVNLEKASESLKGNMAAFLKNVCLGLEDLQYVFMISSHELFITLLKDEERKLLVDQMRKRSPRVNLCIKPVTSFYDIPASASVNIGQLEHQLILSVDPWRIRQILIELHGMTSERQFWTVSNKWEVPSVYSGVILGIKDNLTRDLVYILMAKGLHCSTVKDFSHAKQLFAACLELVTEFSPKLRQVMLNEMLLLDIHTHEAGTGQAGERPPSDLISRVRGYLEMRLPDIPLRQVIAEECVAFMLNWRENEYLTLQVPAFLLQSNPYVKEPLVLTIILSLFVKLHNVREDIVNDITAEHISIWPSSIPNLQSVDFEAVAITVKELVRYTLSINPNNHSWLIIQADIYFATNQYSAALHYYLQAGAVCSDFFNKAVPPDVYTDQVIKRMIKCCSLLNCHTQVAILCQFLREIDYKTAFKSLQEQNSHDAMDSYYDYIWDVTILEYLTYLHHKRGETDKRQIAIKAIGQTELNASNPEEVLQLAAQRRKKKFLQAMAKLYF

SEQ ID NO: 865816 - protein, 970 aa, Homo sapiens
MSAEAADREAATSSRPCTPPQTCWFEFLLEESLLEKHLRKPCPDPAPVQLIVQFLEQASKPSVNEQNQVQPPPDNKRNRILKLLALKVAAHLKWDLDILEKSLSVPVLNMLLNELLCISKVPPGTKHVDMDLATLPPTTAMAVLLYNRWAIRTIVQSSFPVKQAKPGPPQLSVMNQMQQEKELTENILKVLKEQAADSIWVLEAALKLNKDLYVHTMRTLDLLAMEPGMVNGETESSTAGLKVKTEEMQCQVCYDLGAAYFQQGSTNSAVYENAREKFFRTKELIAEIGSLSLHCTIDEKRLAGYCQACDVLVPSSDSTSQQLTPYSQVHICLRSGNYQEVIQIFIEDNLTLSLPVQFRQSVLRELFKKAQQGNEALDEICFKVCACNTVRDILEGRTISVQFNQLFLRPNKEKIDFLLEVCSRSVNLEKASESLKGNMAAFLKNVCLGLEDLQYVFMISSHELFITLLKDEERKLLVDQMRKRSPRVNLCIKPVTSFYDIPASASVNIGQLEHQLILSVDPWRIRQILIELHGMTSERQFWTVSNKWEVPSVYSGVILGIKDNLTRDLVYILMAKGLHCSTVKDFSHAKQLFAACLELVTEFSPKLRQVMLNEMLLLDIHTHEAGTGQAGERPPSDLISRVRGYLEMRLPDIPLRQVIAEECVAFMLNWRENEYLTLQVPAFLLQSNPYVKLGQLLAATCKELPGPKESRRTAKDLWEVVVQICSVSSQHKRGNDGRVSLIKQRESTLGIMYRSELLSFIKKLREPLVLTIILSLFVKLHNVREDIVNDITAEHISIWPSSIPNLQSVDFEAVAITVKELVRYTLSINPNNHSWLIIQADIYFATNQYSAALHYYLQAGAVCSDFFNKAVPPDVYTDQVIKRMIKCCSLLNCHTQVAILCQFLREIDYKTAFKSLQEQNSHDAMDSYYDYIWDVTILEYLTYLHHKRGETDKRQIAVYKTSEGGRGKAA

SEQ ID NO: 865817 - protein, 696 aa, Homo sapiens
MSAEAADREAATSSRPCTPPQTCWFEFLLEESLLEKHLRKPCPDPAPVQLIVQFLEQASKPSVNEQNQVQPPPDNKRNRILKLLALKVAAHLKWDLDILEKSLSVPVLNMLLNELLCISKVPPGTKHVDMDLATLPPTTAMAVLLYNRWAIRTIVQSSFPVKQAKPGPPQLSVMNQMQQEKELTENILKVLKEQAADSIWVLEAALKLNKDLYVHTMRTLDLLAMEPGMVNGETESSTAGLKVKTEEMQCQVCYDLGAAYFQQGSTNSAVYENAREKFFRTKELIAEIGSLSLHCTIDEKRLAGYCQACDVLVPSSDSTSQQLTPYSQVHICLRSGNYQEVIQIFIEDNLTLSLPVQFRQSVLRELFKKAQQGNEALDEICFKVCACNTVRDILEGRTISVQFNQLFLRPNKEKIDFLLEVCSRSVNLEKASESLKGNMAAFLKNVCLGLEDLQYVFMISSHELFITLLKDEERKLLVDQMRKRSPRVNLCIKPVTSFYDIPASASVNIGQLEHQLILSVDPWRIRQILIELHGMTSERQFWTVSNKWEVPSVYSGVILGIKDNLTRDLVYILMAKGLHCSTVKDFSHAKQLFAACLELVTEFSPKLRQVMLNEMLLLDIHTHEAGTGQAGERPPSDLISRVRGYLEMRLPDIPLRQVIAEECVAFMLNWRENEYLTLQVPAFLLQSNPYVKVVNV

SEQ ID NO: 865818 - protein, 951 aa, Homo sapiens
MSAEAADREAATSSRPCTPPQTCWFEFLLEESLLEKHLRKPCPDPAPVQLIVQFLEQASKPSVNEQNQVQPPPDNKRNRILKLLALKVAAHLKWDLDILEKSLSVPVLNMLLNELLCISKVPPGTKHVDMDLATLPPTTAMAVLLYNRWAIRTIVQSSFPVKQAKPGPPQLSVMNQMQQEKELTENILKVLKEQAADSIWVLEAALKLNKDLYVHTMRTLDLLAMEPGMVNGETESSTAGLKVKTEEMQCQVCYDLGAAYFQQGSTNSAVYENAREKFFRTKELIAEIGSLSLHCTIDEKRLAGYCQACDVLVPSSDSTSQQLTPYSQVHICLRSGNYQEVIQIFIEDNLTLSLPVQFRQSVLRELFKKAQQGNEALDEICFKVCACNTVRDILEGRTISVQFNQLFLRPNKEKIDFLLEVCSRSVNLEKASESLKGNMAAFLKNVCLGLEDLQYVFMISSHELFITLLKDEERKLLVDQMRKRSPRVNLCIKPVTSFYDIPASASVNIGQLEHQLILSVDPWRIRQILIELHGMTSERQFWTVSNKWEVPSVYSGVILGIKDNLTRDLVYILMAKGLHCSTVKDFSHAKQLFAACLELVTEFSPKLRQVMLNEMLLLDIHTHEAGTGQAGERPPSDLISRVRGYLEMRLPDIPLRQVIAEECVAFMLNWRENEYLTLQVPAFLLQSNPYVKLGQLLAATCKELPGPKESRRTAKDLWEVVVQICSVSSQHKRGNDGRVSLIKQRESTLGIMYRSELLSFIKKLREPLVLTIILSLFVKLHNVREDIVNDITAEHISIWPSSIPNLQSVDFEAVAITVKELVRYTLSINPNLCPLMFIQTSNKTNDKCCSLLNWHTQVAIYVSSQRNDYKTVNLCRTTSLKLGSNYDTMGLSLDNWLLPKGKRSTHWVSPAKLGGTKVLGRGKISRELRHLKGTGFFRAFKHSLFCVCCSS

SEQ ID NO: 865819 - protein, 639 aa, Homo sapiens
MSAEAADREAATSSRPCTPPQTCWFEFLLEESLLEKHLRKPCPDPAPVQLIVQFLEQASKPSVNEQNQVQPPPDNKRNRILKLLALKVAAHLKWDLDILEKSLSVPVLNMLLNELLCISKVPPGTKHVDMDLATLPPTTAMAVLLYNRWAIRTIVQSSFPVKQAKPGPPQLSVMNQMQQEKELTENILKVLKEQAADSIWVLEAALKLNKDLYVHTMRTLDLLAMEPGMVNGETESSTAGLKVKTEEMQCQVCYDLGAAYFQQGSTNSAVYENAREKFFRTKELIAEIGSLSLHCTIDEKRLAGYCQACDVLVPSSDSTSQQLTPYSQVHICLRSGNYQEVIQIFIEDNLTLSLPVQFRQSVLRELFKKAQQGNEALDEICFKVCACNTVRDILEGRTISVQFNQLFLRPNKEKIDFLLEVCSRSVNLEKASESLKGNMAAFLKNVCLGLEDLQYVFMISSHELFITLLKDEERKLLVDQMRKRSPRVNLCIKPVTSFYDIPASASVNIGQLEHQLILSVDPWRIRQILIELHGMTSERQFWTVSNKWEVPSVYSGVILGIKDNLTRDLVYILMAKGLHCSTVKDFSHAKQLFAACLELVTEFSPKLRQVMLNEMLLLDIHKKKKNTLRGGPGPHFALL

SEQ ID NO: 865820 - protein, 995 aa, Homo sapiens; identical to SEQ ID NO: 865813

SEQ ID NO: 865821 - protein, 780 aa, Homo sapiens
MSAEAADREAATSSRPCTPPQTCWFEFLLEESLLEKHLRKPCPDPAPVQLIVQFLEQASKPSVNEQNQVQPPPDNKRNRILKLLALKVAAHLKWDLDILEKSLSVPVLNMLLNELLCISKVPPGTKHVDMDLATLPPTTAMAVLLYNRWAIRTIVQSSFPVKQAKPGPPQLSVMNQMQQEKELTENILKVLKEQAADSIWVLEAALKLNKDLYVHTMRTLDLLAMEPGMVNGETESSTAGLKVKTEEMQCQVCYDLGAAYFQQGSTNSAVYENAREKFFRTKELIAEIGSLSLHCTIDEKRLAGYCQACDVLVPSSDSTSQQLTPYSQVHICLRSGNYQEVIQIFIEDNLTLSLPVQFRQSVLRELFKKAQQGNEALDEICFKVCACNTVRDILEGRTISVQFNQLFLRPNKEKIDFLLEVCSRSVNLEKASESLKGNMAAFLKNVCLGLEDLQYVFMISSHELFITLLKDEERKLLVDQMRKRSPRVNLCIKPVTSFYDIPASASVNIGQLEHQLILSVDPWRIRQILIELHGMTSERQFWTVSNKWEVPSVYSGVILGIKDNLTRDLVYILMAKGLHCSTVKDFSHAKQLFAACLELVTEFSPKLRQVMLNEMLLLDIHTHEAGTGQAGERPPSDLISRVRGYLEMRLPDIPLRQVIAEECVAFMLNWRENEYLTLQVPAFLLQSNPYVKLGQLLAATCKELPGPKESRRTAKDLWEVVVQICSVSSQHKRGNDGRVSLIKQRESTLGIMYRSELLSFIKKLRVSFIKNCSNYYCWFL

SEQ ID NO: 865822 - protein, 320 aa, Homo sapiens
KTLPPKRKENKRNSEFILGQLLAATCKELPGPKESRRTAKDLWEVVVQICSVSSQHKRGNDGRVSLIKQRESTLGIMYRSELLSFIKKLREPLVLTIILSLFVKLHNVREDIVNDITAEHISIWPSSIPNLQSVDFEAVAITVKELVRYTLSINPNNHSWLIIQADIYFATNQYSAALHYYLQAGAVCSDFFNKAVPPDVYTDQVIKRMIKCCSLLNCHTQVAILCQFLREIDYKTAFKSLQEQNSHDAMDSYYDYIWDVTILEYLTYLHHKRGETDKRQIAIKAIGQTELNASNPEEVLQLAAQRRKKKFLQAMAKLYF

SEQ ID NO: 865823 - protein, 909 aa, Homo sapiens
MSAEAADREAATSSRPCTPPQTCWFEFLLEESLLEKHLRKPCPDPAPVQLIVQFLEQASKPSVNEQNQVQPPPDNKRNRILKLLALKVAAHLKWDLDILEKSLSVPVLNMLLNELLCISKVPPGTKHVDMDLATLPPTTAMAVLLYNRWAIRTIVQSSFPVKQAKPGPPQLSVMNQMQQEKELTENILKVLKEQAADSIWVLEAALKLNKDLYVHTMRTLDLLAMEPGMVNGETESSTAGLKVKTEEMQCQVCYDLGAAYFQQGSTNSAVYENAREKFFRTKELIAEIGSLSLHCTIDEKRLAGYCQACDVLVPSSDSTSQQLTPYSQVHICLRSGNYQEVIQIFIEDNLTLSLPVQFRQSVLRELFKKAQQGNEALDEICFKVCACNTVRDILEGRTISVQFNQLFLRPNKEKIDFLLEVCSRSVNLEKASESLKGNMAAFLKNVCLGLEDLQYVFMISSHELFITLLKDEERKLLVDQMRKRSPRVNLCIKPVTSFYDIPASASVNIGQLEHQLILSVDPWRIRQILIELHGMTSERQFWTVSNKWEVPSVYSGVILGIKDNLTRDLVYILMAKGLHCSTVKDFSHAKQLFAACLELVTEFSPKLRQVMLNEMLLLDIHTHEAGTGQAGERPPSDLISRVRGYLEMRLPDIPLRQVIAEECVAFMLNWRENEYLTLQVPAFLLQSNPYVKLGQLLAATCKELPGPKESRRTAKDLWEVVVQICSVSSQHKRGNDGRVSLIKQRESTLGIMYRSELLSFIKKLREPLVLTIILSLFVKLHNVREDIVNDITAEHISIWPSSIPNLQSVDFEAVAITVKELVRYTLSINPNNHSWLIIQADIYFATNQYSAALHYYLQAGAVCSDFFNKAVPPDVYTDQVNCFRGLAGFLPTCICSSWVPFWLNLPISL

SEQ ID NO: 865824 - protein, 780 aa, Homo sapiens; identical to SEQ ID NO: 865821

SEQ ID NO: 865825 - protein, 165 aa, Homo sapiens
MKWGKKVACGSSEGTIYLFNWNGFGATSDRFALRAESIDCMVPVTESLLCTGSTDGVIRAVNILPNRVVGSVGQHTGEPVEELALSHCGRFLASSGHDQRLKFWDMAQLRAVVVDDYRRRKKKGGPLRALSSKTWSTDDFFAGLREEGEDSMAQEEKEETGDDSD

SEQ ID NO: 865826 - protein, 403 aa, Homo sapiens
SVGGSEADYPAAARLAVLLSMDRTCEERPAEDGSDEEDPDSMEAPTRIRDTPEDIVLEAPASGLAFHPARDLLAAGDVDGDVFVFSYSCQEGETKELWSSGHHLKACRAVAFSEDGQKLITVSKDKAIHVLDVEQGQLERRVSKAHGAPINSLLLVDENVLATGDDTGGIRLWDQRKEGPLMDMRQHEEYIADMALDPAKKLLLTASGDGCLGIFNIKRRRFELLSEPQSGDLTSVTLMKWGKKVACGSSEGTIYLFNWNGFGATSDRFALRAESIDCMVPVTESLLCTGSTDGVIRAVNILPNRVVGSVGQHTGEPVEELALSHCGRFLASSGHDQRLKFWDMAQLRAVVVDDYRRRKKKGGPLRALSSKTWSTDDFFAGLREEGEDSMAQEEKEETGDDSD

SEQ ID NO: 865827 - protein, 403 aa, Homo sapiens; identical to SEQ ID NO: 865826

SEQ ID NO: 865828 - protein, 403 aa, Homo sapiens; identical to SEQ ID NO: 865826

SEQ ID NO: 865829 - protein, 403 aa, Homo sapiens; identical to SEQ ID NO: 865826

SEQ ID NO: 865830 - protein, 403 aa, Homo sapiens; identical to SEQ ID NO: 865826

SEQ ID NO: 865831 - protein, 403 aa, Homo sapiens; identical to SEQ ID NO: 865826

SEQ ID NO: 865832 - protein, 403 aa, Homo sapiens; identical to SEQ ID NO: 865826

SEQ ID NO: 865833 - protein, 374 aa, Homo sapiens
SVGGSEADYPAAARLAVLLSMDRTCEERPAEDGSDEEDPDSMEAPTRIRDTPEDIVLEAPASGLAFHPARDLLAAGDVDGDVFVFSYSCQEGETKELWSSGHHLKACRAVAFSEDGQKLITVSKDKAIHVLDVEQGQLERRVSKAHGAPINSLLLVDENVLATGDDTGGIRLWDQRKEGPLMDMRQHEEYIADMALDPAKKLLLTASGDGCLGIFNIKRRRFELLSEPQSGDLTSVTLMKWGKKVACGSSEGTIYLFNWNGFGATSDRFALRAESIDCMVPVTESLLCTGSTDGVIRAVNILPNRVVGSVGQHTGEPVEELALSHCGRFLASSGHDQRLKFWDMAQLRAVVVDDYRRRKKKGGEEKEETGDDSD

SEQ ID NO: 865834 - protein, 317 aa, Homo sapiens
MEVSLMALSMSLSSDILSGAPTAGRGGGCSAALSPRGRGSKGLGTRAPGPRGDGQQPPLGTGGDEDPGAGSASAGGSRLAAAAAAEAAAPGDRSLCWAPRGRLLASSPAGEAGSWGRARRGGPRPGAPCKGLAGPPLRPGLRQVLKKSLRLRLRRLHRREAEAEAEAELGAAAPAAASAPHIAGTPAPGSPAGRPHARAVPRGSSRPPLLPPSFVTPRPHAPLAAFRWGFRAAPEPRTRLAGVRLGLPKTRRIQDRPLGLPRRWRCANDVIGPDSRECACVGASAFISTLRRFTPGKRSSERICGGQPRREKTGLKH

SEQ ID NO: 865835 - protein, 317 aa, Homo sapiens; identical to SEQ ID NO: 865834

SEQ ID NO: 865836 - protein, 317 aa, Homo sapiens; identical to SEQ ID NO: 865834

SEQ ID NO: 865837 - protein, 317 aa, Homo sapiens; identical to SEQ ID NO: 865834

SEQ ID NO: 865838 - protein, 317 aa, Homo sapiens; identical to SEQ ID NO: 865834

SEQ ID NO: 865839 - protein, 103 aa, Homo sapiens
  misc_feature (70)..(70): Xaa can be any naturally occurring amino acid
RRGGLKLWRRAWPKALLSTGSVCVKLSAQMNDDRHVIQPERRGALAWLRGSDRMCYVEIYVITKVDSSSXDRAEPSTFLVYWWERNLRMTIYPSPVRFFIRQR

SEQ ID NO: 865840 - protein, 317 aa, Homo sapiens; identical to SEQ ID NO: 865834

SEQ ID NO: 865841 - protein, 317 aa, Homo sapiens; identical to SEQ ID NO: 865834

SEQ ID NO: 865842 - protein, 317 aa, Homo sapiens; identical to SEQ ID NO: 865834

SEQ ID NO: 865843 - protein, 317 aa, Homo sapiens; identical to SEQ ID NO: 865834

SEQ ID NO: 865844 - protein, 85 aa, Homo sapiens
MSLSSDILSGAPTAGRGGGCSAALSPRGRGSKGLGTRAPGPRGDGQQPPLGTGGDEDPGAGSASAGGSRLAAAAAAEAAAPGDRS

SEQ ID NO: 865845 - protein, 274 aa, Homo sapiens
MAATKTASYDEHFRPEKLREWPEPESVSLMEVLAREDIDEAVCAILFKENSIVKRLDMYFQHVDTFKERRKEMLHKKWVENVAEPLQQRIMEKVISYKELKMKQENVEYYLQHRHKMVTVPPFVDPLFQRQQEVDEERRTGLQCETGKRHSIKELEEIEKARLHASSPYFTFTSHCVIPKEWHKASARARSKTYKYSPEKLICADKKQKRKEKKTADLSQAAFERQFLSSKLSQKNKVGENSLLNPSSEPQSLWELAKRVKNLTTQKFSEVRNG

SEQ ID NO: 865846 - protein, 298 aa, Homo sapiens
MAATKTASYDEHFRPEKLREWPEPESVSLMEVLAREDIDEAVCAILFKENSIVKRLDMYFQHVDTFKERRKEMLHKKWVENVAEPLQQRIMEKVISYKELKMKQENVEYYLQHRHKMVTVPPFVDPLFQRQQEVDEERRTGLQCETGKRHSIKELEEIEKARLHASSPYFTFTSHCVIPKEWHKASARARSKTYKYSPEKLICADKKQKRKEKKTADLSQAAFERQFLSSKLSQKNKVGERKGLVLGTRQQRPRSWAAGDSQQHRGPQPVGKRVMTAEVLGQHLASLQKVARQGHPWY

SEQ ID NO: 865847 - protein, 239 aa, Homo sapiens
SGRAPFSVAAPGRGLGGALPGRSRGACDFPRSWPEVLAREDIDEAVCAILFKENSIVKVTVPPFVDPLFQRQQEVDEERRTGLQCETGKRHSIKELEEIEKARLHASSPYFTFTSHCVIPKEWHKASARARSKTYKYSPEKLICADKKQKRKEKKTADLSQAAFERQFLSSKLSQKNKVGERKGLVLGTRQQRPRSWAAGDSQQHRGPQPVGKRVMTAEVLGQHLASLQKVARQGHPWY

SEQ ID NO: 865848 - protein, 339 aa, Homo sapiens
MAATKTASYDEHFRPEKLREWPEPESVSLMEVLAREDIDEAVCAILFKENSIVKVTVPPFVDPLFQRQQEVDEERRTGLQCETGKRHSIKELEEIEKARLHASSPYFTFTSHCVIPKEWHKASARARSKTYKYSPEKLICADKKQKRKEKKTADLSQAAFERQFLSSKLSQKNKVGERKGLVSRGLGRGWLQGFAAPTSSTYWFQNEPPPQPSLSDRHPRAEEAWPKKKGVKRRREKWRWPQAQHCSSDRAPRAGKPCMKKLRQVVNVGPGPHFPETSCPSEVRANLATGAFPPEISSAPSPGPLPFCHFPTIFHLLHPNCTKDGVLLSPHTTGGKFLK

SEQ ID NO: 865849 - protein, 235 aa, Homo sapiens
MAATKTASYDEHFRPEKLREWPEPESVSLMEVLAREDIDEAVCAILFKENSIVKVTVPPFVDPLFQRQQEVDEERRTGLQCETGKRHSIKELEEIEKARLHASSPYFTFTSHCVIPKEWHKASARARSKTYKYSPEKLICADKKQKRKEKKTADLSQAAFERQFLSSKLSQKNKVGERKGLVLGTRQQRPRSWAAGDSQQHRGPQPVGKRVMTAEVLGQHLASLQKVARQGHPWY

SEQ ID NO: 865850 - protein, 199 aa, Homo sapiens
MAATKTASYDEHFRPEKLREWPEPESVSLMEVLAREDIDEAVCAILFKENSIVKRLDMYFQHVDTFKERRKEMLHKKWVENVAEPLQQRIMEKVISYKELKMKQENVEYYLQHRHKMVTVPPFVDPLFQRQQEVDEERRTGLQCETGKRHSIKELEEIEKARLHASSPYFTFTSHCVIPKEWHKASARARSKTYKYRYR

SEQ ID NO: 865851 - protein, 269 aa, Homo sapiens
RGARAPASQVGARPWPWRKSRRSRRPAPGDAASRSPRGRDRAAGIMTLFHFGNCFALAYFPYFITYKCSGLSEYNAFWKCVQAGVTYLFVQLCKMLFLATFFPTWEGGIYDFIGEFMKASVDVADLIGLNLVMSRNAGKGEYKIMVAALGWATAELIMSRCIPLWVGARGIEFDWKYIQMSIDSNISLVHYIVASAQVWMITRYDLYHTFRPAVLLLMFLSVYKAFVMETFVHLCSLGSWAALLARAVVTGLLALSTLALYVAVVNVHS

SEQ ID NO: 865852 - protein, 224 aa, Homo sapiens
MTLFHFGNCFALAYFPYFITYKCSGLSEYNAFWKCVQAGVTYLFVQLCKMLFLATFFPTWEGGIYDFIGEFMKASVDVADLIGLNLVMSRNAGKGEYKIMVAALGWATAELIMSRCIPLWVGARGIEFDWKYIQMSIDSNISLVHYIVASAQVWMITRYDLYHTFRPAVLLLMFLSVYKAFVMETFVHLCSLGSWAALLARAVVTGLLALSTLALYVAVVNVHS

SEQ ID NO: 865853 - protein, 269 aa, Homo sapiens; identical to SEQ ID NO: 865851

SEQ ID NO: 865854 - protein, 224 aa, Homo sapiens; identical to SEQ ID NO: 865852

SEQ ID NO: 865855 - protein, 269 aa, Homo sapiens; identical to SEQ ID NO: 865851

SEQ ID NO: 865856 - protein, 334 aa, Homo sapiens
  misc_feature (314)..(314): Xaa can be any naturally occurring amino acid
  misc_feature (321)..(321): Xaa can be any naturally occurring amino acid
RGARAPASQVGARPWPWRKSRRSRRPAPGDAASRSPRGRDRAAGIMTLFHFGNCFALAYFPYFITYKCSGLSEYNAFWKCVQAGVTYLFVQLCKMLFLATFFPTWEGGIYDFIGEFMKASVDVADLIGLNLVMSRNAGKGEYKIMVAALGWATAELIMSRCIPLWVGARGIEFDWKYIQMSIDSNISLVHYIVASAQVWMITRYDLYHTFRPAVLLLMFLSVYKAFVMETFVHLCSLGSWAALLARAVVTGLLALSTLALYVAVGTAARGARTTRGEPGLEQEQDQQGDGQDGTVRTVCGGDDDRTGDKREAIXHADLECXFHANSFKIGAGHK

SEQ ID NO: 865857 - protein, 269 aa, Homo sapiens
MTLFHFGNCFALAYFPYFITYKCSGLSEYNAFWKCVQAGVTYLFVQLCKMLFLATFFPTWEGGIYDFIGEFMKASVDVADLIGLNLVMSRNAGKGEYKIMVAALGWATAELIMSRCVQQPGAQTPEKGHLGSTGVLEGRGSKPGLKVSEYWRIPSFAFLSCIPLWVGARGIEFDWKYIQMSIDSNISLVHYIVASAQVWMITRYDLYHTFRPAVLLLMFLSVYKAFVMETFVHLCSLGSWAALLARAVVTGLLALSTLALYVAVVNVHS

SEQ ID NO: 865858 - protein, 184 aa, Homo sapiens
MTLFHFGNCFALAYFPYFITYKCSGLSEYNAFWKCVQAGVTYLFVQLCKMLFLATFFPTWEGGIYDFIGEFMKASVDVADLIGLNLVMSRNAGKGEYKIMVAALGWATAELIMSRCIPLWVGARGIEFDWKYIQMSIDSNISLVHYIVASAQVWMITRYDLYHTFRPAVLLLMFLSVYKAFVME

SEQ ID NO: 865859 - protein, 148 aa, Homo sapiens
MTLFHFGNCFALAYFPYFITYKCSGLSEYNAFWKCVQAGVTYLFVQLCKMLFLATFFPTWEGGIYDFIGEFMKASVDVADLIGLNLVMSRNAGKGEYKIMVAALGWATAELIMSRCVQQPGAQTPEKGHLGSTGVLEGRGSKPGAEGV

SEQ ID NO: 865860 - protein, 245 aa, Homo sapiens
GGANNSVVRGSVVNSAEALAVAKEPAEPETRSRRRRLAIPARAGPGGRHHDPVSLRELLRSCLLPLLHHLQVQRPVSAGRARGGEGAGPGPTLTSRFSRSEYNAFWKCVQAGVTYLFVQLCKVRATGKPRVLAPRLCRPRGTRAHGELIPRNADATDREDTTHRDIPDTYEERIRIPRRGTATRKSRRHEPVQAQKTPRTAQLVDASHHYGTSLKHNPAAKTHKHKHTQVDHHNHRGQETSGGKE

SEQ ID NO: 865861 - protein, 172 aa, Homo sapiens
MTLFHFGNCFALAYFPYFITYKCSGLSEYNAFWKCVQAGVTYLFVQLCKVRATGKPRVLAPRLCRPRGTRAHGELIPRNADATDREDTTHRDIPDTYEERIRIPRRGTATRKSRRHEPVQAQKTPRTAQLVDASHHYGTSLKHNPAAKTHKHKHTQVDHHNHRGQETSGGKE

SEQ ID NO: 865862 - protein, 224 aa, Homo sapiens; identical to SEQ ID NO: 865852

SEQ ID NO: 865863 - protein, 297 aa, Homo sapiens
GGANNSVVRGSVVNSAEALAVAKEPAEPETRSRRRRLAIPARAGPGGRHHDPVSLRELLRSCLLPLLHHLQVQRPVSAGRARGGEGAGPGPTLTSRFSRSEYNAFWKCVQAGVTYLFVQLCKMLFLATFFPTWEGGIYDFIGEFMKASVDVADLIGLNLVMSRNAGKGEYKIMVAALGWATAELIMSRCIPLWVGARGIEFDWKYIQMSIDSNISLVHYIVASAQVWMITRYDLYHTFRPAVLLLMFLSVYKAFVMETFVHLCSLGSWAALLARAVVTGLLALSTLALYVAVVNVHS

SEQ ID NO: 865864 - protein, 242 aa, Homo sapiens
IFCHQDPTSNLPVLMNSNSIPPIPLRPTHTRQVDLTITYKCSGLSEYNAFWKCVQAGVTYLFVQLCKMLFLATFFPTWEGGIYDFIGEFMKASVDVADLIGLNLVMSRNAGKGEYKIMVAALGWATAELIMSRCIPLWVGARGIEFDWKYIQMSIDSNISLVHYIVASAQVWMITRYDLYHTFRPAVLLLMFLSVYKAFVMETFVHLCSLGSWAALLARAVVTGLLALSTLALYVAVVNVHS

SEQ ID NO: 865865 - protein, 172 aa, Homo sapiens
MGLPVPLCLLKPQPDPQEFMKASVDVADLIGLNLVMSRNAGKGEYKIMVAALGWATAELIMSRCIPLWVGARGIEFDWKYIQMSIDSNISLVHYIVASAQVWMITRYDLYHTFRPAVLLLMFLSVYKAFVMETFVHLCSLGSWAALLARAVVTGLLALSTLALYVAVVNVHS

SEQ ID NO: 865866 - protein, 179 aa, Homo sapiens
MPARESTRSWLLPWAGPLLSLLCPGAYSSLEPRPLRRDTWVPRGCWRAGAQSLVLKVSEYWRIPSFAFLSCIPLWVGARGIEFDWKYIQMSIDSNISLVHYIVASAQVWMITRYDLYHTFRPAVLLLMFLSVYKAFVMETFVHLCSLGSWAALLARAVVTGLLALSTLALYVAVVNVHS

SEQ ID NO: 865867 - protein, 184 aa, Homo sapiens
MTLFHFGNCFALAYFPYFITYKCSGLSEYNAFWKCVQAGVTYLFVQLCKMLFLATFFPTWEGGIYDFIGEFMKASVDVADLIGLNLVMSRNAGKGEYKIMVAALGWATAELIMSRCIPLWVGARGIEFDWKYIQMSIDSNISLVGSRALPHTHFCWRPYSSPRPGPDFLPPSRSITSSRLLRSG

SEQ ID NO: 865868 - protein, 136 aa, Homo sapiens
WLAEGHESYPAGEGGIDDCVGEFMKASVDVADLIGLNLVMSRNAGKGEYKIMVAALGWATAELIMSRCIPLWVGARGIEFDWKYIQMSIDSNISLVGSRALPHTHFCWRPYSSPRPGPDFLPPSRSITSSRLLRSG

SEQ ID NO: 865869 - protein, 360 aa, Homo sapiens
MAEPDLECEQIRLKCIRKEGFFTVPPEHRLGRCRSVKEFEKLNRIGEGTYGIVYRARDTQTDEIVALKKVRMDKEKDGIPISSLREITLLLRLRHPNIVELKEVVVGNHLESIFLVMGYCEQDLASLLENMPTPFSEAQVKCIVLQVLRGLQYLHRNFIIHRDLKVSNLLMTDKGCVKTADFGLARAYGVPVKPMTPKVVTLWYRAPELLLGTTTQTTSIDMWAVGCILAELLAHRPLLPGTSEIHQIDLIVQLLGTPSENIWPGFSKLPLVGQYSLRKQPYNNLKHKFPWLSEAGLRLLHFLFMYDPKKRATAGDCLESSYFKEKPLPCEPELMPTFPHHRNKRAAPATSEGQSKRCKP

SEQ ID NO: 865870 - protein, 208 aa, Homo sapiens
RLRLRAREAGPALGMAEPDLECEQIRLKCIRKEGFFTVPPEHRLGRCRSVKEFEKLNRIGEGTYGIVYRARDTQTDEIVALKKVRMDKEKDGIPISSLREITLLLRLRHPNIVELKEVVVGNHLESIFLVMGYCEQDLASLLENMPTPFSEAQVKCIVLQVLRGLQYLHRNFIIHRDLKVSNLLMTDKGCVKTGGCNLGQALSLDGTW

SEQ ID NO: 865871 - protein, 173 aa, Homo sapiens
TGNTLLFQLGRCRSVKEFEKLNRIGEGTYGIVYRARDTQTDEIVALKKVRMDKEKDGIPISSLREITLLLRLRHPNIVELKEVVVGNHLESIFLVMGYCEQDLASLLENMPTPFSEAQVKCIVLQVLRGLQYLHRNFIIHRDLKVSNLLMTDKGCVKTGGCNLGQALSLDGTW

SEQ ID NO: 865872 - protein, 123 aa, Homo sapiens
MDKEKDGIPISSLREITLLLRLRHPNIVELKEVVVGNHLESIFLVMGYCEQDLASLLENMPTPFSEAQVKCIVLQVLRGLQYLHRNFIIHRDLKVSNLLMTDKGCVKTGGCNLGQALSLDGTW

SEQ ID NO: 865873 - protein, 183 aa, Homo sapiens
MERGPALPGGFTRTLGASLAEVPVPPSAETRREPLGVGRCCPDRARDTQTDEIVALKKVRMDKEKDGIPISSLREITLLLRLRHPNIVELKEVVVGNHLESIFLVMGYCEQDLASLLENMPTPFSEAQVKCIVLQVLRGLQYLHRNFIIHRDLKVSNLLMTDKGCVKTGGCNLGQALSLDGTW

SEQ ID NO: 865874 - protein, 123 aa, Homo sapiens; identical to SEQ ID NO: 865872

SEQ ID NO: 865875 - protein, 237 aa, Homo sapiens
RLRLRAREAGPALGMAEPDLECEQIRLKCIRKEGFFTVPPEHRLGRCRSVKEFEKLNRIGEGTYGIVYRARDTQTDEIVALKKVRMDKEKDGIPISSLREITLLLRLRHPNIVELKEVVVGNHLESIFLVMGYCEQDLASLLENMPTPFSEAQVKCIVLQVLRGLQYLHRNFIIHRDLKVSNLLMTDKGCVKTADFGLARAYGVPVKPMTPKVVTLWYRAPELLLGTTTQTTSIDMW

SEQ ID NO: 865876 - protein, 272 aa, Homo sapiens
MDKEKDGIPISSLREITLLLRLRHPNIVELKEVVVGNHLESIFLVMGYCEQDLASLLENMPTPFSEAQVKCIVLQVLRGLQYLHRNFIIHRDLKVSNLLMTDKGCVKTADFGLARAYGVPVKPMTPKVVTLWYRAPELLLGTTTQTTSIDMWAVGCILAELLAHRPLLPGTSEIHQIDLIVQLLGTPSENIWPGFSKLPLVGQYSLRKQPYNNLKHKFPWLSEAGLRLLHFLFMYDPKKRATAGDCLESSYFKEKPLRLPISGVCEGCREPG

SEQ ID NO: 865877 - protein, 289 aa, Homo sapiens
MDKEKDGIPISSLREITLLLRLRHPNIVELKEVVVGNHLESIFLVMGYCEQDLASLLENMPTPFSEAQVKCIVLQVLRGLQYLHRNFIIHRDLKVSNLLMTDKGCVKTADFGLARAYGVPVKPMTPKVVTLWYRAPELLLGTTTQTTSIDMWAVGCILAELLAHRPLLPGTSEIHQIDLIVQLLGTPSENIWPGFSKLPLVGQYSLRKQPYNNLKHKFPWLSEAGLRLLHFLFMYDPKKRATAGDCLESSYFKEKPLPCEPELMPTFPHHRNKRAAPATSEGQSKRCKP

SEQ ID NO: 865878 - protein, 122 aa, Homo sapiens
MWAVGCILAELLAHRPLLPGTSEIHQIDLIVQLLGTPSENIWPGFSKLPLVGQYSLRKQPYNNLKHKFPWLSEAGLRLLHFLFMYDPKKRATAGDCLESSYFKEKPLRLPISGVCEGCREPG

SEQ ID NO: 865879 - protein, 123 aa, Homo sapiens; identical to SEQ ID NO: 865872

SEQ ID NO: 865880 - protein, 172 aa, Homo sapiens
MDKEKDGIPISSLREITLLLRLRHPNIVELKEVVVGNHLESIFLVMGYCEQDLASLLENMPTPFSEAQVKCIVLQVLRGLQYLHRNFIIHRDLKVSNLLMTDKGCVKTADFGLARAYGVPVKPMTPKVVTLWYRAPELLLGTTTQTTSIDMWAFPSCHWSASTASGSSPTTT

SEQ ID NO: 865881 - protein, 123 aa, Homo sapiens; identical to SEQ ID NO: 865872

SEQ ID NO: 865882 - protein, 123 aa, Homo sapiens; identical to SEQ ID NO: 865872

SEQ ID NO: 865883 - protein, 123 aa, Homo sapiens; identical to SEQ ID NO: 865872

SEQ ID NO: 865884 - protein, 166 aa, Homo sapiens [sequence omitted]

SEQ ID NO: 865885 - protein, 139 aa, Homo sapiens [sequence omitted]

SEQ ID NO: 865886 - protein, 202 aa, Homo sapiens
RLRLRAREAGPALGMAEPDLECEQIRLKCIRKEGFFTVPPEHRLGRCRSVKEFEKLNRIGEDRARDTQTDEIVALKKVRMDKEKDGIPISSLREITLLLRLRHPNIVELKEVVVGNHLESIFLVMGYCEQDLASLLENMPTPFSEAQVKCIVLQVLRGLQYLHRNFIIHRDLKVSNLLMTDKGCVKTGGCNLGQALSLDGTW

SEQ ID NO: 865887 - protein, 132 aa, Homo sapiens
MDKEKDGIPISSLREITLLLRLRHPNIVELKEVVVGNHLESIFLVMGYCEQDLASLLENMPTPFSEAQVKCIVLQVLRGLQYLHRNFIIHRDLKVSNLLMTDKGCVKTADFGLARAYGVPVKPMTPKVVTLW

SEQ ID NO: 865888 - protein, 289 aa, Homo sapiens; identical to SEQ ID NO: 865877

SEQ ID NO: 865889 - protein, 270 aa, Homo sapiens
RLRLRAREAGPALGMAEPDLECEQIRLKCIRKEGFFTVPPEHRLGRCRSVKEFEKLNRIGEGTYGIVYRARDTQTDEIVALKKVRMDKEKDGIPISSLREITLLLRLRHPNIVELKEVVVGNHLESIFLVMGYCEQDLASLLENMPTPFSEAQVKCIVLQVLRGLQYLHRNFIIHRDLKVSNLLMTDKGCVKTGTEPLNCCWEPPRRPPASTCGEEIRLPLLGPQEGLGQEPGHLVPELSLRGGAGVQWGLCQPPTPREVGLSLETQEEV

SEQ ID NO: 865890 - protein, 166 aa, Homo sapiens [sequence omitted]

SEQ ID NO: 865891 - protein, 123 aa, Homo sapiens; identical to SEQ ID NO: 865872

SEQ ID NO: 865892 - protein, 123 aa, Homo sapiens; identical to SEQ ID NO: 865872

SEQ ID NO: 865893 - protein, 104 aa, Homo sapiens
MDKEKDGIPISSLREITLLLRLRHPNIVELKEVVVGNHLESIFLVMGYCEQDLASLLENMPTPFSEAQVKCIVLQVLRGLQYLHRNFIIHRWVTARQSWKHKFG

SEQ ID NO: 865894 - protein, 657 aa, Homo sapiens
MIESQEPVTFEDVAVDFTQEEWQQLNPAQKTLHRDVMLETYNHLVSVGCSGIKPDVIFKLEHGKDPWIIESELSRWIYPDRVKGLESSQQIISGELLFQREILERAPKDNSLYSVLKIWHIDNQMDRYQGNQDRVLRQVTVISRETLTDEMGSKYSAFGKMFNRCTDLAPLSQKFHKFDSCENSLKSNSDLLNYNRSYARKNPTKRFRCGRPPKYNASCSVPEKEGFIHTGMEPYGDSQCEKVLSHKQAHVQYKKFQAREKPNVCSMCGKAFIKKSQLIIHQRIHTGEKPYVCGDCRKAFSEKSHLIVHQRIHTGEKPYECTKYGRAFSRKSPFTVHQRVHTGEKPYECFECPKAFSQKSHLIIHQRVHTREKPFECSECRKAFCEMSHLFIHQITHTGKKPYECTECGKTFPRKTQLIIHQRTHTGEKPYKCGECGKTFCQQSHLIGHQRIHTGEKPYVCTDCGKAFSQKSHLTGHQRLHTGEKPYMCTECGKSFSQKSPLIIHQRIHTGEKPYQCGECGKTFSQKSLLIIHLRVHTGEKPYECTECGRAFSLKSHLILHQRGHTGEKPYECSECGKAFCGKSPLIIHQKTHPREKTPECAESGMTFFWKSQMITYQRRHTGEKPSRCSDCGKAFCQHVYFTGHQNPYRKDTLYIC

SEQ ID NO: 865895 - protein, 657 aa, Homo sapiens; identical to SEQ ID NO: 865894

SEQ ID NO: 865896 - protein, 383 aa, Homo sapiens [sequence omitted]

SEQ ID NO: 865897 - protein, 383 aa, Homo sapiens [sequence omitted]

SEQ ID NO: 865898 - protein, 364 aa, Homo sapiens
MLNVTLQGPTLNGTFAQSKCPQVEWLGWLNTIQPPFLWVLFVLATLENIFVLSVFCLHKSSCTVAEIYLGNLAAADLILACGLPFWAITISNNFDWLFGETLCRVVNAIISMNLYSSICFLMLVSIDRYLALVKTMSMGRMRGVRWAKLYSLVIWGCTLLLSSPMLVFRTMKEYSDEGHNVTACVISYPSLIWEVFTNMLLNVVGFLLPLSVITFCTMQIMQVLRNNEMQKFKEIQTERRATVLVLVVLLLFIICWLPFQISTFLDTLHRLGILSSCQDERIIDVITQIASFMAYSNSCLNPLVYVIVGKRFRKKSWEVYQGVCQKGGCRSEPIQMENSMGTLRTSISVERQIHKLQDWAGSRQ

SEQ ID NO: 865899 - protein, 383 aa, Homo sapiens [sequence omitted]

SEQ ID NO: 865900 - protein, 245 aa, Homo sapiens
MADVSAKDSSQETLVNLAGLLVSLLMLPLVSGCPGFSLGCFFFLTALHIYANYRAVRALVMETLNEGRLRLVLKHYLQRGEVLDPTAANRMEPLWTGFWPAPSLSLGVPLHRLVSSVFELQQLVEGHQESYLLCWDQSQNQVQVVLNQKAGPKTILRAATHGLMLGALQGDGPLPAELEELRNRVRAGPKKESWVVVKETHEVLDMLFPKFLKGLQDAGWKTEKHQLEVDEWRATWLLSPEKKVL

SEQ ID NO: 865901 - protein, 477 aa, Homo sapiens
GGAGIQKLGMADDAGLETPLCSEQFGSGEARGCRAAADGSLQWEVGGWRWWGLSRAFTVKPEGRDAGEVGASGAPSPPLSGLQAVFLPQGFPDSVSPDYLPYQLWDSVQAFASSLSGSLATQAVLLGIGVGNAKATVSAATATWLVKDSTGMLGRIVFAWWKGSKLDCNAKQWRLFADILNDVAMFLEIMAPVYPICFTMTVSTSNLAKCIVSVAGGATRAALTVHQARRNNMADVSAKDSSQETLVNLAGLLVSLLMLPLVSGCPGFSLGCFFFLTALHIYANYRAVRALVMETLNEGRLRLVLKHYLQRGEVLDPTAANRMEPLWTGFWPAPSLSLGVPLHRLVSSVFELQQLVEGHQESYLLCWDQSQNQVQVVLNQKAGPKTILRAATHGLMLGALQGDGPLPAELEELRNRVRAGPKKESWVVVKETHEVLDMLFPKFLKGLQDAGWKTEKHQLEVDEWRATWLLSPEKKVL

SEQ ID NO: 865902 - protein, 345 aa, Homo sapiens
GGAGIQKLGMADDAGLETPLCSEQFGSGEARGCRAAADGSLQWEVGGWRWWGLSRAFTVKPEGRDAGEVGASGAPSPPLSGLQAVFLPQGFPDSVSPDYLPYQLWDSVQAFASSLSGSLATQAVLLGIGVGNAKATVSAATATWLVKDSTGMLGRIVFAWWKGSKLDCNAKQWRLFADILNDVAMFLEIMAPVYPICFTMTVSTSNLAKCIVSVAGGATRAALTVHQARRNNMADVSAKDSSQETLVNLAGLLVSLLMLPLVSGCPGFSLGCFFFLTALHIYANYRAVRALVMETLNEGRLRLVLKHYLQRGEVLDPTAANRMEPLWTGDPAPGLGSCVSTSPTA

SEQ ID NO: 865903 - protein, 642 aa, Homo sapiens
GGAGIQKLGMADDAGLETPLCSEQFGSGEARGCRAAADGSLQWEVGGWRWWGLSRAFTVKPEGRDAGEVGASGAPSPPLSGLQAVFLPQGFPDSVSPDYLPYQLWDSVQAFASSLSGSLATQAVLLGIGVGNAKATVSAATATWLVKDSTGMLGRIVFAWWKGSKLDCNAKQWRLFADILNDVAMFLEIMAPVYPICFTMTVSTSNLAKCIVSVAGGATRAALTVHQARRNNMADVSAKDSSQETLVNLAGLLVSLLMLPLVSGCPGFSLGCFFFLTALHIYANYRAVRALVMETLNEGRLRLVLKHYLQRGEVLDPTAANRMEPLWTGDPAPGLGPVSQPLPLPRHPDPSFPQVSGQLRLYPWGSPYTAWSPGEWPSVSRSSPPPPTLPSLRLHTGLPGKAPPLCPGFFIAAEQTWGWCGCVRKERVYNMKQMEEMCLMGEGRMGRWGSWMTGYRKKGWIWCVWVMAEGERKRGDLSEAWIISVHWVAVQWLVGHACLCCPPPPLHCPLPHSVFELQQLVEGHQESYLLCWDQSQNQVQVVLNQKAGPKTILRAATHGLMLGALQGDGPLPAELEELRNRVRAGPKKESWVVVKETHEVLDMLFPKFLKGLQDAGWKTEKHQLEVDEWRATWLLSPEKKVL

SEQ ID NO: 865904 - protein, 429 aa, Homo sapiens
GGAGIQKLGMADDAGLETPLCSEQFGSGEARGCRAAADGSLQWEVGGWRWWGLSRAFTVKPEGRDAGEVGASGAPSPPLSGLQAVFLPQGFPDSVSPDYLPYQLWDSVQAFASSLSGSLATQAVLLGIGVGNAKATVSAATATWLVKDSTGMLGRIVFAWWKGSKLDCNAKQWRLFADILNDVAMFLEIMAPVYPICFTMTVSTSNLAKCIVSVAGGATRAALTVHQARRNNMADVSAKDSSQETLVNLAGLLVSLLMLPLVSGCPGFSLGCFFFLTALHIYANYRAVRALVMETLNEGRLRLVLKHYLQRGEVLDPTAANRMEPLWTGFWPAPSLSLGVPLHRLVSSVFELQQLVEGHQESYLLCWDQSQSPKKESWVVVKETHEVLDMLFPKFLKGLQDAGWKTEKHQLEVDEWRATWLLSPEKKVL

SEQ ID NO: 865905 - protein, 477 aa, Homo sapiens; identical to SEQ ID NO: 865901

SEQ ID NO: 865906 - protein, 321 aa, Homo sapiens
  misc_feature (18)..(18): Xaa can be any naturally occurring amino acid
FAWWPGRPLRPALPRRGXLFADILNDVAMFLEIMAPVYPICFTMTVSTSNLAKCIVSVAGGATRAALTVHQARRNNMADVSAKDSSQETLVNLAGLLVSLLMLPLVSGCPGFSLGCFFFLTALHIYANYRAVRALVMETLNEGRLRLVLKHYLQRGEVLDPTAANRMEPLWTGFWPAPSLSLGVPLHRLVSSVFELQQLVEGHQESYLLCWDQSQNQVQVVLNQKAGPKTILRAATHGLMLGALQGDGPLPAELEELRNRVRAGPKKESWVVVKETHEVLDMLFPKFLKGLQDAGWKTEKHQLEVDEWRATWLLSPEKKVL

SEQ ID NO: 865907 - protein, 330 aa, Homo sapiens
AAAYSTKFAAASTGKGAKLDCNAKQWRLFADILNDVAMFLEIMAPVYPICFTMTVSTSNLAKCIVSVAGGATRAALTVHQARRNNMADVSAKDSSQETLVNLAGLLVSLLMLPLVSGCPGFSLGCFFFLTALHIYANYRAVRALVMETLNEGRLRLVLKHYLQRGEVLDPTAANRMEPLWTGFWPAPSLSLGVPLHRLVSSVFELQQLVEGHQESYLLCWDQSQNQVQVVLNQKAGPKTILRAATHGLMLGALQGDGPLPAELEELRNRVRAGPKKESWVVVKETHEVLDMLFPKFLKGLQDAGWKTEKHQLEVDEWRATWLLSPEKKVL

SEQ ID NO: 865908 - protein, 477 aa, Homo sapiens; identical to SEQ ID NO: 865901

SEQ ID NO: 865909 - protein, 477 aa, Homo sapiens; identical to SEQ ID NO: 865901

SEQ ID NO: 865910 - protein, 477 aa, Homo sapiens; identical to SEQ ID NO: 865901

SEQ ID NO: 865911 - protein, 179 aa, Homo sapiens [sequence omitted]

SEQ ID NO: 865912 - protein, 477 aa, Homo sapiens; identical to SEQ ID NO: 865901

SEQ ID NO: 865913 - protein, 477 aa, Homo sapiens; identical to SEQ ID NO: 865901

SEQ ID NO: 865914 - protein, 496 aa, Homo sapiens
GGAGIQKLGMADDAGLETPLCSEQFGSGEARGCRAAADGSLQWEVGGWRWWGLSRAFTVKPEGRDAGEVGASGAPSPPLSGLQAVFLPQGFPDSVSPDYLPYQLWDSVQAFASSLSGSLATQAVLLGIGVGNAKATVSAATATWLVKDSTGMLGRIVFAWWKGSKLDCNAKQWRLFADILNDVAMFLEIMAPVYPICFTMTVSTSNLAKCIVSVAGGATRAALTVHQARRNNMADVSAKDSSQETLVNLAGLLVSLLMLPLVSGCPGFSLGCFFFLTALHIYANYRAVRALVMETLNEGRLRLVLKHYLQRGEVLDPTAANRMEPLWTGFWPAPSLSLGVPLHRLVSSVFELQQLVEGHQESYLLCWDQSQNQVQVVLNQKAGPKTILRAATHGLMLGALQGDGPLPAELEELRNRVRAVSCPVLTPPCHHQPCLEPPALWQQNQTFLWAFKMVLCPPVRSCVLSPKGHAKDWLWEALITNPSTSSLPQAGSNKCI

SEQ ID NO: 865915 - protein, 124 aa, Homo sapiens
AAAYSTKFAAASTEPCCSSASRSSRSSLLCRRLKTRRWSWGGWEHERGGSSVPPCLALKSLAHQLVTACPTHLCPVYTPSSLVLSSPHPATISPAWSHLPFGNKTKPFCGRSRWYCAHQSDPVF

SEQ ID NO: 865916 - protein, 174 aa, Homo sapiens
GGAGIQKLGMADDAGLETPLCSEQFGSGEARGCRAAADGSLQWEVGGWRWWGLSRAFTVKPEGRDAGEVGASGAPSPPLSGLQAVFLPQGFPDSVSPDYLPLLSCPHPTLPPSALPGATCPLATKPNLFVGVQDGIVPTSQILCFESQRPCQGLALGGFNHQPINIKPPPGRFK

SEQ ID NO: 865917 - protein, 194 aa, Homo sapiens
AAAYSTKFAAASTEPVLLISIQVLPFLLAMPETEDQAVELGRVGARTRWEFCPPMPGPKVSCTPARHCLPYPPLSSIHTQPRLNSCQLHPTWLPCALGINPKPLSLCLKPLALLPQLCQLSSVSRKEGLVSSPDGGPSPGQEPGARTLWPQQDRGKAALFFLRATAAGGPFGNKTKPFCGRSRWYCAHQSDPVF

SEQ ID NO: 865918 - protein, 477 aa, Homo sapiens; identical to SEQ ID NO: 865901

SEQ ID NO: 865919 - protein, 177 aa, Homo sapiens
MGGQPPQPPRPAVRAQPAPKARDAQRRQRPRRRELNRGGGTHTPQPRTTTLAARAAQKKPACGTARGHSGILAGTDTTSYTTNGPAPMEQKTRERQRPGRRPTRDAHHTTRPANANHTQPRQPHPLNREQQRRNESARARRTTGTQRVAQTAARPPPERTQTRTDDSNAQNDNGDHD

SEQ ID NO: 865920 - protein, 616 aa, Homo sapiens
GGAGIQKLGMADDAGLETPLCSEQFGSGEARGCRAAADGSLQWEVGGWRWWGLSRAFTVKPEGRDAGEVGASGAPSPPLSGLQAVFLPQGFPDSVSPDYLPYQLWDSVQAFASSLSGSLATQAVLLGIGVGNAKATVSAATATWLVKDSTGMLGRIVFAWWKGSKLDCNAKQWRLFADILNDVAMFLEIMAPVYPICFTMTVSTSNLAKCIVSVAGGATRAALTVHQARRNNMADVSAKDSSQETLVNLAGLLVSLLMLPLVSGCPGFSLGCFFFLTALHIYANYRAVRALVMETLNEGRLRLVLKHYLQRGEVLDPTAANRMEPLWTGFWPAPSLSLGVPLHRLVSSEWPSVSRSSPPPPTLPSLRLHTGLPGKAPPLCPGFFIAAEQTWGWCGCVRKERVYNMKQMEEMCLMGEGRMGRWGSWMTGYRKKGWIWCVWVMAEGERKRGDLSEAWIISVHWVAVQWLVGHACLCCPPPPLHCPLPHSVFELQQLVEGHQESYLLCWDQSQNQVQVVLNQKAGPKTILRAATHGLMLGALQGDGPLPAELEELRNRVRAGPKKESWVVVKETHEVLDMLFPKFLKGLQDAGWKTEKHQLEVDEWRATWLLSPEKKVL

SEQ ID NO: 865921 - protein, 434 aa, Homo sapiens
GGAGIQKLGMADDAGLETPLCSEQFGSGEARGCRAAADGSLQWEVGGWRWWGLSRAFTVKPEGRDAGEVGASGAPSPPLSGLQAVFLPQGFPDSVSPDYLPYQLWDSVQAFASSLSGSLATQAVLLGIGVGNAKATVSAATATWLVKDSTGMLGRIVFAWWKGSKLDCNAKQWRLFADILNDVAMFLEIMAPVYPICFTMTVSTSNLAKCIVSVAGGATRAALTVHQARRNNMADVSAKDSSQETLVNLAGLLVSLLMLPLVSGCPGFSLGCFFFLTALHIYANYRAVRALVMETLNEGRLRLVLKHYLQRGEVLDPTAANRMEPLWTDQVQVVLNQKAGPKTILRAATHGLMLGALQGDGPLPAELEELRNRVRAGPKKESWVVVKETHEVLDMLFPKFLKGLQDAGWKTEKHQLEVDEWRATWLLSPEKKVL

SEQ ID NO: 865922 - protein, 477 aa, Homo sapiens; identical to SEQ ID NO: 865901

SEQ ID NO: 865923 - protein, 477 aa, Homo sapiens; identical to SEQ ID NO: 865901

SEQ ID NO: 865924 - protein, 245 aa, Homo sapiens; identical to SEQ ID NO: 865900

SEQ ID NO: 865925 - protein, 185 aa, Homo sapiens [sequence omitted]

SEQ ID NO: 865926 - protein, 477 aa, Homo sapiens; identical to SEQ ID NO: 865901

SEQ ID NO: 865927 - protein, 477 aa, Homo sapiens; identical to SEQ ID NO: 865901

SEQ ID NO: 865928 - protein, 477 aa, Homo sapiens; identical to SEQ ID NO: 865901

SEQ ID NO: 865929 - protein, 348 aa, Homo sapiens
GGAGIQKLGMADDAGLETPLCSEQFGSGEARGCRAAADGSLQWEVGGWRWWGLSRAFTVKPEGRDAGEVGASGAPSPPLSGLQAVFLPQGFPDSVSPDYLPYQLWDSVQAFASSLSGSLATQAVLLGIGVGNAKATVSAATATWLVKDSTGMLGRIVFAWWKGSKLDCNAKQWRLFADILNDVAMFLEIMAPVYPICFTMTVSTSNLAKCIVSVAGGATRAALTVHQARRNNMADVSAKDSSQETLVNLAGLLVSLLMLPLVSGCPGFSLGCFFFLTALHIYANYRAVRALVMETLNEGRLRLVLKHYLQRGEVLDPTAANRMEPLWTGFWPAPSLSLGVPLHRLVSR

SEQ ID NO: 865930 - protein, 233 aa, Homo sapiens
GGAGIQKLGMADDAGLETPLCSEQFGSGEARGCRAAADGSLQWEVGGWRWWGLSRAFTVKPEGRDAGEVGASGAPSPPLSGLQAVFLPQGFPDSVSPDYLPYQLWDSVQAFASSLSGSLATQAVLLGIGVGNAKATVSAATATWLVKDSTGMLGRIVFAWWKGSKLDCNAKQWRLFADILNDVAMFLEIMAPVYPICFTMTVSTSNLAKVAACGGTHLPKTPALVVCEFTWAL

SEQ ID NO: 865931 - protein, 221 aa, Homo sapiens
MSYGRPPPDVEGMTSLKVDNLTYRTSPDTLRRVFEKYGRVGDVYIPRDRYTKESRGFAFVRFHDKRDAEDAMDAMDGAVLDGRELRVQMARYGRPPDSHHSRRGPPPRRYGGGGYGRRSRSPRRRRRSRSRSRSRSRSRSRSRYSRSKSRSRTRSRSRSTSKSRSARRSKSKSSSVSRSRSRSRSRSRSRSPPPVSKRESKSRSRSKSPPKSPEEEGAVSS

SEQ ID NO: 865932 - protein, 221 aa, Homo sapiens; identical to SEQ ID NO: 865931

SEQ ID NO: 865933 - protein, 221 aa, Homo sapiens; identical to SEQ ID NO: 865931

SEQ ID NO: 865934 - protein, 221 aa, Homo sapiens; identical to SEQ ID NO: 865931

SEQ ID NO: 865935 - protein, 221 aa, Homo sapiens; identical to SEQ ID NO: 865931

SEQ ID NO: 865936 - protein, 221 aa, Homo sapiens; identical to SEQ ID NO: 865931

SEQ ID NO: 865937 - protein, 221 aa, Homo sapiens; identical to SEQ ID NO: 865931

SEQ ID NO: 865938 - protein, 221 aa, Homo sapiens; identical to SEQ ID NO: 865931

SEQ ID NO: 865939 - protein, 221 aa, Homo sapiens; identical to SEQ ID NO: 865931

SEQ ID NO: 865940 - protein, 221 aa, Homo sapiens; identical to SEQ ID NO: 865931

SEQ ID NO: 865941 - protein, 221 aa, Homo sapiens; identical to SEQ ID NO: 865931

SEQ ID NO: 865942 - protein, 150 aa, Homo sapiens [sequence omitted]

SEQ ID NO: 865943 - protein, 150 aa, Homo sapiens [sequence omitted]

SEQ ID NO: 865944 - protein, 221 aa, Homo sapiens; identical to SEQ ID NO: 865931

SEQ ID NO: 865945 - protein, 221 aa, Homo sapiens; identical to SEQ ID NO: 865931

SEQ ID NO: 865946 - protein, 221 aa, Homo sapiens; identical to SEQ ID NO: 865931

SEQ ID NO: 865947 - protein, 162 aa, Homo sapiens
MSYGRPPPDVEGMTSLKVDNLTYRTSPDTLRRVFEKYGRVGDVYIPRDRYTKESRGFAFVRFHDKRDAEDAMDAMDGPIPESEPFQVSQPISLQPLEVSVPHSFSISVDLQVQIRTKVQVQVLVGLQISFAVQVPVSVQESSPSVQEGIQIQVAIEESPQVS

SEQ ID NO: 865948 - protein, 221 aa, Homo sapiens; identical to SEQ ID NO: 865931

SEQ ID NO: 865949 - protein, 221 aa, Homo sapiens; identical to SEQ ID NO: 865931

SEQ ID NO: 865950 - protein, 221 aa, Homo sapiens; identical to SEQ ID NO: 865931

SEQ ID NO: 865951 - protein, 128 aa, Homo sapiens
GGLGGSARAGPAPLPGINPAVLARPARSPRRRRRSRSRSRSRSRSRSRSRYSRSKSRSRTRSRSRSTSKSRSARRSKSKSSSVSRSRSRSRSRSRSRSPPPVSKRESKSRSRSKSPPKSPEEEGAVSS

SEQ ID NO: 865952 - protein, 224 aa, Homo sapiens
MSYGRPPPDVEGMTSLKVDNLTYRTSPDTLRRVFEKYGRVGDVYIPRDRYTKESRGFAFVRFHDKRDAEDAMDAMDGAVLDGRELRVQMARYGRPPDSHHSRRGPPPRRYGGGGYGRRSRSPRRRRRSRSRSRSRSRSRSRSRYSRSKSRSRTRSRSRSTSKSRSARRSKSKSSSVSRSRSRSRSRSRSRSPPPVSKRESKSRSRSKSPPKSPEEEGASSMLLL

SEQ ID NO: 865953 - protein, 221 aa, Homo sapiens; identical to SEQ ID NO: 865931

SEQ ID NO: 865954 - protein, 221 aa, Homo sapiens; identical to SEQ ID NO: 865931

SEQ ID NO: 865955 - protein, 221 aa, Homo sapiens; identical to SEQ ID NO: 865931

SEQ ID NO: 865956 - protein, 221 aa, Homo sapiens; identical to SEQ ID NO: 865931

SEQ ID NO: 865957 - protein, 221 aa, Homo sapiens; identical to SEQ ID NO: 865931

SEQ ID NO: 865958 - protein, 221 aa, Homo sapiens; identical to SEQ ID NO: 865931

SEQ ID NO: 865959 - protein, 221 aa, Homo sapiens; identical to SEQ ID NO: 865931

SEQ ID NO: 865960 - protein, 221 aa, Homo sapiens; identical to SEQ ID NO: 865931

SEQ ID NO: 865961 - protein, 221 aa, Homo sapiens; identical to SEQ ID NO: 865931

SEQ ID NO: 865962 - protein, 221 aa, Homo sapiens; identical to SEQ ID NO: 865931

SEQ ID NO: 865963 - protein, 221 aa, Homo sapiens; identical to SEQ ID NO: 865931

SEQ ID NO: 865964 - protein, 221 aa, Homo sapiens; identical to SEQ ID NO: 865931

SEQ ID NO: 865965 - protein, 221 aa, Homo sapiens; identical to SEQ ID NO: 865931

SEQ ID NO: 865966 - protein, 98 aa, Homo sapiens
CDGGCSRSGGRVWSRRTDLEISRSKSRSRTRSRSRSTSKSRSARRSKSKSSSVSRSRSRSRSRSRSRSPPPVSKRESKSRSRSKSPPKSPEEEGAVSS

SEQ ID NO: 865967 - protein, 179 aa, Homo sapiens
MKKRWGPRWGAPPLPPAQSRSSGLPGGKSVSRAFQLPANSAPPPSSRDSALFGPPAGLCAGASGRGGARGRVVTKRGAVGQSEGFISGWRGRHFVRSDINGRRGRLPAQLLLRCASLRSPSVLFCGKAFPSCPRGNPNPGRDRRVPPSLLKRKERCPLKKMVMSGNPRHITLIHKWDLG

SEQ ID NO: 865968 - protein, 221 aa, Homo sapiens; identical to SEQ ID NO: 865931

SEQ ID NO: 865969 - protein, 121 aa, Homo sapiens
MQIRTIRPTLHSRSVSVFHESSITRARRGHPDAAVLASGESSTREVSRRDAVISRILIDRRNADRAAPSNVSWKTARPRVSSEENDVSASSVNGGLGEKGPHSPSKKSPWNKQLAIEKVIL

SEQ ID NO: 865970 - protein, 212 aa, Homo sapiens
MPAHSLVMSSPALPAFLLCSTLLVIKMYVVAIITGQVRLRKKAFANPEDALRHGGPQYCRSDPDVERCLRAHRNDMETIYPFLFLGFVYSFLGPNPFVAWMHFLVFLVGRVAHTVAYLGKLRAPIRSVTYTWPAPCASMALQILWEAAATCDQQLMPPWHQTMRQEPAVAIPGDLMFPSELGWALKSSVPWRLVCRVGLWAQWPVCVPRVVL

SEQ ID NO: 865971 - protein, 288 aa, Homo sapiens
MSSRKQGSQPRGQQSAEEENFKKPTRSNMQRSKMRGASSGKKTAGPQQKNLEPALPGRWGGRSAENPPSGSVRKTRKNKQKTPGNGDGGSTSEAPQPPRKKRARADPTVESEEAFKNRMEVKVKIPEELKPWLVEDWDLVTRQKQLFQLPAKKNVDAILEEYANCKKSQGNVDNKEYAVNEVVAGIKEYFNVMLGTQLLYKFERPQYAEILLAHPDAPMSQVYGAPHLLRLFVRIGAMLAYTPLDEKSLALLLGYLHDFLKYLAKNSASLFTASDYKVASAEYHRKAL

SEQ ID NO: 865972 - protein, 288 aa, Homo sapiens; identical to SEQ ID NO: 865971

SEQ ID NO: 865973 - protein, 288 aa, Homo sapiens; identical to SEQ ID NO: 865971

SEQ ID NO: 865974 - protein, 288 aa, Homo sapiens; identical to SEQ ID NO: 865971

SEQ ID NO: 865975 - protein, 288 aa, Homo sapiens; identical to SEQ ID NO: 865971

SEQ ID NO: 865976 - protein, 288 aa, Homo sapiens; identical to SEQ ID NO: 865971

SEQ ID NO: 865977 - protein, 288 aa, Homo sapiens; identical to SEQ ID NO: 865971

SEQ ID NO: 865978 - protein, 288 aa, Homo sapiens; identical to SEQ ID NO: 865971

SEQ ID NO: 865979 - protein, 288 aa, Homo sapiens; identical to SEQ ID NO: 865971

SEQ ID NO: 865980 - protein, 288 aa, Homo sapiens; identical to SEQ ID NO: 865971

SEQ ID NO: 865981 - protein, 288 aa, Homo sapiens; identical to SEQ ID NO: 865971

SEQ ID NO: 865982 - protein, 288 aa, Homo sapiens; identical to SEQ ID NO: 865971

SEQ ID NO: 865983 - protein, 288 aa, Homo sapiens; identical to SEQ ID NO: 865971

SEQ ID NO: 865984 - protein, 288 aa, Homo sapiens; identical to SEQ ID NO: 865971

SEQ ID NO: 865985 - protein, 288 aa, Homo sapiens; identical to SEQ ID NO: 865971

SEQ ID NO: 865986 - protein, 288 aa, Homo sapiens; identical to SEQ ID NO: 865971

SEQ ID NO: 865987 - protein, 288 aa, Homo sapiens; identical to SEQ ID NO: 865971

SEQ ID NO: 865988 - protein, 288 aa, Homo sapiens; identical to SEQ ID NO: 865971

SEQ ID NO: 865989 - protein, 288 aa, Homo sapiens; identical to SEQ ID NO: 865971

SEQ ID NO: 865990 - protein, 288 aa, Homo sapiens; identical to SEQ ID NO: 865971

SEQ ID NO: 865991 - protein, 288 aa, Homo sapiens; identical to SEQ ID NO: 865971

SEQ ID NO: 865992 - protein, 271 aa, Homo sapiens
MSSRKQGSQPRGQQSAEEENFKKPTRSNIQQKNLEPALPGRWGGRSAENPPSGSVRKTRKNKQKTPGNGDGGSTSEAPQPPRKKRARADPTVESEEAFKNRMEVKVKIPEELKPWLVEDWDLVTRQKQLFQLPAKKNVDAILEEYANCKKSQGNVDNKEYAVNEVVAGIKEYFNVMLGTQLLYKFERPQYAEILLAHPDAPMSQVYGAPHLLRLFVRIGAMLAYTPLDEKSLALLLGYLHDFLKYLAKNSASLFTASDYKVASAEYHRKAL

SEQ ID NO: 865993 - protein, 288 aa, Homo sapiens; identical to SEQ ID NO: 865971

SEQ ID NO: 865994 - protein, 170 aa, Homo sapiens
MEVKVKIPEELKPWLVEDWDLVTRQKQLFQLPAKKNVDAILEEYANCKKSQGNVDNKEYAVNEVVAGIKEYFNVMLGTQLLYKFERPQYAEILLAHPDAPMSQVYGAPHLLRLFVRIGAMLAYTPLDEKSLALLLGYLHDFLKYLAKNSASLFTASDYKVASAEYHRKAL

SEQ ID NO: 865995 - protein, 288 aa, Homo sapiens; identical to SEQ ID NO: 865971

SEQ ID NO: 865996 - protein, 288 aa, Homo sapiens; identical to SEQ ID NO: 865971

SEQ ID NO: 865997 - protein, 116 aa, Homo sapiens
MSSRKQGSQPRGQQSAEEENFKKPTRSNMQRSKMRGASSGKKTAGPQQKNLEPALPGRWGGRSAENPPSGSVRKTRKNKQKTPGNGDGGSTSEAPQPPSGTGKQWVPGGQGTPNLV

SEQ ID NO: 865998 - protein, 424 aa, Homo sapiens
MRAPGCGRLVLPLLLLAAAALAEGDAKGLKEGETPGNFMEDEQWLSSISQYSGKIKHWNRFRDEVEDDYIKSWEDNQQGDEALDTTKDPCQKVKCSRHKVCIAQGYQRAMCISRKKLEHRIKQPTVKLHGNKDSICKPCHMAQLASVCGSDGHTYSSVCKLEQQACLSSKQLAVRCEGPCPCPTEQAATSTADGKPETCTGQDLADLGDRLRDWFQLLHENSKQNGSASSVAGPASGLDKSLGASCKDSIGWMFSKLDTSADLFLDQTELAAINLDKYEVCIRPFFNSCDTYKDGRVSTAEWCFCFWREKPPCLAELERIQIQEAAKKKPGIFIPSCDEDGYYRKMQCDQSSGDCWCVDQLGLELTGTRTHGSPDCDDIVGFSGDFGSGVGWEDEEEKETEEAGEEAEEEEGEAGEADDGGYIW

SEQ ID NO: 865999 - protein, 424 aa, Homo sapiens; identical to SEQ ID NO: 865998

SEQ ID NO: 866000 - protein, 366 aa, Homo sapiens
DLYDDPRPIVDLPVTLVREFIERQHAKNRYYYYHRQYRRVPDITECKEEDIMCISRKKLGHRIKQPTVKLHGNKDSICKPCHMAQLASVCGSDGHTYSSVCKLEQQACLSSKQLAVRCEGPCPCPTEQAATSTADGKPETCTGQDLADLGDRLRDWFQLLHENSKQNGSASSVAGPASGLDKSLGASCKDSIGWMFSKLDTSADLFLDQTELAAINLDKYEVCIRPFFNSCDTYKDGRVSTAEWCFCFWREKPPCLAELERIQIQEAAKKKPGIFIPSCDEDGYYRKMQCDQSSGDCWCVDQLGLELTGTRTHGSPDCDDIVGFSGDFGSGVGWEDEEEKETEEAGEEAEEEEGEAGEADDGGYIW

SEQ ID NO: 866001 - protein, 302 aa, Homo sapiens
LQPWLELPESWSQTLSVPDLGQVQVGSGAWKRHYGQCKLEQQACLSSKQLAVRCEGPCPCPTEQAATSTADGKPETCTGQDLADLGDRLRDWFQLLHENSKQNGSASSVAGPASGLDKSLGASCKDSIGWMFSKLDTSADLFLDQTELAAINLDKYEVCIRPFFNSCDTYKDGRVSTAEWCFCFWREKPPCLAELERIQIQEAAKKKPGIFIPSCDEDGYYRKMQCDQSSGDCWCVDQLGLELTGTRTHGSPDCDDIVGFSGDFGSGVGWEDEEEKETEEAGEEAEEEEGEAGEADDGGYIW

SEQ ID NO: 866002 - protein, 70 aa, Homo sapiens
SNAAVTASNAADCIQRRCLHPTPLMSKVADRSFLSSLICDLDQGACHPAPPVPSPRCLAPSCPHSPGLGR

SEQ ID NO: 866003 - protein, 137 aa, Homo sapiens
MSSAWWVHSKSICAEPSSQSLLTADGDDSTAKMTTSKKAGGARFLPGDPQRARPFSSLVWLRIQGKKCETLVYDAWLVLQGTSMRVSVELVRRRLSPGVVERLRAGGSPRGETPQKETQTSRGSSQQSKLLSSLKPA

SEQ ID NO: 866004 - protein, 92 aa, Homo sapiens
MRAPGCGRLVLPLLLLAAAALAEGDAKGLKEGETPGNFMEDEQWLSSISQYSGKIKHWNRFRDEVEVRRAAKAETRGCGFGDVSSGVCGSGR

SEQ ID NO: 866005 - protein, 230 aa, Homo sapiens
MSTGCKLEQQACLSSKQLAVRCEGPCPCPTEQAATSTADGKPETCTGQDLADLGDRLRDWFQLLHENSKQNGSASSVAGPASGLDKSLGASCKDSIGWMFSKLDTSADLFLDQTELAAINLDKYEVCIRPFFNSCDTYKDGRVSTAEWCFCFWREKPPCLAELERIQIQEAAKKKPGIFIPSCDEDGYYRKMQCDQSSGDCWCVDQLGLELTGTRTHGSPDCGTGWAAQG

SEQ ID NO: 866006 - protein, 164 aa, Homo sapiens
ARPHLNRVPHLTALLDKYEVCIRPFFNSCDTYKDGRVSTAEWCFCFWREKPPCLAELERIQIQEAAKKKPGIFIPSCDEDGYYRKMQCDQSSGDCWCVDQLGLELTGTRTHGSPDCDDIVGFSGDFGSGVGWEDEEEKETEEAGEEAEEEEGEAGEADDGGYIW

SEQ ID NO: 866007 - protein, 142 aa, Homo sapiens
ALQLCQAGGLLPPEAEAPLSSRDPAILVGVTGVEEGTDADLFLDQTELAAINLDKYEDGYYRKMQCDQSSGDCWCVDQLGLELTGTRTHGSPDCDDIVGFSGDFGSGVGWEDEEEKETEEAGEEAEEEEGEAGEADDGGYIW

SEQ ID NO: 866008 - protein, 424 aa, Homo sapiens; identical to SEQ ID NO: 865998

SEQ ID NO: 866009 - protein, 424 aa, Homo sapiens; identical to SEQ ID NO: 865998

SEQ ID NO: 866010 - protein, 111 aa, Homo sapiens
MRAPGCGRLVLPLLLLAAAALAEGDAKGLKEGETPGNFMEDEQWLSSISQYSGKIKHWNRFRDEVEFPRPTHPVQRRPHHDLSRFLLKLRASTSSLEICLKHTCFIGYPAK

SEQ ID NO: 866011 - protein, 111 aa, Homo sapiens
MDDDLMLALRLQEEWNLQEAERDHAQESLSLVDASWELVDPTPDLQALFVQFNDQFFWGQLEAVEVKWSVRMTLCAGICSYEGKGGMCSIRLSEPLLKLRPRKDLVEVFFV

SEQ ID NO: 866012 - protein, 212 aa, Homo sapiens
MDDDLMLALRLQEEWNLQEAERDHAQESLSLVDASWELVDPTPDLQALFVQFNDQFFWGQLEAVEVKWSVRMTLCAGICSYEGKGGMCSIRLSEPLLKLRPRKDLVEVYHTFHDEVDEYRRHWWRCNGPCQHRPPYYGYVKRATNREPSAHDYWWAEHQKTCGGTYIKIKEPENYSKKGKGKAKLGKEPVLAAENKDLRVYSSDFYVTIAMM

SEQ ID NO: 866013 - protein, 489 aa, Homo sapiens
MDDDLMLALRLQEEWNLQEAERDHAQESLSLVDASWELVDPTPDLQALFVQFNDQFFWGQLEAVEVKWSVRMTLCAGICSYEGKGGMCSIRLSEPLLKLRPRKDLVETLLHEMIHAYLFVTNNDKDREGHGPEFCKHMHRINSLTGANITVYHTFHDEVDEYRRHWWRCNGPCQHRPPYYGYVKRATNREPSAHDYWWAEHQKTCGGTYIKIKEPENYSKKGKGKAKLGKEPVLAAENKDKPNRGEAQLVIPFSGKGYVLGETSNLPSPGKLITSHAINKTQDLLNQNHSANAVRLNSKIKVKFEQNGSSKNSHLVSPAVSNSHQNVLSNYFPRVSFANQKAFRGVNGSPRISVTVGNIPKNSVSSSSQRRVSSSKISLRNSSKVTESASVMPSQDVSGSEDTFPNKRPRLEDKTVFDNFFIKKEQIKSSGNDPKYSTTTAQNSSSSSSQSKMVNCPVCQNEVLESQINEHLDWCLEGDSIKVKSEESL

SEQ ID NO: 866014 - protein, 489 aa, Homo sapiens; identical to SEQ ID NO: 866013

SEQ ID NO: 866015 - protein, 288 aa, Homo sapiens
MDDDLMLALRLQEEWNLQEAERDHAQESLSLVDASWELVDPTPDLQALFVQFNDQFFWGQLEAVEVKWSVRMTLCAGICSYEGKGGMCSIRLSEPLLKLRPRKDLVETLLHEMIHAYLFVTNNDKDREGHGPEFCKHMHRINSLTGANITVYHTFHDEVDEYRRHWWRCNGPCQHRPPYYGYVKRATNREPSAHDYWWAEHQKTCGGTYIKIKEPENYSKKGKGKAKLGKEPVLAAENKAIQDFLQSPATTCLACYSVRELGCRQHTSEGRKKKGTADNQVVRVNHHY

SEQ ID NO: 866016 - protein, 403 aa, Homo sapiens [sequence omitted]

SEQ ID NO: 866017 - protein, 92 aa, Homo sapiens
LLMYIVFLQLLTCLLNTKNSVSTQVYHTFHDEVDEYRRHWWRCNGPCQHRPPYYGYVKRATNREPSAHDYWWAEHQKTCGGTYIKIKEPENY

SEQ ID NO: 866018 - protein, 489 aa, Homo sapiens; identical to SEQ ID NO: 866013

SEQ ID NO: 866019 - protein, 489 aa, Homo sapiens; identical to SEQ ID NO: 866013

SEQ ID NO: 866020 - protein, 288 aa, Homo sapiens; identical to SEQ ID NO: 866015

SEQ ID NO: 866021 - protein, 255 aa, Homo sapiens
MDDDLMLALRLQEEWNLQEAERDHAQESLSLVDASWELVDPTPDLQALFVQFNDQFFWGQLEAVEVKWSVRMTLCAGICSYEGKGGMCSIRLSEPLLKLRPRKDLVETLLHEMIHAYLFVTNNDKDREGHGPEFCKHMHRINSLTGANITVYHTFHDEVDEYRRHWWRCNGPCQHRPPYYGYVKRATNREPSAHDYWWAEHQKTCGGTYIKIKEPENYSKKGKGKAKLGKEPVLAAENKDLRVYSSDFYVTIAMM

SEQ ID NO: 866022 - protein, 142 aa, Homo sapiens
GRRGRDWTRLGREMAAAAVSSAKRSLRGELKQRLRAMSAEERLRQSRVLSQKVIAHSEYQKSKRISIFLSMQDEIETEEIIKDIFQRGKICFIPRYRFQSNHMDMVRIESPEEISLLPKTSWNIPQPGEGDVREEALSTGGT

SEQ ID NO: 866023 - protein, 172 aa, Homo sapiens
MAAETGYWRCLPESRTCAEEAVHLWPAVLRDPRWGNPGDGGLALLYAGASAGVSGVDASFLRLFPCCCESERAAGGGGSGAGMEDVNSNVNADQEGGLDLIFMPGLGFDKHGNRLGRGKGYYDAYLKRCLQHQEVKPYTLALAFKEQICLQVPVNENDMKVDEVLYEDSSTA

SEQ ID NO: 866024 - protein, 130 aa, Homo sapiens
FLFCPTLCFLDINGHTLFLEIRERIDVITKQKTHPEMIFQKQLILLNLFLFSAGGLDLIFMPGLGFDKHGNRLGRGKGYYDAYLKRCLQHQEVKPYTLALAFKEQICLQVPVNENDMKVDEVLYEDSSTA

SEQ ID NO: 866025 - protein, 105 aa, Homo sapiens
MARSRLTATSVSQVQVIAHSEYQKSKRISIFLSMQDEIETEEIIKDIFQRGKICFIPRYRFQSNHMDMVRIESPEEISLLPKTSWNIPQPGEGDVREEALSTGGT

SEQ ID NO: 866026 - protein, 156 aa, Homo sapiens
MAAAAVSSAKRSLRGELKQRLRAMSAEERLRQSRVLSQKVRGRPERKPRRTDPPKAWRPAIADLCMVIAHSEYQKSKRISIFLSMQDEIETEEIIKDIFQRGKICFIPRYRFQSNHMDMVRIESPEEISLLPKTSWNIPQPGEGDVREEALSTGGT

SEQ ID NO: 866027 - protein, 103 aa, Homo sapiens
MEDVNSNVNADQEVIAHSEYQKSKRISIFLSMQDEIETEEIIKDIFQRGKICFIPRYRFQSNHMDMVRIESPEEISLLPKTSWNIPQPGEGDVREEALSTGGT

SEQ ID NO: 866028 - protein, 142 aa, Homo sapiens; identical to SEQ ID NO: 866022

SEQ ID NO: 866029 - protein, 105 aa, Homo sapiens; identical to SEQ ID NO: 866025

SEQ ID NO: 866030 - protein, 142 aa, Homo sapiens; identical to SEQ ID NO: 866022

SEQ ID NO: 866031 - protein, 148 aa, Homo sapiens
GRRGRDWTRLGREMAAAAVSSAKRSLRGELKQRLRAMSAEERLRQSRVLSQKVIAHSEYQKSKRISIFLSMQDEIETEEIIKDIFQRGKICFIPRYRFQSNHMDMVRIESPEEISLLPGDLISSSCQALGLTNMATDWGGARATMMPI

SEQ ID NO: 866032 - protein, 112 aa, Homo sapiens
MARSRLTATSVSQVQVIAHSEYQKSKRISIFLSMQDEIETEEIIKDIFQRGKICFIPRYRFQSNHMDMVRIESPEEISLLPKTSWNIPQPGEGDVREEALSTGIEDRTELQA

SEQ ID NO: 866033 - protein, 142 aa, Homo sapiens; identical to SEQ ID NO: 866022

SEQ ID NO: 866034 - protein, 142 aa, Homo sapiens; identical to SEQ ID NO: 866022

SEQ ID NO: 866035 - protein, 156 aa, Homo sapiens; identical to SEQ ID NO: 866026

SEQ ID NO: 866036 - protein, 96 aa, Homo sapiens
  misc_feature (7)..(7): Xaa can be any naturally occurring amino acid
  misc_feature (14)..(14): Xaa can be any naturally occurring amino acid
ERRPWGXEVRSFPXWSSWKGGLDLIFMPGLGFDKHGNRLGRGKGYYDAYLKRCLQHQEVKPYTLALAFKEQICLQVPVNENDMKVDEVLYEDSSTA

SEQ ID NO: 866037 - protein, 130 aa, Homo sapiens; identical to SEQ ID NO: 866024

SEQ ID NO: 866038 - protein, 112 aa, Homo sapiens; identical to SEQ ID NO: 866032

SEQ ID NO: 866039 - protein, 149 aa, Homo sapiens
GRRGRDWTRLGREMAAAAVSSAKRSLRGELKQRLRAMSAEERLRQSRVLSQKVIAHSEYQKSKRISIFLSMQDEIETEEIIKDIFQRGKICFIPRYRFQSNHMDMVRIESPEEISLLPKTSWNIPQPGEGDVREEALSTGIEDRTELQA

SEQ ID NO: 866040 - protein, 136 aa, Homo sapiens
DLICLEPRFRPGESLCGDMKLLTHNLLSSHVRGVGSRGFPLRLQATEVRICPVEFNPNFVARMIPKVEWSAFLEAADNLRLIQVPKGPVEGYEENEEFLRTMHHLLLEVEVIEGTLQCPENLDVCSPSAAGSPTCC

SEQ ID NO: 866041 - protein, 254 aa, Homo sapiens
MRTRGGHKNTTPHRAMLHRGVTNKERRKYHNNTKHAPTEQTTTLGTRTQTESTRGDTRGGGRTHNKGGGRGAEMKGAEQQHEQPEKEEGDAAEGGKTNNIDQPGGQGRRETAARAGITHGARRRKRMKENREEEDKSEQARQRDHLHRAVRGAVLHSNRPTPRDSEGDREREEAQPTAERTRKEVRGAEVREERDKGRGGSGPRAKAGRAKQERSRRSESEVRRAEERAREAKNRETEEKTKRQGNDTGRERRE

SEQ ID NO: 866042 - protein, 105 aa, Homo sapiens
MCLFCIQRELLHCSYFAYDLHLTKNLWQKRDPTGLSPTYLSSHKHEKFQQVRHFRFSWLSNSIEWSIPGSEAAEDDLFPVPAWREVCAVDTETGYATICVDSHVP

SEQ ID NO: 866043 - protein, 133 aa, Homo sapiens
AAAYYYYYIESLCGDMKLLTHNLLSSHVRGVGSRGFPLRLQATEVRICPVEFNPNFVARMIPKVEWSAFLEAADNLRLIQVPKGPVEGYEENEEFLRTMHHLLLEVEVIEGTLQCPENLDVCSPSAAGSPTCC

SEQ ID NO: 866044 - protein, 136 aa, Homo sapiens
ADAEVTQGFPYLESLCGDMKLLTHNLLSSHVRGVGSRGFPLRLQATEVRICPVEFNPNFVARMIPKVEWSAFLEAADNLRLIQVPKGPVEGYEENEEFLRTMHHLLLEVEVIEGTLQCPENLDVCSPSAAGSPTCC

SEQ ID NO: 866045 - protein, 118 aa, Homo sapiens
MKLLTHNLLSSHVRGVGSRGFPLRLQATEVRICPVEFNPNFVARMIPKVEWSAFLEAADNLRLIQVPKGPVEGYEENEEFLRTMHHLLLEVEVIEGTLQCPENLDVCSPSAAGSPTCC

SEQ ID NO: 866046 - protein, 118 aa, Homo sapiens; identical to SEQ ID NO: 866045

SEQ ID NO: 866047 - protein, 118 aa, Homo sapiens; identical to SEQ ID NO: 866045

SEQ ID NO: 866048 - protein, 118 aa, Homo sapiens; identical to SEQ ID NO: 866045

SEQ ID NO: 866049 - protein, 106 aa, Homo sapiens
MKLLTHNLLSSHVRGVGSRGFPLRLQATEVRICPVEFNPNFVARMIPKVEWSAFLEAADNLRLIQVPKGPVEGYEENEEFLRTMHHLLLEVRSGPSLASRATCLPH

SEQ ID NO: 866050 - protein, 106 aa, Homo sapiens; identical to SEQ ID NO: 866049

SEQ ID NO: 866051 - protein, 134 aa, Homo sapiens
MKLLTHNLLSSHVRGVGSRGFPLRLQVPAGGSLPFSGGMVGRGPVLCLNSSALQATEVRICPVEFNPNFVARMIPKVEWSAFLEAADNLRLIQVPKGPVEGYEENEEFLRTMHHLLLEVRSGPSLASRATCLPH

SEQ ID NO: 866052 - protein, 128 aa, Homo sapiens
MKENREEEDKSEQARQRDHLHRAVRGAVLHSNRPTPRDSEGDREREEAQPTAERTRKEVRGAEVREERDKGRGGSGPRAKAGRAKQERSRRSESEVRRAEERAREAKNRETEEKTKRQGNDTGRERRE

SEQ ID NO: 866053 - protein, 235 aa, Homo sapiens
MKLLTHNLLSSHVRGVGSRGFPLRLQATEVRICPVEFNPNFVARMIPKVEWSAFLEAADNLRLIQVPKGPVEGYEENEEDLTHSLYMKPSMLNTTALRREPKPTLRAIPFSGYEAHFGLQLAFRIDGQHAYSTHYGKAQFPHSAQPPFTASRNTHNLRRSRQPIHQSLFIADIYPQGSVPLDNNPSALSTHAHFPDTPSSKLVNRVQLSLTFTPLASSHVRGATSPCSSLNSPSP

SEQ ID NO: 866054 - protein, 123 aa, Homo sapiens
IRSGPGMNRTRESLCGDMKLLTHNLLSSHVRGVGSRGFPLRLQATEVRICPVEFNPNFVARMIPKVEWSAFLEAADNLRLIQVPKGPVEGYEENEEFLRTMHHLLLEVRSGPSLASRATCLPH

SEQ ID NO: 866055 - protein, 118 aa, Homo sapiens; identical to SEQ ID NO: 866045

SEQ ID NO: 866056 - protein, 118 aa, Homo sapiens; identical to SEQ ID NO: 866045

SEQ ID NO: 866057 - protein, 118 aa, Homo sapiens; identical to SEQ ID NO: 866045

SEQ ID NO: 866058 - protein, 146 aa, Homo sapiens
MKLLTHNLLSSHVRGVGSRGFPLRLQVPAGGSLPFSGGMVGRGPVLCLNSSALQATEVRICPVEFNPNFVARMIPKVEWSAFLEAADNLRLIQVPKGPVEGYEENEEFLRTMHHLLLEVEVIEGTLQCPENLDVCSPSAAGSPTCC

SEQ ID NO: 866059 - protein, 128 aa, Homo sapiens; identical to SEQ ID NO: 866052

SEQ ID NO: 866060 - protein, 118 aa, Homo sapiens; identical to SEQ ID NO: 866045

SEQ ID NO: 866061 - protein, 118 aa, Homo sapiens; identical to SEQ ID NO: 866045

SEQ ID NO: 866062 - protein, 118 aa, Homo sapiens; identical to SEQ ID NO: 866045

SEQ ID NO: 866063 - protein, 118 aa, Homo sapiens; identical to SEQ ID NO: 866045

SEQ ID NO: 866064 - protein, 157 aa, Homo sapiens
MKLLTHNLLSSHVRGVGSRGFPLRLQATEVRICPVEFNPNFVARMIPKVEWSAFLEAADNVRILTPPQHIPGNAGRAHLSRAEAGVRDALEIILASCPQLRLIQVPKGPVEGYEENEEFLRTMHHLLLEVEVIEGTLQCPENLDVCSPSAAGSPTCC

SEQ ID NO: 866065 - protein, 118 aa, Homo sapiens; identical to SEQ ID NO: 866045

SEQ ID NO: 866066 - protein, 434 aa, Homo sapiens [sequence omitted]

SEQ ID NO: 866067 - protein, 69 aa, Homo sapiens
GKCRGAAGLSCPRGSAPQASWWHAGERGGGDSYPKAAELQAAVGPGVCCNPLGAARLRSLSDAETRSCW

SEQ ID NO: 866068 - protein, 802 aa, Homo sapiens
MEEEGGSSGGAAGTSADGGDGGEQLLTVKHELRTANLTGHAEKVGIENFELLKVLGTGAYGKVFLVRKISGHDTGKLYAMKVLKKATIVQKAKTTEHTRTERQVLEHIRQSPFLVTLHYAFQTETKLHLILDYINGGELFTHLSQRERFTEHEVQIYVGEIVLALEHLHKLGIIYRDIKLENILLDSNGHVVLTDFGLSKEFVADETERAYSFCGTIEYMAPDIVRGGDSGHDKAVDWWSLGVLMYELLTGASPFTVDGEKNSQAEISRRILKSEPPYPQEMSALAKDLIQRLLMKDPKKRLGCGPRDADEIKEHLFFQKINWDDLAAKKVPAPFKPVIRDELDVSNFAEEFTEMDPTYSPAALPQSSEKLFQGYSFVAPSILFKRNAAVIDPLQFHMGVERPGVTNVARSAMMKDSPFYQHYDLDLKDKPLGEGSFSICRKCVHKKSNQAFAVKIISKRMEANTQKEITALKLCEGHPNIVKLHEVFHDQLHTFLVMELLNGGELFERIKKKKHFSETEASYIMRKLVSAVSHMHDVGVVHRDLKPENLLFTDENDNLEIKIIDFGFARLKPPDNQPLKTPCFTLHYAAPELLNQNGYDESCDLWSLGVILYTMLSGQVPFQSHDRSLTCTSAVEIMKKIKKGDFSFEGEAWKNVSQEAKDLIQGLLTVDPNKRLKMSGLRYNEWLQDGSQLSSNPLMTPDILGSSGAAVHTCVKATFHAFNKYKREGFCLQNVDKAPLAKRRKMKKTSTSTETRSSSSESSHSSSSHSHGKTTPTKTLQPSNPADSNNPETLFQFSDSVA

SEQ ID NO: 866069 - protein, 802 aa, Homo sapiens; identical to SEQ ID NO: 866068

SEQ ID NO: 866070 - protein, 549 aa, Homo sapiens
MEEEGGSSGGAAGTSADGGDGGEQLLTVKHELRTANLTGHAEKVGIENFELLKVLGTGAYGKVFLVRKISGHDTGKLYAMKVLKKATIVQKAKTTEHTRTERQVLEHIRQSPFLVTLHYAFQTETKLHLILDYINGGELFTHLSQRERFTEHEVQIYVGEIVLALEHLHKLGIIYRDIKLENILLDSNGHVVLTDFGLSKEFVADETERAYSFCGTIEYMAPDIVRGGDSGHDKAVDWWSLGVLMYELLTGASPFTVDGEKNSQAEISRRILKSEPPYPQEMSALAKDLIQRLLMKDPKKRLGCGPRDADEIKEHLFFQKINWDDLAAKKVPAPFKPVIRDELDVSNFAEEFTEMDPTYSPAALPQSSEKLFQGYSFVAPSILFKRNAAVIDPLQFHMGVERPGVTNVARSAMMKDSPFYQHYDLDLKDKPLGEGSFSICRKCVHKKSNQAFAVKIISKRMEANTQKEITALKLCEGHPNIVKLHEVFHDQLHTFLVMELLNGGELFERIKKKKHFSETEASYIMRKLVSAVSHMHDVGVVHRDLKPEV

SEQ ID NO: 866071 - protein, 802 aa, Homo sapiens; identical to SEQ ID NO: 866068

SEQ ID NO: 866072 - protein, 370 aa, Homo sapiens
MGLWALLPGWVSATLLLALAALPAALAANSSGRWWGIVNVASSTNLLTDSKSLQLVLEPSLQLLSRKQRRLIRQNPGILHSVSGGLQSAVRECKWQFRNRRWNCPTAPGPHLFGKIVNRGCRETAFIFAITSAGVTHSVARSCSEGSIESCTCDYRRRGPGGPDWHWGGCSDNIDFGRLFGREFVDSGEKGRDLRFLMNLHNNEAGRTTVFSEMRQECKCHGMSGSCTVRTCWMRLPTLRAVGDVLRDRFDGASRVLYGNRGSNRASRAELLRLEPEDPAHKPPSPHDLVYFEKSPNFCTYSGRLGTAGTAGRACNSSSPALDGCELLCCGRGHRTRTQRVTERCNCTFHWCCHVSCRNCTHTRVLHECL

SEQ ID NO: 866073 - protein, 226 aa, Homo sapiens
MAAGAALALALWLLMPPVEVGGAGPPPIQDGEFTFLLPAGRKQCFYQSAPANASLETEYQVIGGAGLDVDFTLESPQGVLLVSESRKADGVHTVEPTEAGDYKLCFDNSFSTISEKLVFFELIFDSLQDDEEVEGWAEAVEPEEMLDVKMEDIKESIETMRTRLERSIQMLTLLRAFEARDRNLQEGNLERVNFWSAVNVAVLLLVAVLQVCTLKRFFQDKRPVPT

SEQ ID NO: 866074 - protein, 226 aa, Homo sapiens; identical to SEQ ID NO: 866073

SEQ ID NO: 866075 - protein, 212 aa, Homo sapiens [sequence omitted]

SEQ ID NO: 866076 - protein, 218 aa, Homo sapiens
MAAGAALALALWLLMPPVEVGGAGPPPIQDGEFTFLLPAGRKQCFYQSAPANASLETEYQVIGGAGLDVDFTLESPQGVLLVSESRKADGVHTVEPTEAGDYKLCFDNSFSTISEKLVFFELIFDSLQDDEEVEGWAEAVEPEEMLDVKMEDIKESIETMRTRLERSIQMLTLLRAFEARDRNLQEGNLERVNFWSAVNVAVLLLVAVLQRAGNTSGL

SEQ ID NO: 866077 - protein, 226 aa, Homo sapiens; identical to SEQ ID NO: 866073

SEQ ID NO: 866078 - protein, 226 aa, Homo sapiens; identical to SEQ ID NO: 866073

SEQ ID NO: 866079 - protein, 264 aa, Homo sapiens
MAAGAALALALWLLMPPVEVGGAGPPPIQDGEFTFLLPAGRKQCFYQSAPANASLETEYQVIGGAGLDVDFTLESPQGVLLVSESRKADGVHTVEPTEAGDYKLCFDNSFSTISEKLVFFELIFDSLQDDEEVEGWAEAVEPEEMLDVKMEDIKVCPGCAGATPSRSLGFTWGAPLGLTQPPLRSCALQLNYESIETMRTRLERSIQMLTLLRAFEARDRNLQEGNLERVNFWSAVNVAVLLLVAVLQVCTLKRFFQDKRPVPT

SEQ ID NO: 866080 - protein, 627 aa, Homo sapiens
MLTDSGGGGTSFEEDLDSVAPRSAPAGASEPPPPGGVGLGIRTVRLFGEAGPASGVGSSGGGGSGSGTGGGDAALDFKLAAAVLRTGGGGGASGSDEDEVSEVESFILDQEDLDNPVLKTTSEIFLSSTAEGADLRTVDPETQARLEALLEAAGIGKLSTADGKAFADPEVLRRLTSSVSCALDEAAAALTRMKAENSHNAGQVDTRSLAEACSDGDVNAVRKLLDEGRSVNEHTEEGESLLCLACSAGYYELAQVLLAMHANVEDRGNKGDITPLMAASSGGYLDIVKLLLLHDADVNSQSATGNTALTYACAGGFVDIIKVLLNEGANIEDHNENGHTPLMEAASAGHVEVARVLLDHGAGINTHSNEFKESALTLACYKGHLDMVRFLLEAGADQEHKTDEMHTALMEACMDGHVEVARLLLDSGAQVNMPADSFESPLTLAACGGHVELAALLIERGANLEEVNDEGYTPLMEAAREGHEEMVALLLAQGANINAQTEETQETALTLACCGGFSEVADFLIKAGADIELGCSTPLMEASQEGHLELVKYLLASGANVHATTATGDTALTYACENGHTDVADVLLQAGADLDKQEDMKTILEGIDPAKHQVRVAFDACKLLRKE

SEQ ID NO: 866081 - protein, 259 aa, Homo sapiens
MLTDSGGGGTSFEEDLDSVAPRSAPAGASEPPPPGGVGLGIRTVRLFGEAGPASGVGSSGGGGSGSGTGGGDAALDFKLAAAVLRTGGGGGASGSDEDEVSEVESFILDQEDLDNPVLKTTSEIFLSSTAEGADLRTVDPETQARLEALLEAAGIGKLSTADGKAFADPEVLRRLTSSVSCALDEAAAALTRMKAENSHNAGQVDTRSLAEACSDGDVNAVRKLLDEGRSVNEHTEEGESEPYPNGLCSKQVLEHFLWI

SEQ ID NO: 866082 - protein, 195 aa, Homo sapiens
MPADSFESPLTLAACGGHVELAALLIERGANLEEVNDEGYTPLMEAAREGHEEMVALLLAQGANINAQTEETQETALTLACCGGFSEVADFLIKAGADIELGCSTPLMEASQEGHLELVKYLLASGANVHATTATGDTALTYACENGHTDVADVLLQAGADLDKQEDMKTILEGIDPAKHQVRVAFDACKLLRKE

SEQ ID NO: 866083 - protein, 627 aa, Homo sapiens; identical to SEQ ID NO: 866080

SEQ ID NO: 866084 - protein, 685 aa, Homo sapiens
MLTDSGGGGTSFEEDLDSVAPRSAPAGASEPPPPGGVGLGIRTVRLFGEAGPASGVGSSGGGGSGSGTGGGDAALDFKLAAAVLRTGGGGGASGSDEDEVSEVESFILDQEDLDNPVLKTTSEIFLSSTAEGADLRTVDPETQARLEALLEAAGIGKLSTADGKAFADPEVLRRLTSSVSCALDEAAAALTRMKAENSHNAGQVDTRSLAEACSDGDVNAVRKLLDEGRSVNEHTEEGESLLCLACSAGYYELAQVLLAMHANVEDRGNKGDITPLMAASSGGYLDIVKLLLLHDADVNSQSATGNTALTYACAGGFVDIIKVLLNEGANIEDHNENGHTPLMEAASAGHVEVARVLLDHGAGINTHSNEFKESALTLACYKGHLDMVRFLLEAGADQEHKTDEMHTALMEACMDGHVEVARLLLDSGAQVNMPADSFESPLTLAACGGHVELAALLIERGANLEEVNDEGYTPLMEAAREGHEEMVALLLAQGANINAQTEETQETALTLACCGGFSEVADFLIKAGADIELGCSTPLMEASQEGHLELVKYLLASGANVHATTATGDTALTYACENGHTDVADVLLQAGADLEHESEGGRTPLMKAARAGHLCTVQFLISKGANVNRATANNDHTVVSLACAGGHLAVVELLLAHGADPTHRLKDGSTMLIEAAKGGHTNVVS

SEQ ID NO: 866085 - protein, 435 aa, Homo sapiens
ERSRGSPDAGQVDTRSLAEACSDGDVNAVRKLLDEGRSVNEHTEEGESLLCLACSAGYYELAQVLLAMHANVEDRGNKGDITPLMAASSGGYLDIVKLLLLHDADVNSQSATGNTALTYACAGGFVDIIKVLLNEGANIEDHNENGHTPLMEAASAGHVEVARVLLDHGAGINTHSNEFKESALTLACYKGHLDMVRFLLEAGADQEHKTDEMHTALMEACMDGHVEVARLLLDSGAQVNMPADSFESPLTLAACGGHVELAALLIERGANLEEVNDEGYTPLMEAAREGHEEMVALLLAQGANINAQTEETQETALTLACCGGFSEVADFLIKAGADIELGCSTPLMEASQEGHLELVKYLLASGANVHATTATGDTALTYACENGHTDVADVLLQAGADLDKQEDMKTILEGIDPAKHQVRVAFDACKLLRKE

SEQ ID NO: 866086 - protein, 88 aa, Homo sapiens
GSGTGGGDAALDFKLAAAVLRTGGGGGASGSDEDEVSEVRLRDPRLPHIVRREFSLGRLWAGAILPLPWWSPSVTAVGSMAAVAAVRA

SEQ ID NO: 866087 - protein, 614 aa, Homo sapiens
MLTDSGGGGTSFEEDLDSVAPRSAPAGASEPPPPGGVGLGIRTVRLFGEAGPASGVGSSGGGGSGSGTGGGDAALDFKLAAAVLRTGGGGGASGSDEDEVSEVESFILDQEDLDNPVLKTTSEIFLSSTAEGADLRTVDPETQARLEALLEAAADPEVLRRLTSSVSCALDEAAAALTRMKAENSHNAGQVDTRSLAEACSDGDVNAVRKLLDEGRSVNEHTEEGESLLCLACSAGYYELAQVLLAMHANVEDRGNKGDITPLMAASSGGYLDIVKLLLLHDADVNSQSATGNTALTYACAGGFVDIIKVLLNEGANIEDHNENGHTPLMEAASAGHVEVARVLLDHGAGINTHSNEFKESALTLACYKGHLDMVRFLLEAGADQEHKTDEMHTALMEACMDGHVEVARLLLDSGAQVNMPADSFESPLTLAACGGHVELAALLIERGANLEEVNDEGYTPLMEAAREGHEEMVALLLAQGANINAQTEETQETALTLACCGGFSEVADFLIKAGADIELGCSTPLMEASQEGHLELVKYLLASGANVHATTATGDTALTYACENGHTDVADVLLQAGADLDKQEDMKTILEGIDPAKHQVRVAFDACKLLRKE

SEQ ID NO: 866088 - protein, 220 aa, Homo sapiens
MLTDSGGGGTSFEEDLDSVAPRSAPAGASEPPPPGGVGLGIRTVRLFGEAGPASGVGSSGGGGSGSGTGGGDAALDFKLAAAVLRTGGGGGASGSDEDEVSEVESFILDQEDLDNPVLKTTSEIFLSSTAEGADLRTVDPETQARLEALLEAAGIGKLSTADGKAFADPEVLRRLTSSVSCALDEAAAALTRMKAENSHNAGQVDTRRRAEAGAEGEGKA

SEQ ID NO: 866089 - protein, 638 aa, Homo sapiens
MLTDSGGGGTSFEEDLDSVAPRSAPAGASEPPPPGGVGLGIRTVRLFGEAGPASGVGSSGGGGSGSGTGGGDAALDFKLAAAVLRTGGGGGASGSDEDEVSECASGSDEEKCPVESFILDQEDLDNPVLKTTSEIFLSSTAEGADLRTVDPETQARLEALLEAAGIGKLSTADGKAFADPEVLRRLTSSVSCALDEAAAALTRMKAENSHNAGQVDTRSLAEACSDGDVNAVRKLLDEGRSVNEHTEEGESLLCLACSAGYYELAQVLLAMHANVEDRGNKGDITPLMAASSGGYLDIVKLLLLHDADVNSQSATGNTALTYACAGGFVDIIKVLLNEGANIEDHNENGHTPLMEAASAGHVEVARVLLDHGAGINTHSNEFKESALTLACYKGHLDMVRFLLEAGADQEHKTDEMHTALMEACMDGHVEVARLLLDSGAQVNMPADSFESPLTLAACGGHVELAALLIERGANLEEVNDEGYTPLMEAAREGHEEMVALLLAQGANINAQTEETQETALTLACCGGFSEVADFLIKAGADIELGCSTPLMEASQEGHLELVKYLLASGANVHATTATGDTALTYACENGHTDVADVLLQAGADLDKQEDMKTILEGIDPAKHQVRVAFDACKLLRKE

SEQ ID NO: 866090 - protein, 371 aa, Homo sapiens
MLTDSGGGGTSFEEDLDSVAPRSAPAGASEPPPPGGVGLGIRTVRLFGEAGPASGVGSSGGGGSGSGTGGGDAALDFKLAAAVLRTGGGGGASGSDEDEVSEVESFILDQEDLDNPVLKTTSEIFLSSTAEGADLRTVDPETQARLEALLEAAGIGKLSTADGKAFADPEVLRRLTSSVSCALDEAAAALTRMKAENSHNAGQVDTRSLAEACSDGDVNAVRKLLDEGRSVNEHTEEGESLLCLACSAGYYELAQVLLAMHANVEDRGNKGDITPLMAASSGGYLDIVKLLLLHDADVNSQSATGNTALTYACAGGFVDIIKVLLNEGANIEDHNENGHTPLMEAASAGHVEVARVLLDHGAGISRCRTGY

SEQ ID NO: 866091 - protein, 195 aa, Homo sapiens; identical to SEQ ID NO: 866082

SEQ ID NO: 866092 - protein, 357 aa, Homo sapiens
MEEGMNVLHDFGIQSTHYLQVNYQDSQDWFILVSVIADLRNAFYVLFPIWFHLQEAVGIKLLWVAVIGDWLNLVFKWILFGQRPYWWVLDTDYYSNTSVPLIKQFPVTCETGPGSPSGHAMGTAGVYYVMVTSTLSIFQGKIKPTYRFRCLNVILWLGFWAVQLNVCLSRIYLAAHFPHQVVAGVLSGIAVAETFSHIHSIYNASLKKYFLITFFLFSFAIGFYLLLKGLGVDLLWTLEKAQRWCEQPEWVHIDTTPFASLLKNLGTLFGLGLALNSSMYRESCKGKLSKWLPFRLSSIVASLVLLHVFDSLKPPSQVELVFYVLSFCKSAVVPLASVSVIPYCLAQVLGQPHKKSL

SEQ ID NO: 866093 - protein, 156 aa, Homo sapiens
MEEGMNVLHDFGIQSTHYLQVNYQDSQDWFILVSVIADLRNAFYVLFPIWFHLQEAVGIKLLWVAVIGDWLNLVFKWILFGQRPYWWVLDTDYYSNTSVPLIKQFPVTCETGPGSPSGHAMGTAGVYYVMVTSTLSIFQGKIKPTYRFRHLPPKKS

SEQ ID NO: 866094 - protein, 357 aa, Homo sapiens; identical to SEQ ID NO: 866092

SEQ ID NO: 866095 - protein, 106 aa, Homo sapiens
FDTSLDEILELKSSRRGRPRPKTKGKPCPERPSWRSQGTHVGLATGSDPGSMTRLAGEWGTVRTAEQISRRHRTSMLTRLLALLLVGLSCSCGPLCLAKMVKPRLY

SEQ ID NO: 866096 - protein, 153 aa, Homo sapiens
MLSSSESVKENPNPKHEGVGIERPLARPRRPLIGGDWTQRRKFSLSHMIGWEKQKLRPTAAQIGARPGRSPSLVIGGAQQTPLGCSMIGRGLLVLGPGPEPRCPIDGPEGSRRGPAQLPLVDFDLAGLGQHVDDVGLEVRVVHASLPELARVP

SEQ ID NO: 866097 - protein, 117 aa, Homo sapiens
NVSLEADLYLEKNINNLKPDMESLCLFIFKLAISLLYIARLGNVCSLTLYLLAELVSQFHVVVSSQAGLPASHNRVPFTLNAADLWYSTAGTLGTDSGLTANVWHGRSRVGTYRVWA

SEQ ID NO: 866098 - protein, 69 aa, Homo sapiens
LRVTQRIPEVTFGRDGQIPGERGSRGPFEEAGGARANWRRASCVGRRQRKHKEEAQERGPREWRPLSRP

SEQ ID NO: 866099 - protein, 148 aa, Homo sapiens
MDRFLVKGAQGGLLRKQEEQEPTGEEPAVLGGDKESTRKRPRREAPGNGGHSAGPSWRHIRAEGLDCSYTVLFGKAEADEIFQELEKEVEYFTGALARVQVFGKWHSVPRKQATYGDAGLTYTFSGLTLSPKPWIPVLERIRDHVSGV

SEQ ID NO: 866100 - protein, 157 aa, Homo sapiens
MDRFLVKGAQGGLLRKQEEQEPTGEEPAVLGGDKESTRKRPRREAPGNGGHSAGPSWRHIRAEGLDCSYTVLFGKAEADEIFQELEKEVEYFTGIKMAVTTSGSTEMMKENWPLGAPLPLSPSVPAETLSSGIRIPVGKAPPGGWRWSGCRWPTGAY

SEQ ID NO: 866101 - protein, 157 aa, Homo sapiens; identical to SEQ ID NO: 866100

SEQ ID NO: 866102 - protein, 157 aa, Homo sapiens; identical to SEQ ID NO: 866100

SEQ ID NO: 866103 - protein, 157 aa, Homo sapiens; identical to SEQ ID NO: 866100

SEQ ID NO: 866104 - protein, 274 aa, Homo sapiens
MKKKTRRRSTRSEELTRSEELTLSEEATWSEEATQSEEATQGEEMNRSQEVTRDEESTRSEEVTREEMAAAGLTVTVTHSNEKHDLHVTSQQGSSEPVVQDLAQVVEEVIGVPQSFQKLIFKGKSLKEMETPLSALGIQDGCRVMLIGKKNSPQEEVELKKLKHLEKSVEKIADQLEELNKELTGIQQGFLPKDLQAEALCKLDRRVKATIEQFMKILEEIDTLILPENFKDSRLKRKGLVKKVQAFLAECDTVEQNICQETERLQSTNFALAE

SEQ ID NO: 866105 - protein, 274 aa, Homo sapiens; identical to SEQ ID NO: 866104

SEQ ID NO: 866106 - protein, 241 aa, Homo sapiens
MKKKTRRRSTRSEELTRSEELTLSEEATWSEEATQSEEATQGEEMNRSQEVTRDEESTRSEEVTREEMAAAGLTVTVTHSNEKHDLHVTSQQGSSEPVVQDLAQVVEEVIGVPQSFQKLIFKGKSLKEMETPLSALGIQDGCRVMLIGKKNSPQEEVELKKLKHLEKSVEKIADQLEELNKELTGIQQGFLPKDLQAEALCKLDRRVKATIEQFMKILEEIDTLNWPFANFPTLTLVLNEK

SEQ ID NO: 866107 - protein, 202 aa, Homo sapiens
MKKKTRRRSTRSEELTRSEELTLSEEATWSEEATQSEEATQGEEMNRSQEVTRDEESTRSEEVTREEMAAAGLTVTVTHSNEKHDLHVTSQQGSSEPVVQDLAQVVEEVIGVPQSFQKLIFKGKSLKEMETPLSALGIQDGCRVMLIGKKNSPQEEVELKKLKHLEKSVEKIADQLEELNKELTGIQQRWGFTMLARLVSNS

SEQ ID NO: 866108 - protein, 69 aa, Homo sapiens
DEDAVFADEEGRFREIDTLILPENFKDSRLKRKGLVKKVQAFLAECDTVEQNICQETERLQSTNFALAE

SEQ ID NO: 866109 - protein, 274 aa, Homo sapiens; identical to SEQ ID NO: 866104

SEQ ID NO: 866110 - protein, 274 aa, Homo sapiens; identical to SEQ ID NO: 866104

SEQ ID NO: 866111 - protein, 251 aa, Homo sapiens
MKKKTRRRSTRSEELTRSEELTLSEEATWSEEATQSEEATQGEEMNRSQEVTRDEESTRSEEVTREEMAAAGLTVTVTHSNEKHDLHVTSQQGSSEPVVQDLAQVVEEVIGVPQSFQKLIFKGKSLKEMETPLSALGIQDGCRVMLIGKKNSPQEEVELKKLKHLEKSVEKIADQLEELNKELTGIQQGFLPKDLQAEALCKLDRRVKATIEQFMKILEEIDTLILPENFKDSRLKRKGLVKKVQDQRRQA

SEQ ID NO: 866112 - protein, 168 aa, Homo sapiens
MKKKTRRRSTRSEELTRSEELTLSEEATWSEEATQSEEATQGEEMNRSQEVTRDEESTRSEEVTREEMAAAGLTVTVTHSNEKHDLHVTSQQGSSEPVVQDLAQVVEEVIGVPQSFQKLIFKVLQQIFIEDLLGIGHSQTPGQVSDLKSYDDGRNLTIFDEAHGQSSL

SEQ ID NO: 866113 - protein, 583 aa, Homo sapiens
MAARRRRSTGGGRARALNESKRVNNGNTAPEDSSPAKKTRRCQRQESKKMPVAGGKANKDRTEDKQDGMPGRSWASKRVSESVKALLLKGKAPVDPECTAKVGKAHVYCEGNDVYDVMLNQTNLQFNNNKYYLIQLLEDDAQRNFSVWMRWGRVGKMGQHSLVACSGNLNKAKEIFQKKFLDKTKNNWEDREKFEKVPGKYDMLQMDYATNTQDEEETKKEESLKSPLKPESQLDLRVQELIKLICNVQAMEEMMMEMKYNTKKAPLGKLTVAQIKAGYQSLKKIEDCIRAGQHGRALMEACNEFYTRIPHDFGLRTPPLIRTQKELSEKIQLLEALGDIEIAIKLVKTELQSPEHPLDQHYRNLHCALRPLDHESYEFKVISQYLQSTHAPTHSDYTMTLLDLFEVEKDGEKEAFREDLHNRMLLWHGSRMSNWVGILSHGLRIAPPEAPITGYMFGKGIYFADMSSKSANYCFASRLKNTGLLLLSEVALGQCNELLEANPKAEGLLQGKHSTKGLGKMAPSSAHFVTLNGSTVPLGPASDTGILNPDGYTLNYNEYIVYNPNQVRMRYLLKVQFNFLQLW

SEQ ID NO: 866114 - protein, 570 aa, Homo sapiens
MAARRRRSTGGGRARALNESKRVNNGNTAPEDSSPAKKTRRCQRQESKKMPVAGGKANKDRTEDKQDESVKALLLKGKAPVDPECTAKVGKAHVYCEGNDVYDVMLNQTNLQFNNNKYYLIQLLEDDAQRNFSVWMRWGRVGKMGQHSLVACSGNLNKAKEIFQKKFLDKTKNNWEDREKFEKVPGKYDMLQMDYATNTQDEEETKKEESLKSPLKPESQLDLRVQELIKLICNVQAMEEMMMEMKYNTKKAPLGKLTVAQIKAGYQSLKKIEDCIRAGQHGRALMEACNEFYTRIPHDFGLRTPPLIRTQKELSEKIQLLEALGDIEIAIKLVKTELQSPEHPLDQHYRNLHCALRPLDHESYEFKVISQYLQSTHAPTHSDYTMTLLDLFEVEKDGEKEAFREDLHNRMLLWHGSRMSNWVGILSHGLRIAPPEAPITGYMFGKGIYFADMSSKSANYCFASRLKNTGLLLLSEVALGQCNELLEANPKAEGLLQGKHSTKGLGKMAPSSAHFVTLNGSTVPLGPASDTGILNPDGYTLNYNEYIVYNPNQVRMRYLLKVQFNFLQLW

SEQ ID NO: 866115 - protein, 185 aa, Homo sapiens
MTLLDLFEVEKDGEKEAFREDLHNRMLLWHGSRMSNWVGILSHGLRIAPPEAPITGYMFGKGIYFADMSSKSANYCFASRLKNTGLLLLSEVALGQCNELLEANPKAEGLLQGKHSTKGLGKMAPSSAHFVTLNGSTVPLGPASDTGILNPDGYTLNYNEYIVYNPNQVRMRYLLKVQFNFLQLW

SEQ ID NO: 866116 - protein, 622 aa, Homo sapiens
MAARRRRSTGGGRARALNESKRVNNGNTAPEDSSPAKKTRRCQRQESKKMPVAGGKANKDRTEDKQDESVKALLLKGKAPVDPECTAKVGKAHVYCEGNDVYDVMLNQTNLQFNNNKYYLIQLLEDDAQRNFSVWMRWGRVGKMGQHSLVACSGNLNKAKEIFQKKFLDKTKNNWEDREKFEKVPGKYDMLQMDYATNTQDEEETKKEESLKSPLKPESQLDLRVQELIKLICNVQAMEEMMMEMKYNTKKAPLGKLTVAQIKAGYQSLKKIEDCIRAGQHGRALMEACNEFYTRIPHDFGLRTPPLIRTQKELSEKIQLLEALGDIEIAIKLVKTELQSPEHPLDQHYRNLHCALRPLDHESYEFKVISQYLQSTHAPTHSDYTMTLLDLFEVEKDGEKEAFREDLHNRSESSFAFGKTLLARKYSCRTYKRESEEGVGFFMLMAYLCRTTEYNNIGFSFRMLLWHGSRMSNWVGILSHGLRIAPPEAPITGYMFGKGIYFADMSSKSANYCFASRLKNTGLLLLSEVALGQCNELLEANPKAEGLLQGKHSTKGLGKMAPSSAHFVTLNGSTVPLGPASDTGILNPDGYTLNYNEYIVYNPNQVRMRYLLKVQFNFLQLW

SEQ ID NO: 866117 - protein, 293 aa, Homo sapiens
MAARRRRSTGGGRARALNESKRVNNGNTAPEDSSPAKKTRRCQRQESKKMPVAGGKANKDRTEDKQDGMPGRSWASKRVSESVKALLLKGKAPVDPECTAKVGKAHVYCEGNDVYDVMLNQTNLQFNNNKYYLIQLLEDDAQRNFSVWMRWGRVGKMGQHSLVACSGNLNKAKEIFQKKFLDKTKNNWEDREKFEKVPGKYDMLQMDYATNTQDEEETKKEESLKSPLKPESQLDLRVQELIKLICNVQAMEEMMMEMKYNTKKAPLGQLKEQTKNRVLEGNYRYYQGIFQSE

SEQ ID NO: 866118 - protein, 48 aa, Homo sapiens
MSNWVGILSHGLRIAPPEAPITGYMVSEIELWEEHRGKGYSNVLSAFF

SEQ ID NO: 866119 - protein, 531 aa, Homo sapiens
MAARRRRSTGGGRARALNESKRVNNGNTAPEDSSPAKKTRRCQRQESKKMPVAGGKANKDRTEDKQDGMPGRSWASKRVSESVKALLLKGKAPVDPECTAKVGKAHVYCEGNDVYDVMLNQTNLQFNNNKYYLIQLLEDDAQRNFSVWMRWGRVGKMGQHSLVACSGNLNKAKEIFQKKFLDKTKNNWEDREKFEKVPGKYDMLQMDYATNTQDEEETKKEESLKSPLKPESQLDLRVQELIKLICNVQAMEEMMMEMKYNTKKAPLGKLTVAQIKAGYQSLKKIEDCIRAGQHGRALMEACNEFYTRIPHDFGLRTPPLIRTQKELSEKIQLLEALGDIEIAIKLVKTELQSPEHPLDQHYRNLHCALRPLDHESYEFKVISQYLQSTHAPTHSDYTMTLLDLFEVEKDGEKEAFREDLHNRMLLWHGSRMSNWVGILSHGLRIAPPEAPITGYMFGKGIYFADMSSKSANYCFASRLKNTGLLLLSEVALGQCNELLEANPKAEGLLQGKHSTKGLGKMAPSSAHFVTL

SEQ ID NO: 866120 - protein, 285 aa, Homo sapiens
MEACNEFYTRIPHDFGLRTPPLIRTQKELSEKIQLLEALGDIEIAIKLVKTELQSPEHPLDQHYRNLHCALRPLDHESYEFKVISQYLQSTHAPTHSDYTMTLLDLFEVEKDGEKEAFREDLHNRMLLWHGSRMSNWVGILSHGLRIAPPEAPITGYMFGKGIYFADMSSKSANYCFASRLKNTGLLLLSEVALGQCNELLEANPKAEGLLQGKHSTKGLGKMAPSSAHFVTLNGSTVPLGPASDTGILNPDGYTLNYNEYIVYNPNQVRMRYLLKVQFNFLQLW

SEQ ID NO: 866121 - protein, 485 aa, Homo sapiens
MAARRRRSTGGGRARALNESKRVNNGNTAPEDSSPAKKTRRCQRQESKKMPVAGGKANKDRTEDKQDESVKALLLKGKAPVDPECTAKVGKAHVYCEGNDVYDVMLNQTNLQFNNNKYYLIQLLEDDAQRNFSVWMRWGRVGKMGQHSLVACSGNLNKAKEIFQKKFLDKTKNNWEDREKFEKVPGKYDMLQMDYATNTQDEEETKKEESLKSPLKPESQLDLRVQELIKLICNVQAMEEMMMEMKYNTKKAPLGKLTVAQIKAGYQSLKKIEDCIRAGQHGRALMEACNEFYTRIPHDFGLRTPPLIRTQKELSEKIQLLEALGDIEIAIKLVKTELQSPEHPLDQHYRNLHCALRPLDHESYEFKVISQYLQSTHAPTHSDYTMTLLDLFEVEKDGEKEAFREDLHNRMLLWHGSRMSNWVGILSHGLRIAPPEAPITGYMFGKGIYFADMSSKSANYCFASRLKNTGLLLLSEVRQEYVCDL

SEQ ID NO: 866122 - protein, 177 aa, Homo sapiens
MAARRRRSTGGGRARALNESKRVNNGNTAPEDSSPAKKTRRCQRQESKKMPVAGGKANKDRTEDKQDESVKALLLKGKAPVDPECTAKVGKAHVYCEGNDVYDVMLNQTNLQFNNNKYYLIQLLEDDAQRNFSVWMRWGRVGKMGQHSLVACSGNLNKAKEIFQKKEPKMECCELTH

SEQ ID NO: 866123 - protein, 114 aa, Homo sapiens
STSAFLSYFSQVISQYLQSTHAPTHSDYTMTLLDLFEVEKDGEKEAFREDLHNRSESSFAFGKTLLARKYSCRTYKRESEEGVGFFMLMAYLCRTTEYNNIGFSLGCFYGMVPG

SEQ ID NO: 866124 - protein, 159 aa, Homo sapiens [sequence omitted]

SEQ ID NO: 866125 - protein, 305 aa, Homo sapiens
MKSDSSTSAAPLRGLGGPLRSSEPVRAVPARAPAVDLLEEAADLLVVHLDFRAALETCERAWQSLANHAVAEEPAGTSLEVKCSLCVVGIQALAEMDRWQEVLSWVLQYYQVPEKLPPKVLELCILLYSKMQEPGAVLDVVGAWLQDPANQNLPEYGALAEFHVQRVLLPLGCLSEAEELVVGSAAFGEERRLDVLQAIHTARQQQKQEHSGSEEAQKPNLEGSVSHKFLSLPMLVRQLWDSAVSHFFSLPFKKSLLAALILCLLVVRFDPASPSSLHFLYKLAQLFRWIRKAAFSRLYQLRIRD

SEQ ID NO: 866126 - protein, 305 aa, Homo sapiens; identical to SEQ ID NO: 866125

SEQ ID NO: 866127 - protein, 256 aa, Homo sapiens
MKSDSSTSAAPLRGLGGPLRSSEPVRAVPARAPAVDLLEEAADLLVVHLDFRAALETCERAWQSLANHAVAEEPAGTSLEVKCSLCVVGIQALAEMDRWQEVLSWVLQYYQVPEKLPPKVLELCILLYSKMQEPGAVLDVVGAWLQDPANQNLPEYGALAEFHVQRVLLPLGCLSEAEELVVGSAAFGEERRLDVLQAIHTARQQQKQEHSGSEEAQKPNLEASPSSLHFLYKLAQLFRWIRKAAFSRLYQLRIRD

SEQ ID NO: 866128 - protein, 305 aa, Homo sapiens; identical to SEQ ID NO: 866125

SEQ ID NO: 866129 - protein, 256 aa, Homo sapiens; identical to SEQ ID NO: 866127

SEQ ID NO: 866130 - protein, 125 aa, Homo sapiens
MANSGYPGASGEAVTPTSEDLGLGPGLVMKSDSSTSAAPLRGLGGPLRSSEPVRAVPARAPAVDLLEEAADLLVVHLDFRAALETCERAWQSLANHAVAEEPAGTSLEVKCSLTGVSHRARPTFL

SEQ ID NO: 866131 - protein, 217 aa, Homo sapiens
MKSDSSTSAAPLRGLGGPLRSSEPVRAVPARAPAVDLLEEAADLLVVHLDFRAALETCERAWQSLANHAVAEEPAGTSLEVKCSLCVVGIQALAEMDRWQEVLSWVLQYYQVPEKLPPKVLELCILLYSKMQEPGAVLDVVGAWLQDPANQNLPEYGALAEFHVQRVLLPLGCLSEAEELVVGSAAFGEERRLDVLQAIHTARQQQKQEHSGSEEAP

SEQ ID NO: 866132 - protein, 305 aa, Homo sapiens; identical to SEQ ID NO: 866125

SEQ ID NO: 866133 - protein, 305 aa, Homo sapiens; identical to SEQ ID NO: 866125

SEQ ID NO: 866134 - protein, 305 aa, Homo sapiens; identical to SEQ ID NO: 866125

SEQ ID NO: 866135 - protein, 305 aa, Homo sapiens; identical to SEQ ID NO: 866125

SEQ ID NO: 866136 - protein, 305 aa, Homo sapiens; identical to SEQ ID NO: 866125

SEQ ID NO: 866137 - protein, 305 aa, Homo sapiens; identical to SEQ ID NO: 866125

SEQ ID NO: 866138 - protein, 305 aa, Homo sapiens; identical to SEQ ID NO: 866125

SEQ ID NO: 866139 - protein, 305 aa, Homo sapiens; identical to SEQ ID NO: 866125

SEQ ID NO: 866140 - protein, 489 aa, Homo sapiens
MNKLSPVLLFLNQQNYQIDKDVEDKRQKAIEEFFTKDVIVPSPWTDHEGKQLSQCHSSKCTNINSDSPVGKKLTIHSEKSDAACQTLLSLPVDFNLENILGDYFRADEFADQSPGNLSSSSLRRKLFLDGNGSISDSLPSASPGSPHSGVQTSLEMFYSIDLSPVKCRSPLQTPSSGQFSSSPIQASAKKYSLGSITSPSPISSPTFSPIEFQIGETPLSEQRKFTVHSPDASSGTNSNGITNPCIRSPYIDGCSPIKNWSPMRLQMYSGGTQYRTSVIQIPFTLETQGEDEEDKENIPSTDVSSPAMDAAGIHLRQFSNEASTHGTHLVVTAMSVTQNQSSASEKELALLQDVEREKDNNTVDMVDPIEIADETTWIKEPVDNGSLPMTDFVSGIAFSIENSHMCMSPLAESSVIPCESSNIQMDSGYNTQNCGSNIMDTVGAESYCKESDAQTCEVESKSQAFNMKQDHTTQRCWMKTASPFQCSSP

SEQ ID NO: 866141 - protein, 576 aa, Homo sapiens
SLCLSWKLAWPPELPGVGTGGFVLYAPFSLCAMGDVKESKMQITPETPGRIPVLNPFESPSDYSNLHEQTLASPSVFKSTKLPTPGKFRWSIDQLAVINPVEIDPEDIHRQALYLSHSRFSLKMSSYPLLGLIMKGNSFHNVIPVNALTSNSDSPVGKKLTIHSEKSDAACQTLLSLPVDFNLENILGDYFRADEFADQSPGNLSSSSLRRKLFLDGNGSISDSLPSASPGSPHSGVQTSLEMFYSIDLSPVKCRSPLQTPSSGQFSSSPIQASAKKYSLGSITSPSPISSPTFSPIEFQIGETPLSEQRKFTVHSPDASSGTNSNGITNPCIRSPYIDGCSPIKNWSPMRLQMYSGGTQYRTSVIQIPFTLETQGEDEEDKENIPSTDVSSPAMDAAGIHLRQFSNEASTHGTHLVVTAMSVTQNQSSASEKELALLQDVEREKDNNTVDMVDPIEIADETTWIKEPVDNGSLPMTDFVSGIAFSIENSHMCMSPLAESSVIPCESSNIQMDSGYNTQNCGSNIMDTVGAESYCKESDAQTCEVESKSQAFNMKQDHTTQRCWMKTASPFQCSSP

SEQ ID NO: 866142 - protein, 591 aa, Homo sapiens
SLCLSWKLAWPPELPGVGTGGFVLYAPFSLCAMGDVKESKMQITPETPGRIPVLNPFESPSDYSNLHEQTLASPSVFKSTKLPTPGKFRWSIDQLAVINPVEIDPEDIHRQALYLSHSRIDKDVEDKRQKAIEEFFTKDVIVPSPWTDHEGKQLSQCHSSKCTNINSDSPVGKKLTIHSEKSDAACQTLLSLPVDFNLENILGDYFRADEFADQSPGNLSSSSLRRKLFLDGNGSISDSLPSASPGSPHSGVQTSLEMFYSIDLSPVKCRSPLQTPSSGQFSSSPIQASAKKYSLGSITSPSPISSPTFSPIEFQIGETPLSEQRKFTVHSPDASSGTNSNGITNPCIRSPYIDGCSPIKNWSPMRLQMYSGGTQYRTSVIQIPFTLETQGEDEEDKENIPSTDVSSPAMDAAGIHLRQFSNEASTHGTHLVVTAMSVTQNQSSASEKELALLQDVEREKDNNTVDMVDPIEIADETTWIKEPVDNGSLPMTDFVSGIAFSIENSHMCMSPLAESSVIPCESSNIQMDSGYNTQNCGSNIMDTVGAESYCKESDAQTCEVESKSQAFNMKQDHTTQRCWMKTASPFQCSSP

SEQ ID NO: 866143 - protein, 617 aa, Homo sapiens
SLCLSWKLAWPPELPGVGTGGFVLYAPFSLCAMGDVKESKMQITPETPGRIPVLNPFESPSDYSNLHEQTLASPSVFKSTKLPTPGKFRWSIDQLAVINPVEIDPEDIHRQALYLSHSRIDKDVEDKRQKAIEEFFTKDVIVPSPWTDHEGKQLSQCHSSKCTNINSDSPVGKKLTIHSEKSDAACQTLLSLPVDFNLENILGDYFRADEFADQSPGNLSSSSLRRKLFLDGNGSISDSLPSASPGSPHSGVQTSLEMFYSIDLSPVKCRSPLQTPSSGQFSSSPIQASAKKYSLGSITSPSPISSPTFSPIEFQIGETPLSEQRKFTVHSPDASSGTNSNGITNPCIRSPYIDGCSPIKNWSPMRLQMYSGGTQYRTSVIQIPFTLETQGEDEEDKENIPSTDVSSPAMDAAGIHLRQFSNEASTHGTHLVVTAMSVTQNQSSASEKELALLQDVEREKDNNTVDMVDPIEIADETTWIKEPVDNGSLPMTDFVSGIAFSIENSHMCMSPLAESSVIPCESSNIQMDSGYNTQNCGSNIMDTVGAESYCKESDAQTCEVESKSQAFNMKQDTTQHCGETQPFMASIKPGRIKLAKSHMWPAHWGGKTRRVPMKRVA

SEQ ID NO: 866144 - protein, 591 aa, Homo sapiens; identical to SEQ ID NO: 866142

SEQ ID NO: 866145 - protein, 591 aa, Homo sapiens; identical to SEQ ID NO: 866142

SEQ ID NO: 866146 - protein, 334 aa, Homo sapiens
MFYSIDLSPVKCRSPLQTPSSGQFSSSPIQASAKKYSLGSITSPSPISSPTFSPIEFQIGETPLSEQRKFTVHSPDASSGTNSNGITNPCIRSPYIDGCSPIKNWSPMRLQMYSGGTQYRTSVIQIPFTLETQGEDEEDKENIPSTDVSSPAMDAAGIHLRQFSNEASTHGTHLVVTAMSVTQNQSSASEKELALLQDVEREKDNNTVDMVDPIEIADETTWIKEPVDNGSLPMTDFVSGIAFSIENSHMCMSPLAESSVIPCESSNIQMDSGYNTQNCGSNIMDTVGAESYCKESDAQTCEVESKSQAFNMKQDHTTQRCWMKTASPFQCSSP

SEQ ID NO: 866147 - protein, 410 aa, Homo sapiens
MLVEKEWLSFGHKFSQRSSLTLNCQGSGFAPVFLQFLDCVHQVHNQYPTEFEFNLYYLKFLAFHYVSNRFKTFLLDSDYERLEHGTLFDDKGEKHAKKGVCIWECIDRMHKRSPIFFNYLYSPLEIEALKPNVNVSSLKKWDYYIEETLSTGPSYDWMMLTPKHFPSEDSDLAGEAGPRSQRRTVWPCYDDVSCTQPDALTSLFSEIEKLEHKLNQAPEKWQQLWERVTVDLKEEPRTDRSQRHLSRSPGIVSTNLPSYQKRSLLHLPDSSMGEEQNSSISPSNGVERRAATLYSQYTSKNDENRSFEGTLYKRGALLKGWKPRWFVLDVTKHQLRYYDSGEDTSCKGHIDLAEVEMVIPAGPSMGAPKHTSDKAFFDLKTSKRVYNFCAQDGQSAQQWMDKIQSCISDA

SEQ ID NO: 866148 - protein, 618 aa, Homo sapiens
MTSKTVAPEHAPFSLVSGIPTLDYLTPRLWLCEGVWASLRSSTRLISSPTSFIDVGARLAGKDHSASFSNSSYLQNQLLKRQAALYIFGEKSQLRNFKVEFALNCEFVPVEFHEIRQVKASFKKLMRACIPSTIPTDSEVTFLKALGDSEWFPQLHRIMQLAVVVSEVLENGSSVLVCLEEGWDITAQVTSLVQLLSDPFYRTLEGFQMLVEKEWLSFGHKFSQRSSLTLNCQGSGFAPVFLQFLDCVHQVHNQYPTEFEFNLYYLKFLAFHYVSNRFKTFLLDSDYERLEHGTLFDDKGEKHAKKGVCIWECIDRMHKRSPIFFNYLYSPLEIEALKPNVNVSSLKKWDYYIEETLSTGPSYDWMMLTPKHFPSEDSDLAGEAGPRSQRRTVWPCYDDVSCTQPDALTSLFSEIEKLEHKLNQAPEKWQQLWERVTVDLKEEPRTDRSQRHLSRSPGIVSTNLPSYQKRSLLHLPDSSMGEEQNSSISPSNGVERRAATLYSQYTSKNDENRSFEGTLYKRGALLKGWKPRWFVLDVTKHQLRYYDSGEDTSCKGHIDLAEVEMVIPAGPSMGAPKHTSDKAFFDLKTSKRVYNFCAQDGQSAQQWMDKIQSCISDA

SEQ ID NO: 866149 - protein, 618 aa, Homo sapiens; identical to SEQ ID NO: 866148

SEQ ID NO: 866150 - protein, 68 aa, Homo sapiens
  misc_feature (10)..(10): Xaa can be any naturally occurring amino acid
ITLDGALDFXVICSDFVKSTITLDGGVLVHVQKWDGKSTTIKRKREDDKLVVECVMKGVTSTRVYERA

SEQ ID NO: 866151 - protein, 132 aa, Homo sapiens
MCDAFVGTWKLVSSENFDDYMKEVGVGFATRKVAGMAKPNMIISVNGDVITIKSESTFKNTEISFILGQEFDEVTADDRKVKSTITLDGGVLVHVQKWDGKSTTIKRKREDDKLVVECVMKGVTSTRVYERA

SEQ ID NO: 866152 - protein, 132 aa, Homo sapiens; identical to SEQ ID NO: 866151

SEQ ID NO: 866153 - protein, 132 aa, Homo sapiens; identical to SEQ ID NO: 866151

SEQ ID NO: 866154 - protein, 132 aa, Homo sapiens; identical to SEQ ID NO: 866151

SEQ ID NO: 866155 - protein, 132 aa, Homo sapiens; identical to SEQ ID NO: 866151

SEQ ID NO: 866156 - protein, 132 aa, Homo sapiens; identical to SEQ ID NO: 866151

SEQ ID NO: 866157 - protein, 83 aa, Homo sapiens
LTIKDKFLNATFAFPSSRFTSLIPAEVQVFLASSSLRLRIKSLGEKGTASTTASQSLWQTYHSTGKLALARISGYYYRVGKKV

SEQ ID NO: 866158 - protein, 315 aa, Homo sapiens
MAFPEPKPRPPELPQKRLKTLDCGQGAVRAVRFNVDGNYCLTCGSDKTLKLWNPLRGTLLRTYSGHGYEVLDAAGSFDNSSLCSGGGDKAVVLWDVASGQVVRKFRGHAGKVNTVQFNEEATVILSGSIDSSIRCWDCRSRRPEPVQTLDEARDGVSSVKVSDHEILAGSVDGRVRRYDLRMGQLFSDYVGSPITCTCFSRDGQCTLVSSLDSTLRLLDKDTGELLGEYKGHKNQEYKLDCCLSERDTHVVSCSEDGKVFFWDLVEGALALALPVGSGVVQSLAYHPTEPCLLTAMGGSVQCWREEAYEAEDGAG

SEQ ID NO: 866159 - protein, 169 aa, Homo sapiens
MAFPEPKPRPPELPQKRLKTLDCGQGAVRAVRFNVDGNYCLTCGSDKTLKLWNPLRGTLLRTYSGHGYEVLDAAGSFDNSSLCSGGGDKAVVLWDVASGQVVRKFRGHAGKVNTVQFNEEATVILSGSIDSSIRCWDCRSRRPEPVQTLDEARDGVSSVKVSDHEILAG

SEQ ID NO: 866160 - protein, 344 aa, Homo sapiens [sequence omitted]

SEQ ID NO: 866161 - protein, 169 aa, Homo sapiens; identical to SEQ ID NO: 866159

SEQ ID NO: 866162 - protein, 185 aa, Homo sapiens [sequence omitted]

SEQ ID NO: 866163 - protein, 256 aa, Homo sapiens
MAFPEPKPRPPELPQKRLKTLDCGQGAVRAVRFNVDGNYCLTCGSDKTLKLWNPLRGTLLRTYSGHGYEVLDAAGSFDNSSLCSGGGDKAVVLWDVASGQVVRKFRGHAGKVNTVQFNEEATVILSGSIDSSIRCWDCRSRRPEPVQTLDEARDGVSSVKVSDHEILAGSVDGRVRRYDLRMGQLFSDYVGSPITCTCFSRDGQCTLVSSLDSTLRLLDKDTGELLGEYKGHKNQEYKTEVREGEEKNREDREIRR

SEQ ID NO: 866164 - protein, 343 aa, Homo sapiens
MAFPEPKPRPPELPQKRLKTLDCGQGAVRAVRFNGERLRLHSGSSSRLLEIDGPVTPAWCSPVDGNYCLTCGSDKTLKLWNPLRGTLLRTYSGHGYEVLDAAGSFDNSSLCSGGGDKAVVLWDVASGQVVRKFRGHAGKVNTVQFNEEATVILSGSIDSSIRCWDCRSRRPEPVQTLDEARDGVSSVKVSDHEILAGSVDGRVRRYDLRMGQLFSDYVGSPITCTCFSRDGQCTLVSSLDSTLRLLDKDTGELLGEYKGHKNQEYKLDCCLSERDTHVVSCSEDGKVFFWDLVEGALALALPVGSGVVQSLAYHPTEPCLLTAMGGSVQCWREEAYEAEDGAG

SEQ ID NO: 866165 - protein, 169 aa, Homo sapiens; identical to SEQ ID NO: 866159

SEQ ID NO: 866166 - protein, 33 aa, Homo sapiens
MGPYWEIGSLLTILSYDEAVLCGGPYPRRQLPH

SEQ ID NO: 866167 - protein, 84 aa, Homo sapiens
GCALFRITTASHVLLEGRTERVLAGLDPTGVRRRQRRIPEKRLGLRKALRERLAGQFGRLHRSRVPGGTCRPEGGVWGRCREDG

SEQ ID NO: 866168 - protein, 196 aa, Homo sapiens [sequence omitted]

SEQ ID NO: 866169 - protein, 240 aa, Homo sapiens
GCALFRITTASHVLLEGRTERVLAGLDPTGVRRRQRRIPEKRLGLRKALRERLAGQFGRLHRSRVPGGTCRPEGGGPTAELSPPGSGKDPTEAKAAPEGQVRVPFLEEAGARKAVTLALATGFPGAVLSQELHSAGHLQKTVFRVYFLLSSTQSPTAANARGQKMFGGRKTKAGSGGGLTVRVCLQRREGAGSVSSCFSKLQGPGSPLQGRAPLLPARHWRWPPERRRPTPAPGLSGGNG

SEQ ID NO: 866170 - protein, 107 aa, Homo sapiens
MQTDTSNLSARSCRFCVMSPLRTLLRSSEMRRKLLAVSASKVISTVKRKTSCSASGQKPTPCLSSTSKAQISPDFSFFNSVSSSKIKTFHEETSLFQIFIGMLCGNT

SEQ ID NO: 866171 - protein, 107 aa, Homo sapiens; identical to SEQ ID NO: 866170

SEQ ID NO: 866172 - protein, 107 aa, Homo sapiens; identical to SEQ ID NO: 866170

SEQ ID NO: 866173 - protein, 722 aa, Homo sapiens
MPLHQLGDKPLTFPSPNSAMENGLDHTPPSRRASPGTPLSPGSLRSAAHSPLDTSKQPLCQLWAEKHGARGTHEVRYVSAGQSVACGWWAFAPPCLQVLNTPKGILFFLCAAAFLQGMTVNGFINTVITSLERRYDLHSYQSGLIASSYDIAACLCLTFVSYFGGSGHKPRWLGWGVLLMGTGSLVFALPHFTAGRYEVELDAGVRTCPANPGAVCADSTSGLSRYQLVFMLGQFLHGVGATPLYTLGVTYLDENVKSSCSPVYIAIFYTAAILGPAAGYLIGGALLNIYTEMGRRTELTTESPLWVGAWWVGFLGSGAAAFFTAVPILGYPRQLPGSQRYAVMRAAEMHQLKDSSRGEASNPDFGKTIRDLPLSIWLLLKNPTFILLCLAGATEATLITGMSTFSPKFLESQFSLSASEAATLFGYLVVPAGGGGTFLGGFFVNKLRLRGSAVIKFCLFCTVVSLLGILVFSLHCPSVPMAGVTASYGGSLLPEGHLNLTAPCNAACSCQPEHYSPVCGSDGLMYFSLCHAGCPAATETNVDGQKVYRDCSCIPQNLSSGFGHATAGKCTSTCQRKPLLLVFIFVVIFFTFLSSIPALTATLRCVRDPQRSFALGIQWIVVRILGGIPGPIAFGWVIDKACLLWQDQCGQQGSCLVYQNSAMSRYILIMGLLYKVLGVLFFAIACFLYKPLSESSDGLETCLPSQSSAPDSATDSQLQSSV

SEQ ID NO: 866174 - protein, 167 aa, Homo sapiens
MGVPSLREEEKPFYHQKAVPSGALQPRRRMWTARSIPALTATLRCVRDPQRSFALGIQWIVVRILGGIPGPIAFGWVIDKACLLWQDQCGQQGSCLVYQNSAMSRYILIMGLLYKAPLLRIHPTLDGKCSFCGRWNWRVRRADCTYKYTYMSVHMFLYKRVTVKLFL

SEQ ID NO: 866175 - protein, 700 aa, Homo sapiens
MPLHQLGDKPLTFPSPNSAMENGLDHTPPSRRASPGTPLSPGSLRSAAHSPLDTSKQPLCQLWAEKHGARGTHEVRYVSAGQSVACGWWAFAPPCLQVLNTPKGILFFLCAAAFLQGMTVNGFINTVITSLERRYDLHSYQSGLIASSYDIAACLCLTFVSYFGGSGHKPRWLGWGVLLMGTGSLVFALPHFTAGRYEVELDAGVRTCPANPGAVCADSTSGLSRYQLVFMLGQFLHGVGATPLYTLGVTYLDENVKSSCSPVYIAIFYTAAILGPAAGYLIGGALLNIYTEMGRRTELTTESPLWVGAWWVGFLGSGAAAFFTAVPILGYPRQLPGSQRYAVMRAAEMHQLKDSSRGEASNPDFGKTIRDLPLSIWLLLKNPTFILLCLAGATEATLITGMSTFSPKFLESQFSLSASEAATLFGYLVVPAGGGGTFLGGFFVNKLRLRGSAVIKFCLFCTVVSLLGILVFSLHCPSVPMAGVTASYGGSLLPEGHLNLTAPCNAACSCQPEHYSPVCGSDGLMYFSLCHAGCPAATETNVDGQKVYRDCSCIPQNLSSGFGHATAGKCTSTCQRKPLLLVFIFVVIFFTFLSSIPALTATLRCVRDPQRSFALGIQWIVVRILGGIPGPIAFGWVIDKACLLWQDQCGQQGSCLVYQNSAMSRYILIMGLLYKFQLPEVHHSLNVLNRKFQKQTVHNL

SEQ ID NO: 866176 - protein, 620 aa, Homo sapiens
MPLHQLGDKPLTFPSPNSAMENGLDHTPPSRRASPGTPLSPGSLRSAAHSPLDTSKQPLCQLWAEKHGARGTHEVRYVSAGQSVACGWWAFAPPCLQVLNTPKGILFFLCAAAFLQGMTVNGFINTVITSLERRYDLHSYQSGLIASSYDIAACLCLTFVSYFGGSGHKPRWLGWGVLLMGTGSLVFALPHFTAGRYEVELDAGVRTCPANPGAVCADSTSGLSRYQLVFMLGQFLHGVGATPLYTLGVTYLDENVKSSCSPVYIAIFYTAAILGPAAGYLIGGALLNIYTEMGRRTELTTESPLWVGAWWVGFLGSGAAAFFTAVPILGYPRQLPGSQRYAVMRAAEMHQLKDSSRGEASNPDFGKTIRDLPLSIWLLLKNPTFILLCLAGATEATLITGMSTFSPKFLESQFSLSASEAATLFGYLVVPAGGGGTFLGGFFVNKLRLRGSAVIKFCLFCTVVSLLGILVFSLHCPSVPMAGVTASYGGSLLPEGHLNLTAPCNAACSCQPEHYSPVCGSDGLMYFSLCHAGCPAATETNVDGQKVSGAAAYRPCPPLDPGKGPPCLPLVIGAIVGLPRCTETVAVSLRIFPLVLAMPLQGNALQLVRESPSFWFSYSL

SEQ ID NO: 866177 - protein, 684 aa, Homo sapiens
MPLHQLGDKPLTFPSPNSAMENGLDHTPPSRRASPGTPLSPGSLRSAAHSPLDTSKQPLCQLWAEKHGARGTHEVRYVSAGQSVACGWWAFAPPCLQVLNTPKGILFFLCAAAFLQGMTVNGFINTVITSLERRYDLHSYQSGLIASSYDIAACLCLTFVSYFGGSGHKPRWLGWGVLLMGTGSLVFALPHFTAGRYEVELDAGVRTCPANPGAVCADSTSGLSRYQLVFMLGQFLHGVGATPLYTLGVTYLDENVKSSCSPVYIAIFYTAAILGPAAGYLIGGALLNIYTEMGRRTELTTESPLWVGAWWVGFLGSGAAAFFTAVPILGYPRQLPGSQRYAVMRAAEMHQLKDSSRGEASNPDFGKTIRDLPLSIWLLLKNPTFILLCLAGATEATLITGMSTFSPKFLESQFSLSASEAATLFGYLVVPAGGGGTFLGGFFVNKLRLRGSAVIKFCLFCTVVSLLGILVFSLHCPSVPMAGVTASYGGSLLPEGHLNLTAPCNAACSCQPEHYSPVCGSDGLMYFSLCHAGCPAATETNVDGQKVYRDCSCIPQNLSSGFGHATAGKCTSTCQRKPLLLVFIFVVIFFTFLSSIPALTATLRCVRDPQRSFALGIQWIVVRILGGIPGPIAFGWVIDKACLLWQDQCGQQGSCLVYQNSAMSRYILIMGLLYKEEENEFRRL

SEQ ID NO: 866178 - protein, 493 aa, Homo sapiens
MPLHQLGDKPLTFPSPNSAMENGLDHTPPSRRASPGTPLSPGSLRSAAHSPLDTSKQPLCQLWAEKHGARGTHEVRYVSAGQSVACGWWAFAPPCLQVLNTPKGILFFLCAAAFLQGMTVNGFINTVITSLERRYDLHSYQSGLIASSYDIAACLCLTFVSYFGGSGHKPRWLGWGVLLMGTGSLVFALPHFTAGRYEVELDAGVRTCPANPGAVCADSTSGLSRYQLVFMLGQFLHGVGATPPTKRRPTKHSKKKKKNKNTKKNKKKKPESEHKARGSRDKSGVIRHGATDGAKTRVPRDPRVFWEHRGENPARGATPPNKGERRDRNKLSRKKAPRGVYTGATYKETPAEQDWTSTQTHRDTTQRDTDPKPHTERDRRTQTQITTTQRAGARQGDQQETKTEQGNATEPGPGSKANRDKHKVDGTRKDKTRRKTGRKETGEKEEETAQEGKEERERGSKRGHRRKRTGEDTSGVGRQQAGNGDTDEARRKK

SEQ ID NO: 866179 - protein, 86 aa, Homo sapiens
LFSTPPPLPSSIWLLLKNPTFILLCLAGATEATLITGMSTFSPKFLESQFSLSASEAATLFGEKTESWGSSAFMSVLRNRVFKGIF

SEQ ID NO: 866180 - protein, 620 aa, Homo sapiens; identical to SEQ ID NO: 866176

SEQ ID NO: 866181 - protein, 722 aa, Homo sapiens; identical to SEQ ID NO: 866173

SEQ ID NO: 866182 - protein, 549 aa, Homo sapiens
MPLHQLGDKPLTFPSPNSAMENGLDHTPPSRRASPGTPLSPGSLRSAAHSPLDTSKQPLCQLWAEKHGARGTHEVRYVSAGQSVACGWWAFAPPCLQVLNTPKGILFFLCAAAFLQGMTVNGFINTVITSLERRYDLHSYQSGLIASSYDIAACLCLTFVSYFGGSGHKPRWLGWGVLLMGTGSLVFALPHFTAGRYEVELDAGVRTCPANPGAVCADSTSGLSRYQLVFMLGQFLHGVGATPLYTLGVTYLDENVKSSCSPVYIAIFYTAAILGPAAGYLIGGALLNIYTEMGRRTELTTESPLWVGAWWVGFLGSGAAAFFTAVPILGYPRQLPGSQRYAVMRAAEMHQLKDSSRGEASNPDFGKTIRDLPLSIWLLLKNPTFILLCLAGATEATLITGMSTFSPKFLESQFSLSASEAATLFGYLVVPAGGGGTFLGGFFVNKLRLRGSAVIKFCLFCTVVSLLGILVFSLHCPSVPMAGVTASYGGSLLPEGHLNLTAPCNAACSCQPEHYSPVCGSDGLMYFSLCHAGCPAATETNVDGQKMCP

SEQ ID NO: 866183 - protein, 240 aa, Homo sapiens
MGTSPMADPVPAGRQHGSGLDPTTRLSPLCSLLPEGHLNLTAPCNAACSCQPEHYSPVCGSDGLMYFSLCHAGCPAATETNVDGQKVYRDCSCIPQNLSSGFGHATAGKCTSTCQRKPLLLVFIFVVIFFTFLSSIPALTATLRCVRDPQRSFALGIQWIVVRILGGIPGPIAFGWVIDKACLLWQDQCGQQGSCLVYQNSAMSRYILIMGLLYKFQLPEVHHSLNVLNRKFQKQTVHNL

SEQ ID NO: 866184 - protein, 463 aa, Homo sapiens
MAGAGERKGKKDDNGIGTAIDFVLSNARLVLGVGGAAMLGIATLAVKRMYDRAISAPTSPTRLSHSGKRSWEEPNWMGSPRLLNRDMKTGLSRSLQTLPTDSSTFDTDTFCPPRPKPVARKGQVDLKKSRLRMSLQEKLLTYYRNRAAIPAGEQARAKQAAVDICAELRSFLRAKLPDMPLRDMYLSGSLYDDLQVVTADHIQLIVPLVLEQNLWSCIPGEDTIMNVPGFFLVRRENPEYFPRGSSYWDRCVVGGYLSPKTVADTFEKVVAGSINWPAIGSLLDYVIRPAPPPEALTLEVQYERDKHLFIDFLPSVTLGDTVLVAKPHRLAQYDNLWRLSLRPAETARLRALDQADSGCRSLCLKILKAICKSTPALGHLTASQLTNVILHLAQEEADWSPDMLADRFLQALRGLISYLEAGVLPSALNPKVNLFAELTPEEIDELGYTLYCSLSEPEVLLQT

SEQ ID NO: 866185 - protein, 463 aa, Homo sapiens; identical to SEQ ID NO: 866184

SEQ ID NO: 866186 - protein, 463 aa, Homo sapiens; identical to SEQ ID NO: 866184

SEQ ID NO: 866187 - protein, 463 aa, Homo sapiens; identical to SEQ ID NO: 866184

SEQ ID NO: 866188 - protein, 285 aa, Homo sapiens
MPLRDMYLSGSLYDDLQVVTADHIQLIVPLVLEQNLWSCIPGEDTIMNVPGFFLVRRENPEYFPRGSSYWDRCVVGGYLSPKTVADTFEKVVAGSINWPAIGSLLDYVIRPAPPPEALTLEVQYERDKHLFIDFLPSVTLGDTVLVAKPHRLAQYDNLWRLSLRPAETARLRALDQADSGCRSLCLKILKAICKSTPALGHLTASQLTNVILHLAQEEADWSPDMLADRFLQALRGLISYLEAGVLPSALNPKVNLFAELTPEEIDELGYTLYCSLSEPEVLLQT

SEQ ID NO: 866189 - protein, 285 aa, Homo sapiens; identical to SEQ ID NO: 866188

SEQ ID NO: 866190 - protein, 328 aa, Homo sapiens
MAGAGERKGKKDDNGIGTAIDFVLSNARLVLGVGGAAMLGIATLAVKRMYDRAISAPTSPTRLSHSGKRSWEEPNWMGSPRLLNRDMKTGLSRSLQTLPTDSSTFDTDTFCPPRPKPVARKGQVDLKKSRLRMSLQEKLLTYYRNRAAIPAGEQARAKQAAVDICAELRSFLRAKLPDMPLRDMYLSGSLYDDLQVVTADHIQLIVPLVLEQNLWSCIPGEDTIMNVPGFFLVRRENPEYFPRGSSYWDRCVVGGYLSPKTVADTFEKVVAGSINWPAIGSLLDYVIRPAPPPDPKVNLFAELTPEEIDELGYTLYCSLSEPEVLLQT

SEQ ID NO: 866191 - protein, 105 aa, Homo sapiens [sequence omitted]

SEQ ID NO: 866192 - protein, 437 aa, Homo sapiens
MAGAGERKGKKDDNGIGTAIDFVLSNARLVLGVGGAAMLGIATLAVKRMYDRAISAPTSPTRLSHSGKRSWEEPNWMGSPRLLNRDMKTGLSRSLQTLPTDSSTFDTDTFCPPRPKPVARKGQVDLKKSRLRMSLQEKLLTYYRNRAAIPAGEQARAKQAAVDICAELRSFLRAKLPDMPLRDMYLSGSLYDDLQVVTADHIQLIVPLVLEQNLWSCIPGEDTIMNVPGFFLVRRENPEYFPRGSSYWDRCVVGGYLSPKTVADTFEKVVAGSINWPAIGSLLDYVIRPAPPPEALTLEVQYERDKHLFIDFLPSVTLGDTVLVAKPHRLAQYDNLWRLSLRPAETARLRALDQADSGCRSLCLKILKAICKSTPALGHLTASQLTNVILHLAQEEADWSPDMLADRFLQALRGLISYLEAGVLPSALRQGLEGTQP

SEQ ID NO: 866193 - protein, 1035 aa, Homo sapiens
MGGPAAPRGAGRLRALLLALVVAGIPAGAYNLDPQRPVHFQGPADSFFGYAVLEHFHDNTRWVLVGAPKADSKYSPSVKSPGAVFKCRVHTNPDRRCTELDMARGKNRGTSCGKTCREDRDDEWMGVSLARQPKADGRVLACAHRWKNIYYEADHILPHGFCYIIPSNLQAKGRTLIPCYEEYKKKYGEEHGSCQAGIAGFFTEELVVMGAPGSFYWAGTIKVLNLTDNTYLKLNDEVIMNRRYTYLGYAVTAGHFSHPSTIDVVGGAPQDKGIGKVYIFRADRRSGTLIKIFQASGKKMGSYFGSSLCAVDLNGDGLSDLLVGAPMFSEIRDEGQVTVYINRGNGALEEQLALTGDGAYNAHFGESIASLDDLDNDGFPDVAIGAPKEDDFAGAVYIYHGDAGGIVPQYSMKLSGQKINPVLRMFGQSISGGIDMDGNGYPDVTVGAFMSDSVVLLRARPVITVDVSIFLPGSINITAPQCHDGQQPVNCLNVTTCFSFHGKHVPEEIGLNYVLMADVAKKEKGQMPRVYFVLLGETMGQVTEKLQLTYMEETCRHYVAHVKRRVQDVISPIVFEAAYSLSEHVTGEEERELPPLTPVLRWKKGQKIAQKNQTVFERNCRSEDCAADLQLQGKLLLSSMDEKTLYLALGAVKNISLNISISNLGDDAYDANVSFNVSRELFFINMWQKEEMGISCELLESDFLKCSVGFPFMRSKSKYEFSVIFDTSHLSGEEEVLSFIVTAQSGNTERSESLHDNTLVLMVPLMHEVDTSITGIMSPTSFVYGESVDAANFIQLDDLECHFQPINITLQVYNTGPSTLPGSSVSISFPNRLSSGGAEMFHVQEMVVGQEKGNCSFQKNPTPCIIPQEQENIFHTIFAFFTKSGRKVLDCEKPGISCLTAHCNFSALAKEESRTIDIYMLLNTEILKKDSSSVIQFMSRAKVKVDPALRVVEIAHGNPEEVTVVFEALHNLEPRGYVVGWIIAISLLVGILIFLLLAVLLWKMGFFRRRYKEIIEAEKNRKENEDSWDWVQKNQ

SEQ ID NO: 866194 - protein, 738 aa, Homo sapiens
MGGPAAPRGAGRLRALLLALVVAGIPAGAYNLDPQRPVHFQGPADSFFGYAVLEHFHDNTRWVLVGAPKADSKYSPSVKSPGAVFKCRVHTNPDRRCTELDMARGKNRGTSCGKTCREDRDDEWMGVSLARQPKADGRVLACAHRWKNIYYEADHILPHGFCYIIPSNLQAKGRTLIPCYEEYKKKYGEEHGSCQAGIAGFFTEELVVMGAPGSFYWAGTIKVLNLTDNTYLKLNDEVIMNRRYTYLGYAVTAGHFSHPSTIDVVGGAPQDKGIGKVYIFRADRRSGTLIKIFQASGKKMGSYFGSSLCAVDLNGDGLSDLLVGAPMFSEIRDEGQVTVYINRGNGALEEQLALTGDGAYNAHFGESIASLDDLDNDGFPDVAIGAPKEDDFAGAVYIYHGDAGGIVPQYSMKLSGQKINPVLRMFGQSISGGIDMDGNGYPDVTVGAFMSDSVVLLRARPVITVDVSIFLPGSINITAPQCHDGQQPVNCLNVTTCFSFHGKHVPEEIGLNYVLMADVAKKEKGQMPRVYFVLLGETMGQVTEKLQLTYMEETCRHYVAHVKRRVQDVISPIVFEAAYSLSEHVTGEEERELPPLTPVLRWKKGQKIAQKNQTVFERNCRSEDCAADLQLQGKLLLSSMDEKTLYLALGAVKNISLNISISNLGDDAYDANVSFNVSRELFFINMWQKEEMGISCELLESDFLKCSVGFPFMRSKSKVRDTDGTLPQQQAPSPSTSH

SEQ ID NO: 866195 - protein, 442 aa, Homo sapiens
MPGISARGLSHEGRKQLAVNLTRVLALYRSILDAYIIEFFTDNLWDTLPCSWQEALDGLKPPQLATMLLGMPGEGEVVRYRSVWPLTLLALKSTACALAFTRMPGFQTPSEFLENPSQSSRLTAPFRKHVRPKKQHEIRRLGELVKKLSDFTGCTQVVDVGSGQGHLSRFMALGLGLMVKSIEGDQRLVERAQRLDQELLQALEKEEKRNPQVVQTSPRHSPHHVVRWVDPTALCEELLLPLENPCQGRARLLLTGLHACGDLSVALLRHFSCCPEVVALASVGCCYMKLSDPGGYPLSQWVAGLPGYELPYRLREGACHALEEYAERLQKAGPGLRTHCYRAALETVIRRARPELRRPGVQGIPRVHELKIEEYVQRGLQRVGLDPQLPLNLAALQAHLAQENRVVAFFSLALLLAPLVETLILLDRLLYLQEQAFPRFPC

SEQ ID NO: 866196 - protein, 477 aa, Homo sapiens
MPGISARGLSHEGRKQLAVNLTRVLALYRSILDAYIIEFFTDNLWDTLPCSWQEALDGLKPPQLATMLLGMPGEGEVVRYRSVWPLTLLALKSTACALAFTRMPGFQTPSEFLENPSQSSRLTAPFRKHVRPKKQHEIRRLGELVKKLSDFTGCTQVVDVGSGQGHLSRFMALGLGLMVKSIEGDQRLVERAQRLDQELLQALEKEEKRNPQVGQPFLRPGLQEQGLLGWNGAQRLDYIFQVSQLELVVQTSPRHSPHHVVRWVDPTALCEELLLPLENPCQGRARLLLTGLHACGDLSVALLRHFSCCPEVVALASVGCCYMKLSDPGGYPLSQWVAGLPGYELPYRLREGACHALEEYAERLQKAGPGLRTHCYRAALETVIRRARPELRRPGVQGIPRVHELKIEEYVQRGLQRVGLDPQLPLNLAALQAHLAQENRVVAFFSLALLLAPLVETLILLDRLLYLQEQAFPRFPC

SEQ ID NO: 866197 - protein, 295 aa, Homo sapiens
MPGISARGLSHEGRKQLAVNLTRVLALYRSILDAYIIEFFTDNLWDTLPCSWQEALDGLKPPQLATMLLGMPGEGEVVRYRSVWPLTLLALKSTACALAFTRMPGFQTPSEFLENPSQSSRLTAPFRKHVRPKKQHEIRRLGELVKKLSDFTGCTQVVDVGSGQGHLSRFMALGLGLMVKSIEGDQRLVERAQRLDQELLQALEKEEKRNPQVVQTSPRHSPHHVVRYVQRGLQRVGLDPQLPLNLAALQAHLAQENRVVAFFSLALLLAPLVETLILLDRLLYLQEQAFPRFPC

SEQ ID NO: 866198 - protein, 497 aa, Homo sapiens
MPGISARGLSHEGRKQLAVNLTRVLALYRSILDAYIIEFFTDNLWDTLPCSWQEALDGLKPPQLATMLLGMPGEGEVVRYGLEGPCAGELKALSPAVSILLRESHKVFLGLGLQTAALRCDGTIHWRPRLDYLRYRSVWPLTLLALKSTACALAFTRMPGFQTPSEFLENPSQSSRLTAPFRKHVRPKKQHEIRRLGELVKKLSDFTGCTQVVDVGSGQGHLSRFMALGLGLMVKSIEGDQRLVERAQRLDQELLQALEKEEKRNPQVVQTSPRHSPHHVVRWVDPTALCEELLLPLENPCQGRARLLLTGLHACGDLSVALLRHFSCCPEVVALASVGCCYMKLSDPGGYPLSQWVAGLPGYELPYRLREGACHALEEYAERLQKAGPGLRTHCYRAALETVIRRARPELRRPGVQGIPRVHELKIEEYVQRGLQRVGLDPQLPLNLAALQAHLAQENRVVAFFSLALLLAPLVETLILLDRLLYLQEQAFPRFPC

SEQ ID NO: 866199 - protein, 403 aa, Homo sapiens
MPTSSYRSVWPLTLLALKSTACALAFTRMPGFQTPSEFLENPSQSSRLTAPFRKHVRPKKQHEIRRLGELVKKLSDFTGCTQVVDVGSGQGHLSRFMALGLGLMVKSIEGDQRLVERAQRLDQELLQALEKEEKRNPQVGQPFLRPGLQEQGLLGWNGAQRLDYIFQVSQLELVVQTSPRHSPHHVVRWVDPTALCEELLLPLENPCQGRARLLLTGLHACGDLSVALLRHFSCCPEVVALASVGCCYMKLSDPGGYPLSQWVAGLPGYELPYRLREGACHALEEYAERLQKAGPGLRTHCYRAALETVIRRARPELRRPGVQGIPRVHELKIEEYVQRGLQRVGLDPQLPLNLAALQAHLAQENRVVAFFSLALLLAPLVETLILLDRLLYLQEQAFPRFPC

SEQ ID NO: 866200 - protein, 376 aa, Homo sapiens
MLLGMPGEGEVVRYRSVWPLTLLALKSTACALAFTRMPGFQTPSEFLENPSQSSRLTAPFRKHVRPKKQHEIRRLGELVKKLSDFTGCTQVVDVGSGQGHLSRFMALGLGLMVKSIEGDQRLVERAQRLDQELLQALEKEEKRNPQVVQTSPRHSPHHVVRWVDPTALCEELLLPLENPCQGRARLLLTGLHACGDLSVALLRHFSCCPEVVALASVGCCYMKLSDPGGYPLSQWVAGLPGYELPYRLREGACHALEEYAERLQKAGPGLRTHCYRAALETVIRRARPELRRPGVQGIPRVHELKIEEYVQRGLQRVGLDPQLPLNLAALQAHLAQENRVVAFFSLALLLAPLVETLILLDRLLYLQEQAFPRFPC

SEQ ID NO: 866201 - protein, 340 aa, Homo sapiens
MPGFQTPSEFLENPSQSSRLTAPFRKHVRPKKQHEIRRLGELVKKLSDFTGCTQVVDVGSGQGHLSRFMALGLGLMVKSIEGDQRLVERAQRLDQELLQALEKEEKRNPQVVQTSPRHSPHHVVRWVDPTALCEELLLPLENPCQGRARLLLTGLHACGDLSVALLRHFSCCPEVVALASVGCCYMKLSDPGGYPLSQWVAGLPGYELPYRLREGACHALEEYAERLQKAGPGLRTHCYRAALETVIRRARPELRRPGVQGIPRVHELKIEEYVQRGLQRVGLDPQLPLNLAALQAHLAQENRVVAFFSLALLLAPLVETLILLDRLLYLQEQAFPRFPC

SEQ ID NO: 866202 - protein, 442 aa, Homo sapiens; identical to SEQ ID NO: 866195

SEQ ID NO: 866203 - protein, 442 aa, Homo sapiens; identical to SEQ ID NO: 866195

SEQ ID NO: 866204 - protein, 366 aa, Homo sapiens
  misc_feature (1)..(1): Xaa can be any naturally occurring amino acid
  misc_feature (3)..(3): Xaa can be any naturally occurring amino acid
  misc_feature (11)..(11): Xaa can be any naturally occurring amino acid
  misc_feature (13)..(13): Xaa can be any naturally occurring amino acid
  misc_feature (30)..(30): Xaa can be any naturally occurring amino acid
XAXNLTRVRAXRXCCSQASTPVGDLSVALXRHFSCCPEVVALAQLGCCYMKLSDPGGYPLSQWVAGLPGYELPYRSILDAYIIEFFTDNLWDTLPCSWQEALDGLKPPQLATMLLGMPGEGEVVRYRSVWPLTLLALKSTACALAFTRMPGFQTPSEFLENPSQSSRLTAPFRKHVRPKKQHEIRRLGELVKKLSDFTGCTQVVDVGSGQGHLSRFMALGLGLMVKSIEGDQRLVERAQRLDQELLQALEKEEKRNPQICAAGATASGARSPAATESGCPSGPPGPGEPCGGLLQPGSTACPTGGDAYSTGPAAVPSGTGFSQVSMLSSCPSSVLNSLPETWFWWPPRCPWVRLFLFWRLKTADAA

SEQ ID NO: 866205 - protein, 421 aa, Homo sapiens
MPGISARGLSHEGRKQLAVNLTRVLALYRSILDAYIIEFFTDNLWDTLPCSWQEALDGLKPPQLATMLLGMPGEGEVVRYRSVWPLTLLALKSTACALAFTRMPGFQTPSEFLENPSQSSRLTAPFRKHVRPKKQHEIRRLGEGHLSRFMALGLGLMVKSIEGDQRLVERAQRLDQELLQALEKEEKRNPQVVQTSPRHSPHHVVRWVDPTALCEELLLPLENPCQGRARLLLTGLHACGDLSVALLRHFSCCPEVVALASVGCCYMKLSDPGGYPLSQWVAGLPGYELPYRLREGACHALEEYAERLQKAGPGLRTHCYRAALETVIRRARPELRRPGVQGIPRVHELKIEEYVQRGLQRVGLDPQLPLNLAALQAHLAQENRVVAFFSLALLLAPLVETLILLDRLLYLQEQAFPRFPC

SEQ ID NO: 866206 - protein, 320 aa, Homo sapiens
MPGISARGLSHEGRKQLAVNLTRVLALYRSILDAYIIEFFTDNLWDTLPCSWQEALDGLKPPQLATMLLGMPGEGEVVRYRSVWPLTLLALKSTACALAFTRMPGFQTPSEFLENPSQSSRLTAPFRKHVRPKKQHEIRRLGELVKKLSDFTGCTQVVDVGSGQGHLSRFMALGLGLMVKSIEGDQRLVERAQRLDQELLQALEKEEKRNPQICAAGATASGARSPAATESGCPSGPPGPGEPCGGLLQPGSTACPTGGDAYSTGPAAVPSGTGFSQVSMLSSCPSSVLNSLPETWFWWPPRCPWVRLFLFWRLKTADAA

SEQ ID NO: 866207 - protein, 488 aa, Homo sapiens
  misc_feature (1)..(1): Xaa can be any naturally occurring amino acid
  misc_feature (3)..(3): Xaa can be any naturally occurring amino acid
  misc_feature (11)..(11): Xaa can be any naturally occurring amino acid
  misc_feature (13)..(13): Xaa can be any naturally occurring amino acid
  misc_feature (30)..(30): Xaa can be any naturally occurring amino acid
XAXNLTRVRAXRXCCSQASTPVGDLSVALXRHFSCCPEVVALAQLGCCYMKLSDPGGYPLSQWVAGLPGYELPYRSILDAYIIEFFTDNLWDTLPCSWQEALDGLKPPQLATMLLGMPGEGEVVRYRSVWPLTLLALKSTACALAFTRMPGFQTPSEFLENPSQSSRLTAPFRKHVRPKKQHEIRRLGELVKKLSDFTGCTQVVDVGSGQGHLSRFMALGLGLMVKSIEGDQRLVERAQRLDQELLQALEKEEKRNPQVVQTSPRHSPHHVVRWVDPTALCEELLLPLENPCQGRARLLLTGLHACGDLSVALLRHFSCCPEVVALASVGCCYMKLSDPGGYPLSQWVAGLPGYELPYRLREGACHALEEYAERLQKAGPGLRTHCYRAALETVIRRARPELRRPGVQGIPRVHELKIEEYVQRGLQRVGLDPQLPLNLAALQAHLAQENRVVAFFSLALLLAPLVETLILLDRLLYLQEQAFPRFPC

SEQ ID NO: 866208 - protein, 409 aa, Homo sapiens
MPGISARGLSHEGRKQLAVNLTRVLALYRSILDAYIIEFFTDNLWDTLPCSWQEALDGLKPPQLATMLLGMPGEGEVVRYRSVWPLTLLALKSTACALAFTRMPGFQTPSEFLENPSQSSRLTAPFRKHVRPKKQHEIRRLGELVKKLSDFTGCTQVVDVGSGQGHLSRFMALGLGLMVKSIEGDQRLVERAQRLDQELLQALEKEEKRNPQVVQTSPRHSPHHVVRWVDPTALCEELLLPLENPCQGRARLLLTGLHACGDLSVALLRHFSCCPEVVALASVGCCYMKLSDPGGYPLSQWVAGLPGYELPYRLREGACHALEEYAERLQKAGPGLLQPGSTACPTGGDAYSTGPAAVPSGTGFSQVSMLSSCPSSVLNSLPETWFWWPPRCPWVRLFLFWRLKTADAA

SEQ ID NO: 866209 - protein, 260 aa, Homo sapiens
MPGISARGLSHEGRKQLAVNLTRVLALYRSILDAYIIEFFTDNLWDTLPCSWQEALDGLKPPQLATMLLGMPGEGEVVRYRSVWPLTLLALKSTACALAFTRMPGFQTPSEFLENPSQSSRLTAPFRKHVRPKKQHEIRRLGELVKKLSDFTGCTQVVDVGSGQGHLSRFMALGLGLMVKSIEGDQRLVERAQRLDQELLQALEKEEKRNPQVVQTSPRHSPHHVVRYVQRGLQRVGLDPQLPLNLAALQALSVLETEDS

SEQ ID NO: 866210 - protein, 168 aa, Homo sapiens
MSLTHRLHLCKYWGCAVSNVCRFWEGRPLPLMIVVPYTLPVSLPVGSCVIITGTPILTFVKDPQLEVNFYTGMDEDSDIAFQFRLHFGHPAIMNSCVFGIWRYEEKCYYLPFEDGKPFELCIYVRHKEYKVMVNGQRIYNFAHRFPPASVKMLQVFRDISLTRVLISD

SEQ ID NO: 866211 - protein, 102 aa, Homo sapiens
VCVCTMGGPAQHAVCFDLSKDPQLEVNFYTGMDEDSDIAFQFRLHFGHPAIMNSCVFGIWRYEEKCYYLPFEDGKPFELCIYVRHKEYKVSTSGSSSAGALW

SEQ ID NO: 866212 - protein, 139 aa, Homo sapiens
MSSLPVPYTLPVSLPVGSCVIITGTPILTFVKDPQLEVNFYTGMDEDSDIAFQFRLHFGHPAIMNSCVFGIWRYEEKCYYLPFEDGKPFELCIYVRHKEYKVMVNGQRIYNFAHRFPPASVKMLQVFRDISLTRVLISD

SEQ ID NO: 866213 - protein, 151 aa, Homo sapiens
MRVPRHPGGSHRSAVGLLCEKGPAAPSLVQIRCQTVFLGIHPNRSLISLCGSPGPPSRPEPKCLGSRERPVPFFSSLATSSHFRLLTVPKQPPKTLRELGPGPEAENGRKKRSGRRWVSLCHPDWSAVSGAIIAYCSLKLLGSSDLLASAS

SEQ ID NO: 866214 - protein, 201 aa, Homo sapiens
MRVPRHPGGSHRSAVGLLCEKGPAAPSLVQIRCQTVFLGIHPNRSLISLCGSPGPPSRPEPKCLGSRERPVPFFSSLATSSHFRLLTVPKQPPKTLRELGPGPEAENGRKKRSGRISHRAPLLMLLGDTFIRPAPGGERRGKEVFSSRPPGARLGVVCGGGGRIWGPQSQPPLAAAAFIPEILLLTINRNPEKSQRCEVHT

SEQ ID NO: 866215 - protein, 151 aa, Homo sapiens; identical to SEQ ID NO: 866213

SEQ ID NO: 866216 - protein, 154 aa, Homo sapiens
MRVPRHPGGSHRSAVGLLCEKGPAAPSLVQIRCQTVFLGIHPNRSLISLCGSPGPPSRPEPKCLGSRERPVPFFSSLATSSHFRLLTVPKQPPKTLRELGPGPEAENGRKKRSGRFIKLSLQILQYRHCLLSSLWMVCTHPCLQVFRKNAQELF

SEQ ID NO: 866217 - protein, 891 aa, Homo sapiens
MKEQEKGEGSDSKESPKTKSDESGEEKNGDEDCQRGGQKKKGNKHKWVPLQIDMKPEVPREKLASRPTRPPEPRHIPANRGEIKGSESATYVPVAPPTPAWQPEIKPEPAWHDQDETSSVKSDGAGGARASFRGRGRGRGRGRGRGRGGTRTHFDYQFGYRKFDGVEGPRTPKYMNNITYYFDNVSSTELYSVDQELLKDYIKRQIEYYFSVDNLERDFFLRRKMDADGFLPITLIASFHRVQALTTDISLIFAALKDSKVVEIVDEKVRRREEPEKWPLPPIVDYSQTDFSQLLNCPEFVPRQHYQKETESAPGSPRAVTPVPTKTEEVSNLKTLPKGLSASLPDLDSENWIEVKKRPRPSPARPKKSEESRFSHLTSLPQQLPSQQLMSKDQDEQEELDFLFDEEMEQMDGRKNTFTAWSDEESDYEIDDRDVNKILIVTQTPHYMRRHPGGDRTGNHTSRAKMSAELAKVINDGLFYYEQDLWAEKFEPEYSQIKQEVENFKKVNMISREQFDTLTPEPPVDPNQEVPPGPPRFQQVPTDALANKLFGAPEPSTIARSLPTTVPESPNYRNTRTPRTPRTPQLKDSSQTSRFYPVVKEGRTLDAKMPRKRKTRHSSNPPLESHVGWVMDSREHRPRTASISSSPSEGTPTVGSYGCTPQSLPKFQHPSHELLKENGFTQHVYHKYRRRCLNERKRLGIGQSQEMNTLFRFWSFFLRDHFNKKMYEEFKQLALEDAKEGYRYGLECLFRYYSYGLEKKFRLDIFKDFQEETVKDYEAGQLYGLEKFWAFLKYSKAKNLDIDPKLQEYLGKFRRLEDFRVDPPMGEEGNHKRHSVVAGGGGGEGRKRCPSQSSSRPAAMISQPPTPPTGQPVREDAKWTSQHSNTQTLGK

SEQ ID NO: 866218 - protein, 138 aa, Homo sapiens
  misc_feature (35)..(35): Xaa can be any naturally occurring amino acid
ELGAGGNPCQLVKPCGRKVYVDIGVYLNLFLQPLXCLGWAVNDNGMAGVCCSHHALLPSSGRRKPKDLKLGFGGRFQPLPTPLAPHPLLPSPERRCFYQERLLKDVLFYFSLTFPSLKKWGKKKKKDKIDHKRPKKKK

SEQ ID NO: 866219 - protein, 1192 aa, Homo sapiens
RREARARPPPAADRVVCLARRASPPSVHIAAAPEPGSPGRPGGGGEGGTGLEACRARGGGVLRGTGGGGRTPRRPGLQSGGPSSPPAPLVGLGFTAAASNWEGAAPRVNPDPSLQGLGPSAPEEGVAGALLAKFEAGEAASGAPGFSGGAGAQMATQVEPLLPGGATLLQAEEHGGLVRKKPPPAPEGKGEPGPNDVRGGEPDGSARRPRPPCAKPHKEGTGQQERESPRPLQLPGAEGPAISDGEEGGGEPGAGGGAAGAAGAGRRDFVEAPPPKVNPWTKNALPPVLTTVNGQSPPEHSAPAKVVRAAVPKQRKGSKVGDFGDAINWPTPGEIAHKSVQPQSHKPQPTRKLPPKKDMKEQEKGEGSDSKESPKTKSDESGEEKNGDEDCQRGGQKKKGNKHKWVPLQIDMKPEVPREKLASRPTRPPEPRHIPANRGEIKGSESATYVPVAPPTPAWQPRKFDGVEGPRTPKYMNNITYYFDNVSSTELYSVDQELLKDYIKRQIEYYFSVDNLERDFFLRRKMDADGFLPITLIASFHRVQALTTDISLIFAALKDSKVVEIVDEKVRRREEPEKWPLPPIVDYSQTDFSQLLNCPEFVPRQHYQKETESAPGSPRAVTPVPTKTEEVSNLKTLPKGLSASLPDLDSENWIEVKKRPRPSPARPKKSEESRFSHLTSLPQQLPSQQLMSKDQDEQEELDFLFDEEMEQMDGRKNTFTAWSDEESDYEIDDRDVNKILIVTQTPHYMRRHPGGDRTGNHTSRAKMSAELAKVINDGLFYYEQDLWAEKFEPEYSQIKQEVENFKKVNMISREQFDTLTPEPPVDPNQEVPPGPPRFQQVPTDALANKLFGAPEPSTIARSLPTTVPESPNYRNTRTPRTPRTPQLKDSSQTSRFYPVVKEGRTLDAKMPRKRKTRHSSNPPLESHVGWVMDSREHRPRTASISSSPSEGTPTVGSYGCTPQSLPKFQHPSHELLKENGFTQHVYHKYRRRCLNERKRLGIGQSQEMNTLFRFWSFFLRDHFNKKMYEEFKQLALEDAKEGYRYGLECLFRYYSYGLEKKFRLDIFKDFQEETVKDYEAGQLYGLEKFWAFLKYSKAKNLDIDPKLQEYLGKFRRLEDFRVDPPMGEEGNHKRHSVVAGGGGGEGRKRCPSQSSSRPAAMISQPPTPPTGQPVREDAKWTSQHSNTQTLGK

SEQ ID NO: 866220 - protein, 1223 aa, Homo sapiens
RREARARPPPAADRVVCLARRASPPSVHIAAAPEPGSPGRPGGGGEGGTGLEACRARGGGVLRGTGGGGRTPRRPGLQSGGPSSPPAPLVGLGFTAAASNWEGAAPRVNPDPSLQGLGPSAPEEGVAGALLAKFEAGEAASGAPGFSGGAGAQMATQVEPLLPGGATLLQAEEHGGLVRKKPPPAPEGKGEPGPNDVRGGEPDGSARRPRPPCAKPHKEGTGQQERESPRPLQLPGAEGPAISDGEEGGGEPGAGGGAAGAAGAGRRDFVEAPPPKVNPWTKNALPPVLTTVNGQSPPEHSAPAKVVRAAVPKQRKGSKVGDFGDAINWPTPGEIAHKSVQPQSHKPQPTRKLPPKKDMKEQEKGEGSDSKESPKTKSDESGEEKNGDEDCQRGGQKKKGNKHKWVPLQIDMKPEVPREKLASRPTRPPEPRHIPANRGEIKGSESATYVPVAPPTPAWQPEIKPEPAWHDQDETSSVKSDGAAHFDYQFGYRKFDGVEGPRTPKYMNNITYYFDNVSSTELYSVDQELLKDYIKRQIEYYFSVDNLERDFFLRRKMDADGFLPITLIASFHRVQALTTDISLIFAALKDSKVVEIVDEKVRRREEPEKWPLPPIVDYSQTDFSQLLNCPEFVPRQHYQKETESAPGSPRAVTPVPTKTEEVSNLKTLPKGLSASLPDLDSENWIEVKKRPRPSPARPKKSEESRFSHLTSLPQQLPSQQLMSKDQDEQEELDFLFDEEMEQMDGRKNTFTAWSDEESDYEIDDRDVNKILIVTQTPHYMRRHPGGDRTGNHTSRAKMSAELAKVINDGLFYYEQDLWAEKFEPEYSQIKQEVENFKKVNMISREQFDTLTPEPPVDPNQEVPPGPPRFQQVPTDALANKLFGAPEPSTIARSLPTTVPESPNYRNTRTPRTPRTPQLKDSSQTSRFYPVVKEGRTLDAKMPRKRKTRHSSNPPLESHVGWVMDSREHRPRTASISSSPSEGTPTVGSYGCTPQSLPKFQHPSHELLKENGFTQHVYHKYRRRCLNERKRLGIGQSQEMNTLFRFWSFFLRDHFNKKMYEEFKQLALEDAKEGYRYGLECLFRYYSYGLEKKFRLDIFKDFQEETVKDYEAGQLYGLEKFWAFLKYSKAKNLDIDPKLQEYLGKFRRLEDFRVDPPMGEEGNHKRHSVVAGGGGGEGRKRCPSQSSSRPAAMISQPPTPPTGQPVREDAKWTSQHSNTQTLGK

SEQ ID NO: 866221 - protein, 1272 aa, Homo sapiens
RREARARPPPAADRVVCLARRASPPSVHIAAAPEPGSPGRPGGGGEGGTGLEACRARGGGVLRGTGGGGRTPRRPGLQSGGPSSPPAPLVGLGFTAAASNWEGAAPRVNPDPSLQGLGPSAPEEGVAGALLAKFEAGEAASGAPGFSGGAGAQMATQVEPLLPGGATLLQAEEHGGLVRKKPPPAPEGKGEPGPNDVRGGEPDGSARRPRPPCAKPHKEGTGQQERESPRPLQLPGAEGPAISDGEEGGGEPGAGGGAAGAAGAGRRDFVEAPPPKVNPWTKNALPPVLTTVNGQSPPEHSAPAKVVRAAVPKQRKGSKVGDFGDAINWPTPGEIAHKSVQMKLLRLAEVNYYALDGQVGIGSQPQSHKPQPTRKLPPKKDMKEQEKGEGSDSKESPKTKSDESGEEKNGDEDCQRGGQKKKGNKHKWVPLQIDMKPEVPREKLASRPTRPPEPRHIPANRGEIKGSESATYVPVAPPTPAWQPEIKPEPAWHDQDETSSVKSDGAGGARASFRGRGRGRGRGRGRGRGGTRTHFDYQFGYRKFDGVEGPRTPKYMNNITYYFDNVSSTELYSVDQELLKDYIKRQIEYYFSVDNLERDFFLRRKMDADGFLPITLIASFHRVQALTTDISLIFAALKDSKVVEIVDEKVRRREEPEKWPLPPIVDYSQTDFSQLLNCPEFVPRQHYQKETESAPGSPRAVTPVPTKTEEVSNLKTLPKGLSASLPDLDSENWIEVKKRPRPSPARPKKSEESRFSHLTSLPQQLPSQQLMSKDQDEQEELDFLFDEEMEQMDGRKNTFTAWSDEESDYEIDDRDVNKILIVTQTPHYMRRHPGGDRTGNHTSRAKMSAELAKVINDGLFYYEQDLWAEKFEPEYSQIKQEVENFKKVNMISREQFDTLTPEPPVDPNQEVPPGPPRFQQVPTDALANKLFGAPEPSTIARSLPTTVPESPNYRNTRTPRTPRTPQLKDSSQTSRFYPVVKEGRTLDAKMPRKRKTRHSSNPPLESHVGWVMDSREHRPRTASISSSPSEGTPTVGSYGCTPQSLPKFQHPSHELLKENGFTQHVYHKYRRRCLNERKRLGIGQSQEMNTLFRFWSFFLRDHFNKKMYEEFKQLALEDAKEGYRYGLECLFRYYSYGLEKKFRLDIFKDFQEETVKDYEAGQLYGLEKFWAFLKYSKAKNLDIDPKLQEYLGKFRRLEDFRVDPPMGEEGNHKRHSVVAGGGGGEGRKRCPSQSSSRPAAMISQPPTPPTGQPVREDAKWTSQHSNTQTLGK

SEQ ID NO: 866222 - protein, 1039 aa, Homo sapiens
NIIVELGLFRTRVTPGPGHSMLWRVLLSKRPPFPHPELDFQEAPIPSCPGRLPGRKNSVALAAAPRKEPTGDREKPLPFPVLAPFSNPEHSAPAKVVRAAVPKQRKGSKVGDFGDAINWPTPGEIAHKSVQPQSHKPQPTRKLPPKKDMKEQEKGEGSDSKESPKTKSDESGEEKNGDEDCQRGGQKKKGNKHKWVPLQIDMKPEVPREKLASRPTRPPEPRHIPANRGEIKGSESATYVPVAPPTPAWQPEIKPEPAWHDQDETSSVKSDGAGGARASFRGRGRGRGRGRGRGRGGTRTHFDYQFGYRKFDGVEGPRTPKYMNNITYYFDNVSSTELYSVDQELLKDYIKRQIEYYFSVDNLERDFFLRRKMDADGFLPITLIASFHRVQALTTDISLIFAALKDSKVVEIVDEKVRRREEPEKWPLPPIVDYSQTDFSQLLNCPEFVPRQHYQKETESAPGSPRAVTPVPTKTEEVSNLKTLPKGLSASLPDLDSENWIEVKKRPRPSPARPKKSEESRFSHLTSLPQQLPSQQLMSKDQDEQEELDFLFDEEMEQMDGRKNTFTAWSDEESDYEIDDRDVNKILIVTQTPHYMRRHPGGDRTGNHTSRAKMSAELAKVINDGLFYYEQDLWAEKFEPEYSQIKQEVENFKKVNMISREQFDTLTPEPPVDPNQEVPPGPPRFQQVPTDALANKLFGAPEPSTIARSLPTTVPESPNYRNTRTPRTPRTPQLKDSSQTSRFYPVVKEGRTLDAKMPRKRKTRHSSNPPLESHVGWVMDSREHRPRTASISSSPSEGTPTVGSYGCTPQSLPKFQHPSHELLKENGFTQHVYHKYRRRCLNERKRLGIGQSQEMNTLFRFWSFFLRDHFNKKMYEEFKQLALEDAKEGYRYGLECLFRYYSYGLEKKFRLDIFKDFQEETVKDYEAGQLYGLEKFWAFLKYSKAKNLDIDPKLQEYLGKFRRLEDFRVDPPMGEEGNHKRHSVVAGGGGGEGRKRCPSQSSSRPAAMISQPPTPPTGQPVREDAKWTSQHSNTQTLGK

SEQ ID NO: 866223 - protein, 1241 aa, Homo sapiens
RREARARPPPAADRVVCLARRASPPSVHIAAAPEPGSPGRPGGGGEGGTGLEACRARGGGVLRGTGGGGRTPRRPGLQSGGPSSPPAPLVGLGFTAAASNWEGAAPRVNPDPSLQGLGPSAPEEGVAGALLAKFEAGEAASGAPGFSGGAGAQMATQVEPLLPGGATLLQAEEHGGLVRKKPPPAPEGKGEPGPNDVRGGEPDGSARRPRPPCAKPHKEGTGQQERESPRPLQLPGAEGPAISDGEEGGGEPGAGGGAAGAAGAGRRDFVEAPPPKVNPWTKNALPPVLTTVNGQSPPEHSAPAKVVRAAVPKQRKGSKVGDFGDAINWPTPGEIAHKSVQPQSHKPQPTRKLPPKKDMKEQEKGEGSDSKESPKTKSDESGEEKNGDEDCQRGGQKKKGNKHKWVPLQIDMKPEVPREKLASRPTRPPEPRHIPANRGEIKGSESATYVPVAPPTPAWQPEIKPEPAWHDQDETSSVKSDGAGGARASFRGRGRGRGRGRGRGRGGTRTHFDYQFGYRKFDGVEGPRTPKYMNNITYYFDNVSSTELYSVDQELLKDYIKRQIEYYFSVDNLERDFFLRRKMDADGFLPITLIASFHRVQALTTDISLIFAALKDSKVVEIVDEKVRRREEPEKWPLPPIVDYSQTDFSQLLNCPEFVPRQHYQKETESAPGSPRAVTPVPTKTEEVSNLKTLPKGLSASLPDLDSENWIEVKKRPRPSPARPKKSEESRFSHLTSLPQQLPSQQLMSKDQDEQEELDFLFDEEMEQMDGRKNTFTAWSDEESDYEIDDRDVNKILIVTHPGGDRTGNHTSRAKMSAELAKVINDGLFYYEQDLWAEKFEPEYSQIKQEVENFKKVNMISREQFDTLTPEPPVDPNQEVPPGPPRFQQVPTDALANKLFGAPEPSTIARSLPTTVPESPNYRNTRTPRTPRTPQLKDSSQTSRFYPVVKEGRTLDAKMPRKRKTRHSSNPPLESHVGWVMDSREHRPRTASISSSPSEGTPTVGSYGCTPQSLPKFQHPSHELLKENGFTQHVYHKYRRRCLNERKRLGIGQSQEMNTLFRFWSFFLRDHFNKKMYEEFKQLALEDAKEGYRYGLECLFRYYSYGLEKKFRLDIFKDFQEETVKDYEAGQLYGLEKFWAFLKYSKAKNLDIDPKLQEYLGKFRRLEDFRVDPPMGEEGNHKRHSVVAGGGGGEGRKRCPSQSSSRPAAMISQPPTPPTGQPVREDAKWTSQHSNTQTLGK

SEQ ID NO: 866224 - protein, 738 aa, Homo sapiens
KANTFWPRSFWTTLLLATLLLATLLLATLLLATLLLATLLLATLLKDYIKRQIEYYFSVDNLERDFFLRRKMDADGFLPITLIASFHRVQALTTDISLIFAALKDSKVVEIVDEKVRRREEPEKWPLPPIVDYSQTDFSQLLNCPEFVPRQHYQKETESAPGSPRAVTPVPTKTEEVSNLKTLPKGLSASLPDLDSENWIEVKKRPRPSPARPKKSEESRFSHLTSLPQQLPSQQLMSKDQDEQEELDFLFDEEMEQMDGRKNTFTAWSDEESDYEIDDRDVNKILIVTQTPHYMRRHPGGDRTGNHTSRAKMSAELAKVINDGLFYYEQDLWAEKFEPEYSQIKQEVENFKKVNMISREQFDTLTPEPPVDPNQEVPPGPPRFQQVPTDALANKLFGAPEPSTIARSLPTTVPESPNYRNTRTPRTPRTPQLKDSSQTSRFYPVVKEGRTLDAKMPRKRKTRHSSNPPLESHVGWVMDSREHRPRTASISSSPSEGTPTVGSYGCTPQSLPKFQHPSHELLKENGFTQHVYHKYRRRCLNERKRLGIGQSQEMNTLFRFWSFFLRDHFNKKMYEEFKQLALEDAKEGYRYGLECLFRYYSYGLEKKFRLDIFKDFQEETVKDYEAGQLYGLEKFWAFLKYSKAKNLDIDPKLQEYLGKFRRLEDFRVDPPMGEEGNHKRHSVVAGGGGGEGRKRCPSQSSSRPAAMISQPPTPPTGQPVREDAKWTSQHSNTQTLGK

SEQ ID NO: 866225 - protein, 1249 aa, Homo sapiens
RREARARPPPAADRVVCLARRASPPSVHIAAAPEPGSPGRPGGGGEGGTGLEACRARGGGVLRGTGGGGRTPRRPGLQSGGPSSPPAPLVGLGFTAAASNWEGAAPRVNPDPSLQGLGPSAPEEGVAGALLAKFEAGEAASGAPGFSGGAGAQMATQVEPLLPGGATLLQAEEHGGLVRKKPPPAPEGKGEPGPNDVRGGEPDGSARRPRPPCAKPHKEGTGQQERESPRPLQLPGAEGPAISDGEEGGGEPGAGGGAAGAAGAGRRDFVEAPPPKVNPWTKNALPPVLTTVNGQSPPEHSAPAKVVRAAVPKQRKGSKVGDFGDAINWPTPGEIAHKSVQPQSHKPQPTRKLPPKKDMKEQEKGEGSDSKESPKTKSDESGEEKNGDEDCQRGGQKKKGNKHKWVPLQIDMKPEVPREKLASRPTRPPEPRHIPANRGEIKGSESATYVPVAPPTPAWQPEIKPEPAWHDQDETSSVKSDGAGGARASFRGRGRGRGRGRGRGRGGTRTHFDYQFGYRKFDGVEGPRTPKYMNNITYYFDNVSSTELYSVDQELLKDYIKRQIEYYFSVDNLERDFFLRRKMDADGFLPITLIASFHRVQALTTDISLIFAALKDSKVVEIVDEKVRRREEPEKWPLPPIVDYSQTDFSQLLNCPEFVPRQHYQKETESAPGSPRAVTPVPTKTEEVSNLKTLPKGLSASLPDLDSENWIEVKKRPRPSPARPKKSEESRFSHLTSLPQQLPSQQLMSKDQDEQEELDFLFDEEMEQMDGRKNTFTAWSDEESDYEIDDRDVNKILIVTQTPHYMRRHPGGDRTGNHTSRAKMSAELAKVINDGLFYYEQDLWAEKFEPEYSQIKQEVENFKKVNMISREQFDTLTPEPPVDPNQEVPPGPPRFQQVPTDALANKLFGAPEPSTIARSLPTTVPESPNYRNTRTPRTPRTPQLKDSSQTSRFYPVVKEGRTLDAKMPRKRKTRHSSNPPLESHVGWVMDSREHRPRTASISSSPSEGTPTVGSYGCTPQSLPKFQHPSHELLKENGFTQHVYHKYRRRCLNERKRLGIGQSQEMNTLFRFWSFFLRDHFNKKMYEEFKQLALEDAKEGYRYGLECLFRYYSYGLEKKFRLDIFKDFQEETVKDYEAGQLYGLEKFWAFLKYSKAKNLDIDPKLQEYLGKFRRLEDFRVDPPMGEEGNHKRHSVVAGGGGGEGRKRCPSQSSSRPAAMISQPPTPPTGQPVREDAKWTSQHSNTQTLGK

SEQ ID NO: 866226 - protein, 288 aa, Homo sapiens
MCCRYASGNTNVTHVSDRPLESHVGWVMDSREHRPRTASISSSPSEGTPTVGSYGCTPQSLPKFQHPSHELLKENGFTQHVYHKYRRRCLNERKRLGIGQSQEMNTLFRFWSFFLRDHFNKKMYEEFKQLALEDAKEGYRYGLECLFRYYSYGLEKKFRLDIFKDFQEETVKDYEAGQLYGLEKFWAFLKYSKAKNLDIDPKLQEYLGKFRRLEDFRVDPPMGEEGNHKRHSVVAGGGGGEGRKRCPSQSSSRPAAMISQPPTPPTGQPVREDAKWTSQHSNTQTLGK

SEQ ID NO: 866227 - protein, 185 aa, Homo sapiens [sequence omitted]

SEQ ID NO: 866228 - protein, 194 aa, Homo sapiens
EIVSSCPEHSCPVSSTFVSFLRDHFNKKMYEEFKQLALEDAKEGYRYGLECLFRYYSYGLEKKFRLDIFKDFQEETVKDYEAGQLYGLEKFWAFLKYSKAKNLDIDPKLQEYLGKFRRLEDFRVDPPMGEEGNHKRHSVVAGGGGGEGRKRCPSQSSSRPAAMISQPPTPPTGQPVREDAKWTSQHSNTQTLGK

SEQ ID NO: 866229 - protein, 1022 aa, Homo sapiens
RREARARPPPAADRVVCLARRASPPSVHIAAAPEPGSPGRPGGGGEGGTGLEACRARGGGVLRGTGGGGRTPRRPGLQSGGPSSPPAPLVGLGFTAAASNWEGAAPRVNPDPSLQGLGPSAPEEGVAGALLAKFEAGEAASGAPGFSGGAGAQMATQVEPLLPGGATLLQAEEHGGLVRKKPPPAPEGKGEPGPNDVRGGEPDGSARRPRPPCAKPHKEGTGQQERESPRPLQLPGAEGPAISDGEEGGGEPGAGGGAAGAAGAGRRDFVEAPPPKVNPWTKNALPPVLTTVNGQSPPEHSAPAKVVRAAVPKQRKGSKVGDFGDAINWPTPGEIAHKSVQPQSHKPQPTRKLPPKKDMKEQEKGEGSDSKESPKTKSDESGEEKNGDEDCQRGGQKKKGNKHKWVPLQIDMKPEVPREKLASRPTRPPEPRHIPANRGEIKGSESATYVPVAPPTPAWQPEIKPEPAWHDQDETSSVKSDGAGGARASFRGRGRGRGRGRGRGRGGTRTHFDYQFGYRKFDGVEGPRTPKYMNNITYYFDNVSSTELYSVDQELLKDYIKRQIEYYFSVDNLERDFFLRRKMDADGFLPITLIASFHRVQALTTDISLIFAALKDSKVVEIVDEKVRRREEPEKWPLPPIVDYSQTDFSQLLNCPEFVPRQHYQKETESAPGSPRAVTPVPTKTEEVSNLKTLPKGLSASLPDLDSENWIEVKKRPRPSPARPKKSEESRFSHLTSLPQQLPSQQLMSKDQDEQEELDFLFDEEMEQMDGRKNTFTAWSDEESDYEIDDRDVNKILIVTQTPHYMRRHPGGDRTGNHTSRAKMSAELAKVINDGLFYYEQDLWAEKFEPEYSQIKQEVENFKKVNMISREQFDTLTPEPPVDPNQEVPPGPPRFQQVPTDALANKLFGAPEPSTIARSLPTTVPESPNYRNTRTPRTPRTPQLKDSSQTSRFYPVVKEGRTLDAKMPRKRKTRHSSNPPLESHVGWVMDSREHRPRTASISKMAPVCVSCFPKQALRATYL

SEQ ID NO: 866230 - protein, 1019 aa, Homo sapiens
  misc_feature (1005)..(1005): Xaa can be any naturally occurring amino acid
  misc_feature (1015)..(1015): Xaa can be any naturally occurring amino acid
RREARARPPPAADRVVCLARRASPPSVHIAAAPEPGSPGRPGGGGEGGTGLEACRARGGGVLRGTGGGGRTPRRPGLQSGGPSSPPAPLVGLGFTAAASNWEGAAPRVNPDPSLQGLGPSAPEEGVAGALLAKFEAGEAASGAPGFSGGAGAQMATQVEPLLPGGATLLQAEEHGGLVRKKPPPAPEGKGEPGPNDVRGGEPDGSARRPRPPCAKPHKEGTGQQERESPRPLQLPGAEGPAISDGEEGGGEPGAGGGAAGAAGAGRRDFVEAPPPKVNPWTKNALPPVLTTVNGQSPPEHSAPAKVVRAAVPKQRKGSKVGDFGDAINWPTPGEIAHKSVQPQSHKPQPTRKLPPKKDMKEQEKGEGSDSKESPKTKSDESGEEKNGDEDCQRGGQKKKGNKHKWVPLQIDMKPEVPREKLASRPTRPPEPRHIPANRGEIKGSESATYVPVAPPTPAWQPEIKPEPAWHDQDETSSVKSDGAGGARASFRGRGRGRGRGRGRGRGGTRTHFDYQFGYRKFDGVEGPRTPKYMNNITYYFDNVSSTELYSVDQELLKDYIKRQIEYYFSVDNLERDFFLRRKMDADGFLPITLIASFHRVQALTTDISLIFAALKDSKVVEIVDEKVRRREEPEKWPLPPIVDYSQTDFSQLLNCPEFVPRQHYQKETESAPGSPRAVTPVPTKTEEVSNLKTLPKGLSASLPDLDSENWIEVKKRPRPSPARPKKSEESRFSHLTSLPQQLPSQQLMSKDQDEQEELDFLFDEEMEQMDGRKNTFTAWSDEESDYEIDDRDVNKILIVTQTPHYMRRHPGGDRTGNHTSRAKMSAELAKVINDGLFYYEQDLWAEKFEPEYSQIKQEVENFKKVNMISREQFDTLTPEPPVDPNQEVPPGPPRFQQVPTDALANKLFGAPEPSTIARSLPTTVPESPNYRNTRTPRTPRTPQLKDSSQTSRFYPVVKEGRTLDAKMPRKRKTRHSSNPPLESHVGWVMDSREHRPRTASIRGPXPSERGRLQVXKLLV

SEQ ID NO: 866231 - protein, 618 aa, Homo sapiens
RREARARPPPAADRVVCLARRASPPSVHIAAAPEPGSPGRPGGGGEGGTGLEACRARGGGVLRGTGGGGRTPRRPGLQSGGPSSPPAPLVGLGFTAAASNWEGAAPRVNPDPSLQGLGPSAPEEGVAGALLAKFEAGEAASGAPGFSGGAGAQMATQVEPLLPGGATLLQAEEHGGLVRKKPPPAPEGKGEPGPNDVRGGEPDGSARRPRPPCAKPHKEGTGQQERESPRPLQLPGAEGPAISDGEEGGGEPGAGGGAAGAAGAGRRDFVEAPPPKVNPWTKNALPPVLTTVNGQSPPEHSAPAKVVRAAVPKQRKGSKVGDFGDAINWPTPGEIAHKSVQPQSHKPQPTRKLPPKKDMKEQEKGEGSDSKESPKTKSDESGEEKNGDEDCQRGGQKKKGNKHKWVPLQIDMKPEVPREKLASRPTRPPEPRHIPANRGEIKGSESATYVPVAPPTPAWQPEIKPEPAWHDQDETSSVKSDGAGGARASFRGRGRGRGRGRGRGRGGTRTHFDYQFGYRKFDGVEGPRTPKYMNNITYYFDNVSSTELYSVDQELLKDYIKRQIEYYFSVDNLERDFFLRRKMDADGFLPITLIASFHRVQALTTDISLIFAVCLPPW

SEQ ID NO: 866232 - protein, 301 aa, Homo sapiens
RREARARPPPAADRVVCLARRASPPSVHIAAAPEPGSPGRPGGGGEGGTGLEACRARGGGVLRGTGGGGRTPRRPGLQSGGPSSPPAPLVGLGFTAAASNWEGAAPRVNPDPSLQGLGPSAPEEGVAGALLAKFEAGEAASGAPGFSGGAGAQMATQVEPLLPGGATLLQAEEHGGLVRKKPPPAPEGKGEPGPNDVRGGEPDGSARRPRPPCAKPHKEGTGQQERESPRPLQLPGAEGPAISDGEEGGGEPGAGGGAAGAAGAGRRDFVEAPPPKVNPWTKNALPPVLTTVNGQSPPDTL

SEQ ID NO: 866233 - protein, 1042 aa, Homo sapiens
KIDVMSPVPVLLVTWVTPGPGHSMLWRVLLSKRPPFPHPELDFQEAPIPSCPGRLPGRKNSVALAAAPRKEPTGDREKPLPFPVLAPFSNPEHSAPAKVVRAAVPKQRKGSKVGDFGDAINWPTPGEIAHKSVQPQSHKPQPTRKLPPKKDMKEQEKGEGSDSKESPKTKSDESGEEKNGDEDCQRGGQKKKGNKHKWVPLQIDMKPEVPREKLASRPTRPPEPRHIPANRGEIKGSESATYVPVAPPTPAWQPEIKPEPAWHDQDETSSVKSDGAGGARASFRGRGRGRGRGRGRGRGGTRTHFDYQFGYRKFDGVEGPRTPKYMNNITYYFDNVSSTELYSVDQELLKDYIKRQIEYYFSVDNLERDFFLRRKMDADGFLPITLIASFHRVQALTTDISLIFAALKDSKVVEIVDEKVRRREEPEKWPLPPIVDYSQTDFSQLLNCPEFVPRQHYQKETESAPGSPRAVTPVPTKTEEVSNLKTLPKGLSASLPDLDSENWIEVKKRPRPSPARPKKSEESRFSHLTSLPQQLPSQQLMSKDQDEQEELDFLFDEEMEQMDGRKNTFTAWSDEESDYEIDDRDVNKILIVTQTPHYMRRHPGGDRTGNHTSRAKMSAELAKVINDGLFYYEQDLWAEKFEPEYSQIKQEVENFKKVNMISREQFDTLTPEPPVDPNQEVPPGPPRFQQVPTDALANKLFGAPEPSTIARSLPTTVPESPNYRNTRTPRTPRTPQLKDSSQTSRFYPVVKEGRTLDAKMPRKRKTRHSSNPPLESHVGWVMDSREHRPRTASISSSPSEGTPTVGSYGCTPQSLPKFQHPSHELLKENGFTQHVYHKYRRRCLNERKRLGIGQSQEMNTLFRFWSFFLRDHFNKKMYEEFKQLALEDAKEGYRYGLECLFRYYSYGLEKKFRLDIFKDFQEETVKDYEAGQLYGLEKFWAFLKYSKAKNLDIDPKLQEYLGKFRRLEDFRVDPPMGEEGNHKRHSVVAGGGGGEGRKRCPSQSSSRPAAMISQPPTPPTGQPVREDAKWTSQHSNTQTLGK

SEQ ID NO: 866234 - protein, 1249 aa, Homo sapiens; identical to SEQ ID NO: 866225

SEQ ID NO: 866235 - protein, 1182 aa, Homo sapiens
RREARARPPPAADRVVCLARRASPPSVHIAAAPEPGSPGRPGGGGEGGTGLEACRARGGGVLRGTGGGGRTPRRPGLQSGGPSSPPAPLVGLGFTAAASNWEGAAPRVNPDPSLQGLGPSAPEEGVAGALLAKFEAGEAASGAPGFSGGAGAQMATQVEPLLPGGATLLQAEEHGGLVRKKPPPAPEGKGEPGPNDVRGGEPDGSARRPRPPCAKPHKEGTGQQERESPRPLQLPGAEGPAISDGEEGGGEPGAGGGAAGAAGAGRRDFVEAPPPKVNPWTKNALPPVLTTVNGQSPPEHSAPAKVVRAAVPKQRKGSKVGDFGDAINWPTPGEIAHKSVQPQSHKPQPTRKLPPKKDMKEQEKGEGSDSKESPKTKSDESGEEKNGDEDCQRGGQKKKGNKHKWVPLQIDMKPEVPREKLASRPTRPPEPRHIPANRGEIKAHFDYQFGYRKFDGVEGPRTPKYMNNITYYFDNVSSTELYSVDQELLKDYIKRQIEYYFSVDNLERDFFLRRKMDADGFLPITLIASFHRVQALTTDISLIFAALKDSKVVEIVDEKVRRREEPEKWPLPPIVDYSQTDFSQLLNCPEFVPRQHYQKETESAPGSPRAVTPVPTKTEEVSNLKTLPKGLSASLPDLDSENWIEVKKRPRPSPARPKKSEESRFSHLTSLPQQLPSQQLMSKDQDEQEELDFLFDEEMEQMDGRKNTFTAWSDEESDYEIDDRDVNKILIVTQTPHYMRRHPGGDRTGNHTSRAKMSAELAKVINDGLFYYEQDLWAEKFEPEYSQIKQEVENFKKVNMISREQFDTLTPEPPVDPNQEVPPGPPRFQQVPTDALANKLFGAPEPSTIARSLPTTVPESPNYRNTRTPRTPRTPQLKDSSQTSRFYPVVKEGRTLDAKMPRKRKTRHSSNPPLESHVGWVMDSREHRPRTASISSSPSEGTPTVGSYGCTPQSLPKFQHPSHELLKENGFTQHVYHKYRRRCLNERKRLGIGQSQEMNTLFRFWSFFLRDHFNKKMYEEFKQLALEDAKEGYRYGLECLFRYYSYGLEKKFRLDIFKDFQEETVKDYEAGQLYGLEKFWAFLKYSKAKNLDIDPKLQEYLGKFRRLEDFRVDPPMGEEGNHKRHSVVAGGGGGEGRKRCPSQSSSRPAAMISQPPTPPTGQPVREDAKWTSQHSNTQTLGK

SEQ ID NO: 866236 - protein, 1227 aa, Homo sapiens
RREARARPPPAADRVVCLARRASPPSVHIAAAPEPGSPGRPGGGGEGGTGLEACRARGGGVLRGTGGGGRTPRRPGLQSGGPSSPPAPLVGLGFTAAASNWEGAAPRVNPDPSLQGLGPSAPEEGVAGALLAKFEAGEAASGAPGFSGGAGAQMATQVEPLLPGGATLLQAEEHGGLVRKKPPPAPEGKGEPGPNDVRGGEPDGSARRPRPPCAKPHKEGTGQQERESPRPLQLPGAEGPAISDGEEGGGEPGAGGGAAGAAGAGRRDFVEAPPPKVNPWTKNALPPVLTTVNGQSPPEHSAPAKVVRAAVPKQRKGSKPQSHKPQPTRKLPPKKDMKEQEKGEGSDSKESPKTKSDESGEEKNGDEDCQRGGQKKKGNKHKWVPLQIDMKPEVPREKLASRPTRPPEPRHIPANRGEIKGSESATYVPVAPPTPAWQPEIKPEPAWHDQDETSSVKSDGAGGARASFRGRGRGRGRGRGRGRGGTRTHFDYQFGYRKFDGVEGPRTPKYMNNITYYFDNVSSTELYSVDQELLKDYIKRQIEYYFSVDNLERDFFLRRKMDADGFLPITLIASFHRVQALTTDISLIFAALKDSKVVEIVDEKVRRREEPEKWPLPPIVDYSQTDFSQLLNCPEFVPRQHYQKETESAPGSPRAVTPVPTKTEEVSNLKTLPKGLSASLPDLDSENWIEVKKRPRPSPARPKKSEESRFSHLTSLPQQLPSQQLMSKDQDEQEELDFLFDEEMEQMDGRKNTFTAWSDEESDYEIDDRDVNKILIVTQTPHYMRRHPGGDRTGNHTSRAKMSAELAKVINDGLFYYEQDLWAEKFEPEYSQIKQEVENFKKVNMISREQFDTLTPEPPVDPNQEVPPGPPRFQQVPTDALANKLFGAPEPSTIARSLPTTVPESPNYRNTRTPRTPRTPQLKDSSQTSRFYPVVKEGRTLDAKMPRKRKTRHSSNPPLESHVGWVMDSREHRPRTASISSSPSEGTPTVGSYGCTPQSLPKFQHPSHELLKENGFTQHVYHKYRRRCLNERKRLGIGQSQEMNTLFRFWSFFLRDHFNKKMYEEFKQLALEDAKEGYRYGLECLFRYYSYGLEKKFRLDIFKDFQEETVKDYEAGQLYGLEKFWAFLKYSKAKNLDIDPKLQEYLGKFRRLEDFRVDPPMGEEGNHKRHSVVAGGGGGEGRKRCPSQSSSRPAAMISQPPTPPTGQPVREDAKWTSQHSNTQTLGK

SEQ ID NO: 866237 - protein, 967 aa, Homo sapiens
SSLLRRCRPCWESRRAEHSAPAKVVRAAVPKQRKGSKVGDFGDAINWPTPGEIAHKSVQPQSHKPQPTRKLPPKKDMKEQEKGEGSDSKESPKTKSDESGEEKNGDEDCQRGGQKKKGNKHKWVPLQIDMKPEVPREKLASRPTRPPEPRHIPANRGEIKGSESATYVPVAPPTPAWQPEIKPEPAWHDQDETSSVKSDGAGGARASFRGRGRGRGRGRGRGRGGTRTHFDYQFGYRKFDGVEGPRTPKYMNNITYYFDNVSSTELYSVDQELLKDYIKRQIEYYFSVDNLERDFFLRRKMDADGFLPITLIASFHRVQALTTDISLIFAALKDSKVVEIVDEKVRRREEPEKWPLPPIVDYSQTDFSQLLNCPEFVPRQHYQKETESAPGSPRAVTPVPTKTEEVSNLKTLPKGLSASLPDLDSENWIEVKKRPRPSPARPKKSEESRFSHLTSLPQQLPSQQLMSKDQDEQEELDFLFDEEMEQMDGRKNTFTAWSDEESDYEIDDRDVNKILIVTQTPHYMRRHPGGDRTGNHTSRAKMSAELAKVINDGLFYYEQDLWAEKFEPEYSQIKQEVENFKKVNMISREQFDTLTPEPPVDPNQEVPPGPPRFQQVPTDALANKLFGAPEPSTIARSLPTTVPESPNYRNTRTPRTPRTPQLKDSSQTSRFYPVVKEGRTLDAKMPRKRKTRHSSNPPLESHVGWVMDSREHRPRTASISSSPSEGTPTVGSYGCTPQSLPKFQHPSHELLKENGFTQHVYHKYRRRCLNERKRLGIGQSQEMNTLFRFWSFFLRDHFNKKMYEEFKQLALEDAKEGYRYGLECLFRYYSYGLEKKFRLDIFKDFQEETVKDYEAGQLYGLEKFWAFLKYSKAKNLDIDPKLQEYLGKFRRLEDFRVDPPMGEEGNHKRHSVVAGGGGGEGRKRCPSQSSSRPAAMISQPPTPPTGQPVREDAKWTSQHSNTQTLGK

SEQ ID NO: 866238 - protein, 1231 aa, Homo sapiens
RREARARPPPAADRVVCLARRASPPSVHIAAAPEPGSPGRPGGGGEGGTGLEACRARGGGVLRGTGGGGRTPRRPGLQSGGPSSPPAPLVGLGFTAAASNWEGAAPRVNPDPSLQGLGPSAPEEGVAGALLAKFEAGEAASGAPGFSGGAGAQMATQVEPLLPGGATLLQAEEHGGLVRKKPPPAPEGKGEPGPNDVRGGEPDGSARRPRPPCAKPHKEGTGQQERESPRPLQLPGAEGPAISDGEEGGGEPGAGGGAAGAAGAGRRDFVEAPPPKVNPWTKNALPPVLTTVNGQSPPEHSAPAKVVRAAVPKQRKGSKVGDFGDAINWPTPGEIAHKSVQPQSHKPQPTRKLPPKKDMKEQEKGEGSDSKESPKTKSDESGEEKNGDEDCQRGGQKKKGNKHKWVPLQIDMKPEVPREKLASRPTRPPEPRHIPANRGEIKGSESATYVPVAPPTPAWQPEIKPEPAWHDQDETSSVKSDGAGGARASFRGRGRGRGRGRGRGRGGTRTHFDYQFGYRKFDGVEGPRTPKYMNNITYYFDNVSSTELYSVDQELLKDYIKRQIEYYFSVDNLERDFFLRRKMDADGFLPITLIASFHRVQALTTDISLIFAALKDSKVVEIVDEKVRRREEPEKWPLPPIVDYSQTDFSQLLNCPEFVPRQHYQKETESAPGSPRAVTPVPTKTEEVSNLKTLPKGLSASLPDLDSENWIEVKKRPRPSPARPKKSEESRFSHLTSLPQQLPSQQLMSKDQDEQEELDFLFDEEMEQMDGRKNTFTAWSDEESDYEIDDRDVNKILIVTQTPHYMRRHPGGDRTGNHTSRAKMSAELAKVINDGLFYYEQDLWAEKFEPEYSQIKQEVENFKKVNMISREQFDTLTPEPPVDPNQEVPPGPPRFQQVPTDALANKLFGAPEPSTIARSLPTTVPESPNYRNTRTPRTPRTPQLKDSSQTSRFYPVVKEGRTLDAKMPRKRKTRHSSNPPLESHVGWVMDSREHRPRTASISSSPSEGTPTVGSYGCTPQSLPKFQHPSHELLKERKRLGIGQSQEMNTLFRFWSFFLRDHFNKKMYEEFKQLALEDAKEGYRYGLECLFRYYSYGLEKKFRLDIFKDFQEETVKDYEAGQLYGLEKFWAFLKYSKAKNLDIDPKLQEYLGKFRRLEDFRVDPPMGEEGNHKRHSVVAGGGGGEGRKRCPSQSSSRPAAMISQPPTPPTGQPVREDAKWTSQHSNTQTLGK

SEQ ID NO: 866239 - protein, 1305 aa, Homo sapiens
RREARARPPPAADRVVCLARRASPPSVHIAAAPEPGSPGRPGGGGEGGTGLEACRARGGGVLRGTGGGGRTPRRPGLQSGGPSSPPAPLVGLGFTAAASNWEGAAPRVNPDPSLQGLGPSAPEEGVAGALLAKFEAGEAASGAPGFSGGAGAQMATQVEPLLPGGATLLQAEEHGGLVRKKPPPAPEGKGEPGPNDVRGGEPDGSARRPRPPCAKPHKEGTGQQERESPRPLQLPGAEGPAISDGEEGGGEPGAGGGAAGAAGAGRRDFVEAPPPKVNPWTKNALPPVLTTVNGQSPPEHSAPAKVVRAAVPKQRKGSKVGDFGDAINWPTPGEIAHKSVQPQSHKPQPTRKLPPKKDMKEQEKGEGSDSKESPKTKSDESGEEKNGDEDCQRGGQKKKGNKHKWVPLQIDMKPEVPREKLASRPTRPPEPRHIPANRGEIKGSESATYVPVAPPTPAWQPEIKPEPAWHDQDETSSVKSDGAGGARASFRGRGRGRGRGRGRGRGGTRTHFDYQFGYRKFDGVEGPRTPKYMNNITYYFDNVSSTELYSVDQELLKDYIKRQIEYYFSVDNLERDFFLRRKMDADGFLPITLIASFHRVQALTTDISLIFAALKDSKVVEIVDEKVRRREEPEKWPLPPIVDYSQTDFSQLLNCPEFVPRQHYQKETESAPGSPRAVTPVPTKTEEVSNLKTLPKGLSASLPDLDSENWIEVKKRPRPSPARPKKSEESRFSHLTSLPQQLPSQQLMSKDQDEQEELDFLFDEEMEQMDGRKNTFTAWSDEESDYEIDDRDVNKILIVTQTPHYMRRHPGGDRTGNHTSRAKMSAELAKVINDGLFYYEQDLWAEKFEPEYSQIKQEVENFKKVNMISREQFDTLTPEPPVDPNQEVPPGPPRFQQVPTDALANKLFGAPEPSTIARSLPTTVPESPNYRNTRTPRTPRTPQLKDSSQTSRFYPVVKEGRTLDAKMPRKRKTRHSSNPPLESHVGWVMDSREHRPRTASISSSPSEGTPTVGSYGCTPQSLPKFQHPSHELLKENGFTQHVYHKYRRRCLNERKRLGIGQSQEMNTLFRFWSFFLRDHFNKKMYEEFKQLALEDAKEGYRYGLECLFRYYSYGLEKKFRLDIFKDFQEETVKDYEAGQLYGLEKFWAFLKYSKAKNLDIDPKLQEYLGKFRRLEDFRVDPPIAQHCLIEGSGGTSGPQEHQPLDHLGFVITIFSPCCSHHALLPSSGRRKPKDLKLGFGGRFQPLPTPLAPHPLLPSPERRCFYQERLLKDVLFYFSLTFPSLKKWGKKKKKDKIDHKRPKKKK

SEQ ID NO: 866240 - protein, 261 aa, Homo sapiens
DAILAYRPRTASISSSPSEGTPTVGSYGCTPQSLPKFQHPSHELLKENGFTQHVYHKYRRRCLNERKRLGIGQSQEMNTLFRFWSFFLRDHFNKKMYEEFKQLALEDAKEGYRYGLECLFRYYSYGLEKKFRLDIFKDFQEETVKDYEAGQLYGLEKFWAFLKYSKAKNLDIDPKLQEYLGKFRRLEDFRVDPPMGEEGNHKRHSVVAGGGGGEGRKRCPSQSSSRPAAMISQPPTPPTGQPVREDAKWTSQHSNTQTLGK

SEQ ID NO: 866241 - protein, 102 aa, Homo sapiens
EESRSVARLECSGTISAHCNLRLPVSSVSCLSLPSSWDYRCALPRPANFCIFSRDGVSPCWPGWSRSLDLMIHPPPTPPTGQPVREDAKWTSQHSNTQTLGK

SEQ ID NO: 866242 - protein, 1008 aa, Homo sapiens
RREARARPPPAADRVVCLARRASPPSVHIAAAPEPGSPGRPGGGGEGGTGLEACRARGGGVLRGTGGGGRTPRRPGLQSGGPSSPPAPLVGLGFTAAASNWEGAAPRVNPDPSLQGLGPSAPEEGVAGALLAKFEAGEAASGAPGFSGGAGAQMATQVEPLLPGGATLLQAEEHGGLVRKKPPPAPEGKGEPGPNDVRGGEPDGSARRPRPPCAKPHKEGTGQQERESPRPLQLPGAEGPAISDGEEGGGEPGAGGGAAGAAGAGRRDFVEAPPPKVNPWTKNALPPVLTTVNGQSPPEHSAPAKVVRAAVPKQRKGSKVGDFGDAINWPTPGEIAHKSVQPQSHKPQPTRKLPPKKDMKEQEKGEGSDSKESPKTKSDESGEEKNGDEDCQRGGQKKKGNKHKWVPLQIDMKPEVPREKLASRPTRPPEPRHIPANRGEIKGSESATYVPVAPPTPAWQPEIKPEPAWHDQDETSSVKSDGAGGARASFRGRGRGRGRGRGRGRGGTRTHFDYQFGYRKFDGVEGPRTPKYMNNITYYFDNVSSTELYSVDQELLKDYIKRQIEYYFSVDNLERDFFLRRKMDADGFLPITLIASFHRVQALTTDISLIFAALKDSKVVEIVDEKVRRREEPEKWPLPPIVDYSQTDFSQLLNCPEFVPRQHYQKETESAPGSPRAVTPVPTKTEEVSNLKTLPKGLSASLPDLDSENWIEVKKRPRPSPARPKKSEESRFSHLTSLPQQLPSQQLMSKDQDEQEELDFLFDEEMEQMDGRKNTFTAWSDEESDYEIDDRDVNKILIVTQTPHYMRRHPGGDRTGNHTSRAKMSAELAKVINDGLFYYEQDLWAEKFEPEYSQIKQEVENFKKVNMISREQFDTLTPEPPVDPNQEVPPGPPRFQQVPTDALANKLFGAPEPSTIARSLPTTVPESPNYRNTRTPRTPRTPQLKDSSQTSRFYPVVKEGRTLDAKMPRKRKTRHSSNPPLESHVGWVMDSREHRPRTASIRDGTDCK

SEQ ID NO: 866243 - protein, 942 aa, Homo sapiens
RREARARPPPAADRVVCLARRASPPSVHIAAAPEPGSPGRPGGGGEGGTGLEACRARGGGVLRGTGGGGRTPRRPGLQSGGPSSPPAPLVGLGFTAAASNWEGAAPRVNPDPSLQGLGPSAPEEGVAGALLAKFEAGEAASGAPGFSGGAGAQMATQVEPLLPGGATLLQAEEHGGLVRKKPPPAPEGKGEPGPNDVRGGEPDGSARRPRPPCAKPHKEGTGQQERESPRPLQLPGAEGPAISDGEEGGGEPGAGGGAAGAAGAGRRDFVEAPPPKVNPWTKNALPPVLTTVNGQSPPEHSAPAKVVRAAVPKQRKGSKVGDFGDAINWPTPGEIAHKSVQPQSHKPQPTRKLPPKKDMKEQEKGEGSDSKESPKTKSDESGEEKNGDEDCQRGGQKKKGNKHKWVPLQIDMKPEVPREKLASRPTRPPEPRHIPANRGEIKGSESATYVPVAPPTPAWQPEIKPEPAWHDQDETSSVKSDGAGGARASFRGRGRGRGRGRGRGRGGTRTHFDYQFGYRKFDGVEGPRTPKYMNNITYYFDNVSSTELYSVDQELLKDYIKRQIEYYFSVDNLERDFFLRRKMDADGFLPITLIASFHRVQALTTDISLIFAALKDSKVVEIVDEKVRRREEPEKWPLPPIVDYSQTDFSQLLNCPEFVPRQHYQKETESAPGSPRAVTPVPTKTEEVSNLKTLPKGLSASLPDLDSENWIEVKKRPRPSPARPKKSEESRFSHLTSLPQQLPSQQLMSKDQDEQEELDFLFDEEMEQMDGRKNTFTAWSDEESDYEIDDRDVNKILIVTQTPHYMRRHPGGDRTGNHTSRAKMSAELAKVINDGLFYYEQDLWAEKFEPEYSQIKQEVENFKKVNMISREQFDTLTPEPPVDPNQEVPPGPPRFQQVLRMLAKLFVSEPHIAFYNMSRVQIRNRPGSEHVQIATRSVGKRR

SEQ ID NO: 866244 - protein, 123 aa, Homo sapiens
QEVENFKKVNMISREQFDTLTPEPPVDPNQEVPPGPPRFQQGEKQTPEILTWVRGSRALGLGAILGWMPQAFPCFLTPLSASAVPTDALANKLFGAPEPSTIARSLPTTVPESPNYRNTRTPR

SEQ ID NO: 866245 - protein, 167 aa, Homo sapiens
MADEATRRVVSEIPVLKTNAGPRDRELWVQRLKEEYQSLIRYVENNKNADNDWFRLESNKEGTRWFGKCWYIHDLLKYEFDIEFDIPITYPTTAPEIAVPELDGKTAKMYRGGKICLTDHFKPLWARNVPKFGLAHLMALGLGPWLAVEIPDLIQKGVIQHKEKCNQ

SEQ ID NO: 866246 - protein, 167 aa, Homo sapiens; identical to SEQ ID NO: 866245

SEQ ID NO: 866247 - protein, 134 aa, Homo sapiens
KDLILCFQYVENNKNADNDWFRLESNKEGTRWFGKCWYIHDLLKYEFDIEFDIPITYPTTAPEIAVPELDGKTAKMYRGGKICLTDHFKPLWARNVPKFGLAHLMALGLGPWLAVEIPDLIQKGVIQHKEKCNQ

SEQ ID NO: 866248 - protein, 117 aa, Homo sapiens
FGTRRLESNKEGTRWFGKCWYIHDLLKYEFDIEFDIPITYPTTAPEIAVPELDGKTAKMYRGGKICLTDHFKPLWARNVPKFGLAHLMALGLGPWLAVEIPDLIQKGVIQHKEKCNQ

SEQ ID NO: 866249 - protein, 167 aa, Homo sapiens; identical to SEQ ID NO: 866245

SEQ ID NO: 866250 - protein, 167 aa, Homo sapiens; identical to SEQ ID NO: 866245

SEQ ID NO: 866251 - protein, 167 aa, Homo sapiens; identical to SEQ ID NO: 866245

SEQ ID NO: 866252 - protein, 148 aa, Homo sapiens
MADEATRRVVSEIPVLKTNAGPRDRELWVQRLKEEYQSLIRYVENNKNADNDWFRLESNKEGTRWFGKCWYIHDLLKYEFDIEFDIPITYPTTAPEIAVPELDGKTAKMYRGGKICLTDHFKPLWARNVPKFGLAHLMALGVSFVYLA

SEQ ID NO: 866253 - protein, 122 aa, Homo sapiens
MADEATRRVVSEIPVLKTNAGPRDRELWVQRLKEEYQSLIRYVENNKNADNDWFRLESNKEGTRWFGKCWYIHDLLKYEFDIEFDIPITYPTTAPEIAVPELDGKTAKMYSWVHGWQWKSLI

SEQ ID NO: 866254 - protein, 112 aa, Homo sapiens
MADEATRRVVSEIPVLKTNAGPRDRELWVQRLKEEYQSLIRYVENNKNADNDWFRLESNKEGTRWFGKCWYIHDLLKYEFDIEFDIPITYPTTAPCSVKVSNTFSLVSQGGF

SEQ ID NO: 866255 - protein, 47 aa, Homo sapiens
MADEATRRVVSEIPVLKTNAGPRDRELWVQRLRDLLWSHGLKTSLGS

SEQ ID NO: 866256 - protein, 167 aa, Homo sapiens; identical to SEQ ID NO: 866245

SEQ ID NO: 866257 - protein, 167 aa, Homo sapiens; identical to SEQ ID NO: 866245

SEQ ID NO: 866258 - protein, 167 aa, Homo sapiens; identical to SEQ ID NO: 866245

SEQ ID NO: 866259 - protein, 113 aa, Homo sapiens
MADEATRRVVSEIPVLKTNAGPRDRELWVQRLKEEYQSLIRYVENNKNADNDWFRLESNKEGTRWFGKCWYIHDLLKYEFDIEFDIPITYPTTAPEIAVPELDGKTAKMYSLD

SEQ ID NO: 866260 - protein, 111 aa, Homo sapiens
MADEATRRVVSEIPVLKTNAGPRDRELWVQRLKEEYQSLIRYVENNKNADNDWFRLESNKEGTRWFGKCWYIHDLLKYEFDIEFDIPITYPTTAPEIAVPELDGKTAKMYR

SEQ ID NO: 866261 - protein, 114 aa, Homo sapiens
MADEATRRVVSEIPVLKTNAGPRDRELWVQRLKEEYQSLIRYVENNKNADNDWFRLESNKEGTRWFGKCWYIHDLLKYEFDIEFDCFLLGVASHIPRSPAGYPRMTHAAAAKIV

SEQ ID NO: 866262 - protein, 105 aa, Homo sapiens
MADEATRRVVSEIPVLKTNAGPRDRELWVQRLKEEYQSLIRYVENNKNADNDWFRLESNKEGTRWFGKCWYIHDLLKYEFDIEFDVSVIEWEIRRLVEGEGLDDG

SEQ ID NO: 866263 - protein, 70 aa, Homo sapiens
AGTPGPGGGPWGGRREAAACPGLGGWGERGGEMDKLTIISGCLFLAADIFAIASIANPDWINTGESAVSP

SEQ ID NO: 866264 - protein, 145 aa, Homo sapiens
AGTPGPGGGPWGGRREAAACPGLGGWGERGGEMDKLTIISGCLFLAADIFAIASIANPDWINTGESAALTVGLVRQCQTIHGRDRTCIPPRLPPEWVTTLFFIIMGIISLTVTCGLLVASHWRREATKYARWIAFTGKCVHSSHT

SEQ ID NO: 866265 - protein, 184 aa, Homo sapiens
AGTPGPGGGPWGGRREAAACPGLGGWGERGGEMDKLTIISGCLFLAADIFAIASIANPDWINTGESAGTHCGPRATVSNNPWTRPDVHPSPASPGVGHHTVFYHHGNHFIDCHMWFAGGFPLAKRSYKICSMDSIHWNHYEKIIGKTPRLEDSGFLLCKVNSSGSQLPSNKNKEFPHGLQILYY

SEQ ID NO: 866266 - protein, 198 aa, Homo sapiens
AGTPGPGGGPWGGRREAAACPGLGGWGERGGEMDKLTIISGCLFLAADIFAIASIANPDWINTGESAALTVGLVRQCQTIHGRDRTCIPPRLPPEWVTTLFFIIMGIISLTVTCGLLVASHWRREATKYARWIAFTGMILFCMAALIFPIGFYINEVGGQPYKLPNNTVVGSSYVLFVLSIFFTIVGLLFAGKVCLPG

SEQ ID NO: 866267 - protein, 105 aa, Homo sapiens
MACQISVFVALGELLPKGSKEEQRDYVFYLAVGNYRLKEYEKALKYVRGLLQTEPQNNQAKELERLIDKAMKKDGLVGMAIVGGMALGVAGLAGLIGLAVSKSKS

SEQ ID NO: 866268 - protein, 117 aa, Homo sapiens
VKVRLELVQKAKTITTLEGIEVLKKLLPKGSKEEQRDYVFYLAVGNYRLKEYEKALKYVRGLLQTEPQNNQAKELERLIDKAMKKDGLVGMAIVGGMALGVAGLAGLIGLAVSKSKS

SEQ ID NO: 866269 - protein, 126 aa, Homo sapiens
MVGRRNAPSRRKVAVVKTSACAGCVGAWRRSWKELLPKGSKEEQRDYVFYLAVGNYRLKEYEKALKYVRGLLQTEPQNNQAKELERLIDKAMKKDGLVGMAIVGGMALGVAGLAGLIGLAVSKSKS

SEQ ID NO: 866270 - protein, 152 aa, Homo sapiens
MRVRGAWVPGDEAGKKFEKKFQSEKAAGSVSKSTQFEYAWCLVRSKYNDDIRKGIVLLEELLPKGSKEEQRDYVFYLAVGNYRLKEYEKALKYVRGLLQTEPQNNQAKELERLIDKAMKKDGLVGMAIVGGMALGVAGLAGLIGLAVSKSKS

SEQ ID NO: 866271 - protein, 185 aa, Homo sapiens
HPPDAGSGSPPLPLGHGDCGTVDCSVRLAGAVAMEAVLNELVSVEDLLKFEKKFQSEKAAGSVSKSTQFEYAWCLVRSKYNDDIRKGIVLLEELLPKGSKEEQRDYVFYLAVGNYRLKEYEKALKYVRGLLQTEPQNNQAKELERLIDKAMKKDGLVGMAIVGGMALGVAGLAGLIGLAVSKSKS

SEQ ID NO: 866272 - protein, 163 aa, Homo sapiens
HPPDAGSGSPPLPLGHGDCGTVDCSVRLAGAVAMEAVLNELVSVEDLLKFEKKFQSEKAAGSVSKSTQFEYAWCLVRSKYNDDIRKGIVLLEELLPKGSKEEQRDYVFYLAVGNYRLKEYEKALKYVRGLLQTEPQNNQAKELERLIDKAMKKDDSLGPFVQP

SEQ ID NO: 866273 - protein, 185 aa, Homo sapiens; identical to SEQ ID NO: 866271

SEQ ID NO: 866274 - protein, 185 aa, Homo sapiens; identical to SEQ ID NO: 866271

SEQ ID NO: 866275 - protein, 185 aa, Homo sapiens; identical to SEQ ID NO: 866271

SEQ ID NO: 866276 - protein, 106 aa, Homo sapiens
HPPDAGSGSPPLPLGHGDCGTVDCSVRLAGAVAMEAVLNELVSVEDLLARSLSTPGAWCGASTMMTSVKASCCSRSCCPKGARRNSGITSSTWPWGTTGSRNTRRP

SEQ ID NO: 866277 - protein, 161 aa, Homo sapiens
HPPDAGSGSPPLPLGHGDCGTVDCSVRLAGAVAMEAVLNELVSVEDLLVRPGPDRGKGKVGGRVLRKSELLPKGSKEEQRDYVFYLAVGNYRLKEYEKALKYVRGLLQTEPQNNQAKELERLIDKAMKKDGLVGMAIVGGMALGVAGLAGLIGLAVSKSKS

SEQ ID NO: 866278 - protein, 79 aa, Homo sapiens
HPPDAGSGSPPLPLGHGDCGTVDCSVRLAGAVAMEAVLNELVSVEDLLSCCPKGARRNSGITSSTWPWGTTGSRNTRRP

SEQ ID NO: 866279 - protein, 427 aa, Homo sapiens
MAPKKRPETQKTSEIVLRPRNKRSRSPLELEPEAKKLCAKGSGPSRRCDSDCLWVGLAGPQILPPCRSIVRTLHQHKLGRASWPSVQQGLQQSFLHTLDSYRILQKAAPFDRRATSLAWHPTHPSTVAVGSKGGDIMLWNFGIKDKPTFIKGIGAGGSITGLKFNPLNTNQFYASSMEGTTRLQDFKGNILRVFASSDTINIWFCSLDVSASSRMVVTGDNVGNVILLNMDGKELWNLRMHKKKVTHVALNPCCDWFLATASVDQTVKIWDLRQVRGKASFLYSLPHRHPVNAACFSPDGARLLTTDQKSEIRVYSASQWDCPLGLIPHPHRHFQHLTPIKAAWHPRYNLIVVGRYPDPNFKSCTPYELRTIDVFDGNSGKMMCQLYDPESSGISSLNEFNPMGDTLASAMGYHILIWSQEEARTRK

SEQ ID NO: 866280 - protein, 427 aa, Homo sapiens; identical to SEQ ID NO: 866279

SEQ ID NO: 866281 - protein, 132 aa, Homo sapiens
LSFQNFFVVVHSPDSPLPFRSCLERSGRESTPAGEGLQGQDHRGLVVPSAQGLFTLPACFSPDGARLLTTDQKSEIRVYSASQWDCPLGLIPHPHRHFQHLTPIKVSGGGKELAEGGCDHEAGAGLPTVGKG

SEQ ID NO: 866282 - protein, 341 aa, Homo sapiens
MAPKKRPETQKTSEIVLRPRNKRSRSPLELEPEAKKLCAKGSGPSRRCDSDCLWVGLAGPQILPPCRSIVRTLHQHKLGRASWPSVQQGLQQSFLHTLDSYRILQKAAPFDRRATSLAWHPTHPSTVAVGSKGGDIMLWNFGIKDKPTFIKGIGAGGSITGLKFNPLNTNQFYASSMEGTTRLQDFKGNILRVFASSDTINIWFCSLDVSASSRMVVTGDNVGNVILLNMDGKELWNLRMHKKKVTHVALNPCCDWFLATASVDQTVKIWDLRQVRGKASFLYSLPHRHPVNAACFSPDGARLLTTDQKSEIRVYSASQWDCPLGLIPHPHRHFQHLTPIK

SEQ ID NO: 866283 - protein, 427 aa, Homo sapiens; identical to SEQ ID NO: 866279

SEQ ID NO: 866284 - protein, 413 aa, Homo sapiens
MKQGFLSGNSAEKPFVRLERKICLFCLAGPSRRCDSDCLWVGLAGPQILPPCRSIVRTLHQHKLGRASWPSVQQGLQQSFLHTLDSYRILQKAAPFDRRATSLAWHPTHPSTVAVGSKGGDIMLWNFGIKDKPTFIKGIGAGGSITGLKFNPLNTNQFYASSMEGTTRLQDFKGNILRVFASSDTINIWFCSLDVSASSRMVVTGDNVGNVILLNMDGKELWNLRMHKKKVTHVALNPCCDWFLATASVDQTVKIWDLRQVRGKASFLYSLPHRHPVNAACFSPDGARLLTTDQKSEIRVYSASQWDCPLGLIPHPHRHFQHLTPIKAAWHPRYNLIVVGRYPDPNFKSCTPYELRTIDVFDGNSGKMMCQLYDPESSGISSLNEFNPMGDTLASAMGYHILIWSQEEARTRK

SEQ ID NO: 866285 - protein, 291 aa, Homo sapiens [sequence omitted]

SEQ ID NO: 866286 - protein, 368 aa, Homo sapiens [sequence omitted]

SEQ ID NO: 866287 - protein, 115 aa, Homo sapiens
  misc_feature (9)..(9): Xaa can be any naturally occurring amino acid
PGWYSPRGXDIVDPRAPRQHSTTFCQLRHQWSIWFCSLDVSASSRMVVTGDNVGNVILLNMDGKELWNLRMHKKKVTHVALNPCCDWFLATASVDQTVKIWDLRQLVSVPMEPGS

SEQ ID NO: 866288 - protein, 267 aa, Homo sapiens
MAPKKRPETQKTSEIVLRPRNKRSRSPLELEPEAKKLCAKGSGPSRRCDSDCLWVGLAGPQILPPCRSIVRTLHQHKLGRASWPSVQQGLQQSFLHTLDSYRILQKAAPFDRRATSLAWHPTHPSTVAVGSKGGDIMLWNFGIKDKPTFIKGAAWHPRYNLIVVGRYPDPNFKSCTPYELRTIDVFDGNSGKMMCQLYDPESSGISSLRIQSMGKVALDGYNFIAAGERKRGELEGGRLGQGKPRGVLGPTRGEAEAGGIGARRGGL

SEQ ID NO: 866289 - protein, 161 aa, Homo sapiens
MAPKKRPETQKTSEIVLRPRNKRSRSPLELEPEAKKLCAKGSGPSRRCDSDCLWVGLAGPQILPPCRSIVRTLHQHKLGRASWPSVQQGLQQSFLHTLDSYRILQKAAPFDRRATSLAWHPTHPSTVAVGSKGGDIMLWNFGIKDKPTFIKGTGSCCVTQG

SEQ ID NO: 866290 - protein, 244 aa, Homo sapiens
MAPKKRPETQKTSEIVLRPRNKRSRSPLELEPEAKKLCAKGSGPSRRCDSDCLWVGLAGPQILPPCRSIVRTLHQHKLGRASWPSVQQGLQQSFLHTLDSYRILQKAAPFDRRATSLAWHPTHPSTVAVGSKGGDIMLWNFGIKDKPTFIKGIGAGGSITGLKFNPLNTNQFYASSMEGTTRLQDFKGNILRVFASSDTINIWFCSLDVSASSRMVVTGDNVGNVILLNMDGKELVSVPMEPGS

SEQ ID NO: 866291 - protein, 427 aa, Homo sapiens; identical to SEQ ID NO: 866279

SEQ ID NO: 866292 - protein, 244 aa, Homo sapiens; identical to SEQ ID NO: 866290

SEQ ID NO: 866293 - protein, 284 aa, Homo sapiens
MAPKKRPETQKTSEIVLRPRNKRSRSPLELEPEAKKLCAKGSGPSRRCDSDCLWVGLAGPQILPPCRSIVRTLHQHKLGRASWPSVQQGLQQSFLHTLDSYRILQKAAPFDRRATSLAWHPTHPSTVAVGSKGGDIMLWNFGIKDKPTFIKGIGAGGSITGLKFNPLNTNQFYASSMEGTTRLQDFKGNILRVFASSDTINIWFCSLDVSASSRMVVTGDNVGNVILLNMDGKELWNLRMHKKKVTHVALNPCCDWFLATASVDQTVKIWDLRQLVSVPMEPGS

SEQ ID NO: 866294 - protein, 188 aa, Homo sapiens
MHKKKVTHVALNPCCDWFLATASVDQTVKIWDLRQVRGKASFLYSLPHRHPVNAACFSPDGARLLTTDQKSEIRVYSASQWDCPLGLIPHPHRHFQHLTPIKAAWHPRYNLIVVGRYPDPNFKSCTPYELRTIDVFDGNSGKMMCQLYDPESSGISSLNEFNPMGDTLASAMGYHILIWSQEEARTRK

SEQ ID NO: 866295 - protein, 275 aa, Homo sapiens
MAPKKRPETQKTSEIVLRPRNKRSRSPLELEPEAKKLCAKGSGPSRRCDSDCLWVGLAGPQILPPCRSIVRTLHQHKLGRASWPSVQQGLQQSFLHTLDSYRILQKAAPFDRRATSLAWHPTHPSTVAVGSKGGDIMLWNFGIKDKPTFIKGIGAGGSITGLKFNPLNTNQFYASSMEGTTRLQDFKGNILRVFASSDTINIWFCSLDVSASSRMVVTGDNVGNVILLNMDGKEMPKELTRWLNLWMVRTARNHGDWPAGKNQSYGEVVAGSRER

SEQ ID NO: 866296 - protein, 479 aa, Homo sapiens
  misc_feature (18)..(19): Xaa can be any naturally occurring amino acid
DAPPPLHLCPERGMQPAXXPAPGQERLLGRGGVAEVYFLEKAPGFGLENPTAKIEPSSWSGSESPAENMERMSDSADKPIDNDAEGVWSPDIEQSFQEALAIYPPCGRRKIILSDEGKMYGRNELIARYIKLRTGKTRTRKQVSSHIQVLARRKSRDFHSKLKDQTAKDKALQHMAAMSSAQIVSATAIHNKLGLPGIPRPTFPGAPGFWPGMIQTGQPGSSQDVKPFVQQAYPIQPAVTAPIPGFEPASAPAPSVPAWQGRSIGTTKLRLVEFSAFLEQQRDPDSYNKHLFVHIGHANHSYSDPLLESVDIRQIYDKFPEKKGGLKELFGKGPQNAFFLVKFWADLNCNIQDDAGAFYGVTSQYESSENMTVTCSTKVCSFGKQVVEKVETEYARFENGRFVYRINRSPMCEYMINFIHKLKHLPEKYMMNSVLENFTILLVVTNRDTQETLLCMACVFEVSNSEHGAQHHIYRLVKD

SEQ ID NO: 866297 - protein, 877 aa, Homo sapiens
NVPEPDGHIISPLLAGFYMFWTMIILLQVLIPISLYVSIEIVKLGQIYFIQSDVDFYNEKMDSIVQCRALNIAEDLGQIQYLFSDKTGTLTENKMVFRRCSVAGFDYCHEENARRLESYQEAVSEDEDFIDTVSGSLSNMAKPRAPSCRTVHNGPLGNKPSNHLAGSSFTLGSGEGASEVPHSRQAAFSSPIETDVVPDTKQVMVDFAALGPLTFQLLHILPFDSVRKRMSVVVRHPLSNQVVVYTKGADSVIMELLSVASPDGASLEKQQMIVREKTQKHLDDYAKQGLRTLCIAKKVMSDTEYAEWLRNHFLAETSIDNREELLLESAMRLENKLTLLGATGIEDRLQEGVPESIEALHKAGIKIWMLTGDKQETAVNIAYACKLLEPDDKLFILNTQSKDACGMLMSTILKELQKKTQALPEQVSLSEDLLQPPVPRDSGLRAGLIITGKTLEFALQESLQKQFLELTSWCQAVVCCRATPLQKSEVVKLVRSHLQVMTLAIGDGANDVSMIQVADIGIGVSGQEGMQAVMASDFAVSQFKHLSKLLLVHGHWCYTRLSNMILYFFYKNVAYVNLLFWYQFFCGFSGTSMTDYWVLIFFNLLFTSAPPVIYGVLEKDVSAETLMQLPELYRSGQKSEAYLPHTFWITLLDAFYQSLVCFFVPYFTYQGSDTDIFAFGNPLNTAALFIVLLHLVIESKSLTWIHLLVIIGSILSYFLFAIVFGAMCVTCNPPSNPYWIMQEHMLDPVFYLVCILTTSIALLPRFVYRVLQGSLFPSPILRAKHFDRLTPEERTKALKKWRGAGKMNQVTSKYANQSAGKSGRRPMPGPSAVFAMKSASSCAIEQGNLSLCETALDQGYSETKAFEMAGPSKGKES

SEQ ID NO: 866298 - protein, 708 aa, Homo sapiens
NVPEPDGHIISPLLAGFYMFWTMIILLQVLIPISLYVSIEIVKLGQIYFIQSDVDFYNEKMDSIVQCRALNIAEDLGQIQYLFSDKTGTLTENKMVFRRCSVAGFDYCHEENARRLESYQEAVSEDEDFIDTVSGSLSNMAKPRAPSCRTVHNGPLGNKPSNHLAGSSFTLGSGEGASEVPHSRQAAFSSPIETDVVPDTKQVMVDFAALGPLTFQLLHILPFDSVRKRMSVVVRHPLSNQVVVYTKGADSVIMELLSVASPDGASLEKQQMIVREKTQKHLDDYAKQGLRTLCIAKKVMSDTEYAEWLRNHFLAETSIDNREELLLESAMRLENKLTLLGATGIEDRLQEGVPESIEALHKAGIKIWMLTGDKQETAVNIAYACKLLEPDDKLFILNTQSKDACGMLMSTILKELQKKTQALPEQVSLSEDLLQPPVPRDSGLRAGLIITGKTLEFALQESLQKQFLELTSWCQAVVCCRATPLQKSEVVKLVRSHLQVMTLAIGDGANDVSMIQVADIGIGVSGQEGMQAVMASDFAVSQFKHLSKLLLVHGHWCYTRLSNMILYFFYKNVAYVNLLFWYQFFCGFSGTSMTDYWVLIFFNLLFTSAPPVIYGVLEKDVSAETLMQLPELYRSGQKSEAYLPHTFWITLLDAFYQSLVCFFVPYFTYQGSDTDIFAFGNPLNTAALFIVLLHLVIESKSLFLEPCV

SEQ ID NO: 866299 - protein, 721 aa, Homo sapiens
NVPEPDGHIISPLLAGFYMFWTMIILLQVLIPISLYVSIEIVKLGQIYFIQSDVDFYNEKMDSIVQCRALNIAEDLGQIQYLFSDKTGTLTENKMVFRRCSVAGFDYCHEENARRLESYQEAVSEDEDFIDTVSGSLSNMAKPRAPSCRTVHNGPLGNKPSNHLAGSSFTLGSGEGASEVPHSRQAAFSSPIETDVVPDTKQVMVDFAALGPLTFQLLHILPFDSVRKRMSVVVRHPLSNQVVVYTKGADSVIMELLSVASPDGASLEKQQMIVREKTQKHLDDYAKQGLRTLCIAKKVMSDTEYAEWLRNHFLAETSIDNREELLLESAMRLENKLTLLGATGIEDRLQEGVPESIEALHKAGIKIWMLTGDKQETAVNIAYACKLLEPDDKLFILNTQSKDACGMLMSTILKELQKKTQALPEQVSLSEDLLQPPVPRDSGLRAGLIITGKTLEFALQESLQKQFLELTSWCQAVVCCRATPLQKSEVVKLVRSHLQVMTLAIGDGANDVSMIQVADIGIGVSGQEGMQAVMASDFAVSQFKHLSKLLLVHGHWCYTRLSNMILYFFYKNVAYVNLLFWYQFFCGFSGTSMTDYWVLIFFNLLFTSAPPVIYGVLEKDVSAETLMQLPELYRSGQKSEAYLPHTFWITLLDAFYQSLVCFFVPYFTYQGSDTDIFAFGNPLNTAALFIVLLHLVIESKSLTRCSDSHLQFQSFGRLWIT

SEQ ID NO: 866300 - protein, 877 aa, Homo sapiens; identical to SEQ ID NO: 866297

SEQ ID NO: 866301 - protein, 877 aa, Homo sapiens; identical to SEQ ID NO: 866297

SEQ ID NO: 866302 - protein, 1651 aa, Homo sapiens
ARRKRCRSAQGLLPPPPLHRLPERACRAPPSPLSFLGELRGWGGRGSPSARRNRRRRRPRLRCRAPEPPSPPRALPGGGPPSPMEVSRRKAPPRPPRPAAPLPLLAYLLALAAPGRGADEPVWRSEQAIGAIAASQEDGVFVASGSCLDQLDYSLEHSLSRLYRDQAGNCTEPVSLAPPARPRPGSSFSKLLLPYREGAAGLGGLLLTGWTFDRGACEVRPLGNLSRNSLRNGTEVVSCHPQGSTAGVVYRAGRNNRWYLAVAATYVLPEPETASRCNPAASDHDTAIALKDTEGRSLATQELGRLKLCEGAGSLHFVDAFLWNGSIYFPYYPYNYTSGAATGWPSMARIAQSTEVLFQGQASLDCGHGHPDGRRLLLSSSLVEALDVWAGVFSAAAGEGQERRSPTTTALCLFRMSEIQARAKRVSWDFKTAESHCKEGDQPERVQPIASSTLIHSDLTSVYGTVVMNRTVLFLGTGDGQLLKVILGENLTSNCPEVIYEIKEETPVFYKLVPDPVKNIYIYLTAGKEVRRIRVANCNKHKSCSECLTATDPHCGWCHSLQRCTFQGDCVHSENLENWLDISSGAKKCPKIQIIRSSKEKTTVTMVGSFSPRHSKCMVKNVDSSRELCQNKSQPNRTCTCSIPTRATYKDVSVVNVMFSFGSWNLSDRFNFTNCSSLKECPACVETGCAWCKSARRCIHPFTACDPSDYERNQEQCPVAVEKTSGGGRPKENKGNRTNQALQVFYIKSIEPQKVSTLGKSNVIVTGANFTRASNITMILKGTSTCDKDVIQVSHVLNDTHMKFSLPSSRKEMKDVCIQFDGGNCSSVGSLSYIALPHCSLIFPATTWISGGQNITMMGRNFDVIDNLIISHELKGNINVSEYCVATYCGFLAPSLKSSKVRTNVTVKLRVQDTYLDCGTLQYREDPRFTGYRVESEVDTELEVKIQKENDNFNISKKDIEITLFHGENGQLNCSFENITRNQDLTTILCKIKGIKTASTIANSSKKVRVKLGNLELYVEQESVPSTWYFLIVLPVLLVIVIFAAVGVTRHKSKELSRKQSQQLELLESELRKEIRDGFAELQMDKLDVVDSFGTVPFLDYKHFALRTFFPESGGFTHIFTEDMHNRDANDKNESLTALDALICNKSFLVTVIHTLEKQKNFSVKDRCLFASFLTIALQTKLVYLTSILEVLTRDLMEQCSNMQPKLMLRRTESVVEKLLTNWMSVCLSGFLRETVGEPFYLLVTTLNQKINKGPVDVITCKALYTLNEDWLLWQVPEFSTVALNVVFEKIPENESADVCRNISVNVLDCDTIGQAKEKIFQAFLSKNGSPYGLQLNEIGLELQMGTRQKELLDIDSSSVILEDGITKLNTIGHYEISNGSTIKVFKKIANFTSDVEYSDDHCHLILPDSEAFQDVQGKRHRGKHKFKVKEMYLTKLLSTKVAIHSVLEKLFRSIWSLPNSRAPFAIKYFFDFLDAQAENKKITDPDVVHIWKTNSLPLRFWVNILKNPQFVFDIKKTPHIDGCLSVIAQAFMDAFSLTEQQLGKEAPTNKLLYAKDIPTYKEEVKSYYKAIRDLPPLSSSEMEEFLTQESKKHENEFNEEVALTEIYKYIVKYFDEILNKLERERGLEEAQKQLLHVKVLFDEKKKCKWM

SEQ ID NO: 866303 - protein, 152 aa, Homo sapiens
VTVSLCHPGWSAVAQSWLTATSASQIQVINPQFVFDIKKTPHIDGCLSVIAQAFMDAFSLTEQQLGKEAPTNKLLYAKDIPTYKEEVKSYYKAIRDLPPLSSSEMEEFLTQESKVSLESRNKLIFGYFTSFQNLSTSLSFRNMKMNLMKKWP

SEQ ID NO: 866304 - protein, 699 aa, Homo sapiens
ARRKRCRSAQGLLPPPPLHRLPERACRAPPSPLSFLGELRGWGGRGSPSARRNRRRRRPRLRCRAPEPPSPPRALPGGGPPSPMEVSRRKAPPRPPRPAAPLPLLAYLLALAAPGRGADEPVWRSEQAIGAIAASQEDGVFVASGSCLDQLDYSLEHSLSRLYRDQAGNCTEPVSLAPPARPRPGSSFSKLLLPYREGAAGLGGLLLTGWTFDRGACEVRPLGNLSRNSLRNGTEVVSCHPQGSTAGVVYRAGRNNRWYLAVAATYVLPEPETASRCNPAASDHDTAIALKDTEGRSLATQELGRLKLCEGAGSLHFVDAFLWNGSIYFPYYPYNYTSGAATGWPSMARIAQSTEVLFQGQASLDCGHGHPDGRRLLLSSSLVEALDVWAGVFSAAAGEGQERRSPTTTALCLFRMSEIQARAKRVSWDFKTAESHCKEGDQPERVQPIASSTLIHSDLTSVYGTVVMNRTVLFLGTGDGQLLKVILGENLTSNCPEVIYEIKEETPVFYKLVPDPVKNIYIYLTAGKEVRRIRVANCNKHKSCSECLTATDPHCGWCHSLQRYLLNSFSPTRIFEKVIMRQNTCCPTLTIHSSDLRELISSSTKILLCNPNEFSKVFPAASVLCNHWTRELPSLGAGGAGVQPSGERERAGRFGFYFLQSSPRLKREAKGPPLREDKRIEMSENFSAESPSCMSCILF

SEQ ID NO: 866305 - protein, 274 aa, Homo sapiens
AGLRVTTLGLNQKEGDQPERVQPIASSTLIHSDLTSVYGTVVMNRTVLFLGTGDGQLLKVILGENLTSNCPEVIYEIKEETPVFYKLVPDPVKNIYIYLTAGKEVRRIRVANCNKHKSCSECLTATDPHCGWCHSLQRYLLNSFSPTRIFEKDVMRQNTCCPTLTIHSSDLRELISSSTKILLCNPNEFSKVFPAASVLCNHWTRELPSLGAGGAGVQPSGERERAGRFGFYFLQSSPRLKREAKGPPLREDKRIEMSENFSAESPSCMSCILF

SEQ ID NO: 866306 - protein, 1630 aa, Homo sapiens
ARRKRCRSAQGLLPPPPLHRLPERACRAPPSPLSFLGELRGWGGRGSPSARRNRRRRRPRLRCRAPEPPSPPRALPGGGPPSPMEVSRRKAPPRPPRPAAPLPLLAYLLALAAPGRGADEPVWRSEQAIGAIAASQEDGVFVASGSCLDQLDYSLEHSLSRLYRDQAGNCTEPVSLAPPARPRPGSSFSKLLLPYREGAAGLGGLLLTGWTFDRGACEVRPLGNLSRNSLRNGTEVVSCHPQGSTAGVVYRAGRNNRWYLAVAATYVLPEPETASRCNPAASDHDTAIALKDTEGRSLATQELGRLKLCEGAGSLHFVDAFLWNGSIYFPYYPYNYTSGAATGWPSMARIAQSTEVLFQGQASLDCGHGHPDGRRLLLSSSLVEALDVWAGVFSAAAGEGQERRSPTTTALCLFRMSEIQARAKRVSWDFKTAESHCKEGDQPERVQPIASSTLIHSDLTSVYGTVVMNRTVLFLGTGDGQLLKVILGENLTSNCPEVIYEIKEETPVFYKLVPDPVKNIYIYLTAGKEVRRIRVANCNKHKSCSECLTATDPHCGWCHSLQRCTFQGDCVHSENLENWLDISSGAKKCPKIQIIRSSKEKTTVTMVGSFSPRHSKCMVKNVDSSRELCQNKSQPNRTCTCSIPTRATYKDVSVVNVMFSFGSWNLSDRFNFTNCSSLKECPACVETGCAWCKSARRCIHPFTACDPSDYERNQEQCPVAVEKTSGGGRPKENKGNRTNQALQVFYIKSIEPQKVSTLGKSNVIVTGANFTRASNITMILKGTSTCDKDVIQVSHVLNDTHMKFSLPSSRKEMKDVCIQFDGGNCSSVGSLSYIALPHCSLIFPATTWISGGQNITMMGRNFDVIDNLIISHELKGNINVSEYCVATYCGFLAPSLKSSKVRTNVTVKLRVQDTYLDCGTLQYREDPRFTGYRVESEVDTELEVKIQKENDNFNISKKDIEITLFHGENGQLNCSFENITRNQDLTTILCKIKGIKTASTIANSSKKVRVKLGNLELYVEQESVPSTWYFLIVLPVLLVIVIFAAVGVTRHKSKELSRKQSQQLELLESELRKEIRDGFAELQMDKLDVVDSFGTVPFLDYKHFALRTFFPESGGFTHIFTEDMHNRDANDKNESLTALDALICNKSFLVTVIHTLEKQKNFSVKDRCLFASFLTIALQTKLVYLTSILEVLTRDLMEQCSNMQPKLMLRRTESVVEKLLTNWMSVCLSGFLRETVGEPFYLLVTTLNQKINKGPVDVITCKALYTLNEDWLLWQVPEFSTVALNVVFEKIPENESADVCRNISVNVLDCDTIGQAKEKIFQAFLSKNGSPYGLQLNEIGLELQMGTRQKELLDIDSSSVILEDGITKLNTIGHYEISNGSTIKVFKKIANFTSDVEYSDDHCHLILPDSEAFQDVQGKRHRGKHKFKVKEMYLTKLLSTKVAIHSVLEKLFRSIWSLPNSRAPFAIKYFFDFLDAQAENKKITDPDVVHIWKTNSLPLRFWVNILKNPQFVFDIKKTPHIDGCLSVIAQAFMDAFSLTEQQLGKEAPTNKLLYAKDIPTYKEEVKSYYKAIRDLPPLSSSEMEEFLTQESKVSLESRNKLIFGYFTSFQNLSTSLSFRNMKMNLMKKWP

SEQ ID NO: 866307 - protein, 1353 aa, Homo sapiens
ARRKRCRSAQGLLPPPPLHRLPERACRAPPSPLSFLGELRGWGGRGSPSARRNRRRRRPRLRCRAPEPPSPPRALPGGGPPSPMEVSRRKAPPRPPRPAAPLPLLAYLLALAAPGRGADEPVWRSEQAIGAIAASQEDGVFVASGSCLDQLDYSLEHSLSRLYRDQAGNCTEPVSLAPPARPRPGSSFSKLLLPYREGAAGLGGLLLTGWTFDRGACEVRPLGNLSRNSLRNGTEVVSCHPQGSTAGVVYRAGRNNRWYLAVAATYVLPEPETASRCNPAASDHDTAIALKDTEGRSLATQELGRLKLCEGAGSLHFVDAFLWNGSIYFPYYPYNYTSGAATGWPSMARIAQSTEVLFQGQASLDCGHGHPDGRRLLLSSSLVEALDVWAGVFSAAAGEGQERRSPTTTALCLFRMSEIQARAKRVSWDFKTAESHCKEGDQPERVQPIASSTLIHSDLTSVYGTVVMNRTVLFLGTGDGQLLKVILGENLTSNCPEVIYEIKEETPVFYKLVPDPVKNIYIYLTAGKEVRRIRVANCNKHKSCSECLTATDPHCGWCHSLQRCTFQGDCVHSENLENWLDISSGAKKCPKIQIIRSSKEKTTVTMVGSFSPRHSKCMVKNVDSSRELCQNKSQPNRTCTCSIPTRATYKDVSVVNVMFSFGSWNLSDRFNFTNCSSLKECPACVETGCAWCKSARRCIHPFTACDPSDYERNQEQCPVAVEKTSGGGRPKENKGNRTNQALQVFYIKSIEPQKVSTLGKSNVIVTGANFTRASNITMILKGTSTCDKDVIQVSHVLNDTHMKFSLPSSRKEMKDVCIQFDGGNCSSVGSLSYIALPHCSLIFPATTWISGGQNITMMGRNFDVIDNLIISHELKGNINVSEYCVATYCGFLAPSLKSSKVRTNVTVKLRVQDTYLDCGTLQYREDPRFTGYRVESEVDTELEVKIQKENDNFNISKKDIEITLFHGENGQLNCSFENITRNQDLTTILCKIKGIKTASTIANSSKKVRVKLGNLELYVEQESVPSTWYFLIVLPVLLVIVIFAAVGVTRHKSKELSRKQSQQLELLESELRKEIRDGFAELQMDKLDVVDSFGTVPFLDYKHFALRTFFPESGGFTHIFTEDMHNRDANDKNESLTALDALICNKSFLVTVIHTLEKQKNFSVKDRCLFASFLTIALQTKLVYLTSILEVLTRDLMEQCSNMQPKLMLRRTESVVEKLLTNWMSVCLSGFLRETVGEPFYLLVTTLNQKINKGPVDVITCKALYTLNEDWLLWQVPEFSTVALNVVFEKIPENESADVCRNISVNVLDCDTIGQAKEKIFQAFLSKNGSPYGLQLNEIGLGKAVRELCGPRP

SEQ ID NO: 866308 - protein, 674 aa, Homo sapiens
MQSREDAPRSRRLASPRGGKRPKKIHKPTVSAFFTGPEELKDTAHSAALLAQLKSFYDARLLCDVTIEVVTPGSGPGTGRLFPCNRNVLAAACPYFKSMFTGGMYESQQASVTMHDVDAESFEVLVDYCYTGRVSLSEANVERLYAASDMLQLEYVREACASFLARRLDLTNCTAILKFADAFGHRKLRSQAQSYIAQNFKQLSHMGSIREETLADLTLAQLLAVLRLDSLDVESEQTVCHVAVQWLEAAPKERGPSAAEVFKCVRWMHFTEEDQDYLEGLLTKPIVKKYCLDVIEGALQMRYGDLLYKSLVPVPNSSSSSSSSNSLVSAAENPPQRLGMCAKEMVIFFGHPRDPFLCCDPYSGDLYKVPSPLTCLAHTRTVTTLAVCISPDHDIYLAAQPRTDLWVYKPAQNSWQQLADRLLCREGMDVAYLNGYIYILGGRDPITGVKLKEVECYNVKRNQWALVAPLPHSFLSFDLMVIRDYLYALNSKRMFCYDPSHNMWLKCVSLKRNDFQEACVFNEEIYCICDIPVMKVYNPVRAEWRQMNNIPLVSETNNYRIIKHGQKLLLITSRTPQWKKNRVTVYEYDIRGDQWINIGTTLGLLQFDSNFFCLSARVYPSCLEPGQSFLTEEEEIPSESSTEWDLGGFSEPDSESGSSSSLSDDDFWVRVAPQ

SEQ ID NO: 866309 - protein, 674 aa, Homo sapiens; identical to SEQ ID NO: 866308

SEQ ID NO: 866310 - protein, 68 aa, Homo sapiens
TERGDVTEAGGNQRDSARQKNMKKQSDHRLRESAEDDGLFPAAARKQRDSEIMQQKQKKANEKKEEPK

SEQ ID NO: 866311 - protein, 70 aa, Homo sapiens
  misc_feature (55)..(55): Xaa can be any naturally occurring amino acid
CVEAGEGEAEKEEAGAQVGLLRALQNCCSVPSPPSHSMRDAWRLRGPEDMHGRGXQMRASKANEKKEEPK

SEQ ID NO: 866312 - protein, 68 aa, Homo sapiens
SSTTSQFQQPAVTSVSSARQKNMKKQSDHRLRESAEDDGLFPAAARKQRDSEIMQQKQKKADEMLEGG

SEQ ID NO: 866313 - protein, 118 aa, Homo sapiens
VGVPHFLEEQVAFSHPRLSNHRSVRPLDVRGCTRATLTGSACAYPTPAGAGNPLNPIRDGDRGLPIIPHERGIPSKFRSFARPKPPQTQGKGNATGPSTDGIPFALSNGGRLEPLPSP

SEQ ID NO: 866314 - protein, 127 aa, Homo sapiens
MTGFFLLPPASRGTRRSCSRSRKRQTRRRRNPSSFVASCPTLLPFACVPGSQSQTHARVSSCSAHRSQHRWHSLCPESAAGPFCASFPSGSLSSPWATPGGEGVTPSQCFLFLWGSPQSIKSSFVIP

SEQ ID NO: 866315 - protein, 234 aa, Homo sapiens
MTGFFLLPPASRGTRRSCSRSRKRQTRRRRNPSSFVASCPTLLPFACVPGSQSQTHARVSSCSAHRSQHRWHSLCPESAAGPFCASFPSGSLSSPWATPGGEGVTPSQCFLFLWGSPQSIKSSFVIPKKKKKKKKNCGGPGPRKVLKTSVCGAKVRDVRQRAQGDRPRTARFSPIKNRGTGRLHPEGSEAHGLNGPELICPPGTTALPHIDHSDHTYKPPRPDHTRPTTTTHTN

SEQ ID NO: 866316 - protein, 136 aa, Homo sapiens
MTGFFLLPPASRGTRRSCSRSRKRQTRRRRNPSSFVASCPTLLPFACVPGSQSQTHARVSSCSAHRSQHRWHSLCPESAAGPFCASFPSGSLSSPWATPGGEGVTPSQCFLFLWGSPQSIKSSFVIPKPHPHSTNM

SEQ ID NO: 866317 - protein, 128 aa, Homo sapiens
MTGFFLLPPASRGTRRSCSRSRKRQTRRRRNPSSFVASCPTLLPFACVPGSQSQTHARVSSCSAHRSQHRWHSLCPESAAGPFCASFPSGSLSSPWATPGGEGVTPSQCFLFLWGSPLVPNSARAKNL

SEQ ID NO: 866318 - protein, 118 aa, Homo sapiens; identical to SEQ ID NO: 866313

SEQ ID NO: 866319 - protein, 118 aa, Homo sapiens; identical to SEQ ID NO: 866313

SEQ ID NO: 866320 - protein, 121 aa, Homo sapiens
MATEGDVELELETETSGPERPPEKPRKHDSGAADLERVTDYAEEKEIQSSNLETAMSVIGDRRSREQKAKQEREKELAKVTIKKEDLELIMTEMEISRAAAERSLREHMGNVVEALIALTN

SEQ ID NO: 866321 - protein, 121 aa, Homo sapiens; identical to SEQ ID NO: 866320

SEQ ID NO: 866322 - protein, 121 aa, Homo sapiens; identical to SEQ ID NO: 866320

SEQ ID NO: 866323 - protein, 121 aa, Homo sapiens; identical to SEQ ID NO: 866320

SEQ ID NO: 866324 - protein, 121 aa, Homo sapiens; identical to SEQ ID NO: 866320

SEQ ID NO: 866325 - protein, 69 aa, Homo sapiens
SSTTAQSPQPAVTSVSSARQKNMKKQSDHRLRESAEDDGLFPAAARKQRDSEIMQQKQKKANEKKEEPK

SEQ ID NO: 866326 - protein, 69 aa, Homo sapiens; identical to SEQ ID NO: 866325

SEQ ID NO: 866327 - protein, 154 aa, Homo sapiens
SVWTLPLGSPDFLLRPCGSGYFWKSLREAGEIDMATEGDVELELETETSGPERPPEKPRKHDSGAADLERVTDYAEEKEIQSSNLETAMSVIGDRRSREQKAKQEREKELAKVTIKKEDLELIMTEMEISRAAAERSLREHMGNVVEALIALTN

SEQ ID NO: 866328 - protein, 91 aa, Homo sapiens
  misc_feature (1)..(1): Xaa can be any naturally occurring amino acid
XSSARFTEAEGLGDHAAEAEKGKREEGGTQVALWLRVQPSCPSPVCLGASPKPTLAFPPVVLTGPSTDGIPFALSLQRVPFVLPCQTVPSS

SEQ ID NO: 866329 - protein, 179 aa, Homo sapiens
MTGFFLLPPASRGTRRSCSRSRKRQTRRRRNPSSFVASCPTLLPFACVPGSQSQTHARVSSCSAHRSQHRWHSLCPESAAGPFCASFPSGSLSSPWATPGGEGVTPSQCFLFLWGSPQSIKSSFVIPKKKKKKNFRGLLMCRVWGKKGDLELGTVWHLGGVPGPTLSVFNGGKIRRPPL

SEQ ID NO: 866330 - protein, 127 aa, Homo sapiens; identical to SEQ ID NO: 866314

SEQ ID NO: 866331 - protein, 127 aa, Homo sapiens; identical to SEQ ID NO: 866314

SEQ ID NO: 866332 - protein, 118 aa, Homo sapiens; identical to SEQ ID NO: 866313

SEQ ID NO: 866333 - protein, 118 aa, Homo sapiens; identical to SEQ ID NO: 866313

SEQ ID NO: 866334 - protein, 176 aa, Homo sapiens
MTGFFLLPPASRASRTGAERRCGPGPAPPPPRAEAVSVAGSRREVGLMRRRGEIDMATEGDVELELETETSGPERPPEKPRKHDSGAADLERVTDYAEEKEIQSSNLETAMSVIGDRRSREQKAKQEREKELAKVTIKKEDLELIMTEMEISRAAAERSLREHMGNVVEALIALTN

SEQ ID NO: 866335 - protein, 174 aa, Homo sapiens
METGRLLSLSSLPLVLLGWEYSSQTLNLVPSTSILSFVPFIPLHLVLFALWYLPVPHHLYPQGLGDHAAEAEKGKREEGGTQVALWLRVQPSCPSPVCLGASPKPTLAFPPVVLTGPSTDGIPFALSLQRVPFVLPSPQVASRPPGPLPGVRGLPLPSVFYSCGAHPKVLKVAL

SEQ ID NO: 866336 - protein, 118 aa, Homo sapiens; identical to SEQ ID NO: 866313

SEQ ID NO: 866337 - protein, 121 aa, Homo sapiens; identical to SEQ ID NO: 866320

SEQ ID NO: 866338 - protein, 362 aa, Homo sapiens
ARETQLGLHGCGEILPRALFTMSVLDALWEDRDVRFDLSAQQMKTRPGEVLIDCLDSIEDTKGNNGDRGRLLVTNLRILWHSLALSRVNVSVGYNCILNITTRTANSKLRGQTEALYILTKCNSTRFEFIFTNLVPGSPRLFTSVMAVHRAYETSKMYRDFKLRSALIQNKQLRLLPQEHVYDKINGVWNLSSDQGNLGTFFITNVRIVWHANMNDSFNVSIPYLQIRSIKIRDSKFGLALVIESSQQSGGYVLGFKIDPVEKLQESVKEINSLHKVYSASPIFGVDYEMEEKPQPLEALTVEQIQDDVEIDSDGHTDAFVAYFADGNKQQDREPVFSEELGLAIEKLKDGFTLQGLWEVMS

SEQ ID NO: 866339 - protein, 106 aa, Homo sapiens
YCSLWANRGSWGTKCPIVLALLPPEHLGYLPPACCCCPGRSPAWVTGHRTGVSGQIGGRLSGSQEGLGCLKFQIMNKCILNYITKSEPEERLEVAEKRRPFQDVSE

SEQ ID NO: 866340 - protein, 107 aa, Homo sapiens
MPLSHVCTADSGHWVQSTPASWGNPGLSFPHQTEFGPHNTFHFFTPRASAANFCGHTLFIEKYRSLRSSSTSMSFWQPVAGKEMFSFILKQLYASGGLVPLPLNPTI

SEQ ID NO: 866341 - protein, 603 aa, Homo sapiens
MSAAVTAGKLARAPADPGKAGVPGVAAPGAPAAAPPAKEIPEVLVDPRSRRRYVRGRFLGKGGFAKCFEISDADTKEVFAGKIVPKSLLLKPHQREKMSMEISIHRSLAHQHVVGFHGFFEDNDFVFVVLELCRRRSLLELHKRRKALTEPEARYYLRQIVLGCQYLHRNRVIHRDLKLGNLFLNEDLEVKIGDFGLATKVEYDGERKKTLCGTPNYIAPEVLSKKGHSFEVDVWSIGCIMYTLLVGKPPFETSCLKETYLRIKKNEYSIPKHINPVAASLIQKMLQTDPTARPTINELLNDEFFTSGYIPARLPITCLTIPPRFSIAPSSLDPSNRKPLTVLNKGLENPLPERPREKEEPVVRETGEVVDCHLSDMLQQLHSVNASKPSERGLVRQEEAEDPACIPIFWVSKWVDYSDKYGLGYQLCDNSVGVLFNDSTRLILYNDGDSLQYIERDGTESYLTVSSHPNSLMKKITLLKYFRNYMSEHLLKAGANITPREGDELARLPYLRTWFRTRSAIILHLSNGSVQINFFQDHTKLILCPLMAAVTYIDEKRDFRTYRLSLLEEYGCCKELASRLRYARTMVDKLLSSRSASNRLKAS

SEQ ID NO: 866342 - protein, 603 aa, Homo sapiens; identical to SEQ ID NO: 866341

SEQ ID NO: 866343 - protein, 711 aa, Homo sapiens
MSAAVTAGKLARAPADPGKAGVPGVAAPGAPAAAPPAKEIPEVLVDPRSRRRYVRGRFLGKGGFAKCFEISDADTKEVFAGKIVPKSLLLKPHQREKMSMEISIHRSLAHQHVVGFHGFFEDNDFVFVVLELCRRRSLLELHKRRKALTEPEARYYLRQIVLGCQYLHRNRVIHRDLKLGNLFLNEDLEVKIGDFGLATKVEYDGERKKTLCGTPNYIAPEVLSKKGHSFEVDVWSIGCIMYTLLVGKPPFETSCLKETYLRIKKNEYSIPKHINPVAASLIQKMLQTDPTARPTINELLNDEFFTSGYIPARLPITCLTIPPRFSIAPSSLDPSNRKPLTVLNKGLENPLPERPREKEEPVVRETGEVVDCHLSDMLQQLHSVNASKPSERGLVRQEEAEDPACIPIFWVSKWVDYSDKYGLGYQLCDNSVGVLFNDSTRLILYNDGDSLQYIERDGTESYLTVSSHPNSLMKKITLLKYFRNYMSEHLLKAGANITPREGDELARLPYLRTWFRTRSAIILHLSNGSVQINFFQVSWRSPGAGESWGRLRMPGSGPCGLNVELSGSGSHQAHLVPTDGSRDLHRREAGLPHIPPESPGGVRLLQGAGQPAPLRPHYGGQAAELTLGQQPSQGLLIAALPSGLVPSSLPPASGAHTGWLPRCHVCSVPPSPGGWAELHHPCRWGLLYKLFLYMFGCGFYSLVPLPLNPTI

SEQ ID NO: 866344 - protein, 531 aa, Homo sapiens
MSAAVTAGKLARAPADPGKAGVPGVAAPGAPAAAPPAKEIPEVLVDPRSRRRYVRGRFLGKGGFAKCFEISDADTKEVFAGKIVPKSLLLKPHQREKMSMEISIHRSLAHQHVVGFHGFFEDNDFVFVVLELCRRRSLLELHKRRKALTEPEARYYLRQIVLGCQYLHRNRVIHRDLKLGNLFLNEDLEVKIGDFGLATKVEYDGERKKTLCGTPNYIAPEVLSKKGHSFEVDVWSIGCIMYTLLVGKPPFETSCLKETYLRIKKNEYSIPKHINPVAASLIQKMLQTDPTARPTINELLNDEFFTSGYIPARLPITCLTIPPRFSIAPSSLDPSNRKPLTVLNKGLENPLPERPREKEEPVVRETGEVVDCHLSDMLQQLHSVNASKPSERGLVRQEEAEDPACIPIFWVSKWVDYSDKYGLGYQLCDNSVGVLFNDSTRLILYNDGDSLQYIERDGTESYLTVSSHPNSLMKKITLLKYFRNYMSEHLLKAGANITPREGDELARLPYLRTWFRTRSASLVPLPLNPTI

SEQ ID NO: 866345 - protein, 438 aa, Homo sapiens
MSAAVTAGKLARAPADPGKAGVPGVAAPGAPAAAPPAKEIPEVLVDPRSRRRYVRGRFLGKGGFAKCFEISDADTKEVFAGKIVPKSLLLKPHQREKMSMEISIHRSLAHQHVVGFHGFFEDNDFVFVVLELCRRRSLLELHKRRKALTEPEARYYLRQIVLGCQYLHRNRVIHRDLKLGNLFLNEDLEVKIGDFGLATKVEYDGERKKTLCGTPNYIAPEVLSKKGHSFEVDVWSIGCIMYTLLVGKPPFETSCLKETYLRIKKNEYSIPKHINPVAASLIQKMLQTDPTARPTINELLNDEFFTSGYIPARLPITCLTIPPRFSIAPSSLDPSNRKPLTVLNKGLENPLPERPREKEEPVVRETGEVVDCHLSDMLQQLHSVNASKPSERGLVRQEEAEDPACIPIFWVSKWVDYSDKYGLGRFLPEQVGDSGTAR

SEQ ID NO: 866346 - protein, 289 aa, Homo sapiens
MSAAVTAGKLARAPADPGKAGVPGVAAPGAPAAAPPAKEIPEVLVDPRSRRRYVRGRFLGKGGFAKCFEISDADTKEVFAGKIVPKSLLLKPHQREKMSMEISIHRSLAHQHVVGFHGFFEDNDFVFVVLELCRRRSLLELHKRRKALTEPEARYYLRQIVLGCQYLHRNRVIHRDLKLGNLFLNEDLEVKIGDFGLATKVEYDGERKKTLCGTPNYIAPEVLSKKGHSFEVDVWSIGCIMYTLLVGKPPFETSCLKETYLRIKKNEYSIPKNINREHEYGIFIDSPGR

SEQ ID NO: 866347 - protein, 363 aa, Homo sapiens
MYTLLVGKPPFETSCLKETYLRIKKNEYSIPKHINPVAASLIQKMLQTDPTARPTINELLNDEFFTSGYIPARLPITCLTIPPRFSIAPSSLDPSNRKPLTVLNKGLENPLPERPREKEEPVVRETGEVVDCHLSDMLQQLHSVNASKPSERGLVRQEEAEDPACIPIFWVSKWVDYSDKYGLGYQLCDNSVGVLFNDSTRLILYNDGDSLQYIERDGTESYLTVSSHPNSLMKKITLLKYFRNYMSEHLLKAGANITPREGDELARLPYLRTWFRTRSAIILHLSNGSVQINFFQDHTKLILCPLMAAVTYIDEKRDFRTYRLSLLEEYGCCKELASRLRYARTMVDKLLSSRSASNRLKAS

SEQ ID NO: 866348 - protein, 529 aa, Homo sapiens
CRCAGEGMGWGHREGEKPTKTPLSSLGSPESSPVLPLPGNPLPSPPASIHLPIPPALSFPPTSLLELHKRRKALTEPEARYYLRQIVLGCQYLHRNRVIHRDLKLGNLFLNEDLEVKIGDFGLATKVEYDGERKKTLCGTPNYIAPEVLSKKGHSFEVDVWSIGCIMYTLLVGKPPFETSCLKETYLRIKKNEYSIPKHINPVAASLIQKMLQTDPTARPTINELLNDEFFTSGYIPARLPITCLTIPPRFSIAPSSLDPSNRKPLTVLNKGLENPLPERPREKEEPVVRETGEVVDCHLSDMLQQLHSVNASKPSERGLVRQEEAEDPACIPIFWVSKWVDYSDKYGLGYQLCDNSVGVLFNDSTRLILYNDGDSLQYIERDGTESYLTVSSHPNSLMKKITLLKYFRNYMSEHLLKAGANITPREGDELARLPYLRTWFRTRSAIILHLSNGSVQINFFQDHTKLILCPLMAAVTYIDEKRDFRTYRLSLLEEYGCCKELASRLRYARTMVDKLLSSRSASNRLKAS

SEQ ID NO: 866349 - protein, 495 aa, Homo sapiens
SASGREVLGGGVLVMDARALEYPEEESQSLLELHKRRKALTEPEARYYLRQIVLGCQYLHRNRVIHRDLKLGNLFLNEDLEVKIGDFGLATKVEYDGERKKTLCGTPNYIAPEVLSKKGHSFEVDVWSIGCIMYTLLVGKPPFETSCLKETYLRIKKNEYSIPKHINPVAASLIQKMLQTDPTARPTINELLNDEFFTSGYIPARLPITCLTIPPRFSIAPSSLDPSNRKPLTVLNKGLENPLPERPREKEEPVVRETGEVVDCHLSDMLQQLHSVNASKPSERGLVRQEEAEDPACIPIFWVSKWVDYSDKYGLGYQLCDNSVGVLFNDSTRLILYNDGDSLQYIERDGTESYLTVSSHPNSLMKKITLLKYFRNYMSEHLLKAGANITPREGDELARLPYLRTWFRTRSAIILHLSNGSVQINFFQDHTKLILCPLMAAVTYIDEKRDFRTYRLSLLEEYGCCKELASRLRYARTMVDKLLSSRSASNRLKAS

SEQ ID NO: 866350 - protein, 498 aa, Homo sapiens
NNTQNRSVTGTVFNLDEDTSCRGVGALTPERSLLELHKRRKALTEPEARYYLRQIVLGCQYLHRNRVIHRDLKLGNLFLNEDLEVKIGDFGLATKVEYDGERKKTLCGTPNYIAPEVLSKKGHSFEVDVWSIGCIMYTLLVGKPPFETSCLKETYLRIKKNEYSIPKHINPVAASLIQKMLQTDPTARPTINELLNDEFFTSGYIPARLPITCLTIPPRFSIAPSSLDPSNRKPLTVLNKGLENPLPERPREKEEPVVRETGEVVDCHLSDMLQQLHSVNASKPSERGLVRQEEAEDPACIPIFWVSKWVDYSDKYGLGYQLCDNSVGVLFNDSTRLILYNDGDSLQYIERDGTESYLTVSSHPNSLMKKITLLKYFRNYMSEHLLKAGANITPREGDELARLPYLRTWFRTRSAIILHLSNGSVQINFFQDHTKLILCPLMAAVTYIDEKRDFRTYRLSLLEEYGCCKELASRLRYARTMVDKLLSSRSASNRLKAS

SEQ ID NO: 866351 - protein, 319 aa, Homo sapiens
MLQTDPTARPTINELLNDEFFTSGYIPARLPITCLTIPPRFSIAPSSLDPSNRKPLTVLNKGLENPLPERPREKEEPVVRETGEVVDCHLSDMLQQLHSVNASKPSERGLVRQEEAEDPACIPIFWVSKWVDYSDKYGLGYQLCDNSVGVLFNDSTRLILYNDGDSLQYIERDGTESYLTVSSHPNSLMKKITLLKYFRNYMSEHLLKAGANITPREGDELARLPYLRTWFRTRSAIILHLSNGSVQINFFQDHTKLILCPLMAAVTYIDEKRDFRTYRLSLLEEYGCCKELASRLRYARTMVDKLLSSRSASNRLKAS

SEQ ID NO: 866352 - protein, 293 aa, Homo sapiens
MGQWNEGVSGTWCAVLRLSLQRYLCCCLSEPAGSRGPALLFSGALGLSTEPRWGAQQASLFPGVGHMCGAEGKRLVLTNNCLSVSVSEEAEDPACIPIFWVSKWVDYSDKYGLGYQLCDNSVGVLFNDSTRLILYNDGDSLQYIERDGTESYLTVSSHPNSLMKKITLLKYFRNYMSEHLLKAGANITPREGDELARLPYLRTWFRTRSAIILHLSNGSVQINFFQDHTKLILCPLMAAVTYIDEKRDFRTYRLSLLEEYGCCKELASRLRYARTMVDKLLSSRSASNRLKAS

SEQ ID NO: 866353 - protein, 86 aa, Homo sapiens
GVRPPTRLAPRPGKYILATDHTKLILCPLMAAVTYIDEKRDFRTYRLSLLEEYGCCKELASRLRYARTMVDKLLSSRSASNRLKAS

SEQ ID NO: 866354 - protein, 80 aa, Homo sapiens
  misc_feature (11)..(11): Xaa can be any naturally occurring amino acid
ALQPPTEESLXKTDHTKLILCPLMAAVTYIDEKRDFRTYRLSLLEEYGCCKELASRLRYARTMVDKLLSSRSASNRLKAS

SEQ ID NO: 866355 - protein, 603 aa, Homo sapiens; identical to SEQ ID NO: 866341

SEQ ID NO: 866356 - protein, 653 aa, Homo sapiens
IRPTLISSTQPEPKETKQIIRLGRRPVVNRPSGAVRRLCSDRGLQRSFGSMSAAVTAGKLARAPADPGKAGVPGVAAPGAPAAAPPAKEIPEVLVDPRSRRRYVRGRFLGKGGFAKCFEISDADTKEVFAGKIVPKSLLLKPHQREKMSMEISIHRSLAHQHVVGFHGFFEDNDFVFVVLELCRRRSLLELHKRRKALTEPEARYYLRQIVLGCQYLHRNRVIHRDLKLGNLFLNEDLEVKIGDFGLATKVEYDGERKKTLCGTPNYIAPEVLSKKGHSFEVDVWSIGCIMYTLLVGKPPFETSCLKETYLRIKKNEYSIPKHINPVAASLIQKMLQTDPTARPTINELLNDEFFTSGYIPARLPITCLTIPPRFSIAPSSLDPSNRKPLTVLNKGLENPLPERPREKEEPVVRETGEVVDCHLSDMLQQLHSVNASKPSERGLVRQEEAEDPACIPIFWVSKWVDYSDKYGLGYQLCDNSVGVLFNDSTRLILYNDGDSLQYIERDGTESYLTVSSHPNSLMKKITLLKYFRNYMSEHLLKAGANITPREGDELARLPYLRTWFRTRSAIILHLSNGSVQINFFQDHTKLILCPLMAAVTYIDEKRDFRTYRLSLLEEYGCCKELASRLRYARTMVDKLLSSRSASNRLKAS

SEQ ID NO: 866357 - protein, 616 aa, Homo sapiens
MSAAVTAGKLARAPADPGKAGVPGVAAPGAPAAAPPAKEIPEVLVDPRSRRRYVRGRFLGKGGFAKCFEISDADTKEVFAGKIVPKSLLLKPHQREKMSMEISIHRSLAHQHVVGFHGFFEDNDFVFVVLELCRRRSLLELHKRRKALTEPEARYYLRQIVLGCQYLHRNRVIHRDLKLGNLFLNEDLEVKIGDFGLATKVEYDGERKKTLCGTPNYIAPEVLSKKGHSFEVDVWSIGCIMYTLLVGKPPFETSCLKETYLRIKKNEYSIPKHINPVAASLIQKMLQTDPTARPTINELLNDEFFTSGYIPARLPITCLTIPPRFSIAPSSLDPSNRKPLTVLNKGLENPLPERPREKEEPVVRETGEVVDCHLSDMLQQLHSVNASKPSERGLVRQEEAEDPACIPIFWVSKWVDYSDKYGLGYQLCDNSVGVLFNDSTRLILYNDGDSLQYIERDGTESYLTVSSHPNSLMKKITLLKYFRNYMSEHLLKAGANITPREGDELARLPYLRTWFRTRSAIILHLSNGSVQINFFQDHNQATSLEPHGWQTVNLIRSEKRGTFPDITGLKVHPVEGSKTLAATGAWPQHGTRLRPGTKVAKPDAHTIEPDNDLTGP

SEQ ID NO: 866358 - protein, 306 aa, Homo sapiens
MSAAVTAGKLARAPADPGKAGVPGVAAPGAPAAAPPAKEIPEVLVDPRSRRRYVRGRFLGKGGFAKCFEISDADTKEVFAGKIVPKSLLLKPHQREKMSMEISIHRSLAHQHVVGFHGFFEDNDFVFVVLELCRRRSLLELHKRRKALTEPEARYYLRQIVLGCQYLHRNRVIHRDLKLGNLFLNEDLEVKIGDFGLATKVEYDGERKKTLCGTPNYIAPEVLSKKGHSFEVDVWSIGCIMYTLLVGKPPFETSCLKETYLRIKKNEYSIPKVTNDALSLHLFCFPQKLFMEPSNILGPEIGLSHL

SEQ ID NO: 866359 - protein, 516 aa, Homo sapiens
LGNWNCLRGSWSAQTWSCWKEYPARESLGLGAAREGCWEPPAYVWKVSLSLLELHKRRKALTEPEARYYLRQIVLGCQYLHRNRVIHRDLKLGNLFLNEDLEVKIGDFGLATKVEYDGERKKTLCGTPNYIAPEVLSKKGHSFEVDVWSIGCIMYTLLVGKPPFETSCLKETYLRIKKNEYSIPKHINPVAASLIQKMLQTDPTARPTINELLNDEFFTSGYIPARLPITCLTIPPRFSIAPSSLDPSNRKPLTVLNKGLENPLPERPREKEEPVVRETGEVVDCHLSDMLQQLHSVNASKPSERGLVRQEEAEDPACIPIFWVSKWVDYSDKYGLGYQLCDNSVGVLFNDSTRLILYNDGDSLQYIERDGTESYLTVSSHPNSLMKKITLLKYFRNYMSEHLLKAGANITPREGDELARLPYLRTWFRTRSAIILHLSNGSVQINFFQDHTKLILCPLMAAVTYIDEKRDFRTYRLSLLEEYGCCKELASRLRYARTMVDKLLSSRSASNRLKAS

SEQ ID NO: 866360 - protein, 233 aa, Homo sapiens
SGASKTWWNCQAGDGETGRDIARSKELVIKQFVNGWAGSGICLKHLLDEGGGHGYQLCDNSVGVLFNDSTRLILYNDGDSLQYIERDGTESYLTVSSHPNSLMKKITLLKYFRNYMSEHLLKAGANITPREGDELARLPYLRTWFRTRSAIILHLSNGSVQINFFQDHTKLILCPLMAAVTYIDEKRDFRTYRLSLLEEYGCCKELASRLRYARTMVDKLLSSRSASNRLKAS

SEQ ID NO: 866361 - protein, 83 aa, Homo sapiens
PLALITNYVWMKGISTDHTKLILCPLMAAVTYIDEKRDFRTYRLSLLEEYGCCKELASRLRYARTMVDKLLSSRSASNRLKAS

SEQ ID NO: 866362 - protein, 164 aa, Homo sapiens
GAFGKVKVGKHELTGHKVAVKILNRQKIRSLDVVGKIRREIQNLKLFRHPHIIKLYQVISTPSDIFMVMEYVSGGELFDYICKNGRLDEKESRRLFQQILSGVDYCHRHMVVHRDLKPENVLLDAHMNAKIADFGLSNMMSDGEFLRTSCGSPNYAAPEVISGR

SEQ ID NO: 866363 - protein, 88 aa, Homo sapiens
RLSSWRKMATAEKQKHDGRVKIGHYILGDTLGVGTFGKVKVGKHELTGHKVAVKILNRQKIRSLDVVGKIRREIQNLKLFRHPHIIKL

SEQ ID NO: 866364 - protein, 550 aa, Homo sapiens
MATAEKQKHDGRVKIGHYILGDTLGVGTFGKVKVGKHELTGHKVAVKILNRQKIRSLDVVGKIRREIQNLKLFRHPHIIKLYQVISTPSDIFMVMEYVSGGELFDYICKNGRLDEKESRRLFQQILSGVDYCHRHMVVHRDLKPENVLLDAHMNAKIADFGLSNMMSDGEFLRTSCGSPNYAAPEVISGRLYAGPEVDIWSSGVILYALLCGTLPFDDDHVPTLFKKICDGIFYTPQYLNPSVISLLKHMLQVDPMKRATIKDIREHEWFKQDLPKYLFPEDPSYSSTMIDDEALKEVCEKFECSEEEVLSCLYNRNHQDPLAVAYHLIIDNRRIMNEAKDFYLATSPPDSFLDDHHLTRPHPERVPFLVAETPRARHTLDELNPQKSKHQGVRKAKWHLGIRSQSRPNDIMAEVCRAIKQLDYEWKVVNPYYLRVRRKNPVTSTYSKMSLQLYQVDSRTYLLDFRSIDDEITEAKSGTATPQRSGSVSNYRSCQRSDSDAEAQGKSSEVSLTSSVTSLDSSPVDLTPRPGSHTIEFFEMCANLIKILAQ

SEQ ID NO: 866365 - protein, 263 aa, Homo sapiens
MATAEKQKHDGRVKIGHYILGDTLGVGTFGKVKVGKHELTGHKVAVKILNRQKIRSLDVVGKIRREIQNLKLFRHPHIIKLYQVISTPSDIFMVMEYVSGGELFDYICKNGRLDEKESRRLFQQILSGVDYCHRHMVVHRDLKPENVLLDAHMNAKIADFGLSNMMSDGEFLRTSCGSPNYAAPEVISGRLYAGPEVDIWSSGVILYALLCGTLPFDDDHVPTLFKKICDGIFYTPQYLNPSVISLLKHMLQVDDRTRLDLKI

SEQ ID NO: 866366 - protein, 207 aa, Homo sapiens
MATAEKQKHDGRVKIGHYILGDTLGVGTFGKVKVGKHELTGHKVAVKILNRQKIRSLDVVGKIRREIQNLKLFRHPHIIKLYQVISTPSDIFMVMEYVSGGELFDYICKNGRLDEKESRRLFQQILSGVDYCHRHMVVHRDLKPENVLLDAHMNAKIADFGLSNMMSDGEFLRTSCGSPNYAAPEVISGRDCNIIRILTSQFTNYQH

SEQ ID NO: 866367 - protein, 122 aa, Homo sapiens
MATAEKQKHDGRVKIGHYILGDTLGVGTFGKVKVGKHELTGHKVAVKILNRQKIRSLDVVGKIRREIQNLKLFRHPHIIKLVLKSFFLGCVRWLTPVIPVLWEAEAGGSPEVRSSRPAWPTW

SEQ ID NO: 866368 - protein, 479 aa, Homo sapiens
MATAEKQKHDGRVKIGHYILGDTLGVGTFGKVKVGKHELTGHKVAVKILNRQKIRSLDVVGKIRREIQNLKLFRHPHIIKLYQVISTPSDIFMVMEYVSGGELFDYICKNGRLDEKESRRLFQQILSGVDYCHRHMVVHRDLKPENVLLDAHMNAKIADFGLSNMMSDGEFLRTSCGSPNYAAPEVISGRLYAGPEVDIWSSGVILYALLCGTLPFDDDHVPTLFKKICDGIFYTPQYLNPSVISLLKHMLQVDPMKRATIKDIREHEWFKQDLPKYLFPEDPSYSSTMIDDEALKEVCEKFECSEEEVLSCLYNRNHQDPLAVAYHLIIDNRRIMNEAKDFYLATSPPDSFLDDHHLTRPHPERVPFLVAETPRARHTLDELNPQKSKHQGVRKAKWHLGIRSQSRPNDIMAEVCRAIKQLDYEWKVVNPYYLRVRRKNPVTSTYSKMSLQLYQVDSRTYLLDFRSIDGMYITQNNID

SEQ ID NO: 866369 - protein, 271 aa, Homo sapiens
SGGDRDDKIFIEEMKSGSVCEKFECSEEEVLSCLYNRNHQDPLAVAYHLIIDNRRIMNEAKDFYLATSPPDSFLDDHHLTRPHPERVPFLVAETPRARHTLDELNPQKSKHQGVRKAKWHLGIRSQSRPNDIMAEVCRAIKQLDYEWKVVNPYYLRVRRKNPVTSTYSKMSLQLYQVDSRTYLLDFRSIDDEITEAKSGTATPQRSGSVSNYRSCQRSDSDAEAQGKSSEVSLTSSVTSLDSSPVDLTPRPGSHTIEFFEMCANLIKILAQ

SEQ ID NO: 866370 - protein, 265 aa, Homo sapiens
MATAEKQKHDGRVKIGHYILGDTLGVGTFGKVKVGKHELTGHKVAVKILNRQKIRSLDVVGKIRREIQNLKLFRHPHIIKLYQVISTPSDIFMVMEYVSGGELFDYICKNGRLDEKESRRLFQQILSGVDYCHRHMVVHRDLKPENVLLDAHMNAKIADFGLSNMMSDGEFLRTSCGSPNYAAPEVISGRLYAGPEVDIWSSGVILYALLCGTLPFDDDHVPTLFKKICDGIFYTPQYLNPSVISLLKHMLQVDPMKRATIKDIR

SEQ ID NO: 866371 - protein, 420 aa, Homo sapiens
MSGRPRTTSFAESCKPVQQPSAFGSMKVSRDKDGSKVTTVVATPGQGPDRPQEVSYTDTKVIGNGSFGVVYQAKLCDSGELVAIKKVLQDKRFKNRELQIMRKLDHCNIVRLRYFFYSSGEKKDEVYLNLVLDYVPETVYRVARHYSRAKQTLPVIYVKLYMYQLFRSLAYIHSFGICHRDIKPQNLLLDPDTAVLKLCDFGSAKQLVRGEPNVSYICSRYYRAPELIFGATDYTSSIDVWSAGCVLAELLLGQPIFPGDSGVDQLVEIIKVLGTPTREQIREMNPNYTEFKFPQIKAHPWTKVFRPRTPPEAIALCSRLLEYTPTARLTPLEACAHSFFDELRDPNVKLPNGRDTPALFNFTTQELSSNPPLATILIPPHARIQAAASTPTNATAASDANTGDRGQTNNAASASASNST

SEQ ID NO: 866372 - protein, 420 aa, Homo sapiens; identical to SEQ ID NO: 866371

SEQ ID NO: 866373 - protein, 420 aa, Homo sapiens; identical to SEQ ID NO: 866371

SEQ ID NO: 866374 - protein, 387 aa, Homo sapiens
MSGRPRTTSFAESCKPVQQPSAFGSMKVSRDKDGSKVTTVVATPGQGPDRPQEVSYTDTKVIGNGSFGVVYQAKLCDSGELVAIKKVLQDKRFKNRELQIMRKLDHCNIVRLRYFFYSSGEKKDEVYLNLVLDYVPETVYRVARHYSRAKQTLPVIYVKLYMYQLFRSLAYIHSFGICHRDIKPQNLLLDPDTAVLKLCDFGSAKQLVRGEPNVSYICSRYYRAPELIFGATDYTSSIDVWSAGCVLAELLLGQPIFPGDSGVDQLVEIIKVLGTPTREQIREMNPNYTEFKFPQIKAHPWTKVFRPRTPPEAIALCSRLLEYTPTARLTPLEACAHSFFDELRDPNVKLPNGRDTPALFNFTTQDANTGDRGQTNNAASASASNST

SEQ ID NO: 866375 - protein, 501 aa, Homo sapiens
MSGRPRTTSFAESCKPVQQPSAFGSMKVSRDKDGSKVTTVVATPGQGPDRPQEVSYTDTKVIGNGSFGVVYQAKLCDSGELVAIKKVLQDKRFKNRELQIMRKLDHCNIVRLRYFFYSSGEKKDEVYLNLVLDYVPETVYRVARHYSRAKQTLPVIYVKLYMYQLFRSLAYIHSFGICHRDIKPQNLLLDPDTAVLKLCDFGSAKQLVRGEPNVSYICSRYYRAPELIFGATDYTSSIDVWSAGCVLAELLLGQPIFPGDSGVDQLVEIIKVLGTPTREQIREMNPNYTEFKFPQIKAHPWTKDSSGTGHFTSGVRVFRPRTPPEAIALCSRLLEYTPTARLTVVYRAVGVYSSRGDHWKLVHIHFLMNYGTQMSNYQMGETHLHSSTSPLKNCQVIHLWLPSLFLLMLGFKQLLQPPQMPQQRQMLILETVDRPIMLLLHQLPTPPEQSRAASCTGKTTSYLSVTQQHWSRLERILKREKNPVHFSVQFFYYYCCSYLTL

SEQ ID NO: 866376 - protein, 137 aa, Homo sapiens [sequence omitted]

SEQ ID NO: 866377 - protein, 266 aa, Homo sapiens
HEESAIRIQQEVLRFNIPMADSKGMDIGKLRNLLLDPDTAVLKLCDFGSAKQLVRGEPNVSYICSRYYRAPELIFGATDYTSSIDVWSAGCVLAELLLGQPIFPGDSGVDQLVEIIKVLGTPTREQIREMNPNYTEFKFPQIKAHPWTKVFRPRTPPEAIALCSRLLEYTPTARLTPLEACAHSFFDELRDPNVKLPNGRDTPALFNFTTQELSSNPPLATILIPPHARIQAAASTPTNATAASDANTGDRGQTNNAASASASNST

SEQ ID NO: 866378 - protein, 433 aa, Homo sapiens
MSGRPRTTSFAESCKPVQQPSAFGSMKVSRDKDGSKVTTVVATPGQGPDRPQEVSYTDTKVIGNGSFGVVYQAKLCDSGELVAIKKVLQDKRFKNRELQIMRKLDHCNIVRLRYFFYSSGEKKDEVYLNLVLDYVPETVYRVARHYSRAKQTLPVIYVKLYMYQLFRSLAYIHSFGICHRDIKPQNLLLDPDTAVLKLCDFGSAKQLVRGEPNVSYICSRYYRAPELIFGATDYTSSIDVWSAGCVLAELLLGQPIFPGDSGVDQLVEIIKVLGTPTREQIREMNPNYTEFKFPQIKAHPWTKDSSGTGHFTSGVRVFRPRTPPEAIALCSRLLEYTPTARLTPLEACAHSFFDELRDPNVKLPNGRDTPALFNFTTQELSSNPPLATILIPPHARIQAAASTPTNATAASDANTGDRGQTNNAASASASNST

SEQ ID NO: 866379 - protein, 277 aa, Homo sapiens
MSGRPRTTSFAESCKPVQQPSAFGSMKVSRDKDGSKVTTVVATPGQGPDRPQEVSYTDTKVIGNGSFGVVYQAKLCDSGELVAIKKVLQDKRFKNRELQIMRKLDHCNIVRLRYFFYSSGEKKDEVYLNLVLDYVPETVYRVARHYSRAKQTLPVIYVKLYMYQLFRSLAYIHSFGICHRDIKPQNLLLDPDTAVLKLCDFGSAKQLVRGEPNVSYICSRYYRAPELIFGATDYTSSIDVWSAGCVLAELLLGQPIFPGDSGVDQLVEIIKYFERKT

SEQ ID NO: 866380 - protein, 165 aa, Homo sapiens
  misc_feature (12)..(13): Xaa can be any naturally occurring amino acid
PAASLTCASFKXXCTQVLGTPTREQIREMNPNYTEFKFPQIKAHPWTKVFRPRTPPEAIALCSRLLEYTPTARLTPLEACAHSFFDELRDPNVKLPNGRDTPALFNFTTQELSSNPPLATILIPPHARIQAAASTPTNATAASDANTGDRGQTNNAASASASNST

SEQ ID NO: 866381 - protein, 396 aa, Homo sapiens
MDPRGTKRGAEKTEVAEPRNKLPRPAPSLPTDPALYSGPFPFYRRPSELGCFSLDAQRQYHGDARALRYYSPPPTNGPGPNFDLRDGYPDRYQPRDEEVQERLDHLLCWLLEHRGRLEGGPGWLAEAIVTWRGHLTKLLTTPYERQEGWQLAASRFQGTLYLSEVETPNARAQRLARPPLLRELMYMGYKFEQYMCADKPGSSPDPSGEVNTNVAFCSVLRSRLGSHPLLFSGEVDCTDPQAPSTQPPTCYVELKTSKEMHSPGQWRSFYRHKLLKWWAQSFLPGVPNVVAGFRNPDGFVSSLKTFPTMKMFEYVRNDRDGWNPSVCMNFCAAFLSFAQSTVVQDDPRLVHLFSWEPGGPVTVSVHQDAPYAFLPIWYVEAMTQDLPSPPKTPSPK

SEQ ID NO: 866382 - protein, 327 aa, Homo sapiens
MDPRGTKRGAEKTEVAEPRNKLPRPAPSLPTDPALYSGPFPFYRRPSELGCFSLDAQRQYHGDARALRYYSPPPTNGPGPNFDLRDGYPDRYQPRDEEVQERLDHLLCWLLEHRGRLEGGPGWLAEAIVTWRGHLTKLLTTPYERQEGWQLAASRFQGTLYLSEVETPNARAQRLARPPLLRELMYMGYKFEQYMCADKPGSSPDPSGEVNTNVAFCSVLRSRLGSHPLLFSGLKTFPTMKMFEYVRNDRDGWNPSVCMNFCAAFLSFAQSTVVQDDPRLVHLFSWEPGGPVTVSVHQDAPYAFLPIWYVEAMTQDLPSPPKTPSPK

SEQ ID NO: 866383 - protein, 166 aa, Homo sapiens
MYMGSNRTGRVGKRVGKLTRGGQEVDCTDPQAPSTQPPTCYVELKTSKEMHSPGQWRSFYRHKLLKWWAQSFLKTFPTMKMFEYVRNDRDGWNPSVCMNFCAAFLSFAQSTVVQDDPRLVHLFSWEPGGPVTVSVHQDAPYAFLPIWYVEAMTQDLPSPPKTPSPK

SEQ ID NO: 866384 - protein, 113 aa, Homo sapiens
PRPGDDERSVNLSSLRPVSAGRGGGDAHTSITSARPGPTPAADWLPPRARTPGDSLAAWRGAGGHVGVNLLREAHTSPAPGGVCPPLSLNDCIIESRKPLLHPSASGVPAMTS

SEQ ID NO: 866385 - protein, 281 aa, Homo sapiens [sequence omitted]

SEQ ID NO: 866386 - protein, 335 aa, Homo sapiens [sequence omitted]

SEQ ID NO: 866387 - protein, 212 aa, Homo sapiens
MDPRGTKRGAEKTEVAEPRNKLPRPAPSLPTDPALYSGPFPFYRRPSELGCFSLDAQRQYHGDARALRYYSPPPTNGPGPNFDLRDGYPDRYQPRDEEVQERLDHLLCWLLEHRGRLEGGPGWLAEAIVTWRGHLTKLLTTPYERQEGWQLAASRFQGTLYLSEVETPNARAQRLARPPLLRELMYMGYKFEQYMCAGELPLLHSPLPLPRG

SEQ ID NO: 866388 - protein, 396 aa, Homo sapiens; identical to SEQ ID NO: 866381

SEQ ID NO: 866389 - protein, 396 aa, Homo sapiens; identical to SEQ ID NO: 866381

SEQ ID NO: 866390 - protein, 281 aa, Homo sapiens [sequence omitted]

SEQ ID NO: 866391 - protein, 475 aa, Homo sapiens
MAAVGSGGYARNDAGEKLPSVMAGVPARRGQSSPPPAPPICLRRRTRLSTASEETVQNRVSLEKVLGITAQNSSGLTCDPGTGHVAYLAGCVVVILDPKENKQQHIFNTARKSLSALAFSPDGKYIVTGENGHRPAVRIWDVEEKNQVAEMLGHKYGVACVAFSPNMKHIVSMGYQHDMVLNVWDWKKDIVVASNKVSCRVIALSFSEDSSYFVTVGNRHVRFWFLEVSTETKVTSTVPLVGRSGILGELHNNIFCGVACGRGRMAGSTFCVSYSGLLCQFNEKRVLEKWINLKVSLSSCLCVSQELIFCGCTDGIVRIFQAHSLHYLANLPKPHYLGVDVAQGLEPSSTGRRKQLYPDTVALTFDPIHQWLSCVYKDHSIYIWDVKDINRVGKVWSELFHSSYVWNVEVYPEFEDQRACLPSGSFLTCSSDNTIRFWNLDSSPDSHWQKNIFSNTLLKVVYVENDIQHLQDMSH

SEQ ID NO: 866392 - protein, 74 aa, Homo sapiens
IFCGVACGRGRMAGSTFCVSYSGLLCQFNEKRVLEKWINLKVPPPSLPSAGQTLSRDMCLQGCSSALTTQVLLM

SEQ ID NO: 866393 - protein, 706 aa, Homo sapiens
MNESKPGDSQNLACVFCRKHDDCPNKYGEKKTKEKWNLTVHYYCLLMSSGIWQRGKEEEGVYGFLIEDIRKEVNRASKLKCCVCKKNGASIGCVAPRCKRSYHFPCGLQRECIFQFTGNFASFCWDHRPVQIITSNNYRESLPCTICLEFIEPIPSYNILRSPCCKNAWFHRDCLQVQAINAGVFFFRCTICNNSDIFQKEMLRMGIHIPEKDASWELEENAYQELLQHYERCDVRRCRCKEGRDYNAPDSKWEIKRCQCCGSSGTHLACSSLRSWEQNWECLECRGIIYNSGEFQKAKKHVLPNSNNVGITDCLLEESSPKLPRQSPGSQSKDLLRQGSKFRRNVSTLLIELGFQIKKKTKRLYINKANIWNSALDAFRNRNFNPSYAIEVAYVIENDNFGSEHPGSKQEFLSLLMQHLENSSLFEGSLSKNLSLNSQALKENLYYEAGKMLAISLVHGGPSPGFFSKTLFNCLVYGPENTQPILDDVSDFDVAQIIIRINTATTVADLKSIINECYNYLELIGCLRLITTLSDKYMLVKDILGYHVIQRVHTPFESFKQGLKTLGVLEKIQAYPEAFCSILCHKPESLSAKILSELFTVHTLPDVKALGFWNSYLQAVEDGKSTTTMEDILIFATGCSSIPPAGFKPTPSIECLHVDFPVGNKCNNCLAIPITNTYKEFQENMDFTIRNTLRLEKEESSHYIGH

SEQ ID NO: 866394 - protein, 242 aa, Homo sapiens
KWEFESCGPLNVAARGRRAPTYSGPGKVALRLWNFCPALLACVFCRKHDDCPNKYGEKKTKEKWNLTVHYYCLLMSSGIWQRGKEEEGVYGFLIEDIRKEVNRASKLKCCVCKKNGASIGCVAPRCKRSYHFPCGLQRECIFQFTGNFASFCWDHRPVQIITSNNYRESLPCTICLEFIEPIPSYNILRSPCCKNAWFHRDCLQVQAINAGVFFFRCTICNNSDIFQKEMLRMGIHIPEKSE

SEQ ID NO: 866395 - protein, 734 aa, Homo sapiens
KWEFESCGPLNVAARGRRAPTYSGPGKVALRLWNFCPALLACVFCRKHDDCPNKYGEKKTKEKWNLTVHYYCLLMSSGIWQRGKEEEGVYGFLIEDIRKEVNRASKLKCCVCKKNGASIGCVAPRCKRSYHFPCGLQRECIFQFTGNFASFCWDHRPVQIITSNNYRESLPCTICLEFIEPIPSYNILRSPCCKNAWFHRDCLQVQAINAGVFFFRCTICNNSDIFQKEMLRMGIHIPEKDASWELEENAYQELLQHYERCDVRRCRCKEGRDYNAPDSKWEIKRCQCCGSSGTHLACSSLRSWEQNWECLECRGIIYNSGEFQKAKKHVLPNSNNVGITDCLLEESSPKLPRQSPGSQSKDLLRQGSKFRRNVSTLLIELGFQIKKKTKRLYINKANIWNSALDAFRNRNFNPSYAIEVAYVIENDNFGSEHPGSKQEFLSLLMQHLENSSLFEGSLSKNLSLNSQALKENLYYEAGKMLAISLVHGGPSPGFFSKTLFNCLVYGPENTQPILDDVSDFDVAQIIIRINTATTVADLKSIINECYNYLELIGCLRLITTLSDKYMLVKDILGYHVIQRVHTPFESFKQGLKTLGVLEKIQAYPEAFCSILCHKPESLSAKILSELFTVHTLPDVKALGFWNSYLQAVEDGKSTTTMEDILIFATGCSSIPPAGFKPTPSIECLHVDFPVGNKCNNCLAIPITNTYKEFQENMDFTIRNTLRLEKEESSHYIGH

SEQ ID NO: 866396 - protein, 706 aa, Homo sapiens; identical to SEQ ID NO: 866393

SEQ ID NO: 866397 - protein, 687 aa, Homo sapiens
MNESKPGDSQNLACVFCRKHDDCPNKYGEKKTKEKWNLTVHYYCLLMSSGIWQRGKEEEGVYGFLIEDIRKEVNRASKLKRSYHFPCGLQRECIFQFTGNFASFCWDHRPVQIITSNNYRESLPCTICLEFIEPIPSYNILRSPCCKNAWFHRDCLQVQAINAGVFFFRCTICNNSDIFQKEMLRMGIHIPEKDASWELEENAYQELLQHYERCDVRRCRCKEGRDYNAPDSKWEIKRCQCCGSSGTHLACSSLRSWEQNWECLECRGIIYNSGEFQKAKKHVLPNSNNVGITDCLLEESSPKLPRQSPGSQSKDLLRQGSKFRRNVSTLLIELGFQIKKKTKRLYINKANIWNSALDAFRNRNFNPSYAIEVAYVIENDNFGSEHPGSKQEFLSLLMQHLENSSLFEGSLSKNLSLNSQALKENLYYEAGKMLAISLVHGGPSPGFFSKTLFNCLVYGPENTQPILDDVSDFDVAQIIIRINTATTVADLKSIINECYNYLELIGCLRLITTLSDKYMLVKDILGYHVIQRVHTPFESFKQGLKTLGVLEKIQAYPEAFCSILCHKPESLSAKILSELFTVHTLPDVKALGFWNSYLQAVEDGKSTTTMEDILIFATGCSSIPPAGFKPTPSIECLHVDFPVGNKCNNCLAIPITNTYKEFQENMDFTIRNTLRLEKEESSHYIGH

SEQ ID NO: 866398 - protein, 706 aa, Homo sapiens; identical to SEQ ID NO: 866393

SEQ ID NO: 866399 - protein, 214 aa, Homo sapiens
MNESKPGDSQNLACVFCRKHDDCPNKYGEKKTKEKWNLTVHYYCLLMSSGIWQRGKEEEGVYGFLIEDIRKEVNRASKLKCCVCKKNGASIGCVAPRCKRSYHFPCGLQRECIFQFTGNFASFCWDHRPVQIITSNNYRESLPCTICLEFIEPIPSYNILRSPCCKNAWFHRDCLQVQAINAGVFFFRCTICNNSDIFQKEMLRMGIHIPEKSE

SEQ ID NO: 866400 - protein, 706 aa, Homo sapiens; identical to SEQ ID NO: 866393

SEQ ID NO: 866401 - protein, 706 aa, Homo sapiens; identical to SEQ ID NO: 866393

SEQ ID NO: 866402 - protein, 706 aa, Homo sapiens; identical to SEQ ID NO: 866393

SEQ ID NO: 866403 - protein, 706 aa, Homo sapiens; identical to SEQ ID NO: 866393

SEQ ID NO: 866404 - protein, 290 aa, Homo sapiens
MQHLENSSLFEGSLSKNLSLNSQALKENLYYEAGKMLAISLVHGGPSPGFFSKTLFNCLVYGPENTQPILDDVSDFDVAQIIIRINTATTVADLKSIINECYNYLELIGCLRLITTLSDKYMLVKDILGYHVIQRVHTPFESFKQGLKTLGVLEKIQAYPEAFCSILCHKPESLSAKILSELFTVHTLPDVKALGFWNSYLQAVEDGKSTTTMEDILIFATGCSSIPPAGFKPTPSIECLHVDFPVGNKCNNCLAIPITNTYKEFQENMDFTIRNTLRLEKEESSHYIGH

SEQ ID NO: 866405 - protein, 87 aa, Homo sapiens
  misc_feature (42)..(42): Xaa can be any naturally occurring amino acid
LQTHSSDRPPLVKCFHMPHMCLLSFLGHFGGTVPLHSLKGSXGIIGNPGSPSRLLSRAVDCKRPRKANWYPRPPASVFLHSLILFRR

SEQ ID NO: 866406 - protein, 210 aa, Homo sapiens
MNESKPGDSQNLACVFCRKHDDCPNKYGEKKTKEKWNLTVHYYCLLMSSGIWQRGKEEEGVYGFLIEDIRKEVNRASKLKCCVCKKNGASIGCVAPRCKRSYHFPCGLQRECIFQFTGNFASFCWDHRPVQIITSNNYRESLPCTICLEFIEPIPSYNILRSPCCKNAWFHRDCLQQMGNKALSVLWFQWHTFSLLLITVMGAKLGVFGM

SEQ ID NO: 866407 - protein, 101 aa, Homo sapiens
MVFHTAHLDISRTTMRWFRREFMQMRGQKWYSDPVHVLQAHDLGAPWSWTEEEAAQRESSWSRPALQPPLSRQPDGPARPPGMAPSHRPWLRSLGRSVTCR

SEQ ID NO: 866408 - protein, 101 aa, Homo sapiens; identical to SEQ ID NO: 866407

SEQ ID NO: 866409 - protein, 101 aa, Homo sapiens; identical to SEQ ID NO: 866407

SEQ ID NO: 866410 - protein, 101 aa, Homo sapiens; identical to SEQ ID NO: 866407

SEQ ID NO: 866411 - protein, 104 aa, Homo sapiens
SIPAAGQDSNPHLSGSTVDLHMRQLLLVKQDGRTQPIGVDGAGQSLLKTFRAQHSPASSTGQCIEAGSLLQAMFFLQQFCFWNAEFGAHACNPSTLGGQGRRIA

SEQ ID NO: 866412 - protein, 125 aa, Homo sapiens
CAGRGLISASGWRFPVSCSGSLAVTMELLGEYVGQEGKPQKLRVSCEAPGDGDPFQGLLSGVAQMKDMVTELFDPLVQGEVQHRVAAAPDEDLDGDDEDDAEDENNIDNRTNFDGPSAKRPKTPS

SEQ ID NO: 866413 - protein, 125 aa, Homo sapiens; identical to SEQ ID NO: 866412

SEQ ID NO: 866414 - protein, 106 aa, Homo sapiens
CAGRGLISASGWRFPVSCSGSLAVTMELLGEYVGQEGKPQKLRVSCEAPGDGDPFQGLLSGVAQMKDMVMMKMMQKMKITLITELTSMDHLQNGQKHRLNNSLHDI

SEQ ID NO: 866415 - protein, 125 aa, Homo sapiens; identical to SEQ ID NO: 866412

SEQ ID NO: 866416 - protein, 219 aa, Homo sapiens
MPLHSGLGDRVRLCLKKQHQQKQQTTTNKQQTAPRGAAAKESSTGGAPPYGVNQGIEQQQEAHQDNGGEHTPETTADVEHNKQERGNAVTKRKKAEHHQQGGGHNKEQDTHQERKTRARHKQNHEHAYRGQADGQWEPAHTLATQTAALRAQIQRENEKEARRNRAQKRTGEEPREHSTRSSDDTHTQGNGSNAQKERHAASNQSERHAHTTSEGENRR

SEQ ID NO: 866417 - protein, 533 aa, Homo sapiens
MKMRRYKLFLMFCMAGLCLISFLHFFKTLSYVTFPRELASLSPNLVSSFFWNNAPVTPQASPEPGGPDLLRTHSTPTLPLLQPLPPSKAAEELHRVDLVLPEDTTEYFVRTKAGGVCFKPGTKMLERPPPGRPEEKPEGANGSSARRPPRYLLSARERTGGRGARRKWVECVCLPGWHGPSCGVPTVVQYSNLPTKERLVPREVPRRVINAINVNHEFDLLDVRFHELGDVVDAFVVCESNFTAYGEPRPLKFREMLTNGTFEYIRHKVLYVFLDHFPPGGRQDGWIADDYLRTFLTQDGVSRLRNLRPDDVFIIDDADEIPARDGVLFLKLYDGWTEPFAFHMRKSLYGFFWKQPGTLEVVSGCTVDMLQAVYGLDGIRLRRRQYYTMPNFRQYENRTGHILVQWSLGSPLHFAGWHCSWCFTPEGIYFKLVSAQNGDFPRWGDYEDKRDLNYIRGLIRTGGWFDGTQQEYPPADPSEHMYAPKYLLKNYDRFHYLLDNPYQEPRSTAAGGWRHRGPEGRPPARGKLDEAEV

SEQ ID NO: 866418 - protein, 531 aa, Homo sapiens
MRRYKLFLMFCMAGLCLISFLHFFKTLSYVTFPRELASLSPNLVSSFFWNNAPVTPQASPEPGGPDLLRTHSTPTLPLLQPLPPSKAAEELHRVDLVLPEDTTEYFVRTKAGGVCFKPGTKMLERPPPGRPEEKPEGANGSSARRPPRYLLSARERTGGRGARRKWVECVCLPGWHGPSCGVPTVVQYSNLPTKERLVPREVPRRVINAINVNHEFDLLDVRFHELGDVVDAFVVCESNFTAYGEPRPLKFREMLTNGTFEYIRHKVLYVFLDHFPPGGRQDGWIADDYLRTFLTQDGVSRLRNLRPDDVFIIDDADEIPARDGVLFLKLYDGWTEPFAFHMRKSLYGFFWKQPGTLEVVSGCTVDMLQAVYGLDGIRLRRRQYYTMPNFRQYENRTGHILVQWSLGSPLHFAGWHCSWCFTPEGIYFKLVSAQNGDFPRWGDYEDKRDLNYIRGLIRTGGWFDGTQQEYPPADPSEHMYAPKYLLKNYDRFHYLLDNPYQEPRSTAAGGWRHRGPEGRPPARGKLDEAEV

SEQ ID NO: 866419 - protein, 533 aa, Homo sapiens; identical to SEQ ID NO: 866417

SEQ ID NO: 866420 - protein, 99 aa, Homo sapiens
ECLKKALKIANQCMDPSLQVQLFIEILNRYIYFYEKENDAVTIQVLNQLIQKIREDLPNLESSEETEQINKHFHNTLEHLRLRRESPESEGPIYEGLIL

SEQ ID NO: 866421 - protein, 99 aa, Homo sapiens; identical to SEQ ID NO: 866420

SEQ ID NO: 866422 - protein, 178 aa, Homo sapiens
MWVDRISPSSPPRTSSGAISTPRAGPPATRPGTHRWAKFPRLHVRASSAVTRKSTSSRRPTLSGSGFFRVAAFRRTRLPWETAAMAAPRQIPSHIVRLKPSCSTDSSFTRTPVPTVSLASRELPVSSWQVTEPSSKNLWEQICKGCASRGNAFSWLQCRALFSGFPFHHDLTYTLSSR

SEQ ID NO: 866423 - protein, 260 aa, Homo sapiens
MWVDRISPSSPPRTSSGAISTPRAGPPATRPGTHRWAKFPRLHVRASSAVTRKSTSSRRPTLSGSGFFRVAAFRRTRLPWETAAMAAPRQIPSHIVRLKPSCSTDSSFTRTPVPTVSLASRELPVSSWQVTEPSSKNLWEQICKEYEAEQPPFPEGYKVKQEPVITVAPVEEMLFHGFSAEHYFPVSHFTMISRTPCPQDKSETINPKTCSPKEYLETFIFPVLLPGMASLLHQAKKEKCFERKRTKFIACDFLTEWLYK

SEQ ID NO: 866424 - protein, 257 aa, Homo sapiens
MWVDRISPSSPPRTSSGAISTPRAGPPATRPGTHRWAKFPRLHVRASSAVTRKSTSSRRPTLSGSGFFRVAAFRRTRLPWETAAMAAPRQIPSHIVRLKPSCSTDSSFTRTPVPTVSLASRELPVSSWQVTEPSSKNLWEQICKEYEAEQPPFPEGYKVKQEPVITVAPVEEMLFHGFSAEHYFPVSHFTMISRTPCPQDKSETINPKTCSPKEYLETFIFPVLLPGMASLLHQAKKEKCFEIDCSPWHLSTPCQLS

SEQ ID NO: 866425 - protein, 150 aa, Homo sapiens
MDLSGGYRSLVYVNHEKQLPERKRTKFIACDFLTEWLYNQNPKRAGEPFTEFFSIPFVEERLKQHPRPPIPLSLLLTEEEAALYIQSFWRACVVRCDPEIQELRQWQKKLREAKHIHQQVKIFWAKQEQKVKCKMEDDAVPAAKMKIPSS

SEQ ID NO: 866426 - protein, 299 aa, Homo sapiens
MWVDRISPSSPPRTSSGAISTPRAGPPATRPGTHRWAKFPRLHVRASSAVTRKSTSSRRPTLSGSGFFRVAAFRRTRLPWETAAMAAPRQIPSHIVRLKPSCSTDSSFTRTPVPTVSLASRELPVSSWQVTEPSSKNLWEQICKEYEAEQPPFPEGYKVKQEPVITVAPVEEMLFHGFSAEHYFPVSHFTMISRTPCPQDKSETINPKTCSPKEYLETFIFPVLLPGMASLLHQAKKEKCFEVRCDPEIQELRQWQKKLREAKHIHQQVKIFWAKQEQKVKCKMEDDAVPAAKMKIPSS

SEQ ID NO: 866427 - protein, 371 aa, Homo sapiens
MWVDRISPSSPPRTSSGAISTPRAGPPATRPGTHRWAKFPRLHVRASSAVTRKSTSSRRPTLSGSGFFRVAAFRRTRLPWETAAMAAPRQIPSHIVRLKPSCSTDSSFTRTPVPTVSLASRELPVSSWQVTEPSSKNLWEQICKEYEAEQPPFPEGYKVKQEPVITVAPVEEMLFHGFSAEHYFPVSHFTMISRTPCPQDKSETINPKTCSPKEYLETFIFPVLLPGMASLLHQAKKEKCFERKRTKFIACDFLTEWLYNQNPKRAGEPFTEFFSIPFVEERLKQHPRPPIPLSLLLTEEEAALYIQSFWRACVVRCDPEIQELRQWQKKLREAKHIHQQVKIFWAKQEQKVKCKMEDDAVPAAKMKIPSS

SEQ ID NO: 866428 - protein, 211 aa, Homo sapiens
MWVDRISPSSPPRTSSGAISTPRAGPPATRPGTHRWAKFPRLHVRASSAVTRKSTSSRRPTLSGSGFFRVAAFRRTRLPWETAAMAAPRQIPSHIVRLKPSCSTDSSFTRTPVPTVSLASRELPVSSWQVTEPSSKNLWEQICKEYEAEQPPFPEGYKVKQEPVITVAPVEEMLFHGFSAEHYFPVSHFTMISRTPCPQDKSETINPKTCE

SEQ ID NO: 866429 - protein, 371 aa, Homo sapiens; identical to SEQ ID NO: 866427

SEQ ID NO: 866430 - protein, 273 aa, Homo sapiens
MWVDRISPSSPPRTSSGAISTPRAGPPATRPGTHRWAKFPRLHVRASSAVTRKSTSSRRPTLSGSGFFRVAAFRRTRLPWETAAMAAPRQIPSHIVRLKPSCSTDSSFTRTPVPTVSLASRELPVSSWQVTEPSSKNLWEQICKEYEAEQPPFPEGYKVKQEPVITVAPVEEMLFHGFSAEHYFPVSHFTMISRTPCPQDKSETINPKTCSPKEYLETFIFPVLLPGMASLLHQAKKEKCFEPTAANPTLAPADRRGSSPLHSILLESLCGSL

SEQ ID NO: 866431 - protein, 287 aa, Homo sapiens
LAQPYSQAPVMTLYPSGKGGCSASYSLQICSHRFLLDGSVTCHDETGSSRDARDTVGTGVRVNDESVEQLGLRRTMWLGICRVAPVEEMLFHGFSAEHYFPVSHFTMISRTPCPQDKSETINPKTCSPKEYLETFIFPVLLPGMASLLHQAKKEKCFERKRTKFIACDFLTEWLYNQNPKRAGEPFTEFFSIPFVEERLKQHPRPPIPLSLLLTEEEAALYIQSFWRACVVRCDPEIQELRQWQKKLREAKHIHQQVKIFWAKQEQKVKCKMEDDAVPAAKMKIPSS

SEQ ID NO: 866432 - protein, 220 aa, Homo sapiens
MWVDRISPSSPPRTSSGAISTPRAGPPATRPGTHRWAKFPRLHVRASSAVTRKSTSSRRPTLSGSGFFRVAAFRRTRLPWETAAMAAPRQIPSHIVRLKPSCSTDSSFTRTPVPTVSLASRELPVSSWQVTEPSSKNLWEQICKEYEAEQPPFPEGYKVKQEPVITVAPVEEMLFHGFSAEHYFPVSHFTMISRTPCPQDKSETINPKTSHGRQSHSRSC

SEQ ID NO: 866433 - protein, 260 aa, Homo sapiens; identical to SEQ ID NO: 866423

SEQ ID NO: 866434 - protein, 267 aa, Homo sapiens
MWVDRISPSSPPRTSSGAISTPRAGPPATRPGTHRWAKFPRLHVRASSAVTRKSTSSRRPTLSGSGFFRVAAFRRTRLPWETAAMAAPRQIPSHIVRLKPSCSTDSSFTRTPVPTVSLASRELPVSSWQVTEPSSKNLWEQICKEYEAEQPPFPEGYKVKQEPVITVAPVEEMLFHGFSAEHYFPVSHFTMISRTPCPQDKSETINPKTCSPKEYLETFIFPVLLPGMASLLHQAKKEKCFEVVLQMTPSGGKACVWGHLPSSSHTI

SEQ ID NO: 866435 - protein, 104 aa, Homo sapiens
FIKKRALISNSSGGRSLRSRHQQIGCLMRACCLPPRWHLVATFSRGEELCAFFIWQRDRRAKKKGQTPSVKPFYNDINPFVRALPSRPEHLPKGPTSQQYCIGD

SEQ ID NO: 866436 - protein, 365 aa, Homo sapiens
MYQDFYAFDLSGATRVLEWIDDKGVFVAGYESLKKNEILHLKLPLRLSVKENKGLFPERDFKVRHGGFSDRSIFDLKHVPHTRLLVTSGLPGCYLQVWQVAEDSDVIKAVSTIAVHEKEESLWPRVAVFSTLAPGVLHGARLRSLQVVDLESRKTTYTSDVSDSEELSSLQVLDADTFAFCCASGRLGLVDTRQKWAPLENRSPGPGSGGERWCAEVGSWGQGPGPSIASLGSDGRLCLLDPRDLCHPVSSVQCPVSVPSPDPELLRVTWAPGLKNCLAISGFDGTVQVYDATSWDGTRSQDGTRSQVEPLFTHRGHIFLDGNGMDPAPLVTTHTWHPCRPRTLLSATNDASLHVWDWVDLCAPR

SEQ ID NO: 866437 - protein, 365 aa, Homo sapiens; identical to SEQ ID NO: 866436

SEQ ID NO: 866438 - protein, 199 aa, Homo sapiens
MYQDFYAFDLSGATRVLEWIDDKGVFVAGYESLKKNEILHLKLPLRLSVKENKGLFPERDFKVRHGGFSDRSIFDLKHVPHTRLLVTSGLPGCYLQVWQVAEDSDVIKAVSTIAVHEKEESLWPRVAVFSTLAPGVLHGARLRSLQVVDLESRKTTYTSGTVVLCPLLAAPAGITPQPNSATIKTEFNSLCQVLGIHSE

SEQ ID NO: 866439 - protein, 165 aa, Homo sapiens
MYQDFYAFDLSGATRVLEWIDDKGVFVAGYESLKKNEILHLKLPLRLSVKENKGLFPERDFKVRHGGFSDRSIFDLKHVPHTRLLVTSGLPGCYLQVWQVAEDSDVIKAVSTIAVHEKEESLWPRVAVFSTLAPGVLHGARLRSLQVVDLESRKTTYTSGVGDTQ

SEQ ID NO: 866440 - protein, 107 aa, Homo sapiens
MGAGPGACLAGGWVWVEARWGSWCRVGQLWPRGSPPWRTPPGPRPPSLGNGSFLRARVVRLLVGAALVKTQCPVSLRQPLSSAQNTDDLIDSSRQPWEIWVPWDVHT

SEQ ID NO: 866441 - protein, 107 aa, Homo sapiens; identical to SEQ ID NO: 866440

SEQ ID NO: 866442 - protein, 107 aa, Homo sapiens; identical to SEQ ID NO: 866440

SEQ ID NO: 866443 - protein, 106 aa, Homo sapiens
MYQDFYAFDLSGATRVLEWIDDKGVFVAGYESLKKNEILHLKLPLRLSVKENKGLFPERDFKVRHGGFSDRSIFDLKHVPHTRLLVTSGLPGCYLQVWQVAEDSGE

SEQ ID NO: 866444 - protein, 365 aa, Homo sapiens; identical to SEQ ID NO: 866436

SEQ ID NO: 866445 - protein, 107 aa, Homo sapiens; identical to SEQ ID NO: 866440

SEQ ID NO: 866446 - protein, 107 aa, Homo sapiens; identical to SEQ ID NO: 866440

SEQ ID NO: 866447 - protein, 280 aa, Homo sapiens
MSLSKVCYPSKVWQVAEDSDVIKAVSTIAVHEKEESLWPRVAVFSTLAPGVLHGARLRSLQVVDLESRKTTYTSDVSDSEELSSLQVLDADTFAFCCASGRLGLVDTRQKWAPLENRSPGPGSGGERWCAEVGSWGQGPGPSIASLGSDGRLCLLDPRDLCHPVSSVQCPVSVPSPDPELLRVTWAPGLKNCLAISGFDGTVQVYDATSWDGTRSQDGTRSQVEPLFTHRGHIFLDGNGMDPAPLVTTHTWHPCRPRTLLSATNDASLHVWDWVDLCAPR

SEQ ID NO: 866448 - protein, 107 aa, Homo sapiens; identical to SEQ ID NO: 866440

SEQ ID NO: 866449 - protein, 506 aa, Homo sapiens
MSEFRIHHDVNELLSLLRVHGGDGAEVYIDLLQKNRTPYVTTTVSAHSAKVKIAEFSRTPEDFLKKYDELKSKNTRNLDPLVYLLSKLTEDKETLQYLQQNAKERAELAAAAVGSSTTSINVPAAASKISMQELEELRKQLGSVATGSTLQQSLELKRKMLRDKQNKKNSGQHLPIFPAWVYERPALIGDFLIGAGISTDTALPIGTLPLASQESAVVEDLLYVLVGVDGRYVSAQPLAGRQSRTFLVDPNLDLSIRELVHRILPVAASYSAVTRFIEEKSSFEYGQVNHALAAAMRTLVKEHLILVSQLEQLHRQGLLSLQKLWFYIQPAMRTMDILASLATSVDKGECLGGSTLSLLHDRSFSYTGDSQAQELCLYLTKAASAPYFEVLEKWIYRGIIHDPYSEFMVEEHELRKERIQEDYNDKYWDQRYTIVQQQIPSFLQKMADKILSTGKYLNVVRECGHDVTCPVAKEIIYTLKERAYVEQIEKAFNYASKVLLDFLMEE

SEQ ID NO: 866450 - protein, 316 aa, Homo sapiens
MGVGAAEPQLLSVPAGTLPLASQESAVVEDLLYVLVGVDGRYVSAQPLAGRQSRTFLVDPNLDLSIRELVHRILPVAASYSAVTRFIEEKSSFEYGQVNHALAAAMRTLVKEHLILVSQLEQLHRQGLLSLQKLWFYIQPAMRTMDILASLATSVDKGECLGGSTLSLLHDRSFSYTGDSQAQELCLYLTKAASAPYFEVLEKWIYRGIIHDPYSEFMVEEHELRKERIQEDYNDKYWDQRYTIVQQQIPSFLQKMADKILSTGKYLNVVRECGHDVTCPVAKEIIYTLKERAYVEQIEKAFNYASKVLLDFLMEE

SEQ ID NO: 866451 - protein, 405 aa, Homo sapiens
MSEFRIHHDVNELLSLLRVHGGDGAEVYIDLLQKNRTPYVTTTVSAHSAKVKIAEFSRTPEDFLKKYDELKSKNTRNLDPLVYLLSKLTEDKETLQYLQQNAKERAELAAAAVGSSTTSINVPAAASKISMQELEELRKQLGSVATGSTLQQSLELKRKMLRDKQNKKNSGQHLPIFPAWVYERPALIGDFLIGAGISTDTALPIGTLPLASQESAVVEDLLYVLVGVDGRYVSAQPLAGRQSRTFLVDPNLDLSIRELVHRILPVAASYSAVTRFIEEKSSFEYGQVNHALAAAMRTLVKEHLILVSQLEQLHRQGLLSLQKLWFYIQPAMRTMDILASLATSVDKGECLGGSTLSLLHDRSFSYTGDSQAQELCLYLTKAASAPYFEVLEKWIYRGIIHDPYR

SEQ ID NO: 866452 - protein, 673 aa, Homo sapiens
MRLSWSVAQGPFDSFVVQYEDTNGQPQALLVDGDQSKILISGLEPSTPYRFLLYGLHEGKRLGPLSAEGTTGLAPAGQTSEESRPRLSQLSVTDVTTSSLRLNWEAPPGAFDSFLLRFGVPSPSTLEPHPRPLLQRELMVPGTRHSAVLRDLRSGTLYSLTLYGLRGPHKADSIQGTARTLSPVLESPRDLQFSEIRETSAKVNWMPPPSRADSFKVSYQLADGGEPQSVQVDGQARTQKLQGLIPGARYEVTVVSVRGFEESEPLTGFLTTVPDGPTQLRALNLTEGFAVLHWKPPQNPVDTYDVQVTAPGAPPLQAETPGSAVDYPLHDLVLHTNYTATVRGLRGPNLTSPASITFTTGLEAPRDLEAKEVTPRTALLTWTEPPVRPAGYLLSFHTPGGQNQEILLPGGITSHQLLGLFPSTSYNARLQAMWGQSLLPPVSTSFTTGGLRIPFPRDCGEEMQNGAGASRTSTIFLNGNRERPLNVFCDMETDGGGWLVFQRRMDGQTDFWRDWEDYAHGFGNISGEFWLGNEALHSLTQAGDYSMRVDLRAGDEAVFAQYDSFHVDSAAEYYRLHLEGYHGTAGDSMSYHSGSVFSARDRDPNSLLISCAVSYRGAWWYRNCHYANLNGLYGSTVDHQGVSWYHWKGFEFSVPFTEMKLRPRNFRSPAGGG

SEQ ID NO: 866453 - protein, 872 aa, Homo sapiens
MPAQYALTSSLVLLVLLSTARAGPFSSRSNVTLPAPRPPPQPGGHTVGAGVGSPSSQLYEHTVEGGEKQVVFTHRINLPPSTGCGCPPGTEPPVLASEVQALRVRLEILEELVKGLKEQCTGGCCPASAQAGTGEQVITEEGGEVVVGWALLVHKGPWYELEEGSSFLTMRGVDAAQNTTWRAELGYMSTKAYARALRGCIHYTYYNWEQTWPYEMRLAWLGACTLGALHRLSLSPRRETETCLSPPTPGQTDVRTLCSLHGVFDLSRCTCSCEPGWGGPTCSDPTDAEIPPSSPPSASGSCPDDCNDQGRCVRGRCVCFPGYTGPSCGWPSCPGDCQGRGRCVQGVCVCRAGFSGPDCSQRSCPRGCSQRGRCEGGRCVCDPGYTGDDCGMRSCPRGCSQRGRCENGRCVCNPGYTGEDCGVRSCPRGCSQRGRCKDGRCVCDPGYTGEDCGTRSCPWDCGEGGRCVDGRCVCWPGYTGEDCSTRTCPRDCRGRGRCEDGECICDTGYSGDDCGVRSCPGDCNQRGRCEDGRCVCWPGYTGTDCGSRACPRDCRGRGRCENGVCVCNAGYSGEDCGVRSCPGDCRGRGRCESGRCMCWPGYTGRDCGTRACPGDCRGRGRCVDGRCVCNPGFTGEDCGSRRCPGDCRGHGLCEDGVCVCDAGYSGEDCSTRSCPGGCRGRGQCLDGRCVCEDGYSGEDCGVRQCPNDCSQHGVCQDGVCICWEGYVSEDCSIRTCPSNCHGRGRCEEGRCLCDPGYTGPTCATRMCPADCRGRGRCVQGVCLCHVGYGGEDCGQEEPPASACPGGCGPRELCRAGQCVCVEGFRGPDCAIQTCPGDCRGRGECHDGSCVCKDGYAGEDCGEGEQAAFPSVL

SEQ ID NO: 866454 - protein, 4344 aa, Homo sapiens
MPAQYALTSSLVLLVLLSTARAGPFSSRSNVTLPAPRPPPQPGGHTVGAGVGSPSSQLYEHTVEGGEKQVVFTHRINLPPSTGCGCPPGTEPPVLASEVQALRVRLEILEELVKGLKEQCTGGCCPASAQAGTGEQVITEEGGEVVVGWALLVHKGPWYELEEGSSFLTMRGVDAAQNTTWRAELGYMSTKAYARALRGCIHYTYYNWEQTWPYEMRLAWLGACTLGALHRLSLSPRRETETCLSPPTPGQTDVRTLCSLHGVFDLSRCTCSCEPGWGGPTCSDPTDAEIPPSSPPSASGSCPDDCNDQGRCVRGRCVCFPGYTGPSCGWPSCPGDCQGRGRCVQGVCVCRAGFSGPDCSQRSCPRGCSQRGRCEGGRCVCDPGYTGDDCGMRSCPRGCSQRGRCENGRCVCNPGYTGEDCGVRSCPRGCSQRGRCKDGRCVCDPGYTGEDCGTRSCPWDCGEGGRCVDGRCVCWPGYTGEDCSTRTCPRDCRGRGRCEDGECICDTGYSGDDCGVRSCPGDCNQRGRCEDGRCVCWPGYTGTDCGSRACPRDCRGRGRCENGVCVCNAGYSGEDCGVRSCPGDCRGRGRCESGRCMCWPGYTGRDCGTRACPGDCRGRGRCVDGRCVCNPGFTGEDCGSRRCPGDCRGHGLCEDGVCVCDAGYSGEDCSTRSCPGGCRGRGQCLDGRCVCEDGYSGEDCGVRQCPNDCSQHGVCQDGVCICWEGYVSEDCSIRTCPSNCHGRGRCEEGRCLCDPGYTGPTCATRMCPADCRGRGRCVQGVCLCHVGYGGEDCGQEEPPASACPGGCGPRELCRAGQCVCVEGFRGPDCAIQTCPGDCRGRGECHDGSCVCKDGYAGEDCGEEVPTIEGMRMHLLEETTVRTEWTPAPGPVDAYEIQFIPTTEGASPPFTARVPSSASAYDQRGLAPGQEYQVTVRALRGTSWGLPASKTITTMIDGPQDLRVVAVTPTTLELGWLRPQAEVDRFVVSYVSAGNQRVRLEVPPEADGTLLTDLMPGVEYVVTVTAERGRAVSYPASVRANTGSSPLGLLGTTDEPPPSGPSTTQGAQAPLLQQRPQELGELRVLGRDETGRLRVVWTAQPDTFAYFQLRMRVPEGPGAHEEVLPGDVRQALVPPPPPGTPYELSLHGVPPGGKPSDPIIYQGIMDKDEEKPGKSSGPPRLGELTVTDRTSDSLLLRWTVPEGEFDSFVIQYKDRDGQPQVVPVEGPQRSAVITSLDPGRKYKFVLYGFVGKKRHGPLVAEAKILPQSDPSPGTPPRLGNLWVTDPTPDSLHLSWTVPEGQFDTFMVQYRDRDGRPQVVPVEGPERSFVVSSLDPDHKYRFTLFGIANKKRYGPLTADGTTAPERKEEPPRPEFLEQPLLGELTVTGVTPDSLRLSWTVAQGPFDSFMVQYKDAQGQPQAVPVAGDENEVTVPGLDPDRKYKMNLYGLRGRQRVGPESVVAKTAPQEDVDETPSPTELGTEAPESPEEPLLGELTVTGSSPDSLSLFWTVPQGSFDSFTVQYKDRDGRPRAVRVGGKESEVTVGGLEPGHKYKMHLYGLHEGQRVGPVSAVGVTAPQQEETPPATESPLEPRLGELTVTDVTPNSVGLSWTVPEGQFDSFIVQYKDKDGQPQVVPVAADQREVTVYNLEPERKYKMNMYGLHDGQRMGPLSVVIVTAPLPPAPATEASKPPLEPRLGELTVTDITPDSVGLSWTVPEGEFDSFVVQYKDRDGQPQVVPVAADQREVTIPDLEPSRKYKFLLFGIQDGKRRSPVSVEAKTVARGDASPGAPPRLGELWVTDPTPDSLRLSWTVPEGQFDSFVVQFKDKDGPQVVPVEGHERSVTVTPLDAGRKYRFLLYGLLGKKRHGPLTADGTTEARSAMDDTGTKRPPKPRLGEELQVTTVTQNSVGLSWTVPEGQFDSFVVQYKDRDGQPQVVPVEGSLREVSVPGLDPAHRYKLLLYGLHHGKRVGPISAVAITAGREETETETTAPTPPAPEPHLGELTVEEATSHTLHLSWMVTEGEFDSFEIQYTDRDGQLQMVRIGGDRNDITLSGLESDHRYLVTLYGFSDGKHVGPVHVEALTVPEEEKPSEPPTATPEPPIKPRLGELTVTDATPDSLSLSWTVPEGQFDHFLVQYRNGDGQPKAVRVPGHEEGVTISGLEPDHKYKMNLYGFHGGQRMGPVSVVGVTAAEEETPSPTEPSMEAPEPAEEPLLGELTVTGSSPDSLSLSWTVPQGRFDSFTVQYKDRDGRPQVVRVGGEESEVTVGGLEPGRKYKMHLYGLHEGRRVGPVSAVGVTAPEEESPDAPLAKLRLGQMTVRDITSDSLSLSWTVPEGQFDHFLVQFKNGDGQPKAVRVPGHEDGVTISGLEPDHKYKMNLYGFHGGQRVGPVSAVGLTAPGKDEEMAPASTEPPTPEPPIKPRLEELTVTDATPDSLSLSWTVPEGQFDHFLVQYKNGDGQPKATRVPGHEDRVTISGLEPDNKYKMNLYGFHGGQRVGPVSAIGVTAAEEETPSPTEPSMEAPEPPEEPLLGELTVTGSSPDSLSLSWTVPQGRFDSFTVQYKDRDGRPQVVRVGGEESEVTVGGLEPGRKYKMHLYGLHEGRRVGPVSTVGVTAPQEDVDETPSPTEPGTEAPEPPEEPLLGELTVTGSSPDSLSLSWTVPQGRFDSFTVQYKDRDGRPQAVRVGGQESKVTVRGLEPGRKYKMHLYGLHEGRRLGPVSAVGVTEDEAETTQAVPTMTPEPPIKPRLGELTMTDATPDSLSLSWTVPEGQFDHFLVQYRNGDGQPKAVRVPGHEDGVTISGLEPDHKYKMNLYGFHGGQRVGPISVIGVTEEETPSPTELSTEAREPPEEPLLGELTVTGSSPDSLSLSWTIPQGHFDSFTVQYKDRDGRPQVMRVRGEESEVTVGGLEPGRKYKMHLYGLHEGRRVGPVSTVGVTVPTTTPEPPNKPRLGELTVTDATPDSLSLSWMVPEGQFDHFLVQYRNGDGQPKVVRVPGHEDGVTISGLEPDHKYKMNLYGFHGGQRVGPISVIGVTEEETPAPTEPSTEAPEPPEEPLLGELTVTGSSPDSLSLSWTIPQGRFDSFTVQYKDRDGRPQVVRVRGEESEVTVGGLEPGCKYKMHLYGLHEGQRVGPVSAVGVTAPKDEAETTQAVPTMTPEPPIKPRLGELTVTDATPDSLSLSWMVPEGQFDHFLVQYRNGDGQPKAVRVPGHEDGVTISGLEPDHKYKMNLYGFHGGQRVGPVSAIGVTEEETPSPTEPSTEAPEAPEEPLLGELTVTGSSPDSLSLSWTVPQGRFDSFTVQYKDRDGQPQVVRVRGEESEVTVGGLEPGRKYKMHLYGLHEGQRVGPVSTVGITAPLPTPLPVEPRLGELAVAAVTSDSVGLSWTVAQGPFDSFLVQYRDAQGQPQAVPVSGDLRAVAVSGLDPARKYKFLLFGLQNGKRHGPVPVEARTAPDTKPSPRLGELTVTDATPDSVGLSWTVPEGEFDSFVVQYKDKDGRLQVVPVAANQREVTVQGLEPSRKYRFLLYGLSGRKRLGPISADSTTAPLEKELPPHLGELTVAEETSSSLRLSWTVAQGPFDSFVVQYRDTDGQPRAVPVAADQRTVTVEDLEPGKKYKFLLYGLLGGKRLGPVSALGMTAPEEDTPAPELAPEAPEPPEEPRLGVLTVTDTTPDSMRLSWSVAQGPFDSFVVQYEDTNGQPQALLVDGDQSKILISGLEPSTPYRFLLYGLHEGKRLGPLSAEGTTGLAPAGQTSEESRPRLSQLSVTDVTTSSLRLNWEAPPGAFDSFLLRFGVPSPSTLEPHPRPLLQRELMVPGTRHSAVLRDLRSGTLYSLTLYGLRGPHKADSIQGTARTLSPVLESPRDLQFSEIRETSAKVNWMPPPSRADSFKVSYQLADGGEPQSVQVDGQARTQKLQGLIPGARYEVTVVSVRGFEESEPLTGFLTTVPDGPTQLRALNLTEGFAVLHWKPPQNPVDTYDVQVTAPGAPPLQAETPGSAVDYPLHDLVLHTNYTATVRGLRGPNLTSPASITFTTGLEAPRDLEAKEVTPRTALLTWTEPPVRPAGYLLSFHTPGGQNQEILLPGGITSHQLLGLFPSTSYNARLQAMWGQSLLPPVSTSFTTGGLRIPFPRDCGEEMQNGAGASRTSTIFLNGNRERPLNVFCDMETDGGGWLVFQRRMDGQTDFWRDWEDYAHGFGNISGEFWLGNEALHSLTQAGDYSMRVDLRAGDEAVFAQYDSFHVDSAAEYYRLHLEGYHGTAGDSMSYHSGSVFSARDRDPNSLLISCAVSYRGAWWYRNCHYANLNGLYGSTVDHQGVSWYHWKGFEFSVPFTEMKLRPRNFRSPAGGG

SEQ ID NO: 866455 - protein, 4344 aa, Homo sapiens; identical to SEQ ID NO: 866454

SEQ ID NO: 866456 - protein, 4293 aa, Homo sapiens
MPAQYALTSSLVLLVLLSTARAGPFSSRSNVTLPAPRPPPQPGGHTVGAGVGSPSSQLYEHTVEGGEKQVVFTHRINLPPSTGCGCPPGTEPPVLASEVQALRVRLEILEELVKGLKEQCTGGCCPASAQAGTGEQVITEEGGEVVVGWALLVHKGPWYELEEGSSFLTMRGVDAAQNTTWRAELGYMSTKAYARALRGCIHYTYYNWEQTWPYEMRLAWLGACTLGALHRLSLSPRRETETCLSPPTPGQTDVRTLCSLHGVFDLSRCTCSCEPGWGGPTCSDPTDAEIPPSSPPSASGSCPDDCNDQGRCVRGRCVCFPGYTGPSCGWPSCPGDCQGRGRCVQGVCVCRAGFSGPDCSQRSCPRGCSQRGRCEGGRCVCDPGYTGDDCGMRSCPRGCSQRGRCENGRCVCNPGYTGEDCGVRSCPRGCSQRGRCKDGRCVCDPGYTGEDCGTRSCPWDCGEGGRCVDGRCVCWPGYTGEDCSTRTCPRDCRGRGRCEDGECICDTGYSGDDCGVRSCPGDCNQRGRCEDGRCVCWPGYTGTDCGSRACPRDCRGRGRCENGVCVCNAGYSGEDCGVRSCPGDCRGRGRCESGRCMCWPGYTGRDCGTRACPGDCRGRGRCVDGRCVCNPGFTGEDCGSRRCPGDCRGHGLCEDGVCVCDAGYSGEDCSTRSCPGGCRGRGQCLDGRCVCEDGYSGEDCGVRQCPNDCSQHGVCQDGVCICWEGYVSEDCSIRTCPSNCHGRGRCEEGRCLCDPGYTGPTCATRMCPADCRGRGRCVQGVCLCHVGYGGEDCGQEEPPASACPGGCGPRELCRAGQCVCVEGFRGPDCAIQTCPGDCRGRGECHDGSCVCKDGYAGEDCGEEVPTIEGMRMHLLEETTVRTEWTPAPGPVDAYEIQFIPTTEGASPPFTARVPSSASAYDQRGLAPGQEYQVTVRALRGTSWGLPASKTITTMIDGPQDLRVVAVTPTTLELGWLRPQAEVDRFVVSYVSAGNQRVRLEVPPEADGTLLTDLMPGVEYVVTVTAERGRAVSYPASVRANTGSSPLGLLGTTDEPPPSGPSTTQGAQAPLLQQRPQELGELRVLGRDETGRLRVVWTAQPDTFAYFQLRMRVPEGPGAHEEVLPGDVRQALVPPPPPGTPYELSLHGVPPGGKPSDPIIYQGIMDKDEEKPGKSSGPPRLGELTVTDRTSDSLLLRWTVPEGEFDSFVIQYKDRDGQPQVVPVEGPQRSAVITSLDPGRKYKFVLYGFVGKKRHGPLVAEAKILPQSDPSPGTPPRLGNLWVTDPTPDSLHLSWTVPEGQFDTFMVQYRDRDGRPQVVPVEGPERSFVVSSLDPDHKYRFTLFGIANKKRYGPLTADGTTAPERKEEPPRPEFLEQPLLGELTVTGVTPDSLRLSWTVAQGPFDSFMVQYKDAQGQPQAVPVAGDENEVTVPGLDPDRKYKMNLYGLRGRQRVGPESVVAKTAPQEDVDETPSPTELGTEAPESPEEPLLGELTVTGSSPDSLSLFWTVPQGSFDSFTVQYKDRDGRPRAVRVGGKESEVTVGGLEPGHKYKMHLYGLHEGQRVGPVSAVGVTAPQQEETPPATESPLEPRLGELTVTDVTPNSVGLSWTVPEGQFDSFIVQYKDKDGQPQVVPVAADQREVTVYNLEPERKYKMNMYGLHDGQRMGPLSVVIVTAPLPPAPATEASKPPLEPRLGELTVTDITPDSVGLSWTVPEGEFDSFVVQYKDRDGQPQVVPVAADQREVTIPDLEPSRKYKFLLFGIQDGKRRSPVSVEAKTVARGDASPGAPPRLGELWVTDPTPDSLRLSWTVPEGQFDSFVVQFKDKDGPQVVPVEGHERSVTVTPLDAGRKYRFLLYGLLGKKRHGPLTADGTTEARSAMDDTGTKRPPKPRLGEELQVTTVTQNSVGLSWTVPEGQFDSFVVQYKDRDGQPQVVPVEGSLREVSVPGLDPAHRYKLLLYGLHHGKRVGPISAVAITAGREETETETTAPTPPAPEPHLGELTVEEATSHTLHLSWMVTEGEFDSFEIQYTDRDGQLQMVRIGGDRNDITLSGLESDHRYLVTLYGFSDGKHVGPVHVEALTVPEEEKPSEPPTATPEPPIKPRLGELTVTDATPDSLSLSWTVPEGQFDHFLVQYRNGDGQPKAVRVPGHEEGVTISGLEPDHKYKMNLYGFHGGQRMGPVSVVGVTAAEEETPSPTEPSMEAPEPAEEPLLGELTVTGSSPDSLSLSWTVPQGRFDSFTVQYKDRDGRPQVVRVGGEESEVTVGGLEPGRKYKMHLYGLHEGRRVGPVSAVGVTAPEEESPDAPLAKLRLGQMTVRDITSDSLSLSWTVPEGQFDHFLVQFKNGDGQPKAVRVPGHEDGVTISGLEPDHKYKMNLYGFHGGQRVGPVSAVGLTAPGKDEEMAPASTEPPTPEPPIKPRLEELTVTDATPDSLSLSWTVPEGQFDHFLVQYKNGDGQPKATRVPGHEDRVTISGLEPDNKYKMNLYGFHGGQRVGPVSAIGVTAAEEETPSPTEPSMEAPEPPEEPLLGELTVTGSSPDSLSLSWTVPQGRFDSFTVQYKDRDGRPQVVRVGGEESEVTVGGLEPGRKYKMHLYGLHEGRRVGPVSTVGVTAPQEDVDETPSPTEPGTEAPEPPEEPLLGELTVTGSSPDSLSLSWTVPQGRFDSFTVQYKDRDGRPQAVRVGGQESKVTVRGLEPGRKYKMHLYGLHEGRRLGPVSAVGVTEDEAETTQAVPTMTPEPPIKPRLGELTMTDATPDSLSLSWTVPEGQFDHFLVQYRNGDGQPKAVRVPGHEDGVTISGLEPDHKYKMNLYGFHGGQRVGPISVIGVTEEETPSPTELSTEAREPPEEPLLGELTVTGSSPDSLSLSWTIPQGHFDSFTVQYKDRDGRPQVMRVRGEESEVTVGGLEPGRKYKMHLYGLHEGRRVGPVSTVGVTVPTTTPEPPNKPRLGELTVTDATPDSLSLSWMVPEGQFDHFLVQYRNGDGQPKVVRVPGHEDGVTISGLEPDHKYKMNLYGFHGGQRVGPISVIGVTEEETPAPTEPSTEAPEPPEEPLLGELTVTGSSPDSLSLSWTIPQGRFDSFTVQYKDRDGRPQVVRVRGEESEVTVGGLEPGCKYKMHLYGLHEGQRVGPVSAVGVTAPKDEAETTQAVPTMTPEPPIKPRLGELTVTDATPDSLSLSWMVPEGQFDHFLVQYRNGDGQPKAVRVPGHEDGVTISGLEPDHKYKMNLYGFHGGQRVGPVSAIGVTEEETPSPTEPSTEAPEAPEEPLLGELTVTGSSPDSLSLSWTVPQGRFDSFTVQYKDRDGQPQVVRVRGEESEVTVGGLEPGRKYKMHLYGLHEGQRVGPVSTVGITAPLPTPLPVEPRLGELAVAAVTSDSVGLSWTVAQGPFDSFLVQYRDAQGQPQAVPVSGDLRAVAVSGLDPARKYKFLLFGLQNGKRHGPVPVEARTAPDTKPSPRLGELTVTDATPDSVGLSWTVPEGEFDSFVVQYKDKDGRLQVVPVAANQREVTVQGLEPSRKYRFLLYGLSGRKRLGPISADSTTAPLEKELPPHLGELTVAEETSSSLRLSWTVAQGPFDSFVVQYRDTDGQPRAVPVAADQRTVTVEDLEPGKKYKFLLYGLLGGKRLGPVSALGMTAPEEDTPAPELAPEAPEPPEEPRLGVLTVTDTTPDSMRLSWSVAQGPFDSFVVQYEDTNGQPQALLVDGDQSKILISGLEPSTPYRFLLYGLHEGKRLGPLSAEGTTGLAPAGQTSEESRPRLSQLSVTDVTTSSLRLNWEAPPGAFDSFLLRFGVPSPSTLEPHPRPLLQRELMVPGTRHSAVLRDLRSGTLYSLTLYGLRGPHKADSIQGTARTLSPVLESPRDLQFSEIRETSAKVNWMPPPSRADSFKVSYQLADGGEPQSVQVDGQARTQKLQGLIPGARYEVTVVSVRGFEESEPLTGFLTTVPDGPTQLRALNLTEGFAVLHWKPPQNPVDTYDVQVTAPGAPPLQAETPGSAVDYPLHDLVLHTNYTATVRGLRGPNLTSPASITFTTGLEAPRDLEAKEVTPRTALLTWTEPPVRPAGYLLSFHTPGGQNQEILLPGGITSHQLLGLFPSTSYNARLQAMWGQSLLPPVSTSFTTGGLRIPFPRDCGEEMQNGAGASRTSTIFLNGNRERPLNVFCDMETDGGGWLVFQRRMDGQTDFWRDWEDYAHGFGNISGEFWLGNEALHSLTQAGDYSMRVDLRAGDEAVFAQYDSFHVDSAAEYYRLHLEGYHGTAGDSMSYHSGSVFSARDRDPNSLLISYYRGRKKNPEGA

SEQ ID NO: 866457 - protein, 1808 aa, Homo sapiens
MPAQYALTSSLVLLVLLSTARAGPFSSRSNVTLPAPRPPPQPGGHTVGAGVGSPSSQLYEHTVEGGEKQVVFTHRINLPPSTGCGCPPGTEPPVLASEVQALRVRLEILEELVKGLKEQCTGGCCPASAQAGTGEQVITEEGGEVVVGWALLVHKGPWYELEEGSSFLTMRGVDAAQNTTWRAELGYMSTKAYARALRGCIHYTYYNWEQTWPYEMRLAWLGACTLGALHRLSLSPRRETETCLSPPTPGQTDVRTLCSLHGVFDLSRCTCSCEPGWGGPTCSDPTDAEIPPSSPPSASGSCPDDCNDQGRCVRGRCVCFPGYTGPSCGWPSCPGDCQGRGRCVQGVCVCRAGFSGPDCSQRSCPRGCSQRGRCEGGRCVCDPGYTGDDCGMRSCPRGCSQRGRCENGRCVCNPGYTGEDCGVRSCPRGCSQRGRCKDGRCVCDPGYTGEDCGTRSCPWDCGEGGRCVDGRCVCWPGYTGEDCSTRTCPRDCRGRGRCEDGECICDTGYSGDDCGVRSCPGDCNQRGRCEDGRCVCWPGYTGTDCGSRACPRDCRGRGRCENGVCVCNAGYSGEDCGVRSCPGDCRGRGRCESGRCMCWPGYTGRDCGTRACPGDCRGRGRCVDGRCVCNPGFTGEDCGSRRCPGDCRGHGLCEDGVCVCDAGYSGEDCSTRSCPGGCRGRGQCLDGRCVCEDGYSGEDCGVRQCPNDCSQHGVCQDGVCICWEGYVSEDCSIRTCPSNCHGRGRCEEGRCLCDPGYTGPTCATRMCPADCRGRGRCVQGVCLCHVGYGGEDCGQEEPPASACPGGCGPRELCRAGQCVCVEGFRGPDCAIQTCPGDCRGRGECHDGSCVCKDGYAGEDCGEEVPTIEGMRMHLLEETTVRTEWTPAPGPVDAYEIQFIPTTEGASPPFTARVPSSASAYDQRGLAPGQEYQVTVRALRGTSWGLPASKTITTMIDGPQDLRVVAVTPTTLELGWLRPQAEVDRFVVSYVSAGNQRVRLEVPPEADGTLLTDLMPGVEYVVTVTAERGRAVSYPASVRANTGSSPLGLLGTTDEPPPSGPSTTQGAQAPLLQQRPQELGELRVLGRDETGRLRVVWTAQPDTFAYFQLRMRVPEGPGAHEEVLPGDVRQALVPPPPPGTPYELSLHGVPPGGKPSDPIIYQGIMDKDEEKPGKSSGPPRLGELTVTDRTSDSLLLRWTVPEGEFDSFVIQYKDRDGQPQVVPVEGPQRSAVITSLDPGRKYKFVLYGFVGKKRHGPLVAEAKILPQSDPSPGTPPRLGNLWVTDPTPDSLHLSWTVPEGQFDTFMVQYRDRDGRPQVVPVEGPERSFVVSSLDPDHKYRFTLFGIANKKRYGPLTADGTTAPERKEEPPRPEFLEQPLLGELTVTGVTPDSLRLSWTVAQGPFDSFMVQYKDAQGQPQAVPVAGDENEVTVPGLDPDRKYKMNLYGLRGRQRVGPESVVAKTAPQEDVDETPSPTELGTEAPESPEEPLLGELTVTGSSPDSLSLFWTVPQGSFDSFTVQYKDRDGRPRAVRVGGKESEVTVGGLEPGHKYKMHLYGLHEGQRVGPVSAVGVTAPQQEETPPATESPLEPRLGELTVTDVTPNSVGLSWTVPEGQFDSFIVQYKDKDGQPQVVPVAADQREVTVYNLEPERKYKMNMYGLHDGQRMGPLSVVIVTAPLPPAPATEASKPPLEPRLGELTVTDITPDSVGLSWTVPEGEFDSFVVQYKDRDGQPQVVPVAADQREVTIPDLEPSRKYKFLLFGIQDGKRRSPVSVEAKTGEMGPYTAEPEATAFPPFSSLPLLSLPFVH

SEQ ID NO: 866458 - protein, 148 aa, Homo sapiens
QPCSLSSQIPAPLPPAPATEASKPPLEPRLGELTVTDITPDSVGLSWTVPEGEFDSFVVQYKDRDGQPQVVPVAADQREVTIPDLEPSRKYKFLLFGIQDGKRRSPVSVEAKTGEMGPYTAEPEATAFPPFSSLPLLSLPFVHLLCLI

SEQ ID NO: 866459 - protein, 4295 aa, Homo sapiens
MPAQYALTSSLVLLVLLSTARAGPFSSRSNVTLPAPRPPPQPGGHTVGAGVGSPSSQLYEHTVEGGEKQVVFTHRINLPPSTGCGCPPGTEPPVLASEVQALRVRLEILEELVKGLKEQCTGGCCPASAQAGTGQTDVRTLCSLHGVFDLSRCTCSCEPGWGGPTCSDPTDAEIPPSSPPSASGSCPDDCNDQGRCVRGRCVCFPGYTGPSCGWPSCPGDCQGRGRCVQGVCVCRAGFSGPDCSQRSCPRGCSQRGRCEGGRCVCDPGYTGDDCGMRSCPRGCSQRGRCENGRCVCNPGYTGEDCGVRSCPRGCSQRGRCKDGRCVCDPGYTGEDCGTRSCPWDCGEGGRCVDGRCVCWPGYTGEDCSTRTCPRDCRGRGRCEDGECICDTGYSGDDCGVRSCPGDCNQRGRCEDGRCVCWPGYTGTDCGSRACPRDCRGRGRCENGVCVCNAGYSGEDCGVRSCPGDCRGRGRCESGRCMCWPGYTGRDCGTRACPGDCRGRGRCVDGRCVCNPGFTGEDCGSRRCPGDCRGHGLCEDGVCVCDAGYSGEDCSTRSCPGGCRGRGQCLDGRCVCEDGYSGEDCGVRQCPNDCSQHGVCQDGVCICWEGYVSEDCSIRTCPSNCHGRGRCEEGRCLCDPGYTGPTCATRMCPADCRGRGRCVQGVCLCHVGYGGEDCGQEEPPASACPGGCGPRELCRAGQCVCVEGFRGPDCAIQTCPGDCRGRGECHDGSCVCKDGYAGEDCGEARVPSSASAYDQRGLAPGQEYQVTVRALRGTSWGLPASKTITTMIDGPQDLRVVAVTPTTLELGWLRPQAEVDRFVVSYVSAGNQRVRLEVPPEADGTLLTDLMPGVEYVVTVTAERGRAVSYPASVRANTEEREEESPPRPSLSQPPRRPWGNLTAELSRFRGTVQDLERHLRAHGYPLRANQTYTSVARHIHEYLQRQVLGSSADGALLVSLDGLRGQFERVVLRWRPQPPAEGPGGELTVPGTTRTVSLPDLRPGTTYHVEVHGVRAGQTSKSYAFITTTGPSTTQGAQAPLLQQRPQELGELRVLGRDETGRLRVVWTAQPDTFAYFQLRMRVPEGPGAHEEVLPGDVRQALVPPPPPGTPYELSLHGVPPGGKPSDPIIYQGIMDKDEEKPGKSSGPPRLGELTVTDRTSDSLLLRWTVPEGEFDSFVIQYKDRDGQPQVVPVEGPQRSAVITSLDPGRKYKFVLYGFVGKKRHGPLVAEAKILPQSDPSPGTPPRLGNLWVTDPTPDSLHLSWTVPEGQFDTFMVQYRDRDGRPQVVPVEGPERSFVVSSLDPDHKYRFTLFGIANKKRYGPLTADGTTAPERKEEPPRPEFLEQPLLGELTVTGVTPDSLRLSWTVAQGPFDSFMVQYKDAQGQPQAVPVAGDENEVTVPGLDPDRKYKMNLYGLRGRQRVGPESVVAKTAPQEDVDETPSPTELGTEAPESPEEPLLGELTVTGSSPDSLSLFWTVPQGSFDSFTVQYKDRDGRPRAVRVGGKESEVTVGGLEPGHKYKMHLYGLHEGQRVGPVSAVGVTAPQQEETPPATESPLEPRLGELTVTDVTPNSVGLSWTVPEGQFDSFIVQYKDKDGQPQVVPVAADQREVTVYNLEPERKYKMNMYGLHDGQRMGPLSVVIVTAPLPPAPATEASKPPLEPRLGELTVTDITPDSVGLSWTVPEGEFDSFVVQYKDRDGQPQVVPVAADQREVTIPDLEPSRKYKFLLFGIQDGKRRSPVSVEAKTVARGDASPGAPPRLGELWVTDPTPDSLRLSWTVPEGQFDSFVVQFKDKDGPQVVPVEGHERSVTVTPLDAGRKYRFLLYGLLGKKRHGPLTADGTTEARSAMDDTGTKRPPKPRLGEELQVTTVTQNSVGLSWTVPEGQFDSFVVQYKDRDGQPQVVPVEGSLREVSVPGLDPAHRYKLLLYGLHHGKRVGPISAVAITAGREETETETTAPTPPAPEPHLGELTVEEATSHTLHLSWMVTEGEFDSFEIQYTDRDGQLQMVRIGGDRNDITLSGLESDHRYLVTLYGFSDGKHVGPVHVEALTVPEEEKPSEPPTATPEPPIKPRLGELTVTDATPDSLSLSWTVPEGQFDHFLVQYRNGDGQPKAVRVPGHEEGVTISGLEPDHKYKMNLYGFHGGQRMGPVSVVGVTEPSMEAPEPAEEPLLGELTVTGSSPDSLSLSWTVPQGRFDSFTVQYKDRDGRPQVVRVGGEESEVTVGGLEPGRKYKMHLYGLHEGRRVGPVSAVGVTAPEEESPDAPLAKLRLGQMTVRDITSDSLSLSWTVPEGQFDHFLVQFKNGDGQPKAVRVPGHEDGVTISGLEPDHKYKMNLYGFHGGQRVGPVSAVGLTASTEPPTPEPPIKPRLEELTVTDATPDSLSLSWTVPEGQFDHFLVQYKNGDGQPKATRVPGHEDRVTISGLEPDNKYKMNLYGFHGGQRVGPVSAIGVTAAEEETPSPTEPSMEAPEPPEEPLLGELTVTGSSPDSLSLSWTVPQGRFDSFTVQYKDRDGRPQVVRVGGEESEVTVGGLEPGRKYKMHLYGLHEGRRVGPVSTVGVTAPQEDVDETPSPTEPGTEAPEPPEEPLLGELTVTGSSPDSLSLSWTVPQGRFDSFTVQYKDRDGRPQAVRVGGQESKVTVRGLEPGRKYKMHLYGLHEGRRLGPVSAVGVTEDEAETTQAVPTMTPEPPIKPRLGELTMTDATPDSLSLSWTVPEGQFDHFLVQYRNGDGQPKAVRVPGHEDGVTISGLEPDHKYKMNLYGFHGGQRVGPISVIGVTEEETPSPTELSTEAREPPEEPLLGELTVTGSSPDSLSLSWTIPQGHFDSFTVQYKDRDGRPQVMRVRGEESEVTVGGLEPGRKYKMHLYGLHEGRRVGPVSTVGVTVPTTTPEPPNKPRLGELTVTDATPDSLSLSWMVPEGQFDHFLVQYRNGDGQPKVVRVPGHEDGVTISGLEPDHKYKMNLYGFHGGQRVGPISVIGVTEEETPAPTEPSTEAPEPPEEPLLGELTVTGSSPDSLSLSWTIPQGRFDSFTVQYKDRDGRPQVVRVRGEESEVTVGGLEPGCKYKMHLYGLHEGQRVGPVSAVGVTAPKDEAETTQAVPTMTPEPPIKPRLGELTVTDATPDSLSLSWMVPEGQFDHFLVQYRNGDGQPKAVRVPGHEDGVTISGLEPDHKYKMNLYGFHGGQRVGPVSAIGVTEEETPSPTEPSTEAPEAPEEPLLGELTVTGSSPDSLSLSWTVPQGRFDSFTVQYKDRDGQPQVVRVRGEESEVTVGGLEPGRKYKMHLYGLHEGQRVGPVSTVGITAPLPTPLPVEPRLGELAVAAVTSDSVGLSWTVAQGPFDSFLVQYRDAQGQPQAVPVSGDLRAVAVSGLDPARKYKFLLFGLQNGKRHGPVPVEARTAPDTKPSPRLGELTVTDATPDSVGLSWTVPEGEFDSFVVQYKDKDGRLQVVPVAANQREVTVQGLEPSRKYRFLLYGLSGRKRLGPISADSTTAPLEKELPPHLGELTVAEETSSSLRLSWTVAQGPFDSFVVQYRDTDGQPRAVPVAADQRTVTVEDLEPGKKYKFLLYGLLGGKRLGPVSALGMTAPEEDTPAPELAPEAPEPPEEPRLGVLTVTDTTPDSMRLSWSVAQGPFDSFVVQYEDTNGQPQALLVDGDQSKILISGLEPSTPYRFLLYGLHEGKRLGPLSAEGTTGLAPAGQTSEESRPRLSQLSVTDVTTSSLRLNWEAPPGAFDSFLLRFGVPSPSTLEPHPRPLLQRELMVPGTRHSAVLRDLRSGTLYSLTLYGLRGPHKADSIQGTARTLSPVLESPRDLQFSEIRETSAKVNWMPPPSRADSFKVSYQLADGGEPQSVQVDGQARTQKLQGLIPGARYEVTVVSVRGFEESEPLTGFLTTVPDGPTQLRALNLTEGFAVLHWKPPQNPVDTYDVQVTAPGAPPLQAETPGSAVDYPLHDLVLHTNYTATVRGLRGPNLTSPASITFTTGLEAPRDLEAKEVTPRTALLTWTEPPVRPAGYLLSFHTPGGQNQEILLPGGITSHQLLGLFPSTSYNARLQAMWGQSLLPPVSTSFTTGGLRIPFPRDCGEEMQNGAGASRTSTIFLNGNRERPLNVFCDMETDGGGWLVFQRRMDGQTDFWRDWEDYAHGFGNISGEFWLGNEALHSLTQAGDYSMRVDLRAGDEAVFAQYDSFHVDSAAEYYRLHLEGYHGTAGDSMSYHSGSVFSARDRDPNSLLISCAVSYRGAWWYRNCHYANLNGLYGSTVDHQGVSWYHWKGFEFSVPFTEMKLRPRNFRSPAGGG

SEQ ID NO: 866460 - protein, 80 aa, Homo sapiens
LPPVSTSLTSSLASFPPRAVSYRGAWWYRNCHYANLNGLYGSTVDHQGVSWYHWKGFEFSVPFTEMKLRPRNFRSPAGGG

SEQ ID NO: 866461 - protein, 3120 aa, Homo sapiens
MHFCAVNNLHSLTQHSYVGFGFPILLGPKSLPSLYPLFLVPQSDPSPGTPPRLGNLWVTDPTPDSLHLSWTVPEGQFDTFMVQYRDRDGRPQVVPVEGPERSFVVSSLDPDHKYRFTLFGIANKKRYGPLTADGTTAPERKEEPPRPEFLEQPLLGELTVTGVTPDSLRLSWTVAQGPFDSFMVQYKDAQGQPQAVPVAGDENEVTVPGLDPDRKYKMNLYGLRGRQRVGPESVVAKTAPQEDVDETPSPTELGTEAPESPEEPLLGELTVTGSSPDSLSLFWTVPQGSFDSFTVQYKDRDGRPRAVRVGGKESEVTVGGLEPGHKYKMHLYGLHEGQRVGPVSAVGVTAPQQEETPPATESPLEPRLGELTVTDVTPNSVGLSWTVPEGQFDSFIVQYKDKDGQPQVVPVAADQREVTVYNLEPERKYKMNMYGLHDGQRMGPLSVVIVTAPLPPAPATEASKPPLEPRLGELTVTDITPDSVGLSWTVPEGEFDSFVVQYKDRDGQPQVVPVAADQREVTIPDLEPSRKYKFLLFGIQDGKRRSPVSVEAKTVARGDASPGAPPRLGELWVTDPTPDSLRLSWTVPEGQFDSFVVQFKDKDGPQVVPVEGHERSVTVTPLDAGRKYRFLLYGLLGKKRHGPLTADGTTEARSAMDDTGTKRPPKPRLGEELQVTTVTQNSVGLSWTVPEGQFDSFVVQYKDRDGQPQVVPVEGSLREVSVPGLDPAHRYKLLLYGLHHGKRVGPISAVAITAGREETETETTAPTPPAPEPHLGELTVEEATSHTLHLSWMVTEGEFDSFEIQYTDRDGQLQMVRIGGDRNDITLSGLESDHRYLVTLYGFSDGKHVGPVHVEALTVPEEEKPSEPPTATPEPPIKPRLGELTVTDATPDSLSLSWTVPEGQFDHFLVQYRNGDGQPKAVRVPGHEEGVTISGLEPDHKYKMNLYGFHGGQRMGPVSVVGVTAAEEETPSPTEPSMEAPEPAEEPLLGELTVTGSSPDSLSLSWTVPQGRFDSFTVQYKDRDGRPQVVRVGGEESEVTVGGLEPGRKYKMHLYGLHEGRRVGPVSAVGVTAPEEESPDAPLAKLRLGQMTVRDITSDSLSLSWTVPEGQFDHFLVQFKNGDGQPKAVRVPGHEDGVTISGLEPDHKYKMNLYGFHGGQRVGPVSAVGLTAPGKDEEMAPASTEPPTPEPPIKPRLEELTVTDATPDSLSLSWTVPEGQFDHFLVQYKNGDGQPKATRVPGHEDRVTISGLEPDNKYKMNLYGFHGGQRVGPVSAIGVTAAEEETPSPTEPSMEAPEPPEEPLLGELTVTGSSPDSLSLSWTVPQGRFDSFTVQYKDRDGRPQVVRVGGEESEVTVGGLEPGRKYKMHLYGLHEGRRVGPVSTVGVTAPQEDVDETPSPTEPGTEAPEPPEEPLLGELTVTGSSPDSLSLSWTVPQGRFDSFTVQYKDRDGRPQAVRVGGQESKVTVRGLEPGRKYKMHLYGLHEGRRLGPVSAVGVTEDEAETTQAVPTMTPEPPIKPRLGELTMTDATPDSLSLSWTVPEGQFDHFLVQYRNGDGQPKAVRVPGHEDGVTISGLEPDHKYKMNLYGFHGGQRVGPISVIGVTEEETPSPTELSTEAREPPEEPLLGELTVTGSSPDSLSLSWTIPQGHFDSFTVQYKDRDGRPQVMRVRGEESEVTVGGLEPGRKYKMHLYGLHEGRRVGPVSTVGVTVPTTTPEPPNKPRLGELTVTDATPDSLSLSWMVPEGQFDHFLVQYRNGDGQPKVVRVPGHEDGVTISGLEPDHKYKMNLYGFHGGQRVGPISVIGVTEEETPAPTEPSTEAPEPPEEPLLGELTVTGSSPDSLSLSWTIPQGRFDSFTVQYKDRDGRPQVVRVRGEESEVTVGGLEPGCKYKMHLYGLHEGQRVGPVSAVGVTAPKDEAETTQAVPTMTPEPPIKPRLGELTVTDATPDSLSLSWMVPEGQFDHFLVQYRNGDGQPKAVRVPGHEDGVTISGLEPDHKYKMNLYGFHGGQRVGPVSAIGVTEEETPSPTEPSTEAPEAPEEPLLGELTVTGSSPDSLSLSWTVPQGRFDSFTVQYKDRDGQPQVVRVRGEESEVTVGGLEPGRKYKMHLYGLHEGQRVGPVSTVGITAPLPTPLPVEPRLGELAVAAVTSDSVGLSWTVAQGPFDSFLVQYRDAQGQPQAVPVSGDLRAVAVSGLDPARKYKFLLFGLQNGKRHGPVPVEARTAPDTKPSPRLGELTVTDATPDSVGLSWTVPEGEFDSFVVQYKDKDGRLQVVPVAANQREVTVQGLEPSRKYRFLLYGLSGRKRLGPISADSTTAPLEKELPPHLGELTVAEETSSSLRLSWTVAQGPFDSFVVQYRDTDGQPRAVPVAADQRTVTVEDLEPGKKYKFLLYGLLGGKRLGPVSALGMTAPEEDTPAPELAPEAPEPPEEPRLGVLTVTDTTPDSMRLSWSVAQGPFDSFVVQYEDTNGQPQALLVDGDQSKILISGLEPSTPYRFLLYGLHEGKRLGPLSAEGTTGLAPAGQTSEESRPRLSQLSVTDVTTSSLRLNWEAPPGAFDSFLLRFGVPSPSTLEPHPRPLLQRELMVPGTRHSAVLRDLRSGTLYSLTLYGLRGPHKADSIQGTARTLSPVLESPRDLQFSEIRETSAKVNWMPPPSRADSFKVSYQLADGGEPQSVQVDGQARTQKLQGLIPGARYEVTVVSVRGFEESEPLTGFLTTVPDGPTQLRALNLTEGFAVLHWKPPQNPVDTYDVQVTAPGAPPLQAETPGSAVDYPLHDLVLHTNYTATVRGLRGPNLTSPASITFTTGLEAPRDLEAKEVTPRTALLTWTEPPVRPAGYLLSFHTPGGQNQEILLPGGITSHQLLGLFPSTSYNARLQAMWGQSLLPPVSTSFTTGGLRIPFPRDCGEEMQNGAGASRTSTIFLNGNRERPLNVFCDMETDGGGWLVFQRRMDGQTDFWRDWEDYAHGFGNISGEFWLGNEALHSLTQAGDYSMRVDLRAGDEAVFAQYDSFHVDSAAEYYRLHLEGYHGTAGDSMSYHSGSVFSARDRDPNSLLISCAVSYRGAWWYRNCHYANLNGLYGSTVDHQGVSWYHWKGFEFSVPFTEMKLRPRNFRSPAGGG

SEQ ID NO: 866462 - protein, 4347 aa, Homo sapiens
MPAQYALTSSLVLLVLLSTARAGPFSSRSNVTLPAPRPPPQPGGHTVGAGVGSPSSQLYEHTVEGGEKQVVFTHRINLPPSTGCGCPPGTEPPVLASEVQALRVRLEILEELVKGLKEQCTGGCCPASAQAGTGEQVITEEGGEVVVGWALLVHKGPWYELEEGSSFLTMRGVDAAQNTTWRAELGYMSTKAYARALRGCIHYTYYNWEQTWPYEMRLAWLGACTLGALHRLSLSPRRETETCLSPPTPGQTDVRTLCSLHGVFDLSRCTCSCEPGWGGPTCSDPTDAEIPPSSPPSASGSCPDDCNDQGRCVRGRCVCFPGYTGPSCGWPSCPGDCQGRGRCVQGVCVCRAGFSGPDCSQRSCPRGCSQRGRCEGGRCVCDPGYTGDDCGMRSCPRGCSQRGRCENGRCVCNPGYTGEDCGVRSCPRGCSQRGRCKDGRCVCDPGYTGEDCGTRSCPWDCGEGGRCVDGRCVCWPGYTGEDCSTRTCPRDCRGRGRCEDGECICDTGYSGDDCGVRSCPGDCNQRGRCEDGRCVCWPGYTGTDCGSRACPRDCRGRGRCENGVCVCNAGYSGEDCGVRSCPGDCRGRGRCESGRCMCWPGYTGRDCGTRACPGDCRGRGRCVDGRCVCNPGFTGEDCGSRRCPGDCRGHGLCEDGVCVCDAGYSGEDCSTRSCPGGCRGRGQCLDGRCVCEDGYSGEDCGVRQCPNDCSQHGVCQDGVCICWEGYVSEDCSIRTCPSNCHGRGRCEEGRCLCDPGYTGPTCATRMCPADCRGRGRCVQGVCLCHVGYGGEDCGQEEPPASACPGGCGPRELCRAGQCVCVEGFRGPDCAIQTCPGDCRGRGECHDGSCVCKDGYAGEDCGEEVPTIEGMRMHLLEETTVRTEWTPAPGPVDAYEIQFIPTTEGASPPFTARVPSSASAYDQRGLAPGQEYQVTVRALRGTSWGLPASKTITTMIDGPQDLRVVAVTPTTLELGWLRPQAEVDRFVVSYVSAGNQRVRLEVPPEADGTLLTDLMPGVEYVVTVTAERGRAVSYPASVRANTGSSPLGLLGTTDEPPPSGPSTTQGAQAPLLQQRPQELGELRVLGRDETGRLRVVWTAQPDTFAYFQLRMRVPEGPGAHEEVLPGDVRQALVPPPPPGTPYELSLHGVPPGGKPSDPIIYQGIMDKDEEKPGKSSGPPRLGELTVTDRTSDSLLLRWTVPEGEFDSFVIQYKDRDGQPQVVPVEGPQRSAVITSLDPGRKYKFVLYGFVGKKRHGPLVAEAKILPQSDPSPGTPPRLGNLWVTDPTPDSLHLSWTVPEGQFDTFMVQYRDRDGRPQVVPVEGPERSFVVSSLDPDHKYRFTLFGIANKKRYGPLTADGTTAPERKEEPPRPEFLEQPLLGELTVTGVTPDSLRLSWTVAQGPFDSFMVQYKDAQGQPQAVPVAGDENEVTVPGLDPDRKYKMNLYGLRGRQRVGPESVVAKTAPQEDVDETPSPTELGTEAPESPEEPLLGELTVTGSSPDSLSLFWTVPQGSFDSFTVQYKDRDGRPRAVRVGGKESEVTVGGLEPGHKYKMHLYGLHEGQRVGPVSAVGVTAPQQEETPPATESPLEPRLGELTVTDVTPNSVGLSWTVPEGQFDSFIVQYKDKDGQPQVVPVAADQREVTVYNLEPERKYKMNMYGLHDGQRMGPLSVVIVTAPLPPAPATEASKPPLEPRLGELTVTDITPDSVGLSWTVPEGEFDSFVVQYKDRDGQPQVVPVAADQREVTIPDLEPSRKYKFLLFGIQDGKRRSPVSVEAKTVARGDASPGAPPRLGELWVTDPTPDSLRLSWTVPEGQFDSFVVQFKDKDGPQVVPVEGHERSVTVTPLDAGRKYRFLLYGLLGKKRHGPLTADGTTEARSAMDDTGTKRPPKPRLGEELQVTTVTQNSVGLSWTVPEGQFDSFVVQYKDRDGQPQVVPVEGSLREVSVPGLDPAHRYKLLLYGLHHGKRVGPISAVAITAGREETETETTAPTPPAPEPHLGELTVEEATSHTLHLSWMVTEGEFDSFEIQYTDRDGQLQMVRIGGDRNDITLSGLESDHRYLVTLYGFSDGKHVGPVHVEALTVPEEEKPSEPPTATPEPPIKPRLGELTVTDATPDSLSLSWTVPEGQFDHFLVQYRNGDGQPKAVRVPGHEEGVTISGLEPDHKYKMNLYGFHGGQRMGPVSVVGVTAAEEETPSPTEPSMEAPEPAEEPLLGELTVTGSSPDSLSLSWTVPQGRFDSFTVQYKDRDGRPQVVRVGGEESEVTVGGLEPGRKYKMHLYGLHEGRRVGPVSAVGVTAPEEESPDAPLAKLRLGQMTVRDITSDSLSLSWTVPEGQFDHFLVQFKNGDGQPKAVRVPGHEDGVTISGLEPDHKYKMNLYGFHGGQRVGPVSAVGLTAPGKDEEMAPASTEPPTPEPPIKPRLEELTVTDATPDSLSLSWTVPEGQFDHFLVQYKNGDGQPKATRVPGHEDRVTISGLEPDNKYKMNLYGFHGGQRVGPVSAIGVTAAEEETPSPTEPSMEAPEPPEEPLLGELTVTGSSPDSLSLSWTVPQGRFDSFTVQYKDRDGRPQVVRVGGEESEVTVGGLEPGRKYKMHLYGLHEGRRVGPVSTVGVTAPQEDVDETPSPTEPGTEAPEPPEEPLLGELTVTGSSPDSLSLSWTVPQGRFDSFTVQYKDRDGRPQAVRVGGQESKVTVRGLEPGRKYKMHLYGLHEGRRLGPVSAVGVTEDEAETTQAVPTMTPEPPIKPRLGELTMTDATPDSLSLSWTVPEGQFDHFLVQYRNGDGQPKAVRVPGHEDGVTISGLEPDHKYKMNLYGFHGGQRVGPISVIGVTEEETPSPTELSTEAREPPEEPLLGELTVTGSSPDSLSLSWTIPQGHFDSFTVQYKDRDGRPQVMRVRGEESEVTVGGLEPGRKYKMHLYGLHEGRRVGPVSTVGVTVPTTTPEPPNKPRLGELTVTDATPDSLSLSWMVPEGQFDHFLVQYRNGDGQPKVVRVPGHEDGVTISGLEPDHKYKMNLYGFHGGQRVGPISVIGVTEEETPAPTEPSTEAPEPPEEPLLGELTVTGSSPDSLSLSWTIPQGRFDSFTVQYKDRDGRPQVVRVRGEESEVTVGGLEPGCKYKMHLYGLHEGQRVGPVSAVGVTAPKDEAETTQAVPTMTPEPPIKPRLGELTVTDATPDSLSLSWMVPEGQFDHFLVQYRNGDGQPKAVRVPGHEDGVTISGLEPDHKYKMNLYGFHGGQRVGPVSAIGVTEEETPSPTEPSTEAPEAPEEPLLGELTVTGSSPDSLSLSWTVPQGRFDSFTVQYKDRDGQPQVVRVRGEESEVTVGGLEPGRKYKMHLYGLHEGQRVGPVSTVGITAPLPTPLPVEPRLGELAVAAVTSDSVGLSWTVAQGPFDSFLVQYRDAQGQPQAVPVSGDLRAVAVSGLDPARKYKFLLFGLQNGKRHGPVPVEARTAPDTKPSPRLGELTVTDATPDSVGLSWTVPEGEFDSFVVQYKDKDGRLQVVPVAANQREVTVQGLEPSRKYRFLLYGLSGRKRLGPISADSTTAPLEKELPPHLGELTVAEETSSSLRLSWTVAQGPFDSFVVQYRDTDGQPRAVPVAADQRTVTVEDLEPGKKYKFLLYGLLGGKRLGPVSALGMTAPEEDTPAPELAPEAPEPPEEPRLGVLTVTDTTPDSMRLSWSVAQGPFDSFVVQYEDTNGQPQALLVDGDQSKILISGLEPSTPYRFLLYGLHEGKRLGPLSAEGTTGLAPAGQTSEESRPRLSQLSVTDVTTSSLRLNWEAPPGAFDSFLLRFGVPSPSTLEPHPRPLLQRELMVPGTRHSAVLRDLRSGTLYSLTLYGLRGPHKADSIQGTARTLSPVLESPRDLQFSEIRETSAKVNWMPPPSRADSFKVSYQLADGGEPQSVQVDGQARTQKLQGLIPGARYEVTVVSVRGFEESEPLTGFLTTVPDGPTQLRALNLTEGFAVLHWKPPQNPVDTYDVQVTAPGAPPLQAETPGSAVDYPLHDLVLHTNYTATVRGLRGPNLTSPASITFTTGLEAPRDLEAKEVTPRTALLTWTEPPVRPAGYLLSFHTPGGQNQEILLPGGITSHQLLGLFPSTSYNARLQAMWGQSLLPPVSTSFTTGGLRIPFPRDCGEEMQNGAGASRTSTIFLNGNRERPLNVFCDMETDGGGWLVFQRRMDGQTDFWRDWEDYAHGFGNISGEFWLGNEALHSLTQAGDYSMRVDLRAGDEAVFAQYDSFHVDSAAEYYRLHLEGYHGTAGDSMSYHSGSVFSARDRDPNSLLISCAVSYRGAWWYRNCHYANLNGLYGSTVDHQGVSWYHWKGFEFSVPFTEMKLSCCPPLSHPSMTAEH

SEQ ID NO: 866463 - protein, 1400 aa, Homo sapiens
MPAQYALTSSLVLLVLLSTARAGPFSSRSNVTLPAPRPPPQPGGHTVGAGVGSPSSQLYEHTVEGGEKQVVFTHRINLPPSTGCGCPPGTEPPVLASEVQALRVRLEILEELVKGLKEQCTGGCCPASAQAGTGEQVITEEGGEVVVGWALLVHKGPWYELEEGSSFLTMRGVDAAQNTTWRAELGYMSTKAYARALRGCIHYTYYNWEQTWPYEMRLAWLGACTLGALHRLSLSPRRETETCLSPPTPGQTDVRTLCSLHGVFDLSRCTCSCEPGWGGPTCSDPTDAEIPPSSPPSASGSCPDDCNDQGRCVRGRCVCFPGYTGPSCGWPSCPGDCQGRGRCVQGVCVCRAGFSGPDCSQRSCPRGCSQRGRCEGGRCVCDPGYTGDDCGMRSCPRGCSQRGRCENGRCVCNPGYTGEDCGVRSCPRGCSQRGRCKDGRCVCDPGYTGEDCGTRSCPWDCGEGGRCVDGRCVCWPGYTGEDCSTRTCPRDCRGRGRCEDGECICDTGYSGDDCGVRSCPGDCNQRGRCEDGRCVCWPGYTGTDCGSRACPRDCRGRGRCENGVCVCNAGYSGEDCGVRSCPGDCRGRGRCESGRCMCWPGYTGRDCGTRACPGDCRGRGRCVDGRCVCNPGFTGEDCGSRRCPGDCRGHGLCEDGVCVCDAGYSGEDCSTRSCPGGCRGRGQCLDGRCVCEDGYSGEDCGVRQCPNDCSQHGVCQDGVCICWEGYVSEDCSIRTCPSNCHGRGRCEEGRCLCDPGYTGPTCATRMCPADCRGRGRCVQGVCLCHVGYGGEDCGQEEPPASACPGGCGPRELCRAGQCVCVEGFRGPDCAIQTCPGDCRGRGECHDGSCVCKDGYAGEDCGEEVPTIEGMRMHLLEETTVRTEWTPAPGPVDAYEIQFIPTTEGASPPFTARVPSSASAYDQRGLAPGQEYQVTVRALRGTSWGLPASKTITTMIDGPQDLRVVAVTPTTLELGWLRPQAEVDRFVVSYVSAGNQRVRLEVPPEADGTLLTDLMPGVEYVVTVTAERGRAVSYPASVRANTEEREEESPPRPSLSQPPRRPWGNLTAELSRFRGTVQDLERHLRAHGYPLRANQTYTSVARHIHEYLQRQVLGSSADGALLVSLDGLRGQFERVVLRWRPQPPAEGPGGELTVPGTTRTVSLPDLRPGTTYHVEVHGVRAGQTSKSYAFITTTGPSTTQGAQAPLLQQRPQELGELRVLGRDETGRLRVVWTAQPDTFAYFQLRMRVPEGPGAHEEVLPGDVRQALVPPPPPGTPYELSLHGVPPGGKPSDPIIYQGIMDKDEEKPGKSSGPPRLGELTVTDRTSDSLLLRWTVPEGEFDSFVIQYKDRDGQPQVVPVEGPQRSAVITSLDPGRKYKFVLYGFVGKKRHGPLVAEAKICE

SEQ ID NO: 866464 - protein, 1123 aa, Homo sapiens
DGPYSKGGKDAGGADVSLACRRQSIPEEFRGITVVELIKKEGSTLGLTISGGTDKDGKPRVSNLRPGGLAARSDLLNIGDYIRSVNGIHLTRLRHDEIITLLKNVGERVVLEVEYELPPPAPENNPRIISKTVDVSLYKEGNSFGFVLRGGAHEDGHKSRPLVLTYVRPGGPADREGSLKVGDRLLSVDGIPLHGASHATALATLRQCSHEALFQVEYDVATPDTVANASGPLMVEIVKTPGSALGISLTTTSLRNKSVITIDRIKPASVVDRSGALHPGDHILSIDGTSMEHCSLLEATKLLASISEKVRLEILPVPQSQRPLRPSEAVKVQRSEQLHRWDPCVPSCHSPRPGHCRMPTWATPAGQDQSRSLSSTPFSSPTLNHAFSCNNPSTLPRGSQPMSPRTTMGRRRQRRREHKSSLSLASSTVGPGGQIVHTETTEVVLCGDPLSGFGLQLQGGIFATETLSSPPLVCFIEPDSPAERCGLLQVGDRVLSINGIATEDGTMEEANQLLRDAALAHKVVLEVEFDVAESVIPSSGTFHVKLPKKRSVELGITISSASRKRGEPLIISDIKKGSVAHRTGTLEPGDKLLAIDNIRLDNCPMEDAVQILRQCEDLVKLKIRKDEDNSDELETTGAVSYTVELKRYGGPLGITISGTEEPFDPIVISGLTKRGLAERTGAIHVGDRILAINNVSLKGRPLSEAIHLLQVAGETVTLKIKKQLDRPLLPRKSGSLSETSDADEDPADALKGGLPAARFSPAVPSVDSAVESWDSSATEGGFGGPGSYTPQAAARGTTPQERRPGWLRGSPPPTEPRRTSYTPTPADESFPEEEEEDDWEPPTRLLCHRSPPRLICPCSNWPPTVLVAPNCVFPLFRVTNHCPGAPELPPRTPACLPAHPPYGPSSPTLGPGAPKTPQAPARPPACQELTLSGSYVYSPAPGPAREEGFWRMFGEALEDLESCGQSELLRELEASIMTGTVQRVALEGRPGHRPWQRGREVRASPAEMEELLLPTPLEMHKVTLHKDPMRHDFGFSVSDGLLEKGVYVHTVRPDGPAHRGGLQPFDRVLQVNHVRTRDFDCCLAVPLLAEAGDVLELIISRKPHTAHSSRAPRSPGPSSPRML

SEQ ID NO: 866465 - protein, 1029 aa, Homo sapiens
DGPYSKGGKDAGGADVSLACRRQSIPEEFRGITVVELIKKEGSTLGLTISGGTDKDGKPRVSNLRPGGLAARSDLLNIGDYIRSVNGIHLTRLRHDEIITLLKNVGERVVLEVEYELPPPAPENNPRIISKTVDVSLYKEGNSFGFVLRGGAHEDGHKSRPLVLTYVRPGGPADREGSLKVGDRLLSVDGIPLHGASHATALATLRQCSHEALFQVEYDVATPDTVANASGPLMVEIVKTPGSALGISLTTTSLRNKSVITIDRIKPASVVDRSGALHPGDHILSIDGTSMEHCSLLEATKLLASISEKVRLEILPVPQSQRPLRPSEAVKVQRSEQLHRWDPCVPSCHSPRPGHCRMPTWATPAGQDQSRSLSSTPFSSPTLNHAFSCNNPSTLPRGSQPMSPRTTMGRRRQRRREHKSSLSLASSTVGPGGQIVHTETTEVVLCGDPLSGFGLQLQGGIFATETLSSPPLVCFIEPDSPAERCGLLQVGDRVLSINGIATEDGTMEEANQLLRDAALAHKVVLEVEFDVAESVIPSSGTFHVKLPKKRSVELGITISSASRKRGEPLIISDIKKGSVAHRTGTLEPGDKLLAIDNIRLDNCPMEDAVQILRQCEDLVKLKIRKDEDNSDELETTGAVSYTVELKRYGGPLGITISGTEEPFDPIVISGLTKRGLAERTGAIHVGDRILAINNVSLKGRPLSEAIHLLQVAGETVTLKIKKQLDRPLLPRKSGSLSETSDADEDPADALKGGLPAARFSPAVPSVDSAVESWDSSATEGGFGGPGSYTPQAAARGTTPQERRPGWLRGSPPPTEPRRTSYTPTPADESFPEEEEEDDWEPPTSPAPGPAREEGFWRMFGEALEDLESCGQSELLRELEASIMTGTVQRVALEGRPGHRPWQRGREVRASPAEMEELLLPTPLEMHKVTLHKDPMRHDFGFSVSDGLLEKGVYVHTVRPDGPAHRGGLQPFDRVLQVNHVRTRDFDCCLAVPLLAEAGDVLELIISRKPHTAHSSRAPRSPGPSSPRML

SEQ ID NO: 866466 - protein, 100 aa, Homo sapiens
TLPVLCLSLALVMPPCPEALVRHSPFPAPTSENLQLELFQENPFLAHSASLSLSYLIYNKGVGLGDPGGPSLPDRQEISVALAWPISTQCLPLLHLKKLI

SEQ ID NO: 866467 - protein, 377 aa, Homo sapiens
GNETNSRETFLGRINDCYKRSLERKLPPSCMIGGIKETQGKHVILSGSTEVISNEGGRFCYPEFSSGEESEEDVLFSNMEEEHESWDESDEELLAMEIRMRGQPRFANFRANTLSPVRFFVDKKWNTIPLRNKSLQRICAVDYDDSYDEILNGYEENSVVSYGQGSIQSMVSSDSTSPDSSLTEESRSETASSLSQKICNGGLSPGNPGDSKDMKEIEPNYESPSSNNQDKDSSQASKSSIKVPETHKAVLALRLEEKDGKIAVQTEKEESKASTDVAGQAVTINLVPTEEQAKPYRVVNLEQPLCKPYTVVDVSAAMASEHLEGPVNSPKTKSSSSTPNSPVTSSSLTPGQISAHFQKSSAIRYQEVWTSSTSPTT

SEQ ID NO: 866468 - protein, 80 aa, Homo sapiens
RESVLVLREFVLVFVLVLREFVLVLRAGAKGIVCTLVGDSVRRSRNAKDTVNVLSFVAVVVERLFHWYLLHCIINDQMNE

SEQ ID NO: 866469 - protein, 42 aa, Homo sapiens
MNDGTWVLSSQTLSKSALYRHRGLLLLSPTPQSLGPQPIPGH

SEQ ID NO: 866470 - protein, 128 aa, Homo sapiens
LCISSPSGADLDSHPLVPRSGHRILELATEKGETWLPCRGHTISSPLRGLVRVTVGPLLEPQRRTHLSVGEFGRRTWAYRAQPFGSLFLLGADPPTALSLPAMHVVGPGPLWMAHGGLELSLPGGIFV

SEQ ID NO: 866471 - protein, 111 aa, Homo sapiens
MELGSDNTEPAPSRSCMSREGNRMWTARMNTCRPVPMGGGQKRPRLKPHPSCAHLHTVSFCGSQAILPTHLLTDVWEAAASLLLLVQLTTSSSALRLLPFILLQLNLSQSF

SEQ ID NO: 866472 - protein, 105 aa, Homo sapiens
MWCLAAIVNRPWRGHRKGLPATHDLLRACLLTYDPSSSHPSATPVRRYEEDLRCEEDREGLVLSPTLECSGVITAHCSLNFLDSSDFPASTSQELGPQVHATTPG

SEQ ID NO: 866473 - protein, 118 aa, Homo sapiens
LPNLRLSKRPEPPGARPLRGLMTYGSCRVALSQDGGQVACSGLPGDFAPLRPRSLLLSISGPRGCHKESVTRDGRWWPRPLAVCCVEGRIIIIIKLNIALMCQELLSQQWRCGAWPQS

SEQ ID NO: 866474 - protein, 111 aa, Homo sapiens; identical to SEQ ID NO: 866471

SEQ ID NO: 866475 - protein, 94 aa, Homo sapiens
GASSNAGLTGRDGPTAGCTVPLPPRLGICLDYERGRVSFLDAVSFRGLLECPLDCSGPVCPAFCFIGGGAVQLQEPVGTKPERKVTIGGFAKLD

SEQ ID NO: 866476 - protein, 123 aa, Homo sapiens
KPEEILGANPGAVSRVLASLGLGPVPTLSWHWEPQLQIPRGQKPALGPLHKVKHLRESPGRQSETPSEKKKKKKKDSGAVTQGALVRTMTRGKLRLDDWKAAPRTGAECGTGISGNKSFFYLS

SEQ ID NO: 866477 - protein, 106 aa, Homo sapiens
VCSGPSASLIPMACAQATLLGTRREMTTSDPVGMLAPEYLVYFPLLPASGCTPRPATVVSVSGSIQCTMDYDYDYMCLCFPLESEGQNTWAIRREPPKPSAKTTTL

SEQ ID NO: 866478 - protein, 404 aa, Homo sapiens
MSRRSSRLQAKQQPQPSQTESPQEAQIIQAKKRKTTQDVKKRREEVTKKHQYEIRNCWPPVLSGGISPCIIIETPHKEIGTSDFSRFTNYRFKNLFINPSPLPDLSWGCSKEVWLNMLKKESRYVHDKHFEVLHSDLEPQMRSILLDWLLEVCEVYTLHRETFYLAQDFFDRFMLTQKDINKNMLQLIGITSLFIASKLEEIYAPKLQEFAYVTDGACSEEDILRMELIILKALKWELCPVTIISWLNLFLQVDALKDAPKVLLPQYSQETFIQIAQLLDLCILAIDSLEFQYRILTAAALCHFTSIEVVKKASGLEWDSISECVDWMVPFVNVVKSTSPVKLKTFKKIPMEDRHNIQTHTNYLAMLEEVNYINTFRKGGQLSPVCNGGIMTPPKSTEKPPGKH

SEQ ID NO: 866479 - protein, 404 aa, Homo sapiens; identical to SEQ ID NO: 866478

SEQ ID NO: 866480 - protein, 359 aa, Homo sapiens [sequence omitted]

SEQ ID NO: 866481 - protein, 386 aa, Homo sapiens
MSRRSSRLQAKQQPQPSQTESPQEAQIIQAKKRKTTQDVKKRREEVTKKHQYEIRNCWPPVLSGGISPCIIIETPHKEIGTSDFSRFTNYRFKNLFINPSPLPDLSWGCSKEVWLNMLKKESRYVHDKHFEVLHSDLEPQMRSILLDWLLEVCEVYTLHRETFYLAQDFFDRFMLTQKDINKEIYAPKLQEFAYVTDGACSEEDILRMELIILKALKWELCPVTIISWLNLFLQVDALKDAPKVLLPQYSQETFIQIAQLLDLCILAIDSLEFQYRILTAAALCHFTSIEVVKKASGLEWDSISECVDWMVPFVNVVKSTSPVKLKTFKKIPMEDRHNIQTHTNYLAMLEEVNYINTFRKGGQLSPVCNGGIMTPPKSTEKPPGKH

SEQ ID NO: 866482 - protein, 115 aa, Homo sapiens [sequence omitted]

SEQ ID NO: 866483 - protein, 404 aa, Homo sapiens; identical to SEQ ID NO: 866478

SEQ ID NO: 866484 - protein, 288 aa, Homo sapiens
MLKKESRYVHDKHFEVLHSDLEPQMRSILLDWLLEVCEVYTLHRETFYLAQDFFDRFMLTQKDINKNMLQLIGITSLFIASKLEEIYAPKLQEFAYVTDGACSEEDILRMELIILKALKWELCPVTIISWLNLFLQVDALKDAPKVLLPQYSQETFIQIAQLLDLCILAIDSLEFQYRILTAAALCHFTSIEVVKKASGLEWDSISECVDWMVPFVNVVKSTSPVKLKTFKKIPMEDRHNIQTHTNYLAMLEEVNYINTFRKGGQLSPVCNGGIMTPPKSTEKPPGKH

SEQ ID NO: 866485 - protein, 288 aa, Homo sapiens
MSRRSSRLQAKQQPQPSQTESPQEAQIIQAKKRKTTQDVKKRREEVTKKHQYEIRNCWPPVLSGGISPCIIIETPHKEIGTSDFSRFTNYRFKNLFINPSPLPDLSWGCSKEVWLNMLKKESRYVHDKHFEVLHSDLEPQMRSILLDWLLEVCEVYTLHRETFYLAQDFFDRFMLTQKDINKNMLQLIGITSLFIASKLEEIYAPKLQEFAYVTDGACSEEDILRMELIILKALKWELCPVTIISWLNLFLQVDALKDAPKVLLPQYSQETFIQIAQLFSHFSYLLDQ

SEQ ID NO: 866486 - protein, 316 aa, Homo sapiens
MSKKEERRSPRNISMKLGWGCSKEVWLNMLKKESRYVHDKHFEVLHSDLEPQMRSILLDWLLEVCEVYTLHRETFYLAQDFFDRFMLTQKDINKNMLQLIGITSLFIASKLEEIYAPKLQEFAYVTDGACSEEDILRMELIILKALKWELCPVTIISWLNLFLQVDALKDAPKVLLPQYSQETFIQIAQLLDLCILAIDSLEFQYRILTAAALCHFTSIEVVKKASGLEWDSISECVDWMVPFVNVVKSTSPVKLKTFKKIPMEDRHNIQTHTNYLAMLEEVNYINTFRKGGQLSPVCNGGIMTPPKSTEKPPGKH

SEQ ID NO: 866487 - protein, 79 aa, Homo sapiens
RFNQCNTTRGNEVISVMNRAKKAGELGPAVGSGPGDRPLSHILTSITLRKVSGSGNHHTGAACLASRRLRPHGEPQLVL

SEQ ID NO: 866488 - protein, 549 aa, Homo sapiens
ILHTWDFRLAALRLLPDMQGPWVLLLLGLRLQLSLGIIPVEEENPDFWNRQAAEALGAAKKLQPAQTAAKNLIIFLGDGMGVSTVTAARILKGQKKDKLGPETFLAMDRFPYVALSKTYSVDKHVPDSGATATAYLCGVKGNFQTIGLSAAARFNQCNTTRGNEVISVMNRAKKAGKSVGVVTTTRVQHASPAGAYAHTVNRNWYSDADVPASARQEGCQDIATQLISNMDIDVILGGGRKYMFPMGTPDPEYPDDYSQGGTRLDGKNLVQEWLAKHQGARYVWNRTELLQASLDPSVTHLMGLFEPGDMKYEIHRDSTLDPSLMEMTEAALRLLSRNPRGFFLFVEGGRIDHGHHESRAYRALTETIMFDDAIERAGQLTSEEDTLSLVTADHSHVFSFGGYPLRGSSIFGLAPGKARDRKAYTVLLYGNGPGYVLKDGARPDVTESESGSPEYRQQSAVPLDGETHAGEDVAVFARGPQAHLVHGVQEQTFIAHVMAFAACLEPYTACDLAPRAGTTDAAHPGPSVVPALLPLLAGTLLLLGTATAP

SEQ ID NO: 866489 - protein, 302 aa, Homo sapiens
MSEDEEKVKLRRLEPAIQKFIKIVIPTDLERLRKHQINIEKYQRCRIWDKLHEEHINAGRTVQQLRSNIREIEKLCLKVRKDDLVLLKRMIDPVKEEASAATAEFLQLHLESVEELKKQFNDEETLLQPPLTRSMTVGGAFHTTEAEASSQSLTQIYALPEIPQDQNAAESWETLEADLIELSQLVTDFSLLVNSQQEKIDSIADHVNSAAVNVEEGTKNLGKAAKYKLAALPVAGALIGGMVGGPIGLLAGFKVAGIAAALGGGVLGFTGGKLIQRKKQKMMEKLTSSCPDLPSQTDKKCS

SEQ ID NO: 866490 - protein, 645 aa, Homo sapiens
MLFKTNFIIIHRSNDYPFKMIPLGNHVLTVVMLVLILLRPILKLFFQNCLQRHFADHPRKGGMMVLCRTDQEFLEDFEVILKLSAVQGELHEIQKLPSVGCLPSCPPLSALRFLYRSKNQILVTSITEVEETCNIARKYTTFVFHQSAETKPCFVLTLNMKGVSQGPLCPSLLPYEILQEKDEEKPGGRFSSEMRWFFLLLSQNVAVVHRYLTNVEMMFLSNQRPNKRQGSFSSSLNLILKVQGYFLFLINTLLFLTGGSHNLQFINLMPFYKETSSGIINHQCKGSTWYVSTLLLSNRNEEIRNISVHIKLKKKTHKKCQRQIICSRSQKLVSTRLGFNQGLGKNPEGDLTECEALSSHLLRLMVFQTSFNIPNQAIATTEDNWTGNPEIRVLVGFVSCSRIFKSGAALFSHPSHESFNLSGHQLDSIPYIKPCPVNSPLNVVASISKYIHGHHPSKKTITSHPALDLPPTLSDSVPYITATRINNHVHLSFSAERFSVVPTEYQIKFESLRLAFTAFYVLAPALSLETHYSPSDNATKNPQEGFQGFSMVKVQTGNKPCLHFSGLKYFLYYFIIVSWGLFKLLDEPKTCILKKIFFSTRRNCFQFLNLQNNVSVVTCAFDSHSTSILQEHKSSSLEWTIVQLL

SEQ ID NO: 866491 - protein, 302 aa, Homo sapiens; identical to SEQ ID NO: 866489

SEQ ID NO: 866492 - protein, 302 aa, Homo sapiens; identical to SEQ ID NO: 866489

SEQ ID NO: 866493 - protein, 73 aa, Homo sapiens
ARAKLLQDGPPPGLGRVIGELGEDGWIRVQWDTGSTNSYRMGKEGKYDLKLAELPAPAQPSAEDSDTEDDSGG

SEQ ID NO: 866494 - protein, 1555 aa, Homo sapiens
MVENRYTESFFTGQNCRNNEKVTLVRIADLENHNNDGGFWTVIDGKVYDIKDFQTQSLTENSILAQFAGEDPVVALEAALQFEDTRESMHAFCVGQYLEPDQEGVTIPDLGSLSSPLIDTERNLGLLLGLHASYLAMSTPLSPVEIECAKWLQSSIFSGGLQTSQIHYSYNEEKDEDHCSSPGGTPASKSRLCSHRRALGDHSQAFLQAIADNNIQDHNVKDFLCQIERYCRQCHLTTPIMFPPEHPVEEVGRLLLCCLLKHEDLGHVALSLVHAGALDIEQVKHRTLPKSVVDVCRVVYQAKCSLIKTHQEQGRSYKEVCAPVIKRLRFLFNELRPAVCNDLSIMSKFKLLSSLPHWRRIAQKIIREPRKKRVPKKPESTDDEEKIGNEESDLEEACILPHSPINVDKRPIAIKSPKDKWQPLLSTVTDVHKYKWLKQNVQGLYPQSPLLSTIAEFALKEEPVDVEKRKCLLKQLERAEVRLEGIDTILKLYLVSKNFLLPSVPYAMFCGWQRLIPEGIDIGEPLTDCLKDVDLIPPFNRMLLEVTFGKLYAWAVQNIRNVLVDASAKFKELGIQPVPLQTITNENPSGPSLGTIPQAHFLLVMLSMLTLQHSANNLDLLLNSGTLALAQTALRLIGPSCDSVEEDMNASAQGASATVLEETRKETAPVQLPVSGPELAAMMKIGTRVMRGVDWKWGDQDGPPPGLGRVIGELGEDGWIRVQWDTGSTNSYRMGKEGKYDLKLAELPAPAQPSAEDSDTEDDSEAEQTERNIHPTAMMFTSTINLLQTLCLSAGVHAEIMQSEATKTLCGLLQQTELVYREQHRSWCTLGFVQSIALTLQVCGALSSPQWITLLMKVVEGHAPFTATSLQRQILAVHLLQAVLPSWDKTERVRDMKCLMEKLFDFLGSLLTMCSSDVPLLRGGGRLPSLYPGEERCSAVTQRWVAVSLPCVLVKSVQCRHSEVGGRLPSLYPGEERCSAVTQRWVAVSLPCVLVKSRVVPSLRGEWPSPFPVVLVKSGAVSSLRDEGPSPFPVTLVKSGAAASPLVSSSESTLRRRRVCPQASLTATHSSTLAEEVVALLHTLHSLTRWNGLINKYINSQLRSITHSFAGRPSKGAQLDDYFPDSENPEVGGLMAVLAVVGGIDGRLCLGGQVVHDDFGEVTMTRITLKGKITVQFSDMRTCRVCPLNQLKPLPAVAFNVNNLPFTEPMLSVWAQLVNLAGSKLEKHKIKKSTKQAFAGQVDLDLLRRQQLKLYILKAGRALFSHQDKLRQILSQPAVQETGTVHTDDGAVVSPDLGDMSPEGPQPPMILLQQLLASATQPSPVKAIFDKQELETAALAVVESTHPSSPGFEDCSSSEATTPVNVQHIRPARVKRRKQSPVPALPIVVQLMEMGFPRRNIEFALKSLTGASGNASGLPGVEALVGWLLDHSDIQVTELSDADTVSDEYSDEEVVEDMDDAAYSMSTGAVVTESQTYKNRAGFLGNDDYAVYVRENIQVGMMVRCCRTYEEVCEGDVMLAKSSSWTEMDCMISMCSVTGSRKGASTGLGTFMWNL

SEQ ID NO: 866495 - protein, 81 aa, Homo sapiens
TRLSSSTAVISTGRGPCRDPHVPQVRMARHPQATCSLTCPESVTARQCRAPTATCTIFFPLSPSTTYSFHTCTSEPWRNLK

SEQ ID NO: 866496 - protein, 871 aa, Homo sapiens
ARAKLLQDGPPPGLGRVIGELGEDGWIRVQWDTGSTNSYRMGKEGKYDLKLAELPAPAQPSAEDSDTEDDSEAEQTERNIHPTAMMFTSTINLLQTLCLSAGVHAEIMQSEATKTLCGLLQMLVESGTTDKTSNRLVYREQHRSWCTLGFVQSIALTLQVCGALSSPQWITLLMKVVEGHAPFTATSLQRQILAVHLLQAVLPSWDKTERVRDMKCLMEKLFDFLGSLLTMCSSDVPLLRGGGRLPSLYPGEERCSAVTQRWVAVSLPCVLVKSVQCRHSEVGGRLPSLYPGEERCSAVTQRWVAVSLPCVLVKSRVVPSLRGEWPSPFPGALVKSGAAASPLVSSSESTLRRRRVCPQASLTATHSSTLAEEVVALLHTLHSLTRWNGLINKYINSQLRSITHSFAGRPSKGAQLDDYFPDSENPEVGGLMAVLAVVGGIDGRLCLGGQVVHDDFGEVTMTRITLKGKITVQFSDMRTCRVCPLNQLKPLPAVAFNVNNLPFTEPMLSVWAQLVNLAGSKLEKHKIKKSTKQAFAGQVDLDLLRRQQLKLYILKAGRALFSHQDKLRQILSQPAVQETGTVHTEPMDTEGSCICLLLWKHENNDGAVVSPDLGDMSPEGPQPPMILLQQLLASATQPSPVKAIFDKQELETAALAVVESTHPSSPGFEDCSSSEATTPVNVQHIRPARVKRRKQSPVPALPIVVQLMEMGFPRRNIEFALKSLTGASGNASGLPGVEALVGWLLDHSDIQVTELSDADTVSDEYSDEEVVEDMDDAAYSMSTGAVVTESQTYKNRAGFLGNDDYAVYVRENIQVGMMVRCCRTYEEVCEGDVMLAKSSSWTEMDCMISMCSVTGSRKGASTGLGTFMWNL

SEQ ID NO: 866497 - protein, 871 aa, Homo sapiens; identical to SEQ ID NO: 866496

SEQ ID NO: 866498 - protein, 428 aa, Homo sapiens
YKHIRWPAASTDVVGGIDGRLCLGGQVVHDDFGEVTMTRITLKGKITVQFSDMRTCRVCPLNQLKPLPAVAFNVNNLPFTEPMLSVWAQLVNLAGSKLEKHKIKKSTKQAFAGQVDLDLLRRQQLKLYILKAGRALFSHQDKLRQILSQPAVQETGTVHTDDGAVVSPDLGDMSPEGPQPPMILLQQLLASATQPSPVKAIFDKQELETAALAVVESTHPSSPGFEDCSSSEATTPVNVQHIRPARVKRRKQSPVPALPIVVQLMEMGFPRRNIEFALKSLTGASGNASGLPGVEALVGWLLDHSDIQVTELSDADTVSDEYSDEEVVEDMDDAAYSMSTGAVVTESQTYKNRAGFLGNDDYAVYVRENIQVGMMVRCCRTYEEVCEGDVMLAKSSSWTEMDCMISMCSVTGSRKGASTGLGTFMWNL

SEQ ID NO: 866499 - protein, 871 aa, Homo sapiens; identical to SEQ ID NO: 866496

SEQ ID NO: 866500 - protein, 871 aa, Homo sapiens; identical to SEQ ID NO: 866496

SEQ ID NO: 866501 - protein, 871 aa, Homo sapiens; identical to SEQ ID NO: 866496

SEQ ID NO: 866502 - protein, 507 aa, Homo sapiens
ARAKLLQDGPPPGLGRVIGELGEDGWIRVQWDTGSTNSYRMGKEGKYDLKLAELPAPAQPSAEDSDTEDDSEAEQTERNIHPTAMMFTSTINLLQTLCLSAGVHAEIMQSEATKTLCGLLQMLVESGTTDKTSNRLVYREQHRSWCTLGFVQSIALTLQVCGALSSPQWITLLMKVVEGHAPFTATSLQRQILAVHLLQAVLPSWDKTERVRDMKCLMEKLFDFLGSLLTMCSSDVPLLRGGGRLPSLYPGEERCSAVTQRWVAVSLPCVLVKSVQCRHSEVGGRLPSLYPGEERCSAVTQRWVAVSLPCVLVKSRVVPSLRGEWPSPFPGALVKSGAAASPLVSSSESTLRRRRVCPQASLTATHSSTLAEEVVALLHTLHSLTRWNGLINKYINSQLRSITHSFAGRPSKGAQLDDYFPDSENPEVGGLMAVLAVVGGIDGRLCLGGQVVHDDFGEVTMTRITLKGKITVQFSDMRTCRVCPLNQLKPLPAVAFNVNNLPSLEAS

SEQ ID NO: 866503 - protein, 871 aa, Homo sapiens; identical to SEQ ID NO: 866496

SEQ ID NO: 866504 - protein, 871 aa, Homo sapiens; identical to SEQ ID NO: 866496

SEQ ID NO: 866505 - protein, 871 aa, Homo sapiens; identical to SEQ ID NO: 866496

SEQ ID NO: 866506 - protein, 871 aa, Homo sapiens; identical to SEQ ID NO: 866496

SEQ ID NO: 866507 - protein, 871 aa, Homo sapiens; identical to SEQ ID NO: 866496

SEQ ID NO: 866508 - protein, 862 aa, Homo sapiens
ARAKLLQDGPPPGLGRVIGELGEDGWIRVQWDTGSTNSYRMGKEGKYDLKLAELPAPAQPSAEDSDTEDDSEAEQTERNIHPTAMMFTSTINLLQTLCLSAGVHAEIMQSEATKTLCGLLQMLVESGTTDKTSNRLVYREQHRSWCTLGFVQSIALTLQVCGALSSPQWITLLMKVVEGHAPFTATSLQRQILAVHLLQAVLPSWDKTERVRDMKCLMEKLFDFLGSLLTMCSSDVPLLRGGGRLPSLYPGEERCSAVTQRWVAVSLPCVLVKSVQCRHSEVGGRLPSLYPGEERCSAVTQRWVAVSLPCVLVKSRVVPSLRGEWPSPFPGALVKSGAAASPLVSSSESTLRRRRVCPQASLTATHSSTLAEEVVALLHTLHSLTRWNGLINKYINSQLRSITHSFAGRPSKGAQLDDYFPDSENPEVGGLMAVLAVVGGIDGRLCLGGQVVHDDFGEVTMTRITLKGKITVQFSDMRTCRVCPLNQLKPLPAVAFNVNNLPFTEPMLSVWAQLVNLAGSKLEKHKIKKSTKQAFAGQVDLDLLRRQQLKLYILKAGRALFSHQDKLRQILSQPAVQETGTVHTEPMDTEGSCICLLLWKHENNDGAVVSPDLGDMSPEGPQPPMILLQQLLASATQPSPVKAIFDKQELETAALAVVESTHPSSPGFEDCSSSEATTPVNVQHIRPARVKRRKQSPVPALPIVVQLMEMGFPRRNIEFALKSLTGASGNASGLPGVEALVGWLLDHSDIQVTELSDADTVSDEYSDEEVVEDMDDAAYSMSTGAVVTESQTYKNRAGFLGNDDYAVYVRENIQVSNCLKLEPRSVFHSANIWVCPICQTSVDRGPCPQGACLLVLEDIPDQ

SEQ ID NO: 866509 - protein, 673 aa, Homo sapiens
ARAKLLQDGPPPGLGRVIGELGEDGWIRVQWDTGSTNSYRMGKEGKYDLKLAELPAPAQPSAEDSDTEDDSEAEQTERNIHPTAMMFTSTINLLQTLCLSAGVHAEIMQSEATKTLCGLLQMLVESGTTDKTSNRLVYREQHRSWCTLGFVQSIALTLQVCGALSSPQWITLLMKVVEGHAPFTATSLQRQILAVHLLQAVLPSWDKTERVRDMKCLMEKLFDFLGSLLTMCSSDVPLLRGGGRLPSLYPGEERCSAVTQRWVAVSLPCVLVKSVQCRHSEVGGRLPSLYPGEERCSAVTQRWVAVSLPCVLVKSRVVPSLRGEWPSPFPGALVKSGAAASPLVSSSESTLRRRRVCPQASLTATHSSTLAEEVVALLHTLHSLTRWNGLINKYINSQLRSITHSFAGRPSKGAQLDDYFPDSENPEVGGLMAVLAVVGGIDGRLCLGGQVVHDDFGEVTMTRITLKGKITVQFSDMRTCRVCPLNQLKPLPAVAFNVNNLPFTEPMLSVWAQLVNLAGSKLEKHKIKKSTKQAFAGQVDLDLLRRQQLKLYILKAGRALFSHQDKLRQILSQPAVQETGTVHTDDGAVVSPDLGDMSPEGPQPPMILLQQLLASATQPSPVKAIFDKQELEERMSRCCFWRRRTTKLEQILLFIRRMNSVCEKENTNATASN

SEQ ID NO: 866510 - protein, 591 aa, Homo sapiens
ARAKLLQDGPPPGLGRVIGELGEDGWIRVQWDTGSTNSYRMGKEGKYDLKLAELPAPAQPSAEDSDTEDDSEAEQTERNIHPTAMMFTSTINLLQTLCLSAGVHAEIMQSEATKTLCGLLQMLVESGTTDKTSNRLVYREQHRSWCTLGFVQSIALTLQVCGALSSPQWITLLMKVVEGHAPFTATSLQRQILAVHLLQAVLPSWDKTERVRDMKCLMEKLFDFLGSLLTMCSSDVPLLRGGGRLPSLYPGEERCSAVTQRWVAVSLPCVLVKSVQCRHSEVGGRLPSLYPGEERCSAVTQRWVAVSLPCVLVKSRVVPSLRGEWPSPFPGALVKSGAAASPLVSSSESTLRRRRVCPQASLTATHSSTLAEEVVALLHTLHSLTRWNGLINKYINSQLRSITHSFAGRPSKGAQLDDYFPDSENPEVGGLMAVLAVVGGIDGRLCLGGQVVHDDFGEVTMTRITLKGKITVQFSDMRTCRVCPLNQLKPLPAVAFNVNNLPFTEPMLSVWAQLVNLAGSKLEKHKIKKSTKQAFAGQVDLDLLRRQQLKLYILKAGRALFSHQDKLRQILSQPAVQETGTVHTGVFLKSS

SEQ ID NO: 866511 - protein, 536 aa, Homo sapiens
ARAKLLQDGPPPGLGRVIGELGEDGWIRVQWDTGSTNSYRMGKEGKYDLKLAELPAPAQPSAEDSDTEDDSEAEQTERNIHPTAMMFTSTINLLQTLCLSAGVHAEIMQSEATKTLCGLLQMLVESGTTDKTSNRLVYREQHRSWCTLGFVQSIALTLQVCGALSSPQWITLLMKVVEGHAPFTATSLQRQILAVHLLQAVLPSWDKTERVRDMKCLMEKLFDFLGSLLTMCSSDVPLLRGGGRLPSLYPGEERCSAVTQRWVAVSLPCVLVKSVQCRHSEVGGRLPSLYPGEERCSAVTQRWVAVSLPCVLVKSRVVPSLRGEWPSPFPGALVKSGAAASPLVSSSESTLRRRRVCPQASLTATHSSTLAEEVVALLHTLHSLTRWNGLINKYINSQLRSITHSFAGRPSKGAQLDDYFPDSENPEVGGLMAVLAVVGGIDGRLCLGGQVVHDDFGEVTMTRITLKGKITVQFSDMRTCRVCPLNQLKPVGELVLSYCMIREIDFTLEPSTNISTNSYRMGKEGKYDLKLAELPA

SEQ ID NO: 866512 - protein, 78 aa, Homo sapiens [sequence omitted]

SEQ ID NO: 866513 - protein, 1369 aa, Homo sapiens
MHAFCVGQYLEPDQEGVTIPDLGSLSSPLIDTERNLGLLLGLHASYLAMSTPLSPVEIECAKWLQSSIFSGGLQTSQIHYSYNEEKDEDHCSSPGGTPASKSRLCSHRRALGDHSQAFLQAIADNNIQDHNVKDFLCQIERYCRQCHLTTPIMFPPEHPVEEVGRLLLCCLLKHEDLGHVALSLVHAGALDIEQVKHRTLPKSVVDVCRVVYQAKCSLIKTHQEQGRSYKEVCAPVIKRLRFLFNELRPAVCNDLSIMSKFKLLSSLPHWRRIAQKIIREPRKKRVPKKPESTDDEEKIGNEESDLEEACILPHSPINVDKRPIAIKSPKDKWQPLLSTVTDVHKYKWLKQNVQGLYPQSPLLSTIAEFALKEEPVDVEKRKCLLKQLERAEVRLEGIDTILKLYLVSKNFLLPSVPYAMFCGWQRLIPEGIDIGEPLTDCLKDVDLIPPFNRMLLEVTFGKLYAWAVQNIRNVLVDASAKFKELGIQPVPLQTITNENPSGPSLGTIPQAHFLLVMLSMLTLQHSANNLDLLLNSGTLALAQTALRLIGPSCDSVEEDMNASAQGASATVLEETRKETAPVQLPVSGPELAAMMKIGTRVMRGVDWKWGDQDGPPPGLGRVIGELGEDGWIRVQWDTGSTNSYRMGKEGKYDLKLAELPAPAQPSAEDSDTEDDSEAEQTERNIHPTAMMFTSTINLLQTLCLSAGVHAEIMQSEATKTLCGLLQMLVESGTTDKTSNRLVYREQHRSWCTLGFVQSIALTLQVCGALSSPQWITLLMKVVEGHAPFTATSLQRQILAVHLLQAVLPSWDKTERVRDMKCLMEKLFDFLGSLLTMCSSDVPLLRESTLRRRRVCPQASLTATHSSTLAEEVVALLHTLHSLTRWNGLINKYINSQLRSITHSFAGRPSKGAQLDDYFPDSENPEVGGLMAVLAVVGGIDGRLCLGGQVVHDDFGEVTMTRITLKGKITVQFSDMRTCRVCPLNQLKPLPAVAFNVNNLPFTEPMLSVWAQLVNLAGSKLEKHKIKKSTKQAFAGQVDLDLLRRQQLKLYILKAGRALFSHQDKLRQILSQPAVQETGTVHTEPMDTEGSCICLLLWKHENNDGAVVSPDLGDMSPEGPQPPMILLQQLLASATQPSPVKAIFDKQELETAALAVVESTHPSSPGFEDCSSSEATTPVNVQHIRPARVKRRKQSPVPALPIVVQLMEMGFPRRNIEFALKSLTGASGNASGLPGVEALVGWLLDHSDIQVTELSDADTVSDEYSDEEVVEDMDDAAYSMSTGAVVTESQTYKNRAGFLGNDDYAVYVRENIQVGMMVRCCRTYEEVCEGDVMLAKSSSWTEMDCMISMCSVTGSRKGASTGLGTFMWNL

SEQ ID NO: 866514 - protein, 852 aa, Homo sapiens
ARAKLLQDGPPPGLGRVIGELGEDGWIRVQWDTGSTNSYRMGKEGKYDLKLAELPAPAQPSAEDSDTEDDSEAEQTERNIHPTAMMFTSTINLLQTLCLSAGVHAEIMQSEATKTLCGLLQMLVESGTTDKTSNRLVYREQHRSWCTLGFVQSIALTLQVCGALSSPQWITLLMKVVEGHAPFTATSLQRQILAVHLLQAVLPSWDKTERVRDMKCLMEKLFDFLGSLLTMCSSDVPLLRGGGRLPSLYPGEERCSAVTQRWVAVSLPCVLVKSVQCRHSEVGGRLPSLYPGEERCSAVTQRWVAVSLPCVLVKSRVVPSLRGEWPSPFPGALVKSGAAASPLVSSSESTLRRRRVCPQASLTATHSSTLAEEVVALLHTLHSLTRWNGLINKYINSQLRSITHSFAGRPSKGAQLDDYFPDSENPEVGGLMAVLAVVGGIDGRLCLGGQVVHDDFGEVTMTRITLKGKITVQFSDMRTCRVCPLNQLKPLPAVAFNVNNLPFTEPMLSVWAQLVNLAGSKLEKHKIKKSTKQAFAGQVDLDLLRRQQLKLYILKAGRALFSHQDKLRQILSQPAVQETGTVHTDDGAVVSPDLGDMSPEGPQPPMILLQQLLASATQPSPVKAIFDKQELETAALAVVESTHPSSPGFEDCSSSEATTPVNVQHIRPARVKRRKQSPVPALPIVVQLMEMGFPRRNIEFALKSLTGASGNASGLPGVEALVGWLLDHSDIQVTELSDADTVSDEYSDEEVVEDMDDAAYSMSTGAVVTESQTYKNRAGFLGNDDYAVYVRENIQVGMMVRCCRTYEEVCEGDVMLAKSSSWTEMDCMISMCSVTGSRKGASTGLGTFMWNL

SEQ ID NO: 866515 - protein, 871 aa, Homo sapiens; identical to SEQ ID NO: 866496

SEQ ID NO: 866516 - protein, 871 aa, Homo sapiens; identical to SEQ ID NO: 866496

SEQ ID NO: 866517 - protein, 871 aa, Homo sapiens; identical to SEQ ID NO: 866496

SEQ ID NO: 866518 - protein, 871 aa, Homo sapiens; identical to SEQ ID NO: 866496

SEQ ID NO: 866519 - protein, 871 aa, Homo sapiens; identical to SEQ ID NO: 866496

SEQ ID NO: 866520 - protein, 871 aa, Homo sapiens; identical to SEQ ID NO: 866496

SEQ ID NO: 866521 - protein, 871 aa, Homo sapiens; identical to SEQ ID NO: 866496

SEQ ID NO: 866522 - protein, 871 aa, Homo sapiens; identical to SEQ ID NO: 866496

SEQ ID NO: 866523 - protein, 871 aa, Homo sapiens; identical to SEQ ID NO: 866496

SEQ ID NO: 866524 - protein, 641 aa, Homo sapiens
ARAKLLQDGPPPGLGRVIGELGEDGWIRVQWDTGSTNSYRMGKEGKYDLKLAELPAPAQPSAEDSDTEDDSEAEQTERNIHPTAMMFTSTINLLQTLCLSAGVHAEIMQSEATKTLCGLLQMLVESGTTDKTSNRLVYREQHRSWCTLGFVQSIALTLQVCGALSSPQWITLLMKVVEGHAPFTATSLQRQILAVHLLQAVLPSWDKTERVRDMKCLMEKLFDFLGSLLTMCSSDVPLLRGGGRLPSLYPGEERCSAVTQRWVAVSLPCVLVKSVQCRHSEVGGRLPSLYPGEERCSAVTQRWVAVSLPCVLVKSRVVPSLRGEWPSPFPGALVKSGAAASPLVSSSESTLRRRRVCPQASLTATHSSTLAEEVVALLHTLHSLTRWNGLINKYINSQLRSITHSFAGRPSKGAQLDDYFPDSENPEVGGLMAVLAVVGGIDGRLCLGGQVVHDDFGEVTMTRITLKGKITVQFSDMRTCRVCPLNQLKPLPAVAFNVNNLPFTEPMLSVWAQLVNLAGSKLEKHKIKKSTKQAFAGQVDLDLLRRQQLKLYILKAGRALFSHQDKLRQILSQPAVQETGTVHTDDGAVVSPDLGDMSPEGPQPPMILLQQLLASATQPSPVKAIFDKQELEVQPCSLDSF

SEQ ID NO: 866525 - protein, 516 aa, Homo sapiens
ARAKLLQDGPPPGLGRVIGELGEDGWIRVQWDTGSTNSYRMGKEGKYDLKLAELPAPAQPSAEDSDTEDDSEAEQTERNIHPTAMMFTSTINLLQTLCLSAGVHAEIMQSEATKTLCGLLQMLVESGTTDKTSNRLVYREQHRSWCTLGFVQSIALTLQVCGALSSPQWITLLMKVVEGHAPFTATSLQRQILAVHLLQAVLPSWDKTERVRDMKCLMEKLFDFLGSLLTMCSSDVPLLRGGGRLPSLYPGEERCSAVTQRWVAVSLPCVLVKSVQCRHSEVGGRLPSLYPGEERCSAVTQRWVAVSLPCVLVKSRVVPSLRGEWPSPFPGALVKSGAAASPLVSSSESTLRRRRVCPQASLTATHSSTLAEEVVALLHTLHSLTRWNGLINKYINSQLRSITHSFAGRPSKGAQLDDYFPDSENPEVGGLMAVLAVVGGIDGRLCLGGQVVHDDFGEVTMTRITLKGKITVQFSDMRTCRVCPLNQLKPVGELVLSYCMIREIDFTLEPSTNIST

SEQ ID NO: 866526 - protein, 67 aa, Homo sapiens
STVTDVHKYKWLKQNVQGLYPQSPLLSTIAEFALKEEPVDVEKRKCLLKQVTFDEKCFSALGNIHNT

SEQ ID NO: 866527 - protein, 197 aa, Homo sapiens
AESARCCLGCRGRERPSPRPATSGPAAGSRCGCEGPRLAAAARTGHGVGRRARLACLGEPRVKAAVMLTLASKLKRDDGLKGSRTAATASDSTRRVSVRDKLLVKEVAELEANLPCTCKVHFPDPNKLHCFQLTVTPDEGYYQGGKFQFETEVPDAYNMVDLLNFDDPLNIEAAEHHLRDKEDFRNKVDDYIKRYAR

SEQ ID NO: 866528 - protein, 251 aa, Homo sapiens
AESARCCLGCRGRERPSPRPATSGPAAGSRCGCEGPRLAAAARTGHGVGRRARLACLGEPRVKAAVMLTLASKLKRDDGLKGSRTAATASDSTRRVSVRDKLLVKEVAELEANLPCTCKVHFPDPNKLHCFQLTVTPDEGYYQGGKFQFETEVPDAYNMVPPKVKCLTKIWHPNITETGEICLSLLREHSIDGTGWAPTRTLKDVVWGLNSLFTDLLNFDDPLNIEAAEHHLRDKEDFRNKVDDYIKRYAR

SEQ ID NO: 866529 - protein, 251 aa, Homo sapiens; identical to SEQ ID NO: 866528

SEQ ID NO: 866530 - protein, 230 aa, Homo sapiens
AESARCCLGCRGRERPSPRPATSGPAAGSRCGCEGPRLAAAARTGHGVGRRARLACLGEPRVKAAVMLTLASKLKRDDGLKGSRTAATASDSTRRVSVRDKLLVKEVAELEANLPCTCKVHFPDPNKLHCFQLTVTPDEGYYQGGKFQFETEVPDAYNMVPPKVKCLTKIWHPNITETGEICLSLLREHSIDGTGWAPTRTLKDVVWGLNSLFTEDFRNKVDDYIKRYAR

SEQ ID NO: 866531 - protein, 123 aa, Homo sapiens
RKAPAAVSAAAGESGRVPAPPLPVPPPGAGAAVRGRVSQQPPGPGMVLGAGPASPVSGSPEVAELEANLPCTCKVHFPDPNKLHCFQLTVTPASQSEMPDQDLAPQHHRDRGNMSEFIERTFN

SEQ ID NO: 866532 - protein, 251 aa, Homo sapiens; identical to SEQ ID NO: 866528

SEQ ID NO: 866533 - protein, 139 aa, Homo sapiens
AESARCCLGCRGRERPSPRPATSGPAAGSRCGCEGPRLAAAARTGHGVGRRARLACLGEPRVKAAVMLTLASKLKRDDGLKGSRTAATASDSTRRVSVRDKLLVKEVAELEANLPCTCKVHFPDPNKLHCFQLTVTPVY

SEQ ID NO: 866534 - protein, 129 aa, Homo sapiens
AESARCCLGCRGRERPSPRPATSGPAAGSRCGCEGPRLAAAARTGHGVGRRARLACLGEPRVKAAVMLTLASKLKRDDGLKGSRTAATASDSTRRVSVRDKLLVKEVAELEANLPYRVSLCCPSWSTVA

SEQ ID NO: 866535 - protein, 123 aa, Homo sapiens; identical to SEQ ID NO: 866531

SEQ ID NO: 866536 - protein, 251 aa, Homo sapiens; identical to SEQ ID NO: 866528

SEQ ID NO: 866537 - protein, 189 aa, Homo sapiens
AESARCCLGCRGRERPSPRPATSGPAAGSRCGCEGPRLAAAARTGHGVGRRARLACLGEPRVKAAVMLTLASKLKRDDGLKGSRTAATASDSTRRVSVRDKLLVKEVAELEANLPCTCKVHFPDPNKLHCFQLTVTPDEGYYQGGKFQFETEVPDAYNMVPPKVKCLTKIWHPNITETGEICLRMSFGD

SEQ ID NO: 866538 - protein, 555 aa, Homo sapiens
MPSWIGAVILPLLGLLLSLPAGADVKARSCGEVRQAYGAKGFSLADIPYQEIAGEHLRICPQEYTCCTTEMEDKLSQQSKLEFENLVEETSHFVRTTFVSRHKKFDEFFRELLENAEKSLNDMFVRTYGMLYMQNSEVFQDLFTELKRYYTGGNVNLEEMLNDFWARLLERMFQLINPQYHFSEDYLECVSKYTDQLKPFGDVPRKLKIQVTRAFIAARTFVQGLTVGREVANRVSKVSPTPGCIRALMKMLYCPYCRGLPTVRPCNNYCLNVMKGCLANQADLDTEWNLFIDAMLLVAERLEGPFNIESVMDPIDVKISEAIMNMQENSMQVSAKVFQGCGQPKPAPALRSARSAPENFNTRFRPYNPEERPTTAAGTSLDRLVTDIKEKLKLSKKVWSALPYTICKDESVTAGTSNEEECWNGHSKARYLPEIMNDGLTNQINNPEVDVDITRPDTFIRQQIMALRVMTNKLKNAYNGNDVNFQDTSDESSGSGSGSGCMDDVCPTEFEFVTTEAPAVDPDRREVDSSAAQRGHSLLSWSLTCIVLALQRLCR

SEQ ID NO: 866539 - protein, 555 aa, Homo sapiens; identical to SEQ ID NO: 866538

SEQ ID NO: 866540 - protein, 555 aa, Homo sapiens; identical to SEQ ID NO: 866538

SEQ ID NO: 866541 - protein, 305 aa, Homo sapiens
MLYCPYCRGLPTVRPCNNYCLNVMKGCLANQADLDTEWNLFIDAMLLVAERLEGPFNIESVMDPIDVKISEAIMNMQENSMQVSAKVFQGCGQPKPAPALRSARSAPENFNTRFRPYNPEERPTTAAGTSLDRLVTDIKEKLKLSKKVWSALPYTICKDESVTAGTSNEEECWNGHSKARYLPEIMNDGLTNQINNPEVDVDITRPDTFIRQQIMALRVMTNKLKNAYNGNDVNFQDTSDESSGSGSGSGCMDDVCPTEFEFVTTEAPAVDPDRREVDSSAAQRGHSLLSWSLTCIVLALQRLCR

SEQ ID NO: 866542 - protein, 259 aa, Homo sapiens
MPSWIGAVILPLLGLLLSLPAGADVKARSCGEVRQAYGAKGFSLADIPYQEIAGEHLRICPQEYTCCTTEMEDKLSQQSKLEFENLVEETSHFVRTTFVSRHKKFDEFFRELLENAEKSLNDMFVRTYGMLYMQNSEVFQDLFTELKRYYTGGNVNLEEMLNDFWARLLERMFQLINPQYHFSEDYLECVSKYTDQLKPFGDVPRKLKIQVTRAFIAARTFVQGLTVGREVANRVSKVIENVLSFSLVFLVYSVFKTNV

SEQ ID NO: 866543 - protein, 531 aa, Homo sapiens
MAALGCARLRWALRGAGRGLCPHGARAKAAIPAALPSDKATGAPGAGPGVRRRQRSLEEIPRLGQLRFFFQLFVQGYALQLHQLQVLYKAKYGPMWMSYLGPQMHVNLASAPLLEQVMRQEGKYPVRNDMELWKEHRDQHDLTYGPFTTEGHHWYQLRQALNQRLLKPAEAALYTDAFNEVIDDFMTRLDQLRAESASGNQVSDMAQLFYYFALEAICYILFEKRIGCLQRSIPEDTVTFVRSIGLMFQNSLYATFLPKWTRPVLPFWKRYLDGWNAIFSFGKKLIDEKLEDMEAQLQAAGPDGIQVSGYLHFLLASGQLSPREAMGSLPELLMAGVDTTSNTLTWALYHLSKDPEIQEALHEEVVGVVPAGQVPQHKDFAHMPLLKAVLKETLRLYPVVPTNSRIIEKEIEVDGFLFPKNTQFVFCHYVVSRDPTAFSEPESFQPHRWLRNSQPATPRIQHPFGSVPFGYGVRACLGRRIAELEMQLLLARLIQKYKVVLAPETGELKSVARIVLVPNKKVGLQFLQRQC

SEQ ID NO: 866544 - protein, 574 aa, Homo sapiens
MAALGCARLRWALRGAGRGLCPHGARAKAAIPAALPSDKATGAPGAGPGVRRRQRSLEEIPRLGQLRFFFQLFVQGYALQLHQLQVLYKAKYGPMWMSYLGPQMHVNLASAPLLEQVMRQEGKYPVRNDMELWKEHRDQHDLTYGPFTTEGHHWYQLRQALNQRLLKPAEAALYTDAFNEVIDDFMTRLDQLRAESASGNQVSDMAQLFYYFALEGTLAGRGAGEGNGSGRGCAPSPQGLLDSICPGLPPVMASVHYSAICYILFEKRIGCLQRSIPEDTVTFVRSIGLMFQNSLYATFLPKWTRPVLPFWKRYLDGWNAIFSFGKKLIDEKLEDMEAQLQAAGPDGIQVSGYLHFLLASGQLSPREAMGSLPELLMAGVDTTSNTLTWALYHLSKDPEIQEALHEEVVGVVPAGQVPQHKDFAHMPLLKAVLKETLRLYPVVPTNSRIIEKEIEVDGFLFPKNTQFVFCHYVVSRDPTAFSEPESFQPHRWLRNSQPATPRIQHPFGSVPFGYGVRACLGRRIAELEMQLLLARLIQKYKVVLAPETGELKSVARIVLVPNKKVGLQFLQRQC

SEQ ID NO: 866545 - protein, 391 aa, Homo sapiens
MPCNCTSYREGHHWYQLRQALNQRLLKPAEAALYTDAFNEVIDDFMTRLDQLRAESASGNQVSDMAQLFYYFALEAICYILFEKRIGCLQRSIPEDTVTFVRSIGLMFQNSLYATFLPKWTRPVLPFWKRYLDGWNAIFSFGKKLIDEKLEDMEAQLQAAGPDGIQVSGYLHFLLASGQLSPREAMGSLPELLMAGVDTTSNTLTWALYHLSKDPEIQEALHEEVVGVVPAGQVPQHKDFAHMPLLKAVLKETLRLYPVVPTNSRIIEKEIEVDGFLFPKNTQFVFCHYVVSRDPTAFSEPESFQPHRWLRNSQPATPRIQHPFGSVPFGYGVRACLGRRIAELEMQLLLARLIQKYKVVLAPETGELKSVARIVLVPNKKVGLQFLQRQC

SEQ ID NO: 866546 - protein, 434 aa, Homo sapiens
MPCNCTSYREGHHWYQLRQALNQRLLKPAEAALYTDAFNEVIDDFMTRLDQLRAESASGNQVSDMAQLFYYFALEGTLAGRGAGEGNGSGRGCAPSPQGLLDSICPGLPPVMASVHYSAICYILFEKRIGCLQRSIPEDTVTFVRSIGLMFQNSLYATFLPKWTRPVLPFWKRYLDGWNAIFSFGKKLIDEKLEDMEAQLQAAGPDGIQVSGYLHFLLASGQLSPREAMGSLPELLMAGVDTTSNTLTWALYHLSKDPEIQEALHEEVVGVVPAGQVPQHKDFAHMPLLKAVLKETLRLYPVVPTNSRIIEKEIEVDGFLFPKNTQFVFCHYVVSRDPTAFSEPESFQPHRWLRNSQPATPRIQHPFGSVPFGYGVRACLGRRIAELEMQLLLARLIQKYKVVLAPETGELKSVARIVLVPNKKVGLQFLQRQC

SEQ ID NO: 866547 - protein, 213 aa, Homo sapiens
MAQSSVVLGIFFYLLIAGVVTTSNTLTWALYHLSKDPEIQEALHEEVVGVVPAGQVPQHKDFAHMPLLKAVLKETLRLYPVVPTNSRIIEKEIEVDGFLFPKNTQFVFCHYVVSRDPTAFSEPESFQPHRWLRNSQPATPRIQHPFGSVPFGYGVRACLGRRIAELEMQLLLARLIQKYKVVLAPETGELKSVARIVLVPNKKVGLQFLQRQC

SEQ ID NO: 866548 - protein, 220 aa, Homo sapiens
MAALGCARLRWALRGAGRGLCPHGARAKAAIPAALPSDKATGAPGAGPGVRRRQRSLEEIPRLGQLRFFFQLFVQGYALQLHQLQVLYKAKYGPMWMSYLGPQMHVNLASAPLLEQVMRQEGKYPVRNDMELWKEHRDQHDLTYGPFTTEGHHWYQLRQALNQRLLKPAEAALYTDAFNEVIDDFMTRLDQLRAANAFLEQDVANSFQGKVVEELSHVRQ

SEQ ID NO: 866549 - protein, 531 aa, Homo sapiens; identical to SEQ ID NO: 866543

SEQ ID NO: 866550 - protein, 424 aa, Homo sapiens
MAALGCARLRWALRGAGRGLCPHGARAKAAIPAALPSDKATGAPGAGPGVRRRQRSLEEIPRLGQLRFFFQLFVQGYALQLHQLQVLYKAKYGPMWMSYLGPQMHVNLASAPLLEQVMRQEGKYPVRNDMELWKEHRDQHDLTYGPFTTEGHHWYQLRQALNQRLLKPAEAALYTDAFNEVIDDFMTRLDQLRAESASGNQVSDMAQLFYYFALEAICYILFEKRIGCLQRSIPEDTVTFVRSIGLMFQNSLYATFLPKWTRPVLPFWKRYLDGWNAIFSFGKKLIDEKLEDMEAQLQAAGPDGIQVSGYLHFLLASGQLSPREAMGSLPELLMAGVDTTSNTLTWALYHLSKDPEIQEALHEEVVGVVPAGQVPQHKDFAHMPLLKAVLKETLRLYPVVPTNSRIIEKELLAHTLSFCHFYHF

SEQ ID NO: 866551 - protein, 437 aa, Homo sapiens
MWMSYLGPQMHVNLASAPLLEQVMRQEGKYPVRNDMELWKEHRDQHDLTYGPFTTEGHHWYQLRQALNQRLLKPAEAALYTDAFNEVIDDFMTRLDQLRAESASGNQVSDMAQLFYYFALEAICYILFEKRIGCLQRSIPEDTVTFVRSIGLMFQNSLYATFLPKWTRPVLPFWKRYLDGWNAIFSFGKKLIDEKLEDMEAQLQAAGPDGIQVSGYLHFLLASGQLSPREAMGSLPELLMAGVDTTSNTLTWALYHLSKDPEIQEALHEEVVGVVPAGQVPQHKDFAHMPLLKAVLKETLRLYPVVPTNSRIIEKEIEVDGFLFPKNTQFVFCHYVVSRDPTAFSEPESFQPHRWLRNSQPATPRIQHPFGSVPFGYGVRACLGRRIAELEMQLLLARLIQKYKVVLAPETGELKSVARIVLVPNKKVGLQFLQRQC

SEQ ID NO: 866552 - protein, 270 aa, Homo sapiens
MAALGCARLRWALRGAGRGLCPHGARAKAAIPAALPSDKATGAPGAGPGVRRRQRSLEEIPRLGQLRFFFQLFVQGYALQLHQLQVLYKAKYGPMWMSYLGPQMHVNLASAPLLEQVMRQEGKYPVRNDMELWKEHRDQHDLTYGPFTTEGHHWYQLRQALNQRLLKPAEAALYTDAFNEVIDDFMTRLDQLRAESASGNQVSDMAQLFYYFALEAICYILFEKRIGCLQRSIPEDTVTFVRSIGLMFQNSLYATFLPNGPAVPAETVLS

SEQ ID NO: 866553 - protein, 104 aa, Homo sapiens
MAALGCARLRWALRGAGRGLCPHGARAKAAIPAALPSDKATGAPGAGPGVRRRQRSLEEIPRLGQLRFFFQLFVQGYALQLHQLQVTRGGIASWGWEWAPEQRG

SEQ ID NO: 866554 - protein, 326 aa, Homo sapiens
MKQDASRNAAYTVDCEDYVHVVEFNPFENGDSGNLIAYGGNNYVVIGTCTFQEEEADVEGIQYKTLRTFHHGVRVDGIAWSPETRLDSLPPVIKFCTSAADMKIRLFTSDLQDKNEYKVLEGHTDFINGLVFDPKEGQEIASVSDDHTCRIWNLEGVQTAHFVLHSPGMSVCWHPEETFKLMVAEKNGTIRFYDLLAQQAILSLESEQVPLMSAHWCLKNTFKVGAVAGNDWLIWDITRSSYPQNKRPVHMDRACLFRWSTISENLFATTGYPGKMASQFQIHHLGHPQPILMGSVAVGSGLSWHRTLPLCVIGGDHKLLFWVTEV

SEQ ID NO: 866555 - protein, 326 aa, Homo sapiens; identical to SEQ ID NO: 866554

SEQ ID NO: 866556 - protein, 379 aa, Homo sapiens
MKQDASRNAAYTVDCEDYVHVVEFNPFENGDSGNLIAYGGNNYVVIGTCTFQEEEADVEGIQYKTLRTFHHGVRVDGIAWSPETRLDSLPPVIKFCTSAADMKIRLFTSDLQDKNEYKVLEGHTDFINGLVFDPKEGQEIASVSDDHTCRIWNLEGVQTAHFVLHSPGMSVCWHPEETFKIMKDNSRSLNRFKWYSSGVLMPNPTFLPIYHYYLHLQGFFNLIEPELKEHCLKLMVAEKNGTIRFYDLLAQQAILSLESEQVPLMSAHWCLKNTFKVGAVAGNDWLIWDITRSSYPQNKRPVHMDRACLFRWSTISENLFATTGYPGKMASQFQIHHLGHPQPILMGSVAVGSGLSWHRTLPLCVIGGDHKLLFWVTEV

SEQ ID NO: 866557 - protein, 225 aa, Homo sapiens
MKIRLFTSDLQDKNEYKVLEGHTDFINGLVFDPKEGQEIASVSDDHTCRIWNLEGVQTAHFVLHSPGMSVCWHPEETFKLMVAEKNGTIRFYDLLAQQAILSLESEQVPLMSAHWCLKNTFKVGAVAGNDWLIWDITRSSYPQNKRPVHMDRACLFRWSTISENLFATTGYPGKMASQFQIHHLGHPQPILMGSVAVGSGLSWHRTLPLCVIGGDHKLLFWVTEV

SEQ ID NO: 866558 - protein, 144 aa, Homo sapiens
MPPRGKKQPQTDQRWVPSCYSRAGGEKWLSAFVFVQLSTRTARHKTHAENTVKQTKPTAANRPKRKDERPSRLTDKQGTTQTPTKTQKTTHRHGDQRHRHQHRTQTEKPIEQLEAVKTDKNDDKHESTSTTETEARRARTAQAT

SEQ ID NO: 866559 - protein, 326 aa, Homo sapiens; identical to SEQ ID NO: 866554

SEQ ID NO: 866560 - protein, 326 aa, Homo sapiens; identical to SEQ ID NO: 866554

SEQ ID NO: 866561 - protein, 324 aa, Homo sapiens
  misc_feature (154)..(154): Xaa can be any naturally occurring amino acid
  misc_feature (158)..(158): Xaa can be any naturally occurring amino acid
  misc_feature (164)..(164): Xaa can be any naturally occurring amino acid
  misc_feature (167)..(167): Xaa can be any naturally occurring amino acid
  misc_feature (174)..(175): Xaa can be any naturally occurring amino acid
  misc_feature (183)..(183): Xaa can be any naturally occurring amino acid
  misc_feature (189)..(189): Xaa can be any naturally occurring amino acid
  misc_feature (193)..(193): Xaa can be any naturally occurring amino acid
  misc_feature (198)..(198): Xaa can be any naturally occurring amino acid
  misc_feature (201)..(201): Xaa can be any naturally occurring amino acid
  misc_feature (215)..(217): Xaa can be any naturally occurring amino acid
  misc_feature (219)..(219): Xaa can be any naturally occurring amino acid
  misc_feature (227)..(227): Xaa can be any naturally occurring amino acid
  misc_feature (236)..(236): Xaa can be any naturally occurring amino acid
  misc_feature (239)..(239): Xaa can be any naturally occurring amino acid
  misc_feature (243)..(243): Xaa can be any naturally occurring amino acid
  misc_feature (245)..(245): Xaa can be any naturally occurring amino acid
  misc_feature (250)..(252): Xaa can be any naturally occurring amino acid
  misc_feature (256)..(256): Xaa can be any naturally occurring amino acid
  misc_feature (259)..(259): Xaa can be any naturally occurring amino acid
  misc_feature (261)..(262): Xaa can be any naturally occurring amino acid
  misc_feature (264)..(264): Xaa can be any naturally occurring amino acid
  misc_feature (267)..(268): Xaa can be any naturally occurring amino acid
  misc_feature (273)..(273): Xaa can be any naturally occurring amino acid
  misc_feature (277)..(277): Xaa can be any naturally occurring amino acid
  misc_feature (282)..(282): Xaa can be any naturally occurring amino acid
MKQDASRNAAYTVDCEDYVHVVEFNPFENGDSGNLIAYGGNNYVVIGTCTFQEEEADVEGIQYKTLRTFHHGVRVDGIAWSPETRLDSLPPVIKFCTSAADMKIRLFTSDLQDKNEYKVLEGHTDFINGLVFDPKEGQEIASVSDDHTCRNMEXEQTXQYEQQXPSXSVSWQPXXKKKQKEAXKKGKNXKKKXIAQQXKKXQKTEQEPKNPAHRXXXNXPKAGAVAXKKRPTPPPXPPXHPPXHXPPHTXXXPPPXRPXTXXNXRAXXGRPGXRASXGGRRXVGHPQPILMGSVAVGSGLSWHRTLPLCVIGGDHKLLFWVTEV

SEQ ID NO: 866562 - protein, 75 aa, Homo sapiens
QGSLIILIPPPPPPPLFPSERAAALAACAAMAKIKARDLRGKKKEELLKQLDDLKVELSTAARRQSDRRCGLQAL

SEQ ID NO: 866563 - protein, 123 aa, Homo sapiens [sequence omitted]

SEQ ID NO: 866564 - protein, 67 aa, Homo sapiens
YCARYEAWVVSGPLAALAACAAMAKIKARDLRGKKKEELLKQLDDLKVELSPAARRQSDRRCGLQAL

SEQ ID NO: 866565 - protein, 71 aa, Homo sapiens
FAARATRLREDDRRGERAAALAACAAMAKIKARDLRGKKKEELLKQLDDLKVELSPAARRQSDRRCGLQAL

SEQ ID NO: 866566 - protein, 85 aa, Homo sapiens
DAWVAHASAESSGNPLPVFSQLLTRLRKKTSGNSTRARSTSPWTCGLRRHVPLRRRLNKHEENLKTKKQQRKERLYPLRKYAVKA

SEQ ID NO: 866567 - protein, 76 aa, Homo sapiens
ARRHPAVVAEVSPAYFLFPSERAAALAACAAMAKIKARDLRGKKKEELLKQLDDLKVELSPAARRQSDRRCGLQAL

SEQ ID NO: 866568 - protein, 83 aa, Homo sapiens
PFAGRPQVQGLVLLALVEFPEVFFLSLVNNCENTGKKYKPLDLRPKKTRAMRRRLNKHEENLKTKKQQRKERLYPLRKYAVKA

SEQ ID NO: 866569 - protein, 141 aa, Homo sapiens
MQAPALPQLCQDLDTQPSRSADLHEMRMVPPALDLGGLIELVTCVACWQSHGGSLLLSGSGWPSPAPLAAAVAPQPWVLGFTLPSVSQNSTRARSTSPWTCGLRRHVPLRRRLNKHEENLKTKKQQRKERLYPLRKYAVKA

SEQ ID NO: 866570 - protein, 71 aa, Homo sapiens
PFAGRPQVQGLVLLALVEFPEVFFLSLVNNCENTGNGFPDDSDLRELENLKTKKQQRKERLYPLRKYAVKA

SEQ ID NO: 866571 - protein, 75 aa, Homo sapiens; identical to SEQ ID NO: 866562

SEQ ID NO: 866572 - protein, 71 aa, Homo sapiens; identical to SEQ ID NO: 866565

SEQ ID NO: 866573 - protein, 113 aa, Homo sapiens
MVWRHHNPPLRLAPGEARGPGLGYSAQGTAGEGDCPEPWLGLRRTRSRWRVARLWGLATQVKGIWPRGLAEAHSLLRAGQDQGSRSSREEEGGAAETAGRPEGGAVPSCASPK

SEQ ID NO: 866574 - protein, 123 aa, Homo sapiens [sequence omitted]

SEQ ID NO: 866575 - protein, 71 aa, Homo sapiens; identical to SEQ ID NO: 866565

SEQ ID NO: 866576 - protein, 71 aa, Homo sapiens; identical to SEQ ID NO: 866565

SEQ ID NO: 866577 - protein, 71 aa, Homo sapiens; identical to SEQ ID NO: 866565

SEQ ID NO: 866578 - protein, 71 aa, Homo sapiens; identical to SEQ ID NO: 866565

SEQ ID NO: 866579 - protein, 71 aa, Homo sapiens; identical to SEQ ID NO: 866565

SEQ ID NO: 866580 - protein, 71 aa, Homo sapiens; identical to SEQ ID NO: 866565

SEQ ID NO: 866581 - protein, 75 aa, Homo sapiens; identical to SEQ ID NO: 866562

SEQ ID NO: 866582 - protein, 102 aa, Homo sapiens
MLPSKPTRTPSFRFPPTLEFLTPLAAESSGNPLPVFSQLLTRLRKKTSGNSTRARSTSPWTCGLRRHVPLRRRLNKHEENLKTKKQQRKERLYPLRKYAVKA

SEQ ID NO: 866583 - protein, 75 aa, Homo sapiens; identical to SEQ ID NO: 866562

SEQ ID NO: 866584 - protein, 75 aa, Homo sapiens; identical to SEQ ID NO: 866562

SEQ ID NO: 866585 - protein, 75 aa, Homo sapiens; identical to SEQ ID NO: 866562

SEQ ID NO: 866586 - protein, 75 aa, Homo sapiens; identical to SEQ ID NO: 866562

SEQ ID NO: 866587 - protein, 71 aa, Homo sapiens; identical to SEQ ID NO: 866565

SEQ ID NO: 866588 - protein, 85 aa, Homo sapiens
ARSSSEDLYISPLYPQRNASRTLNRLGQQQGAAALAACAAMAKIKARDLRGKKKEELLKQLDDLKVELSPAARRQSDRRCGLQAL

SEQ ID NO: 866589 - protein, 85 aa, Homo sapiens; identical to SEQ ID NO: 866588

SEQ ID NO: 866590 - protein, 76 aa, Homo sapiens; identical to SEQ ID NO: 866567

SEQ ID NO: 866591 - protein, 77 aa, Homo sapiens
REREREREREREREREREQWTQKENLRKGKKYKPLDLRPKKTRAMRRRLNKHEENLKTKKQQRKERLYPLRKYAVKA

SEQ ID NO: 866592 - protein, 161 aa, Homo sapiens
MLLLTRAEEFYKGKKYKPLDLRPKKTRAIAPPAQQARGEPEDQEAAAEGAAVPAAEVRGQGLRGALSIKHSWLRKKKKKKKKKKKNRGIMGGGGHKGDFGRAPGAIRVFPGTQLSVAHKRAKLGRGPKKGGDKHTKPRYRDNARPRNTPRNKTNTHHNTTK

SEQ ID NO: 866593 - protein, 71 aa, Homo sapiens; identical to SEQ ID NO: 866565

SEQ ID NO: 866594 - protein, 71 aa, Homo sapiens; identical to SEQ ID NO: 866565

SEQ ID NO: 866595 - protein, 71 aa, Homo sapiens; identical to SEQ ID NO: 866565

SEQ ID NO: 866596 - protein, 71 aa, Homo sapiens; identical to SEQ ID NO: 866565

SEQ ID NO: 866597 - protein, 71 aa, Homo sapiens; identical to SEQ ID NO: 866565

SEQ ID NO: 866598 - protein, 71 aa, Homo sapiens; identical to SEQ ID NO: 866565

SEQ ID NO: 866599 - protein, 71 aa, Homo sapiens; identical to SEQ ID NO: 866565

SEQ ID NO: 866600 - protein, 71 aa, Homo sapiens; identical to SEQ ID NO: 866565

SEQ ID NO: 866601 - protein, 71 aa, Homo sapiens; identical to SEQ ID NO: 866565

SEQ ID NO: 866602 - protein, 113 aa, Homo sapiens; identical to SEQ ID NO: 866573

SEQ ID NO: 866603 - protein, 75 aa, Homo sapiens; identical to SEQ ID NO: 866562

SEQ ID NO: 866604 - protein, 104 aa, Homo sapiens
MSVSSESGNPLARVLTVINQTQKENLRKFYKGKKYKPLDLRLRRHVPVAAGSTSTRENLKTKKQQRKERLYPLRKYAARPEGRIVNKAQLAEENKNYTTHTNTN

SEQ ID NO: 866605 - protein, 63 aa, Homo sapiens
MPDGRRQHTQKPRHAKLSHAPHLREHTTTHYGKSPRGPSYVYTINAARRHRHQHRTLPDNSYQ

SEQ ID NO: 866606 - protein, 75 aa, Homo sapiens; identical to SEQ ID NO: 866562

SEQ ID NO: 866607 - protein, 443 aa, Homo sapiens
QHPTGIRWPEAAACCSAGTMELSYRLFICLLLWGSTELCYPQPLWLLQGGASHPETSVQPVLVECQEATLMVMVSKDLFGTGKLIRAADLTLGPEACEPLVSMDTEDVVRFEVGLHECGNSMQVTDDALVYSTFLLHDPRPVGNLSIVRTNRAEIPIECRYPRQGNVSSQAILPTWLPFRTTVFSEEKLTFSLRLMEENWNAEKRSPTFHLGDAAHLQAEIHTGSHVPLRLFVDHCVATPTPDQNASPYHTIVDFHGCLVDGLTDASSAFKVPRPGPDTLQFTVDVFHFANDSRNMIYITCHLKVTLAEQDPDELNKACSFSKPSNSWFPVEGSADICQCCNKGDCGTPSHSRRQPHVMSQWSRSASRNRRHVTEEADVTVGPLIFLDRRGDHEVEQWALPSDTSVVLLGVGLAVVVSLTLTAVILVLTRRCRTASHPVSASE

SEQ ID NO: 866608 - protein, 105 aa, Homo sapiens
LRLMEEKNWNAEKRSPTFHLGDAAHLQAEIHTGSHVPLRLFVDHCVATPTPDQNASPYHTIVDFHGCLVDGLTDASSAFKVPRPGPDTLQFTVDVFHFANDSRNM

SEQ ID NO: 866609 - protein, 98 aa, Homo sapiens
LRLMEEKNWNAEKRSPTFHLGDAAHLQAEIHTGSHVPLRLFVDHCVATPTPDQNASPYHTIVDFHGCLVYGLIDASYAFKAPRPAPIHSLHSVCPPLP

SEQ ID NO: 866610 - protein, 133 aa, Homo sapiens
QHPTGIRWPEAAACCSAGTMELSYRLFICLLLWGSTELCYPQPLWLLQGGASHPETSVQPVLVECQEATLMVMVSKDLFGTGKLIRAADLTLGPEACEPLVSMDTEDVVRFEVGLHECGNSMQARMQWHDLRS

SEQ ID NO: 866611 - protein, 481 aa, Homo sapiens
LVVAAVVHTPAQALAGCQAGLAAFAVHVVQQDVSGAIAEEGVGGGGHGRPAAQLTTDHSGIRQPPVVVTHGAPQATVQDLHSALTQGGASHPETSVQPVLVECQEATLMVMVSKDLFGTGKLIRAADLTLGPEACEPLVSMDTEDVVRFEVGLHECGNSMQVTDDALVYSTFLLHDPRPVGNLSIVRTNRAEIPIECRYPRQGNVSSQAILPTWLPFRTTVFSEEKLTFSLRLMEENWNAEKRSPTFHLGDAAHLQAEIHTGSHVPLRLFVDHCVATPTPDQNASPYHTIVDFHGCLVDGLTDASSAFKVPRPGPDTLQFTVDVFHFANDSRNMIYITCHLKVTLAEQDPDELNKACSFSKPSNSWFPVEGSADICQCCNKGDCGTPSHSRRQPHVMSQWSRSASRNRRHVTEEADVTVGPLIFLDRRGDHEVEQWALPSDTSVVLLGVGLAVVVSLTLTAVILVLTRRCRTASHPVSASE

SEQ ID NO: 866612 - protein, 316 aa, Homo sapiens
RNIIFRVPPAPPSANYGPGHSRRPQVASSVQTRSHAAQWTASLLPPVPLAPGFQGQLTFSASDEENETLKKNWNAEKRSPTFHLGDAAHLQAEIHTGSHVPLRLFVDHCVATPTPDQNASPYHTIVDFHGCLVDGLTDASSAFKVPRPGPDTLQFTVDVFHFANDSRNMIYITCHLKVTLAEQDPDELNKACSFSKPSNSWFPVEGSADICQCCNKGDCGTPSHSRRQPHVMSQWSRSASRNRRHVTEEADVTVGPLIFLDRRGDHEVEQWALPSDTSVVLLGVGLAVVVSLTLTAVILVLTRRCRTASHPVSASE

SEQ ID NO: 866613 - protein, 300 aa, Homo sapiens
RGVGDSMWSFIYLQVSTVLWERDIIKMLTTPQGHSPILLQTDSLAIRMVLFGFDAKIESLEMVSPLPFDRISSPAEEIHTGSHVPLRLFVDHCVATPTPDQNASPYHTIVDFHGCLVDGLTDASSAFKVPRPGPDTLQFTVDVFHFANDSRNMIYITCHLKVTLAEQDPDELNKACSFSKPSNSWFPVEGSADICQCCNKGDCGTPSHSRRQPHVMSQWSRSASRNRRHVTEEADVTVGPLIFLDRRGDHEVEQWALPSDTSVVLLGVGLAVVVSLTLTAVILVLTRRCRTASHPVSASE

SEQ ID NO: 866614 - protein, 296 aa, Homo sapiens
GEGARYQCELSAAQKGITGGECNSRPSAQLVPLGPGVLKEKLHFFLRLRRKNWNAEKRSPTFHLGDAAHLQAEIHTGSHVPLRLFVDHCVATPTPDQNASPYHTIVDFHGCLVDGLTDASSAFKVPRPGPDTLQFTVDVFHFANDSRNMIYITCHLKVTLAEQDPDELNKACSFSKPSNSWFPVEGSADICQCCNKGDCGTPSHSRRQPHVMSQWSRSASRNRRHVTEEADVTVGPLIFLDRRGDHEVEQWALPSDTSVVLLGVGLAVVVSLTLTAVILVLTRRCRTASHPVSASE

SEQ ID NO: 866615 - protein, 289 aa, Homo sapiens
SPLQKRDPRRSIGNQATLPPVGPSGPWCSKKKASSLFAWRGESQNWNAEKRSPTFHLGDAAHLQAEIHTGSHVPLRLFVDHCVATPTPDQNASPYHTIVDFHGCLVDGLTDASSAFKVPRPGPDTLQFTVDVFHFANDSRNMIYITCHLKVTLAEQDPDELNKACSFSKPSNSWFPVEGSADICQCCNKGDCGTPSHSRRQPHVMSQWSRSASRNRRHVTEEADVTVGPLIFLDRRGDHEVEQWALPSDTSVVLLGVGLAVVVSLTLTAVILVLTRRCRTASHPVSASE

SEQ ID NO: 866616 - protein, 284 aa, Homo sapiens
FNSQKDTSAGVGRASIPAPGALRARCFRRKTTSFCVEEENWNAEKRSPTFHLGDAAHLQAEIHTGSHVPLRLFVDHCVATPTPDQNASPYHTIVDFHGCLVDGLTDASSAFKVPRPGPDTLQFTVDVFHFANDSRNMIYITCHLKVTLAEQDPDELNKACSFSKPSNSWFPVEGSADICQCCNKGDCGTPSHSRRQPHVMSQWSRSASRNRRHVTEEADVTVGPLIFLDRRGDHEVEQWALPSDTSVVLLGVGLAVVVSLTLTAVILVLTRRCRTASHPVSASE

SEQ ID NO: 866617 - protein, 262 aa, Homo sapiens
MVCSPVTLRIAPPDRRFSRSAIPEQIISSTLSSPSSNAPDPCAKETVLSALKEKKKKRTVEEEDQIFLDGQENKRSCLVDGLTDASSAFKVPRPGPDTLQFTVDVFHFANDSRNMIYITCHLKVTLAEQDPDELNKACSFSKPSNSWFPVEGSADICQCCNKGDCGTPSHSRRQPHVMSQWSRSASRNRRHVTEEADVTVGPLIFLDRRGDHEVEQWALPSDTSVVLLGVGLAVVVSLTLTAVILVLTRRCRTASHPVSASE

SEQ ID NO: 866618 - protein, 318 aa, Homo sapiens
SCRLLPARPIDYPLGTLNTSYNTLLSRSARTRHSQLAARQPPIPARRLALSVSGVARPRPYSLSPIKHPSRTQQGPAASPPANRATHYAANPPRQAPALLGSLGTPVGPTRHKTNRPPLFPPLWTSKAVLVPCLVDGLTDASSAFKVPRPGPDTLQFTVDVFHFANDSRNMIYITCHLKVTLAEQDPDELNKACSFSKPSNSWFPVEGSADICQCCNKGDCGTPSHSRRQPHVMSQWSRSASRNRRHVTEEADVTVGPLIFLDRRGDHEVEQWALPSDTSVVLLGVGLAVVVSLTLTAVILVLTRRCRTASHPVSASE

SEQ ID NO: 866619 - protein, 245 aa, Homo sapiens
MLTHRTLPALLLFGRSSPPLVRSPPCNHVPCGCLWTIGGAHLPEARMPPLITPCGEFHGCLVDGLTDASSAFKVPRPGPDTLQFTVDVFHFANDSRNMIYITCHLKVTLAEQDPDELNKACSFSKPSNSWFPVEGSADICQCCNKGDCGTPSHSRRQPHVMSQWSRSASRNRRHVTEEADVTVGPLIFLDRRGDHEVEQWALPSDTSVVLLGVGLAVVVSLTLTAVILVLTRRCRTASHPVSASE

SEQ ID NO: 866620 - protein, 241 aa, Homo sapiens
PSPGNCGILTSRDYSGSTDHSVDVTIDVTTVTPDQNASPYNPIMYFHDVLVDDIGCLVDGLTDASSAFKVPRPGPDTLQFTVDVFHFANDSRNMIYITCHLKVTLAEQDPDELNKACSFSKPSNSWFPVEGSADICQCCNKGDCGTPSHSRRQPHVMSQWSRSASRNRRHVTEEADVTVGPLIFLDRRGDHEVEQWALPSDTSVVLLGVGLAVVVSLTLTAVILVLTRRCRTASHPVSASE

SEQ ID NO: 866621 - protein, 411 aa, Homo sapiens
LVVAAVVHTPAQALAGCQAGLAAFAVHVVQQDVSGAIAEEGVGGGGHGRPAAQLTTDHSGIRQPPVVVTHGAPQATVQDLHSALTQGGASHPETSVQPVLVECQEATLMVMVSKDLFGTGKLIRAADLTLGPEACEPLVSMDTEDVVRFEVGLHECGNSMQVTDDALVYSTFLLHDPRPVGNLSIVRTNRAEIPIECRYPRQGNVSSQAILPTWLPFRTTVFSEEKLTFSLRLMEENWNAEKRSPTFHLGDAAHLQAEIHTGSHVPLRLFVDHCVATPTPDQNASPYHTIVDFHGCLVDGLTDASSAFKVPRPGPDTLQFTVDVFHFANDSRNMIYITCHLKVTLAEQDPDELNKACSFSKPSNSWFPVEGSADICQCCNKGDCGTPSHSRRQPHVMSQWSRSASRNRRHV

SEQ ID NO: 866622 - protein, 413 aa, Homo sapiens
LVVAAVVHTPAQALAGCQAGLAAFAVHVVQQDVSGAIAEEGVGGGGHGRPAAQLTTDHSGIRQPPVVVTHGAPQATVQDLHSALTQGGASHPETSVQPVLVECQEATLMVMVSKDLFGTGKLIRAADLTLGPEACEPLVSMDTEDVVRFEVGLHECGNSMQVTDDALVYSTFLLHDPRPVGNLSIVRTNRAEIPIECRYPRQGNVSSQAILPTWLPFRTTVFSEEKLTFSLRLMEENWNAEKRSPTFHLGDAAHLQAEIHTGSHVPLRLFVDHCVATPTPDQNASPYHTIVDFHGCLVDGLTDASSAFKVPRPGPDTLQFTVDVFHFANDSRNMIYITCHLKVTLAEQDPDELNKACSFSKPSNSWFPVEGSADICQCCNKGDCGTPSHSRRQPHVMSQWSRSASRNRRHAQL

SEQ ID NO: 866623 - protein, 334 aa, Homo sapiens
LVVAAVVHTPAQALAGCQAGLAAFAVHVVQQDVSGAIAEEGVGGGGHGRPAAQLTTDHSGIRQPPVVVTHGAPQATVQDLHSALTQGGASHPETSVQPVLVECQEATLMVMVSKDLFGTGKLIRAADLTLGPEACEPLVSMDTEDVVRFEVGLHECGNSMQVTDDALVYSTFLLHDPRPVGNLSIVRTNRAEIPIECRYPRQGNVSSQAILPTWLPFRTTVFSEEKLTFSLRLMEENWNAEKRSPTFHLGDAAHLQAEIHTGSHVPLRLFVDHCVATPTPDQNASPYHTIVDFHGCLVDGLTDASSAFKVPRPGPDTLQFTVDVFHFANDSRNM

SEQ ID NO: 866624 - protein, 334 aa, Homo sapiens; identical to SEQ ID NO: 866623

SEQ ID NO: 866625 - protein, 348 aa, Homo sapiens
LVVAAVVHTPAQALAGCQAGLAAFAVHVVQQDVSGAIAEEGVGGGGHGRPAAQLTTDHSGIRQPPVVVTHGAPQATVQDLHSALTQGGASHPETSVQPVLVECQEATLMVMVSKDLFGTGKLIRAADLTLGPEACEPLVSMDTEDVVRFEVGLHECGNSMQVTDDALVYSTFLLHDPRPVGNLSIVRTNRAEIPIECRYPRQGNVSSQAILPTWLPFRTTVFSEEKLTFSLRLMEENWNAEKRSPTFHLGDAAHLQAEIHTGSHVPLRLFVDHCVATPTPDQNASPYHTIVDFHGCLVDGLTDASSAFKVPRPGPDTLQFTVDVFHFANDSRNMYLLTCPPKVPLSYL

SEQ ID NO: 866626 - protein, 315 aa, Homo sapiens
TRRSVKRRITTAHQSGGMTCFMNNPATITDADDGPTRALYRRTLGYYPAYTTLPLQDLTRHNVNITSHTLSGNPDSYGEGPPHTGEAVSILSQEATREPAGLTVNFDTQCAQTARGPEAPPYHTIEPLQRVHVNGLIEASGHTKFLDPARYIPVPSGSPPSDNDPSNLIYITCHLKVTLAEQDPDELNKACSFSKPSNSWFPVEGSADICQCCNKGDCGTPSHSRRQPHVMSQWSRSASRNRRHVTEEADVTVGPLIFLDRRGDHEVEQWALPSDTSVVLLGVGLAVVVSLTLTAVILVLTRRCRTASHPVSASE

SEQ ID NO: 866627 - protein, 285 aa, Homo sapiens
GDEVLPHWTTNYVCTTYLLLTMAALAAEHHSTLCLADRASVARKLRCLNFTNRLTVSFLAAIQLFFHPTLRYTVGTYRAKTACWQAKSPPCKPLGELICLSSPCQLEAFYAMKFFDPGLDISSVLRGVLQLYNGSRRMIYITCHLKVTLAEQDPDELNKACSFSKPSNSWFPVEGSADICQCCNKGDCGTPSHSRRQPHVMSQWSRSASRNRRHVTEEADVTVGPLIFLDRRGDHEVEQWALPSDTSVVLLGVGLAVVVSLTLTAVILVLTRRCRTASHPVSASE

SEQ ID NO: 866628 - protein, 253 aa, Homo sapiens
MRDTMGFLLRSRKENSHYRNPPPPHKRRGPRDRDCKKKTAHPTCLTPGWQWVHASMLLCSHYIIFHDVIDLSLKEPVRELKILDPGLVTPVSKWSFPLCQWVQYKMIYITCHLKVTLAEQDPDELNKACSFSKPSNSWFPVEGSADICQCCNKGDCGTPSHSRRQPHVMSQWSRSASRNRRHVTEEADVTVGPLIFLDRRGDHEVEQWALPSDTSVVLLGVGLAVVVSLTLTAVILVLTRRCRTASHPVSASE

SEQ ID NO: 866629 - protein, 208 aa, Homo sapiens
  misc_feature (26)..(26): Xaa can be any naturally occurring amino acid
RGAEVTTQAFPPYWAPRDARDERRKXNIPQGRNTAGQRVNRAIHLPRGGACPPQGKSPPAPIGTRRVICAPPGGQPGNQDKKAPPLSNHGNFQGLFIRGFHRRPICELKVPGPGPRTIQFPGEVFPFVNDPKNLIYITCHLKVTLAEQDPDELNKACSFSKPSNRQQKSKLLLFHLTGSQWKARLTSVNAVTKVTVALQAIPGGSLMS

SEQ ID NO: 866630 - protein, 160 aa, Homo sapiens
MNCYTFVFDSPDDRLFHQPVTGNPVEQAPDEFKKACSLGKPSNSWFPVEGSADICQCCNKGDCGTPSHSRRQPHVMSQWSRSASRNRRHVTEEADVTVGPLIFLDRRGDHEVEQWALPSDTSVVLLGVGLAVVVSLTLTAVILVLTRRCRTASHPVSASE

SEQ ID NO: 866631 - protein, 141 aa, Homo sapiens
KQLLFYPRQGNVSSQAILPTWLPFRTTVFSEEKLTFSLRLMEENWNAEKRSPTFHLGDAAHLQAEIHTGSHVPLRLFVDHCVATPTPDQNASPYHTIVDFHGCLVDGLTDASSAFKVPRPGPDTLQFTVDVFHFANDSRNM

SEQ ID NO: 866632 - protein, 149 aa, Homo sapiens
MPIHQAQYSCLGVLPTVCWNGYHKKAVLSPRNSRMVCSPVTLRIAPPDRRFSRSAIPEQIISSTLSSPSSNAPDPCAKETVLSALKEKKKKRTVEEEDQIFLDGQENKRSCLVDGLTDASSAFKVPRPGPDTLQFTVDVFHFANDSRNM

SEQ ID NO: 866633 - protein, 82 aa, Homo sapiens
LVVAAVVHTPAQALAGCQAGLAAFAVHVVQQDVSGAIAEEGVGGGGHGRPAAQLTTDHSGIRQPPVVVTHGALAQRPTHRVV

SEQ ID NO: 866634 - protein, 283 aa, Homo sapiens
MSLKRSPAGQGRTRPSAPWSLQPTFLKETYFSSRLMEENWNAEKRSPTFHLGDAAHLQAEIHTGSHVPLRLFVDHCVATPTPDQNASPYHTIVDFHGCLVDGLTDASSAFKVPRPGPDTLQFTVDVFHFANDSRNMIYITCHLKVTLAEQDPDELNKACSFSKPSNSWFPVEGSADICQCCNKGDCGTPSHSRRQPHVMSQWSRSASRNRRHVTEEADVTVGPLIFLDRRGDHEVEQWALPSDTSVVLLGVGLAVVVSLTLTAVILVLTRRCRTASHPVSASE

SEQ ID NO: 866635 - protein, 105 aa, Homo sapiens; identical to SEQ ID NO: 866608

SEQ ID NO: 866636 - protein, 481 aa, Homo sapiens; identical to SEQ ID NO: 866611

SEQ ID NO: 866637 - protein, 248 aa, Homo sapiens
MEENWNAEKRSPTFHLGDAAHLQAEIHTGSHVPLRLFVDHCVATPTPDQNASPYHTIVDFHGCLVDGLTDASSAFKVPRPGPDTLQFTVDVFHFANDSRNMIYITCHLKVTLAEQDPDELNKACSFSKPSNSWFPVEGSADICQCCNKGDCGTPSHSRRQPHVMSQWSRSASRNRRHVTEEADVTVGPLIFLDRRGDHEVEQWALPSDTSVVLLGVGLAVVVSLTLTAVILVLTRRCRTASHPVSASE

SEQ ID NO: 866638 - protein, 307 aa, Homo sapiens
  misc_feature (31)..(31): Xaa can be any naturally occurring amino acid
SSSTPTIQRSHTGKLRANDPPSRFQQSTLEXFGRPGLLPPVWPLGRGVNKHNITSPCVAGGQNWNAEKRSPTFHLGDAAHLQAEIHTGSHVPLRLFVDHCVATPTPDQNASPYHTIVDFHGCLVDGLTDASSAFKVPRPGPDTLQFTVDVFHFANDSRNMIYITCHLKVTLAEQDPDELNKACSFSKPSNSWFPVEGSADICQCCNKGDCGTPSHSRRQPHVMSQWSRSASRNRRHVTEEADVTVGPLIFLDRRGDHEVEQWALPSDTSVVLLGVGLAVVVSLTLTAVILVLTRRCRTASHPVSASE

SEQ ID NO: 866639 - protein, 291 aa, Homo sapiens
LSQKGPRQEMWGQAFCARVSLRTAVSPKERRYSSGFKRVNCYRKKKNWNAEKRSPTFHLGDAAHLQAEIHTGSHVPLRLFVDHCVATPTPDQNASPYHTIVDFHGCLVDGLTDASSAFKVPRPGPDTLQFTVDVFHFANDSRNMIYITCHLKVTLAEQDPDELNKACSFSKPSNSWFPVEGSADICQCCNKGDCGTPSHSRRQPHVMSQWSRSASRNRRHVTEEADVTVGPLIFLDRRGDHEVEQWALPSDTSVVLLGVGLAVVVSLTLTAVILVLTRRCRTASHPVSASE

SEQ ID NO: 866640 - protein, 290 aa, Homo sapiens
IFALRTTFSCRKRTTTVTAPPESFATCCLEARGFQSKNPSFSAKGKISTYQEATPSPHWKTAHLQAEIHTGSHVPLRLFVDHCVATPTPDQNASPYHTIVDFHGCLVDGLTDASSAFKVPRPGPDTLQFTVDVFHFANDSRNMIYITCHLKVTLAEQDPDELNKACSFSKPSNSWFPVEGSADICQCCNKGDCGTPSHSRRQPHVMSQWSRSASRNRRHVTEEADVTVGPLIFLDRRGDHEVEQWALPSDTSVVLLGVGLAVVVSLTLTAVILVLTRRCRTASHPVSASE

SEQ ID NO: 866641 - protein, 252 aa, Homo sapiens
LRLMEEKNWNAEKRSPTFHLGDAAHLQAEIHTGSHVPLRLFVDHCVATPTPDQNASPYHTIVDFHGCLVDGLTDASSAFKVPRPGPDTLQFTVDVFHFANDSRNMIYITCHLKVTLAEQDPDELNKACSFSKPSNSWFPVEGSADICQCCNKGDCGTPSHSRRQPHVMSQWSRSASRNRRHVTEEADVTVGPLIFLDRRGDHEVEQWALPSDTSVVLLGVGLAVVVSLTLTAVILVLTRRCRTASHPVSASE

SEQ ID NO: 866642 - protein, 199 aa, Homo sapiens
MWNFHGCLERVSNCLVDGLTDASSAFKVPRPGPDTLQFTVDVFHFANDSRNMIYITCHLKVTLAEQDPDELNKACSFSKPSNSWFPVEGSADICQCCNKGDCGTPSHSRRQPHVMSQWSRSASRNRRHVTEEADVTVGPLIFLDRRGDHEVEQWALPSDTSVVLLGVGLAVVVSLTLTAVILVLTRRCRTASHPVSASE

SEQ ID NO: 866643 - protein, 276 aa, Homo sapiens
VKDTARGSIKQNDSGARNPDGNGVIQEKAFSFVFTKRTGSQQIVPPSPLKNKAASGANPQREHKPLGCMWTPGGPHRRQTECPPLSHHRDCLVDGLTDASSAFKVPRPGPDTLQFTVDVFHFANDSRNMIYITCHLKVTLAEQDPDELNKACSFSKPSNSWFPVEGSADICQCCNKGDCGTPSHSRRQPHVMSQWSRSASRNRRHVTEEADVTVGPLIFLDRRGDHEVEQWALPSDTSVVLLGVGLAVVVSLTLTAVILVLTRRCRTASHPVSASE

SEQ ID NO: 866644 - protein, 236 aa, Homo sapiens
NHTGKYSTPPGEETTTCSQGPCRMCEDHCGATLTLAKKPPREHAIVDSQDCLVDGLTDASSAFKVPRPGPDTLQFTVDVFHFANDSRNMIYITCHLKVTLAEQDPDELNKACSFSKPSNSWFPVEGSADICQCCNKGDCGTPSHSRRQPHVMSQWSRSASRNRRHVTEEADVTVGPLIFLDRRGDHEVEQWALPSDTSVVLLGVGLAVVVSLTLTAVILVLTRRCRTASHPVSASE

SEQ ID NO: 866645 - protein, 414 aa, Homo sapiens
LVVAAVVHTPAQALAGCQAGLAAFAVHVVQQDVSGAIAEEGVGGGGHGRPAAQLTTDHSGIRQPPVVVTHGAPQATVQDLHSALTQGGASHPETSVQPVLVECQEATLMVMVSKDLFGTGKLIRAADLTLGPEACEPLVSMDTEDVVRFEVGLHECGNSMQVTDDALVYSTFLLHDPRPVGNLSIVRTNRAEIPIECRYPRQGNVSSQAILPTWLPFRTTVFSEEKLTFSLRLMEENWNAEKRSPTFHLGDAAHLQAEIHTGSHVPLRLFVDHCVATPTPDQNASPYHTIVDFHGCLVDGLTDASSAFKVPRPGPDTLQFTVDVFHFANDSRNMIYITCHLKVTLAEQDPDELNKACSFSKPSNSLFPRETLGLTSCHAATKVTWGLPAHSRWYLARLDHSFIFFFPYPPPWHQ

SEQ ID NO: 866646 - protein, 191 aa, Homo sapiens
VASGPGFREKVAFFGFEEKNWNAEKRSPTFHLGDAAHLQAEIHTGSHVPLRLFVDHCVATPTPDQNASPYHTIVDFHGCLVDGLTDASSAFKVPRPGPDTLQFTVDVFHFANDSRNMIYITCHLKVTLAEQDPDELNKACSFSKPSNRQQKSKLLLFHLTGSQWKARLTSVNAVTKVTVALQAIPGGSLMS

SEQ ID NO: 866647 - protein, 338 aa, Homo sapiens
LVVAAVVHTPAQALAGCQAGLAAFAVHVVQQDVSGAIAEEGVGGGGHGRPAAQLTTDHSGIRQPPVVVTHGAPQATVQDLHSALTQGGASHPETSVQPVLVECQEATLMVMVSKDLFGTGKLIRAADLTLGPEACEPLVSMDTEDVVRFEVGLHECGNSMQVTDDALVYSTFLLHDPRPVGNLSIVRTNRAEIPIECRYPRQGNVSSQAILPTWLPFRTTVFSEEKLTFSLRLMEENWNAEKRSPTFHLGDAAHLQAEIHTGSHVPLRLFVDHCVATPTPDQNASPYHTIVDFHGCLVDGLTDASSAFKVPRPGPDTLQFTVDVFHFANDSRNMRYLI

SEQ ID NO: 866648 - protein, 239 aa, Homo sapiens
MSYNGLSRKGGGRGCVRRSGEMDTPYMVNSRSSLIRWKYRKVPVYYRCGFAKAVISHGCRKHCWAFIEIVSGTGSLHFILDVFTLNKRPGDIIYITCHLKVTLAEQDPDELNKACSFSKPSNSWFPVEGSADICQCCNKGDCGTPSHSRRQPHVMSQWSRSASRNRRHVTEEADVTVGPLIFLDRRGDHEVEQWALPSDTSVVLLGVGLAVVVSLTLTAVILVLTRRCRTASHPVSASE

SEQ ID NO: 866649 - protein, 148 aa, Homo sapiens
MIYITCHLKVTLAEQDPDELNKACSFSKPSNSWFPVEGSADICQCCNKGDCGTPSHSRRQPHVMSQWSRSASRNRRHVTEEADVTVGPLIFLDRRGDHEVEQWALPSDTSVVLLGVGLAVVVSLTLTAVILVLTRRCRTASHPVSASE

SEQ ID NO: 866650 - protein, 148 aa, Homo sapiens; identical to SEQ ID NO: 866649

SEQ ID NO: 866651 - protein, 183 aa, Homo sapiens
MQGARWESEAPRPRATNIFPVGRLSLSSMTTLPEPLYAFTVHLKVSLTERAHIYFSSACSFSSLLYSWFPVEGSADICQCCNKGDCGTPSHSRRQPHVMSQWSRSASRNRRHVTEEADVTVGPLIFLDRRGDHEVEQWALPSDTSVVLLGVGLAVVVSLTLTAVILVLTRRCRTASHPVSASE

SEQ ID NO: 866652 - protein, 351 aa, Homo sapiens
LVVAAVVHTPAQALAGCQAGLAAFAVHVVQQDVSGAIAEEGVGGGGHGRPAAQLTTDHSGIRQPPVVVTHGAPQATVQDLHSALTQGGASHPETSVQPVLVECQEATLMVMVSKDLFGTGKLIRAADLTLGPEACEPLVSMDTEDVVRFEVGLHECGNSMQVTDDALVYSTFLLHDPRPVGNLSIVRTNRAEIPIECRYPRQGNVSSQAILPTWLPFRTTVFSEEKLTFSLRLMEENWNAEKRSPTFHLGDAAHLQAEIHTGSHVPLRLFVDHCVATPTPDQNASPCNTQTRPDCEVYGLTRAPLCIQTPSSHGPVLSPLTTDTLPLPARAPNSLFSLPYPPAANPICSWS

SEQ ID NO: 866653 - protein, 306 aa, Homo sapiens
LVVAAVVHTPAQALAGCQAGLAAFAVHVVQQDVSGAIAEEGVGGGGHGRPAAQLTTDHSGIRQPPVVVTHGAPQATVQDLHSALTQGGASHPETSVQPVLVECQEATLMVMVSKDLFGTGKLIRAADLTLGPEACEPLVSMDTEDVVRFEVGLHECGNSMQVTDDALVYSTFLLHDPRPVGNLSIVRTNRAEIPIECRYPRQGNVSSQAILPTWLPFRTTVFSEEKLTFSLRLMEVTEEADVTVGPLIFLDRRGDHEVEQWALPSDTSVVLLGVGLAVVVSLTLTAVILVLTRRCRTASHPVSASE

SEQ ID NO: 866654 - protein, 331 aa, Homo sapiens
MLLSQNAFIFRSLNLVLMVYISLVFGISYDSPDYTDESCTFKISLRNFRSILSWELKNHSIVPTHYTLLYTIMSKPEDLKVVKNCANTTRSFCDLTDEWRSTHEAYVTVLEGFSGNTTLFSCSHNFWLAIDMSFEPPEFEIVGFTNHINVMVKFPSIVEEELQFDLSLVIEEQSEGIVKKHKPEIKGNMSGNFTYIIDKLIPNTNYCVSVYLEHSDEQAVIKSPLKCTLLPPGQESESAESAKIGGIITVFLIALVLTSTIVTLKWIGYICLRNSLPKVLRQGLAKGWNAVAIHRCSHNALQSETPELKQSSCLSFPSSWDYKRASLCPSD

SEQ ID NO: 866655 - protein, 115 aa, Homo sapiens
PPAPAPAAARRPRFRSAPRRPGLGARTRTKDASSRRVGIPPASRTVPRAQPADHHPAARAAFVPRPPLLSERPPARRILTASVGSQSRARLGPEASISREPQGESCKDVKVKRRL

SEQ ID NO: 866656 - protein, 239 aa, Homo sapiens
MLLSQNAFIFRSLNLVLMVYISLVFGISYDSPDYTDESCTFKISLRNFRSILSWELKNHSIVPTHYTLLYTIMSKPEDLKVVKNCANTTRSFCDLTDEWRSTHEAYVTVLEGFSGNTTLFSCSHNFWLAIDMSFEPPEFEIVGFTNHINVMVKFPSIVEEELQFDLSLVIEEQSEGIVKKHKPEIKGNMSGNFTYIIDKLIPNTNYCVSVYLEHSDEQAVIKSPLKCTLLPPGQESEFS

SEQ ID NO: 866657 - protein, 515 aa, Homo sapiens [sequence omitted]

SEQ ID NO: 866658 - protein, 515 aa, Homo sapiens [sequence omitted]

SEQ ID NO: 866659 - protein, 515 aa, Homo sapiens [sequence omitted]

SEQ ID NO: 866660 - protein, 515 aa, Homo sapiens [sequence omitted]

SEQ ID NO: 866661 - protein, 259 aa, Homo sapiens [sequence omitted]

SEQ ID NO: 866662 - protein, 99 aa, Homo sapiens
LRNTPKGPSPSFFRRRRSFSPMSQVSSGEKGGPAQGNREEPSKFQSVSLGHLTHVTSCLLQLEFHLVQPSPVKVGKTDFRITCVTNTERKHGVGERDKT

SEQ ID NO: 866663 - protein, 331 aa, Homo sapiens; identical to SEQ ID NO: 866654

SEQ ID NO: 866664 - protein, 331 aa, Homo sapiens; identical to SEQ ID NO: 866654

SEQ ID NO: 866665 - protein, 515 aa, Homo sapiens [sequence omitted]

SEQ ID NO: 866666 - protein, 331 aa, Homo sapiens; identical to SEQ ID NO: 866654

SEQ ID NO: 866667 - protein, 515 aa, Homo sapiens [sequence omitted]

SEQ ID NO: 866668 - protein, 115 aa, Homo sapiens; identical to SEQ ID NO: 866655

SEQ ID NO: 866669 - protein, 346 aa, Homo sapiens
MSPTMSRTTSHAKSHTMSHTRSHSRSHTMGHPKSPTKSQEGSWWHSDEQAVIKSPLKCTLLPPGQESESAESAKIGGIITVFLIALVLTSTIVTLKWIGYICLRNSLPKVLNFHNFLAWPFPNLPPLEAMDMVEVIYINRKKKVWDYNYDDESDSDTEAAPRTSGGGYTMHGLTVRPLGQASATSTESQLIDPESEEEPDLPEVDVELPTMPKDSPQQLELLSGPCERRKSPLQDPFPEEDYSSTEGSGGRITFNVDLNSVFLRVLDDEDSDDLEAPLMLSSHLEEMVDPEDPDNVQSNHLLASGEGTQPTFPSPSSEGLWSEDAPSDQSDTSESDVDLGDGYIMR

SEQ ID NO: 866670 - protein, 107 aa, Homo sapiens
MWILSNLMGTSEEGNLLSTVSPTVKALFGKTRVSPIFPFSPRSPFQPLIPRTPGSPWGPVGPASPLGPGFPIGPMGPGKPVGPKGPMLPLGPSGPVGPTSPLFPFCP

SEQ ID NO: 866671 - protein, 490 aa, Homo sapiens
MAQRAVWLISHEPGTPLCGTVRFSRRYPTVEKRARVFNGASYVPVPEDGPFLKALLFELRLLDDDKDFVESRDSCSRINKTSIYGLLIGGEELWPVVAFLKNDMIYACVPLVEQTLSPRPPLISVSGVSQGFEFLFGIQDFLYSGQKNDSELNTKLSQLPDLLLQACPFGTLLDANLQNSLDNTNFASVTQPQKQPAWKTGTYKGKPQVSISITEKVKSMQYDKQGIADTWQVVGTVTCKCDLEGIMPNVTISLSLPTNGSPLQDILVHPCVTSLDSAILTSSSIDAMDDSAFSGPYKFPFTPPLESFNLCFYTSQVPVPPILGFYQMKEEEVQLRITINLKLHESVKNNFEFCEAHIPFYNRGPITHLEYKTSFGQLEVFREKSLLIWIIGQKFPKSMEISLSGTVTFGAKSHEKQPFDPICTGETAYLKLHFRILDYTLTGCYADQHSVQVFASGKPKISAHRKLISSDYYIWNSKAPAPVTYGSLLL

SEQ ID NO: 866672 - protein, 504 aa, Homo sapiens
MAQRAVWLISHEPGTPLCGTVRFSRDWQEDSGYLLIHYKRYPTVEKRARVFNGASYVPVPEDGPFLKALLFELRLLDDDKDFVESRDSCSRINKTSIYGLLIGGEELWPVVAFLKNDMIYACVPLVEQTLSPRPPLISVSGVSQGFEFLFGIQDFLYSGQKNDSELNTKLSQLPDLLLQACPFGTLLDANLQNSLDNTNFASVTQPQKQPAWKTGTYKGKPQVSISITEKVKSMQYDKQGIADTWQVVGTVTCKCDLEGIMPNVTISLSLPTNGSPLQDILVHPCVTSLDSAILTSSSIDAMDDSAFSGPYKFPFTPPLESFNLCFYTSQVPVPPILGFYQMKEEEVQLRITINLKLHESVKNNFEFCEAHIPFYNRGPITHLEYKTSFGQLEVFREKSLLIWIIGQKFPKSMEISLSGTVTFGAKSHEKQPFDPICTGETAYLKLHFRILDYTLTGCYADQHSVQVFASGKPKISAHRKLISSDYYIWNSKAPAPVTYGSLLL

SEQ ID NO: 866673 - protein, 244 aa, Homo sapiens
MPNVTISLSLPTNGSPLQDILVHPCVTSLDSAILTSSSIDAMDDSAFSGPYKFPFTPPLESFNLCFYTSQVPVPPILGFYQMKEEEVQLRITINLKLHESVKNNFEFCEAHIPFYNRGPITHLEYKTSFGQLEVFREKSLLIWIIGQKFPKSMEISLSGTVTFGAKSHEKQPFDPICTGETAYLKLHFRILDYTLTGCYADQHSVQVFASGKPKISAHRKLISSDYYIWNSKAPAPVTYGSLLL

SEQ ID NO: 866674 - protein, 321 aa, Homo sapiens [sequence omitted]

SEQ ID NO: 866675 - protein, 490 aa, Homo sapiens; identical to SEQ ID NO: 866671

SEQ ID NO: 866676 - protein, 244 aa, Homo sapiens; identical to SEQ ID NO: 866673

SEQ ID NO: 866677 - protein, 284 aa, Homo sapiens
MAQRAVWLISHEPGTPLCGTVRFSRRYPTVEKRARVFNGASYVPVPEDGPFLKALLFELRLLDDDKDFVESRDSCSRINKTSIYGLLIGGEELWPVVAFLKNDMIYACVPLVEQTLSPRPPLISVSGVSQGFEFLFGIQDFLYSGQKNDSELNTKLSQLPDLLLQACPFGTLLDANLQNSLDNTNFASVTQPQKQPAWKTGTYKGKPQVSISITEKVKSMQYDKQGIADTWQVVGTVTCKVRFFSGTCFIVLFNIWRKVKFASCILNNIFYFHLKQQFLNGRVM

SEQ ID NO: 866678 - protein, 490 aa, Homo sapiens; identical to SEQ ID NO: 866671

SEQ ID NO: 866679 - protein, 284 aa, Homo sapiens; identical to SEQ ID NO: 866677

SEQ ID NO: 866680 - protein, 168 aa, Homo sapiens
RSPPEWMIAVSGPGLEAVIDCAVAKVLTRVAMRMAVGASRLLTECPPVGTASQAFDKHLPGNRARCPESLDWMSRWGERDRDTQAGAQASQGHWFTGVITPSPAIAIRLHCGQLSPRRGWRGLVSGRHCWCVWSVLVSPASCIGDCWVAGREMGRESVGVMVVKAAGF

SEQ ID NO: 866681 - protein, 441 aa, Homo sapiens
MEISSHQSHLLQQLNEQRRQDVFCDCSILVEGKVFKAHRNVLFASSGYFKMLLSQNSKETSQPTTATFQAFSPDTFTVILDFVYSGKLSLTGQNVIEVMSAASFLQMTDVISVCKTFIKSSLDISEKEKDRYFSLSDKDANSNGVERSSFYSGGWQEGSSSPRSHLSPEQGTGIISGKSWNKYNYHPASQKNTQQPLAKHEPRKESIKKTKHLRLSQPSEVTHYKSSKREVRTSDSSSHVSQSEEQAQIDAEMDSTPVGYQYGQGSDVTSKSFPDDLPRMRFKCPYCTHVVKRKADLKRHLRCHTGERPYPCQACGKRFSRLDHLSSHFRTIHQACKLICRKCKRHVTDLTGQVVQEGTRRYRLCNECLAEFGIDSLPIDLEAEQHLMSPSDGDKDSRWHLSEDENRSYVEIVEDGSADLVIQQVDDSEEEEEKEIKPNIR

SEQ ID NO: 866682 - protein, 441 aa, Homo sapiens; identical to SEQ ID NO: 866681

SEQ ID NO: 866683 - protein, 340 aa, Homo sapiens
MEISSHQSHLLQQLNEQRRQDVFCDCSILVEGKVFKAHRNVLFASSGYFKMLLSQNSKETSQPTTATFQAFSPDTFTVILDFVYSGKLSLTGQNVIEVMSAASFLQMTDVISVCKTFIKSSLDISEKEKDRYFSLSDKDANSNGVERSSFYSGGWQEGSSSPRSHLSPEQGTGIISGKSWNKYNYHPASQKNTQQPLAKHEPRKESIKKTKHLRLSQPSEVTHYKSSKREVRTSDSSSHVSQSEEQAQIDAEMDSTPVGYQYGQGSDVTSKSFPDDLPRMRFKCPYCTHVVKRKADLKRHLRCHTGERPYPCQACGKRFSRLDHLSSHFRTMEIRIPDGT

SEQ ID NO: 866684 - protein, 272 aa, Homo sapiens
AGPAEGGGFGGVNCAVSAPFSLTCSCASLHLRLCFFSQHCGRDSRVTLAPLVPLVMAYPGYGGGFGNFSIQVPGMQMGQPVPETGPAILLDGYSGPAYSDTYSSAGDSVYTYFSAVAGQDGEVDAEELQRCLTQSGINGTYSPFSLETCRIMIAMLDRDHTGKMGFNAFKELWAALNAWKENFMTVDQDGSGTVEHHELRQAIGLMGYRLSPQTLTTIVKRYSKNGRIFFDDYVACCVKLRALTDFFRKRDHLQQGSANFIYDDFLQGTMAI

SEQ ID NO: 866685 - protein, 288 aa, Homo sapiens
AGPAEGGGFGGVNCAVSAPFSLTCSCASLHLRLCFFSQHCGRDSRVTLAPLVPLVMAYPGYGGGFGNFSIQVPGMQMGQPVPETGPAILLDGYSGPAYSDTYSSAGDSVYTYFSAVAGQDGEVDAEELQRCLTQSGINGTYSPFSLETCRIMIAMLDRDHTGKMGFNAFKELWAALNAWKENFMTVDQDGSGTVEHHELRQAIGLMGYRLSPQTLTTIVKRYSKNGRIFFDDYVACCVKLRALTDFFRKRDHLQQGSANFIYDDCGGMNVINFEHLDTERPESVCKSD

SEQ ID NO: 866686 - protein, 232 aa, Homo sapiens
MWMDLNHQLSLEGSQDLKFPRSQLFGNFSIQVPGMQMGQPVPETGPAILLDGYSGPAYSDTYSSAGDSVYTYFSAVAGQDGEVDAEELQRCLTQSGINGTYSPFSLETCRIMIAMLDRDHTGKMGFNAFKELWAALNAWKENFMTVDQDGSGTVEHHELRQAIGLMGYRLSPQTLTTIVKRYSKNGRIFFDDYVACCVKLRALTDFFRKRDHLQQGSANFIYDDFLQGTMAI

SEQ ID NO: 866687 - protein, 198 aa, Homo sapiens
MQMGQPVPETGPAILLDGYSGPAYSDTYSSAGDSVYTYFSAVAGQDGEVDAEELQRCLTQSGINGTYSPFSLETCRIMIAMLDRDHTGKMGFNAFKELWAALNAWKENFMTVDQDGSGTVEHHELRQAIGLMGYRLSPQTLTTIVKRYSKNGRIFFDDYVACCVKLRALTDFFRKRDHLQQGSANFIYDDFLQGTMAI

SEQ ID NO: 866688 - protein, 255 aa, Homo sapiens
AGPAEGGGFGGVNCAVSAPFSLTCSCASLHLRLCFFSQHCGRDSRVTLAPLVPLVMAYPGYGGGFGNFSIQVPGMQMGQPVPETGPAILLDGYSGPAYSDTYSSAGDSVYTYFSAVAGQDGEVDAEELQRCLTQSGINGTYSPFSLETCRIMIAMLDRDHTGKMGFNAFKELWAALNAWKENFMTVDQDGSGTVEHHELRQAIGLMGYRLSPQTLTTIVKRYSKNGRIFFDDYVACCVKLRALTVFAGHYGNLNA

SEQ ID NO: 866689 - protein, 190 aa, Homo sapiens
AGPAEGGGFGGVNCAVSAPFSLTCSCASLHLRLCFFSQHCGRDSRVTLAPLVPLVMAYPGYGGGFGNFSIQVPGMQMGQPVPETGPAILLDGYSGPAYSDTYSSAGDSVYTYFSAVAGQDGEVDAEELQRCLTQSGINGTYSPFSLETCRIMIAMLDRDHTGKMGFNAFKELWAALNACCVKPLVLWVIG

SEQ ID NO: 866690 - protein, 213 aa, Homo sapiens
AGPAEGGGFGGVNCAVSAPFSLTCSCASLHLRLCFFSQHCGRDSRVTLAPLVPLVMAYPGYGGGFGNFSIQVPGMQMGQPVPETGPAILLDGYSGPAYSDTYSSAGDSVYTYFSAVAGQDGEVDAEELQRCLTQSGINGTYSPFSLETCRIMIAMLDRDHTGKMGFNAFKELWAALNAWKENFMTVDQDGSGTVEHHELRQAIGLMGKNINIL

SEQ ID NO: 866691 - protein, 272 aa, Homo sapiens; identical to SEQ ID NO: 866684

SEQ ID NO: 866692 - protein, 196 aa, Homo sapiens [sequence omitted]

SEQ ID NO: 866693 - protein, 196 aa, Homo sapiens [sequence omitted]

SEQ ID NO: 866694 - protein, 117 aa, Homo sapiens
AGPAEGGGFGGVNCAVSAPFSLTCSCASLHLRLCFFSQHCGRDSRVTLAPLVPLVMAYPGYGGGSQCQKQAQLYSSMDTLGQHIQTLIPQLVTPCILTSVLLLDRMVKWMLKNFRDV

SEQ ID NO: 866695 - protein, 166 aa, Homo sapiens
AGPAEGGGFGGVNCAVSAPFSLTCSCASLHLRLCFFSQHCGRDSRVTLAPLVPLVMAYPGYGGGFGNFSIQVPGMQMGQPVPETGPAILLDGYSGPAYSDTYSSAGDSVYTYFSAVAGQDGEVDAEELQRCLTQSGINGTYSPFSLETCRIMIAMLDVSLNRNRKY

SEQ ID NO: 866696 - protein, 906 aa, Homo sapiens
MQTQAGSHCGLWLREMEPSLGQGMDLTCPFGVSPACGAQASWSIFGADAAEVPGTRGHSQQEAAMPHIPEDEEPPGEHRQPRALPAKGPPTAGVSCSPTPTIVLTGDATSPEGETDKNLANRVHSPHKRLSHRHLKVSTASLTSVDPAGHIIDLVNDQLPDISISEEDKKKNLALLEEAKLVSERFLTRRGRKSRSSPGDSPSAVSPNLSPSASPTSSRATHLQSPPRQKGDEADVSSPHPGEPNVPKGLADRKQNDQRKVSQGRLAPRPPPVEKSKEIAIEQKENFDPLQYPETTPKGLAPVTNSSGKMALNSPQPGPVESELGKQLLKTGWEGSPLPRSPTQDAAGVGPPASQGRGPAGEPMGPEAGSKAELPPTVSRPPLLRGLSWDSGPEEPGPRLQKVLAKLPLAEEEKRFAGKAGGKLAKAPGLKDFQIQVQPVRMQKLTKLREEHILMRNQNLVGLKLPDLSEAAEQEKGLPSELSPAIEEEESKSGLDVMPNISDVLLRKLRVHRSLPGSAPPLTEKEVENVFVQLSLAFRNDSYTLESRINQAERERNLTEENTEKELENFKASITSSASLWHHCEHRETYQKLLEDIAVLHRLAARLSSRAEVVGAVRQEKRMSKATEVMMQYVENLKRTYEKDHAELMEFKKLANQNSSRSCGPSEDGVPRTARSMSLTLGKNMPRRRVSVAVVPKFNALNLPGQTPSSSSIPSLPALSESPNGKGSLPVTSALPALLENGKTNGDPDCEASAPALTLSCLEELSQETKARMEEEAYSKGFQEGLKKTKELQDLKEEEEEQKSESPEEPEEVEETEEEEKGPRSSKLEELVHFLQVMYPKLCQHWQVIWMMAAVMLVLTVVLGLYNSYNSCAEQADGPLGRSTCSAAQRDSWWSSGLQHEQPTEQ

SEQ ID NO: 866697 - protein, 842 aa, Homo sapiens
MVKAPQSEGRLARGGKENNSAFRGPPTAGVSCSPTPTIVLTGDATSPEGETDKNLANRVHSPHKRLSHRHLKVSTASLTSVDPAGHIIDLVNDQLPDISISEEDKKKNLALLEEAKLVSERFLTRRGRKSRSSPGDSPSAVSPNLSPSASPTSSRSNSLTVPTPPEGDEADVSSPHPGEPNVPKGLADRKQNDQRKVSQGRLAPRPPPVEKSKEIAIEQKENFDPLQYPETTPKGLAPVTNSSGKMALNSPQPGPVESELGKQLLKTGWEGSPLPRSPTQDAAGVGPPASQGRGPAGEPMGPEAGSKAELPPTVSRPPLLRGLSWDSGPEEPGPRLQKVLAKLPLAEEEKRFAGKAGGKLAKAPGLKDFQIQVQPVRMQKLTKLREEHILMRNQNLVGLKLPDLSEAAEQEKGLPSELSPAIEEEESKSGLDVMPNISDVLLRKLRVHRSLPGSAPPLTEKEVENVFVQLSLAFRNDSYTLESRINQAERERNLTEENTEKELENFKASITSSASLWHHCEHRETYQKLLEDIAVLHRLAARLSSRAEVVGAVRQEKRMSKATEVMMQYVENLKRTYEKDHAELMEFKKLANQNSSRSCGPSEDGVPRTARSMSLTLGKNMPRRRVSVAVVPKFNALNLPGQTPSSSSIPSLPALSESPNGKGSLPVTSALPALLENGKTNGDPDCEASAPALTLSCLEELSQETKARMEEEAYSKGFQEGLKKTKELQDLKEEEEEQKSESPEEPEEVEETEEEEKGPRSSKLEELVHFLQVMYPKLCQHWQVIWMMAAVMLVLTVVLGLYNSYNSCAEQADGPLGRSTCSAAQRDSWWSSGLQHEQPTEQ

SEQ ID NO: 866698 - protein, 947 aa, Homo sapiens
MVKAPQSEGRLARGGKENNSVLDRVSHCHPGWSAVVQPHLPGSSNSHASASQVAGITACGAQASWSIFGADAAEVPGTRGHSQQEAAMPHIPEDEEPPGEHRQPRALPAKGPPTAGVSCSPTPTIVLTGDATSPEGETDKNLANRVHSPHKRLSHRHLKVSTASLTSVDPAGHIIDLVNDQLPDISISEEDKKKNLALLEEAKLVSERFLTRRGRKSRSSPGDSPSAVSPNLSPSASPTSSRSNSLTVPTPPGLDVCSGPPSPLPGAPPQKGDEADVSSPHPGEPNVPKGLADRKQNDQRKVSQGRLAPRPPPVEKSKEIAIEQKENFDPLQYPETTPKGLAPVTNSSGKMALNSPQPGPVESELGKQLLKTGWEGSPLPRSPTQDAAGVGPPASQGRGPAGEPMGPEAGSKAELPPTVSRPPLLRGLSWDSGPEEPGPRLQKVLAKLPLAEEEKRFAGKAGGKLAKAPGLKDFQIQVQPVRMQKLTKLREEHILMRNQNLVGLKLPDLSEAAEQEKGLPSELSPAIEEEESKSGLDVMPNISDVLLRKLRVHRSLPGSAPPLTEKEVENVFVQLSLAFRNDSYTLESRINQAERERNLTEENTEKELENFKASITSSASLWHHCEHRETYQKLLEDIAVLHRLAARLSSRAEVVGAVRQEKRMSKATEVMMQYVENLKRTYEKDHAELMEFKKLANQNSSRSCGPSEDGVPRTARSMSLTLGKNMPRRRVSVAVVPKFNALNLPGQTPSSSSIPSLPALSESPNGKGSLPVTSALPALLENGKTNGDPDCEASAPALTLSCLEELSQETKARMEEEAYSKGFQEGLKKTKELQDLKEEEEEQKSESPEEPEEVEETEEEEKGPRSSKLEELVHFLQVMYPKLCQHWQVIWMMAAVMLVLTVVLGLYNSYNSCAEQADGPLGRSTCSAAQRDSWWSSGLQHEQPTEQ

SEQ ID NO: 866699 - protein, 849 aa, Homo sapiens
MKLVLESVWINRGPPTAGVSCSPTPTIVLTGDATSPEGETDKNLANRVHSPHKRLSHRHLKVSTASLTSVDPAGHIIDLVNDQLPDISISEEDKKKNLALLEEAKLVSERFLTRRGRKSRSSPGDSPSAVSPNLSPSASPTSSRSNSLTVPTPPGLDVCSGPPSPLPGAPPQKGDEADVSSPHPGEPNVPKGLADRKQNDQRKVSQGRLAPRPPPVEKSKEIAIEQKENFDPLQYPETTPKGLAPVTNSSGKMALNSPQPGPVESELGKQLLKTGWEGSPLPRSPTQDAAGVGPPASQGRGPAGEPMGPEAGSKAELPPTVSRPPLLRGLSWDSGPEEPGPRLQKVLAKLPLAEEEKRFAGKAGGKLAKAPGLKDFQIQVQPVRMQKLTKLREEHILMRNQNLVGLKLPDLSEAAEQEKGLPSELSPAIEEEESKSGLDVMPNISDVLLRKLRVHRSLPGSAPPLTEKEVENVFVQLSLAFRNDSYTLESRINQAERERNLTEENTEKELENFKASITSSASLWHHCEHRETYQKLLEDIAVLHRLAARLSSRAEVVGAVRQEKRMSKATEVMMQYVENLKRTYEKDHAELMEFKKLANQNSSRSCGPSEDGVPRTARSMSLTLGKNMPRRRVSVAVVPKFNALNLPGQTPSSSSIPSLPALSESPNGKGSLPVTSALPALLENGKTNGDPDCEASAPALTLSCLEELSQETKARMEEEAYSKGFQEGLKKTKELQDLKEEEEEQKSESPEEPEEVEETEEEEKGPRSSKLEELVHFLQVMYPKLCQHWQVIWMMAAVMLVLTVVLGLYNSYNSCAEQADGPLGRSTCSAAQRDSWWSSGLQHEQPTEQ

SEQ ID NO: 866700 - protein, 906 aa, Homo sapiens; identical to SEQ ID NO: 866696

SEQ ID NO: 866701 - protein, 906 aa, Homo sapiens; identical to SEQ ID NO: 866696

SEQ ID NO: 866702 - protein, 906 aa, Homo sapiens; identical to SEQ ID NO: 866696

SEQ ID NO: 866703 - protein, 175 aa, Homo sapiens
MVKAPQSEGRLARGGKENNSVLDRVSHCHPGWSAVVQPHLPGSSNSHASASQVAGITACGAQASWSIFGADAAEVPGTRGHSQQEAAMPHIPEDEEPPGEPQAAQSPAGQGSSYRRSILQSNSHDCPDWGCHFTRRRNRQKPGQQSSQSPQEAFSPTLEGVHCLPDICGPRGAHH

SEQ ID NO: 866704 - protein, 244 aa, Homo sapiens
  misc_feature (234)..(234): Xaa can be any naturally occurring amino acid
MAGKRSGWSRAALLQLLLGVNLVVMPPTQARSLRFVTLEGMLQHWELGQALRQRYHGFLNTSYHRQEVYVRSTDFDRTLMSAEANLAGLFPPNGMQRFNPNISWQPIPVHTVPITEDRLLKFPLGPCPRYEQLQNETRQTPEYQNESSRNAQFLDMVANETGLTDLTLETVWNVYDTLFCEQTHGLRLPPWASPQTMQRLSRLKDFSFRFLFGIYQQAEKARLQGGEVPGWGSXIKGKKPWNPL

SEQ ID NO: 866705 - protein, 406 aa, Homo sapiens
MAGKRSGWSRAALLQLLLGVNLVVMPPTQARSLRFVTLLYRHGDRSPVKTYPKDPYQEEEWPQGFGQLTKEGMLQHWELGQALRQRYHGFLNTSYHRQEVYVRSTDFDRTLMSAEANLAGLFPPNGMQRFNPNISWQPIPVHTVPITEDRLLKFPLGPCPRYEQLQNETRQTPEYQNESSRNAQFLDMVANETGLTDLTLETVWNVYDTLFCEQTHGLRLPPWASPQTMQRLSRLKDFSFRFLFGIYQQAEKARLQGGVLLAQIRKNLTLMATTSQLPKLLVYSAHDTTLVALQMALDVYNGEQAPYASCHIFELYQEDSGNFSVEMYFRNESDKAPWPLSLPGCPHRCPLQDFLRLTEPVVPKDWQQECQLASGPADTVLLLTVLFRMQAQPPGYRHVADGEDHA

SEQ ID NO: 866706 - protein, 423 aa, Homo sapiens [sequence omitted]

SEQ ID NO: 866707 - protein, 451 aa, Homo sapiens
MAGKRSGWSRAALLQLLLGVNLVVMPPTQARSLRFVTLLYRHGDRSPVKTYPKDPYQEEEWPQGFGQLTKEGMLQHWELGQALRQRYHGFLNTSYHRQEVYVRSTDFDRTLMSAEANLAGLFPPNGMQRFNPNISWQPIPVHTVPITEDRLLKFPLGPCPRYEQLQNETRQTPEYQNESSRNAQFLDMVANETGLTDLTLETVWNVYDTLFCEAPSHYGKRAAPWRGWPRPGALTCLCDTQQTHGLRLPPWASPQTMQRLSRLKDFSFRFLFGIYQQAEKARLQGGVLLAQIRKNLTLMATTSQLPKLLVYSAHDTTLVALQMALDVYNGEQAPYASCHIFELYQEDSGNFSVEMYFRNESDKAPWPLSLPGCPHRCPLQDFLRLTEPVVPKDWQQECQLASGPADTEVIVALAVCGSILFLLIVLLLTVLFRMQAQPPGYRHVADGEDHA

SEQ ID NO: 866708 - protein, 221 aa, Homo sapiens
MAGKRSGWSRAALLQLLLGVNLVVMPPTQARSLRFVTLLYRHGDRSPVKTYPKDPYQEEEWPQGFGQLTKEGMLQHWELGQALRQRYHGFLNTSYHRQEVYVRSTDFDRTLMSAEANLAGLFPPNGMQRFNPNISWQPIPVHTVPITEDRLLKFPLGPCPRYEQLQNETRQTPEYQNESSRNAQFLDMVANETGLTDLTLETVWNVYDTLFCEVSPLGCPL

SEQ ID NO: 866709 - protein, 401 aa, Homo sapiens
MAGKRSGWSRAALLQLLLGVNLVVMPPTQARSLRFVTLLYRHGDRSPVKTYPKDPYQEEEWPQGFGQLTKEGMLQHWELGQALRQRYHGFLNTSYHRQEVYVRSTDFDRTLMSAEANLAGLFPPNGMQRFNPNISWQPIPVHTVPITEDRSRTETLIHFSEQFLDMVANETGLTDLTLETVWNVYDTLFCEQTHGLRLPPWASPQTMQRLSRLKDFSFRFLFGIYQQAEKARLQGGVLLAQIRKNLTLMATTSQLPKLLVYSAHDTTLVALQMALDVYNGEQAPYASCHIFELYQEDSGNFSVEMYFRNESDKAPWPLSLPGCPHRCPLQDFLRLTEPVVPKDWQQECQLASGPADTEVIVALAVCGSILFLLIVLLLTVLFRMQAQPPGYRHVADGEDHA

SEQ ID NO: 866710 - protein, 221 aa, Homo sapiens
MAGKRSGWSRAALLQLLLGVNLVVMPPTQARSLRFVTLLYRHGDRSPVKTYPKDPYQEEEWPQGFGQLTKEGMLQHWELGQALRQRYHGFLNTSYHRQEVYVRSTDFDRTLMSAEANLAGLFPPNGMQRFNPNISWQPIPVHTVPITEDRLLKFPLGPCPRYEQLQNETRQTPEYQNESSRNAQFLDMVANETGLTDLTLETVWNVYDTLFCEVVSWKRKF

SEQ ID NO: 866711 - protein, 221 aa, Homo sapiens; identical to SEQ ID NO: 866710

SEQ ID NO: 866712 - protein, 281 aa, Homo sapiens
MAGKRSGWSRAALLQLLLGVNLVVMPPTQARSLRFVTLLYRHGDRSPVKTYPKDPYQEEEWPQGFGQLTKEGMLQHWELGQALRQRYHGFLNTSYHRQEVYVRSTDFDRTLMSAEANLAGLFPPNGMQRFNPNISWQPIPVHTVPITEDRLLKFPLGPCPRYEQLQNETRQTPEYQNESSRNAQFLDMVANETGLTDLTLETVWNVYDTLFCEQTHGLRLPPWASPQTMQRLSRLKDFSFRFLFGIYQQAEKARLQGGVLLAQIRKNLTLMATTSQLPENE

SEQ ID NO: 866713 - protein, 423 aa, Homo sapiens [sequence omitted]

SEQ ID NO: 866714 - protein, 423 aa, Homo sapiens [sequence omitted]

SEQ ID NO: 866715 - protein, 423 aa, Homo sapiens [sequence omitted]

SEQ ID NO: 866716 - protein, 423 aa, Homo sapiens [sequence omitted]

SEQ ID NO: 866717 - protein, 198 aa, Homo sapiens
MAGKRSGWSRAALLQLLLGVNLVVMPPTQARSLRFVTLLYRHGDRSPVKTYPKDPYQEEEWPQGFGQLTKEGMLQHWELGQALRQRYHGFLNTSYHRQEVYVRSTDFDRTLMSAEANLAGLFPPNGMQRFNPNISWQPIPVHTVPITEDRLLKFPLGPCPRYEQLQNETRQTPEYQNESSRNAQFLDMVANETGLTDL

SEQ ID NO: 866718 - protein, 195 aa, Homo sapiens [sequence omitted]

SEQ ID NO: 866719 - protein, 397 aa, Homo sapiens
MAGKRSGWSRAALLQLLLGVNLVVMPPTQARSLRFVTLLYRHGDRSPVKTYPKDPYQEEEWPQGFGQLTKEGMLQHWELGQALRQRYHGFLNTSYHRQEVYVRSTDFDRTLMSAEANLAGLFPPNGMQRFNPNISWQPIPVHTVPITEDRLLKFPLGPCPRYEQLQNETRQTTLETVWNVYDTLFCEQTHGLRLPPWASPQTMQRLSRLKDFSFRFLFGIYQQAEKARLQGGVLLAQIRKNLTLMATTSQLPKLLVYSAHDTTLVALQMALDVYNGEQAPYASCHIFELYQEDSGNFSVEMYFRNESDKAPWPLSLPGCPHRCPLQDFLRLTEPVVPKDWQQECQLASGPADTEVIVALAVCGSILFLLIVLLLTVLFRMQAQPPGYRHVADGEDHA

SEQ ID NO: 866720 - protein, 217 aa, Homo sapiens
MSNPFLKQVFNKDKTFRPKRKFEPGTQRFELHKKAQASLNAGLDLRLAVQLPPGEDLNDWVAVHVVDFFNRVNLIYGTISDGCTEQSCPVMSGGPKYEYRWQDEHKFRKPTALSAPRYMDLLMDWIEAQINNEDLFPTNVGTPFPKNFLQTVRKILSRLFRVFVHVYIHHFDRIAQMGSEAHVNTCYKHFYYFVKEFGLIDTKELEPLKEMTARMCH

SEQ ID NO: 866721 - protein, 227 aa, Homo sapiens
MSNPFLKQVFNKDKTFRPKRKFEPGTQRFELHKKAQASLNAGLDLRLAVQLPPGEDLNDWVAVHVVDFFNRVNLIYGTISDGCTEQSCPVMSGGPKYEYRWQDEHKFRKPTALSAPRYMDLLMDWIEAQINNEDLFPTNVFDRIAQMGSEAHVNTCYKHFYYFVKEFGLIDTKELEPLVRGLGAEGVRLRWGWWPVAEEPFRGQDPDCLRSAQQLAAPAGVGPRGPC

SEQ ID NO: 866722 - protein, 217 aa, Homo sapiens; identical to SEQ ID NO: 866720

SEQ ID NO: 866723 - protein, 217 aa, Homo sapiens; identical to SEQ ID NO: 866720

SEQ ID NO: 866724 - protein, 87 aa, Homo sapiens
KDPLLEKEPERPPQEVREPAQKRRSPGGRAILRSHDGASQHASKQASSVPLDPHLLRPAAYKKDYILRPYPLKFFPHPKQKISGSKV

SEQ ID NO: 866725 - protein, 146 aa, Homo sapiens
MLSLAKRVISRERVIPRERVISRERVIPGERVDPSRNVLSLDERVIPQRNVLSLGERVIPRERVIPRERVIPRERVISRERVIPRNVLSISSRQGRAETDSEAPWTITDAELRVTLTVEGSAIRTIELLHSDRHSHLWEKGNVSSA

SEQ ID NO: 866726 - protein, 134 aa, Homo sapiens
AWPQYKLDNGSKWPENGTFDFSILQDLDHFCQKMGTWSEVPCVQAFFTLRSLPSLCSQCDSSQIFLLSLPSVPSVSTPTSESPESPFSADPSDLSPPPQATPWQAESSPNSSSASAPPSYNSSITSPPQTWSGL

SEQ ID NO: 866727 - protein, 121 aa, Homo sapiens
MGPVPHIWQPDQHPGQHKDLQSELLNFSIQTATHTYGKRVMYHRLSNREYYSYDGKWGQKALVHKTLFLPWPKNSSPPTLKLICLITVFRELILLGQFQAQKYANWHLVSYIKMHPRPETY

SEQ ID NO: 866728 - protein, 2019 aa, Homo sapiens
KAGADIELGCSTPLMEASQEGHLELVKYLLASGANVHATTATGDTALTYACENGHTDVADVLLQAGADLEHESEGGRTPLMKAARAGHLCTVQFLISKGANVNRATANNDHTVVSLACAGGHLAVVELLLAHGADPTHRLKDGSTMLIEAAKGGHTNVVSYLLDYPNNVLSVPTTDVSQLPPPSQDQSQVPRVPTHTLAMVVPPQEPDRTSQENSPALLGVQKGTSKQKSSSLQVADQDLLPSFHPYQPLECIVEETEGKLNELGQRISAIEKAQLKSLELIQGEPLNKDKIEELKKNREEQVQKKKKILKELQKVERQLQMKTQQQFTKEYLETKGQKDTVSLHQQCSHRGVFPEGEGDGSLPEDHFSELPQVDTILFKDNDVDDEQQSPPSAEQIDFVPVQPLSSPQCNFSSDLGSNGTNSLELQKVSGNQQIVGQPQIAITGHDQGLLVQEPDGLMVATPAQTLTDTLDDLIAAVSTRVPTGSNSSSQTTECLTPESCSQTTSNVASQSMPPVYPSVDIDAHTESNHDTALTLACAGGHEELVSVLIARDAKIEHRDKKGFTPLILAATAGHVGVVEILLDKGGDIEAQSERTKDTPLSLACSGGRQEVVDLLLARGANKEHRNVSDYTPLSLAASGGYVNIIKILLNAGAEINSRTGSKLGISPLMLAAMNGHVPAVKLLLDMGSDINAQIETNRNTALTLACFQGRAEVVSLLLDRKANVEHRAKTGLTPLMEAASGGYAEVGRVLLDKGADVNAPPVPSSRDTALTIAADKGHYKFCELLIHRGAHIDVRNKKGNTPLWLASNGGHFDVVQLLVQAGADVDAADNRKITPLMSAFRKGHVKVVQYLVKEVNQFPSDIECMRYIATITDKELLKKCHQCVETIVKAKDQQAAEANKNASILLKELDLEKSREESRKQALAAKREKRKEKRKKKKEEQKRKQEEDEENKPKENSELPEDEDEEENDEDVEQEVPIEPPSATTTTTIGISATSATFTNVFGKKRANVVTTPSTNRKNKKNKTKETPPTAHLILPEQHMSLAQQKADKNKINGEPRGGGAGGNSDSDNLDSTDCNSESSSGGKSQELNFVMDVNSSKYPSLLLHSQEEKTSTATSKTQTRLEGEVTPNSLSTSYKTVSLPLSSPNIKLNLTSPKRGQKREEGWKEVVRRSKKLSVPASVVSRIMGRGGCNITAIQDVTGAHIDVDKQKDKNGERMITIRGGTESTRYAVQLINALIQDPAKELEDLIPKNHIRTPASTKSIHANFSSGVGTTAASSKNAFPLGAPTLVTSQATTLSTFQPANKLNKNVPTNVRSSFPVSLPLAYPHPHFALLAAQTMQQIRHPRLPMAQFGGTFSPSPNTWGPFPVRPVNPGNTNSSPKHNNTSRLPNQNGTVLPSESAGLATASCPITVSSVVAASQQLCVTNTRTPSSVRKQLFACVPKTSPPATVISSVTSTCSSLPSVSSAPITSGQAPTTFLPASTSQAQLSSQKMESFSAVPPTKEKVSTQDQPMANLCTPSSTANSCSSSASNTPGAPETHPSSSPTPTSSNTQEEAQPSSVSDLSPMSMPFASNSEPAPLTLTSPRMVAADNQDTSNLPQLAVPAPRVSHRMQPRGSFYSMVPNATIHQDPQSIFVTNPVTLTPPQGPPAAVQLSSAVNIMNGSQMHINPANKSLPPTFGPATLFNHFSSLFDSSQVPANQGWGDGPLSSRVATDASFTVQSAFLGNSVLGHLENMHPDNSKAPGFRPPSQRVSTSPVGLPSIDPSGSSPSSSSAPLASFSGIPGTRVFLQGPAPVGTPSFNRQHFSPHPWTSASNSCDSPIPSVSSGSSSPLSATSAPPTLGQPKGVSASQDRKIPPPIGTERLARIRQGGSVAQAPAGTSFVAPVGHSGIWSFGVNAVSEGLSGWSQSVMGNHPMHQQLSDPSTFSQHQPMERDDSGMVAPSNIFHQPMASGFVDFSKGLPISMYGGTIIPSHPQLADVPGGPLFNGLHNPDPAWNPMIKVIQNSTECTDAQQVKWA

SEQ ID NO: 866729 - protein, 1838 aa, Homo sapiens
KAGADIELGCSTPLMEASQEGHLELVKYLLASGANVHATTATGDTALTYACENGHTDVADVLLQAGADLEHESEGGRTPLMKAARAGHLCTVQFLISKGANVNRATANNDHTVVSLACAGGHLAVVELLLAHGADPTHRLKDGSTMLIEAAKGGHTNVVSYLLDYPNNVLSVPTTDVSQLPPPSQDQSQVPRVPTHTLAMVVPPQEPDRTSQENSPALLGVQKGTSKQKSSSLQVADQDLLPSFHPYQPLECIVEETEGKLNELGQRISAIEKAQLKSLELIQGEPLNKDKIEELKKNREEQVQKKKKILKELQKVERQLQMKTQQQFTKEYLETKGQKDTVSLHQQCSHRGVFPEGEGDGSLPEDHFSELPQVDTILFKDNDVDDEQQSPPSAEQIDFVPVQPLSSPQCNFSSDLGSNGTNSLELQKVSGNQQIVGQPQIAITGHDQGLLVQEPDGLMVATPAQTLTDTLDDLIAAVSTRVPTGSNSSSQTTECLTPESCSQTTSNVASQSMPPVYPSVDIDAHTESNHDTALTLACAGGHEELVSVLIARDAKIEHRDKKGFTPLILAATAGHVGVVEILLDKGGDIEAQSERTKDTPLSLACSGGRQEVVDLLLARGANKEHRNVSDYTPLSLAASGGYVNIIKILLNAGAEINSRTGSKLGISPLMLAAMNGHVPAVKLLLDMGSDINAQIETNRNTALTLACFQGRAEVVSLLLDRKANVEHRAKTGLTPLMEAASGGYAEVGRVLLDKGADVNAPPVPSSRDTALTIAADKGHYKFCELLIHRGAHIDVRNKKGNTPLWLASNGGHFDVVQLLVQAGADVDAADNRKITPLMSAFRKGHVKVVQYLVKEVNQFPSDIECMRYIATITDKELLKKCHQCVETIVKAKDQQAAEANKNASILLKELDLEKSREESRKQALAAKREKRKEKRKKKKEEQKRKQEEDEENKPKENSELPEDEDEEENDEDVEQEVPIEPPSATTTTTIGISATSATFTNVFGKKRANVVTTPSTNRKNKKNKTDKQKDKNGERMITIRGGTESTRYAVQLINALIQDPAKELEDLIPKNHIRTPASTKSIHANFSSGVGTTAASSKNAFPLGAPTLVTSQATTLSTFQPANKLNKNVPTNVRSSFPVSLPLAYPHPHFALLAAQTMQQIRHPRLPMAQFGGTFSPSPNTWGPFPVRPVNPGNTNSSPKHNNTSRLPNQNGTVLPSESAGLATASCPITVSSVVAASQQLCVTNTRTPSSVRKQLFACVPKTSPPATVISSVTSTCSSLPSVSSAPITSGQAPTTFLPASTSQAQLSSQKMESFSAVPPTKEKVSTQDQPMANLCTPSSTANSCSSSASNTPGAPETHPSSSPTPTSSNTQEEAQPSSVSDLSPMSMPFASNSEPAPLTLTSPRMVAADNQDTSNLPQLAVPAPRVSHRMQPRGSFYSMVPNATIHQDPQSIFVTNPVTLTPPQGPPAAVQLSSAVNIMNGSQMHINPANKSLPPTFGPATLFNHFSSLFDSSQVPANQGWGDGPLSSRVATDASFTVQSAFLGNSVLGHLENMHPDNSKAPGFRPPSQRVSTSPVGLPSIDPSGSSPSSSSAPLASFSGIPGTRVFLQGPAPVGTPSFNRQHFSPHPWTSASNSCDSPIPSVSSGSSSPLSATSAPPTLGQPKGVSASQDRKIPPPIGTERLARIRQGGSVAQAPAGTSFVAPVGHSGIWSFGVNAVSEGLSGWSQSVMGNHPMHQQLSDPSTFSQHQPMERDDSGMVAPSNIFHQPMASGFVDFSKGLPISMYGGTIIPSHPQLADVPGGPLFNGLHNPDPAWNPMIKVIQNSTECTDAQQVKWA

SEQ ID NO: 866730 - protein, 2025 aa, Homo sapiens
KAGADIELGCSTPLMEASQEGHLELVKYLLASGANVHATTATGDTALTYACENGHTDVADVLLQAGADLEHESEGGRTPLMKAARAGHLCTVQFLISKGANVNRATANNDHTVVSLACAGGHLAVVELLLAHGADPTHRLKDGSTMLIEAAKGGHTNVVSYLLDYPNNVLSVPTTDVSQLPPPSQDQSQVPRVPTHTLAMVVPPQEPDRTSQENSPALLGVQKGTSKQKSSSLQVADQDLLPSFHPYQPLECIVEETEGKLNELGQRISAIEKAQLKSLELIQGEPLNKDKIEELKKNREEQVQKKKKILKELQKVERQLQMKTQQQFTKEYLETKGQKDTVSLHQQCSHRGVFPEGEGDGSLPEDHFSELPQVDTILFKDNDVDDEQQSPPSAEQIDFVPVQPLSSPQCNFSSDLGSNGTNSLELQKVSGNQQIVGQPQIAITGHDQGLLVQEPDGLMVATPAQTLTDTLDDLIAAVSTRVPTGSNSSSQTTECLTPESCSQTTSNVASQSMPPVYPSVDIDAHTESNHDTALTLACAGGHEELVSVLIARDAKIEHRDKKGFTPLILAATAGHVGVVEILLDKGGDIEAQSERTKDTPLSLACSGGRQEVVDLLLARGANKEHRNVSDYTPLSLAASGGYVNIIKILLNAGAEINSRTGSKLGISPLMLAAMNGHVPAVKLLLDMGSDINAQIETNRNTALTLACFQGRAEVVSLLLDRKANVEHRAKTGLTPLMEAASGGYAEVGRVLLDKGADVNAPPVPSSRDTALTIAADKGHYKFCELLIHRGAHIDVRNKKGNTPLWLASNGGHFDVVQLLVQAGADVDAADNRKITPLMSAFRKGHVKVVQYLVKEVNQFPSDIECMRYIATITDKELLKKCHQCVETIVKAKDQQAAEANKNASILLKELDLEKSREESRKQALAAKREKRKEKRKKKKEEQKRKQEEDEENKPKENSELPEDEDEEENDEDVEQEVPIEPPSATTTTTIGISATSATFTNVFGKKRANVVTTPSTNRKNKKNKTKETPPTAHLILPEQHMSLAQQKADKNKINGEPRGGGAGGNSDSDNLDSTDCNSESSSGGKSQELNFVMDVNSSKYPSLLLHSQEEKTSTATSKTQTRLEGEVTPNSLSTSYKTVSLPLSSPNIKLNLTSPKRGQKREEGWKEVVRRSKKLSVPASVVSRIMGRGGCNITAIQDVTGAHIDVDKQKDKNGERMITIRGGTESTRYAVQLINALIQDPAKELEDLIPKNHIRTPASTKSIHANFSSGVGTTAASSKNAFPLGAPTLVTSQATTLSTFQPANKLNKNVPTNVRSSFPVSLPLAYPHPHFALLAAQTMQQIRHPRLPMAQFGGTFSPSPNTWGPFPVRPVNPGNTNSSPKHNNTSRLPNQNGTVLPSESAGLATASCPITVSSVVAASQQLCVTNTRTPSSVRKQLFACVPKTSPPATVISSVTSTCSSLPSVSSAPITSGQAPTTFLPASTSQAQLSSQKMESFSAVPPTKEKVSTQDQPMANLCTPSSTANSCSSSASNTPGAPETHPSSSPTPTSSNTQEEAQPSSVSDLSPMSMPFASNSEPAPLTLTSPRMVAADNQDTSNLPQLAVPAPRVSHRMQPRGSFYSMVPNATIHQDPQSIFVTNPVTLTPPQGPPAAVQLSSAVNIMNGSQMHINPANKSLPPTFGPATLFNHFSSLFDSSQVPANQGWGDGPLSSRVATDASFTVQSAFLGNSVLGHLENMHPDNSKAPGFRPPSQRVSTSPVGLPSIDPSGSSPSSSSAPLASFSGIPGTRVFLQGPAPVGTPSFNRQHFSPHPWTSASNSCDSPIPSVSSGSSSPLSATSAPPTLGQPKGVSASQDRKIPPPIGTERLARIRQGGSVAQAPAGTSFVAPVGHSGIWSFGVNAVSEGLSGWSQSVMGNHPMHQQLSDPSTFSQHQPMERDDSGMVAPSNIFHQPMGLPISMYGGTIIPSHPQLADVPGGPLFNGLHNPDPAWNPMIKVIQNSTECTDAQQIWPGTWAPHIGNMHLKYVN

SEQ ID NO: 866731 - protein, 2017 aa, Homo sapiens
KAGADIELGCSTPLMEASQEGHLELVKYLLASGANVHATTATGDTALTYACENGHTDVADVLLQAGADLEHESEGGRTPLMKAARAGHLCTVQFLISKGANVNRATANNDHTVVSLACAGGHLAVVELLLAHGADPTHRLKDGSTMLIEAAKGGHTNVVSYLLDYPNNVLSVPTTDVSQLPPPSQDQSQVPRVPTHTLAMVVPPQEPDRTSQENSPALLGVQKGTSKQKSSSLQVADQDLLPSFHPYQPLECIVEETEGKLNELGQRISAIEKAQLKSLELIQGEPLNKDKIEELKKNREEQVQKKKKILKELQKVERQLQMKTQQQFTKEYLETKGQKDTVSLHQQCSHRGVFPEGEGDGSLPEDHFSELPQVDTILFKDNDVDDEQQSPPSAEQIDFVPVQPLSSPQCNFSSDLGSNGTNSLELQKVSGNQQIVGQPQIAITGHDQGLLVQEPDGLMVATPAQTLTDTLDDLIAAVSTRVPTGSNSSSQTTECLTPESCSQTTSNVASQSMPPVYPSVDIDAHTESNHDTALTLACAGGHEELVSVLIARDAKIEHRDKKGFTPLILAATAGHVGVVEILLDKGGDIEAQSERTKDTPLSLACSGGRQEVVDLLLARGANKEHRNVSDYTPLSLAASGGYVNIIKILLNAGAEINSRTGSKLGISPLMLAAMNGHVPAVKLLLDMGSDINAQIETNRNTALTLACFQGRAEVVSLLLDRKANVEHRAKTGLTPLMEAASGGYAEVGRVLLDKGADVNAPPVPSSRDTALTIAADKGHYKFCELLIHRGAHIDVRNKKGNTPLWLASNGGHFDVVQLLVQAGADVDAADNRKITPLMSAFRKGHVKVVQYLVKEVNQFPSDIECMRYIATITDKELLKKCHQCVETIVKAKDQQAAEANKNASILLKELDLEKSREESRKQALAAKREKRKEKRKKKKEEQKRKQEEDEENKPKENSELPEDEDEEENDEDVEQEVPIEPPSATTTTTIGISATSATFTNVFGKKRANVVTTPSTNRKNKKNKTKETPPTAHLILPEQHMSLAQQKADKNKINGEPRGGGAGGNSDSDNLDSTDCNSESSSGGKSQELNFVMDVNSSKYPSLLLHSQEEKTSTATSKTQTRLEGEVTPNSLSTSYKTVSLPLSSPNIKLNLTSPKRGQKREEGWKEVVRRSKKLSVPASVVSRIMGRGGCNITAIQDVTGAHIDVDKQKDKNGERMITIRGGTESTRYAVQLINALIQDPAKELEDLIPKNHIRTPASTKSIHANFSSGVGTTAASSKNAFPLGAPTLVTSQATTLSTFQPANKLNKNVPTNVRSSFPVSLPLAYPHPHFALLAAQTMQQIRHPRLPMAQFGGTFSPSPNTWGPFPVRPVNPGNTNSSPKHNNTSRLPNQNGTVLPSESAGLATASCPITVSSVVAASQQLCVTNTRTPSSVRKQLFACVPKTSPPATVISSVTSTCSSLPSVSSAPITSGQAPTTFLPASTSQAQLSSQKMESFSAVPPTKEKVSTQDQPMANLCTPSSTANSCSSSASNTPGAPETHPSSSPTPTSSNTQEEAQPSSVSDLSPMSMPFASNSEPAPLTLTSPRMVAADNQDTSNLPQLAVPAPRVSHRMQPRGSFYSMVPNATIHQDPQSIFVTNPVTLTPPQGPPAAVQLSSAVNIMNGSQMHINPANKSLPPTFGPATLFNHFSSLFDSSQVPANQGWGDGPLSSRVATDASFTVQSAFLGNSVLGHLENMHPDNSKAPGFRPPSQRVSTSPVGLPSIDPSGSSPSSSSAPLASFSGIPGTRVFLQGPAPVGTPSFNRQHFSPHPWTSASNSSTSAPPTLGQPKGVSASQDRKIPPPIGTERLARIRQGGSVAQAPAGTSFVAPVGHSGIWSFGVNAVSEGLSGWSQSVMGNHPMHQQLSDPSTFSQHQPMERDDSGMVAPSNIFHQPMASGFVDFSKGLPISMYGGTIIPSHPQLADVPGGPLFNGLHNPDPAWNPMIKVIQNSTECTDAQQIWPGTWAPHIGNMHLKYVN

SEQ ID NO: 866732 - protein, 1975 aa, Homo sapiens
KAGADIELGCSTPLMEASQEGHLELVKYLLASGANVHATTATGDTALTYACENGHTDVADVLLQAGADLEHESEGGRTPLMKAARAGHLCTVQFLISKGANVNRATANNDHTVVSLACAGGHLAVVELLLAHGADPTHRLKDGSTMLIEAAKGGHTNVVSYLLDYPNNVLSVPTTDVSQLPPPSQDQSQVPRVPTHTLAMVVPPQEPDRTSQENSPALLGVQKGTSKQKSSSLQVADQDLLPSFHPYQPLECIVEETEGKLNELGQRISAIEKAQLKSLELIQGEPLNKDKIEELKKNREEQVQKKKKILKELQKVERQLQMKTQQQFTKEYLETKGQKDTVSLHQQCSHRGVFPEGEGDGSLPEDHFSELPQVDTILFKDNDVDDEQQSPPSAEQIDFVPVQPLSSPQCNFSSDLGSNGTNSLELQKVSGNQQIVGQPQIAITGHDQGLLVQEPDGLMVATPAQTLTDTLDDLIAAVSTRVPTGSNSSSQTTECLTPESCSQTTSNVASQSMPPVYPSVDIDAHTESNHDTALTLACAGGHEELVSVLIARDAKIEHRDKKGFTPLILAATAGHVGVVEILLDKGGDIEAQSERTKDTPLSLACSGGRQEVVDLLLARGANKEHRNVSDYTPLSLAASGGYVNIIKILLNAGAEINSRTGSKLGISPLMLAAMNGHVPAVKLLLDMGSDINAQIETNRNTALTLACFQGRAEVVSLLLDRKANVEHRAKTGLTPLMEAASGGYAEVGRVLLDKGADVNAPPVPSSRDTALTIAADKGHYKFCELLIHRGAHIDVRNKKGNTPLWLASNGGHFDVVQLLVQAGADVDAADNRKITPLMSAFRKGHVKVVQYLVKEVNQFPSDIECMRYIATITDKELLKKCHQCVETIVKAKDQQAAEANKNASILLKELDLEKSREESRKQALAAKREKRKEKRKKKKEEQKRKQEEDEENKPKENSELPEDEDEEENDEDVEQEVPIEPPSATTTTTIGISATSATFTNVFGKKRANVVTTPSTNRKNKKNKTKETPPTAHLILPEQHMSLAQQKADKNKINGEPRGGGAGGNSDSDNLDSTDCNSESSSGGKSQELNFVMDVNSSKYPSLLLHSQEEKTSTATSKTQTRLEGEVTPNSLSTSYKTVSLPLSSPNIKLNLTSPKRGQKREEGWKEVVRRSKKLSVPASVVSRIMGRGGCNITAIQDVTGAHIDVDKQKDKNGERMITIRGGTESTRYAVQLINALIQDPAKELEDLIPKNHIRTPASTKSIHANFSSGVGTTAASSKNAFPLGAPTLVTSQATTLSTFQPANKLNKNVPTNVRSSFPVSLPLAYPHPHFALLAAQTMQQIRHPRLPMAQFGGTFSPSPNTWGPFPVRPVNPGNTNSSPKHNNTSRLPNQNGTVLPSESAGLATASCPITVSSVVAASQQLCVTNTRTPSSVRKQLFACVPKTSPPATVISSVTSTCSSLPSVSSAPITSGQAPTTFLPASTSQAQLSSQKMESFSAVPPTKEKVSTQDQPMANLCTPSSTANSCSSSASNTPGAPETHPSSSPTPTSSNTQEEAQPSSVSDLSPMSMPFASNSEPAPLTLTSPRMVAADNQDTSNLPQLAVPAPRVSHRMQPRGSFYSMVPNATIHQDPQSIFVTNPVTLTPPQGPPAAVQLSSAVNIMNGSQMHINPANKSLPPTFGPATLFNHFSSLFDSSQVPANQGWGDGPLSSRVATDASFTVQSAFLGNSVLGHLENMHPDNSKAPGFRPPSQRVSTSPVGDSPIPSVSSGSSSPLSATSAPPTLGQPKGVSASQDRKIPPPIGTERLARIRQGGSVAQAPAGTSFVAPVGHSGIWSFGVNAVSEGLSGWSQSVMGNHPMHQQLSDPSTFSQHQPMERDDSGMVAPSNIFHQPMASGFVDFSKGLPISMYGGTIIPSHPQLADVPGGPLFNGLHNPDPAWNPMIKVIQNSTECTDAQQIWPGTWAPHIGNMHLKYVN

SEQ ID NO: 866733 - protein, 2109 aa, Homo sapiens
KAGADIELGCSTPLMEASQEGHLELVKYLLASGANVHATTATGDTALTYACENGHTDVADVLLQAGADLEHESEGGRTPLMKAARAGHLCTVQFLISKGANVNRATANNDHTVVSLACAGGHLAVVELLLAHGADPTHRLKDGSTMLIEAAKGGHTNVVSYLLDYPNNVLSVPTTDVSQLPPPSQDQSQVPRVPTHTLAMVVPPQEPDRTSQENSPALLGVQKGTSKQKSSSLQVADQDLLPSFHPYQPLECIVEETEGKLNELGQRISAIEKAQLKSLELIQGEPLNKDKIEELKKNREEQVQKKKKILKELQKVERQLQMKTQQQFTKEYLETKGQKDTVSLHQQCSHRGVFPEGEGDGSLPEDHFSELPQVDTILFKDNDVDDEQQSPPSAEQIDFVPVQPLSSPQCNFSSDLGSNGTNSLELQKVSGNQQIVGQPQIAITGHDQGLLVQEPDGLMVATPAQTLTDTLDDLIAAVSTRVPTGSNSSSQTTECLTPESCSQTTSNVASQSMPPVYPSVDIDAHTESNHDTALTLACAGGHEELVSVLIARDAKIEHRDKKGFTPLILAATAGHVGVVEILLDKGGDIEAQSERTKDTPLSLACSGGRQEVVDLLLARGANKEHRNVSDYTPLSLAASGGYVNIIKILLNAGAEINSRTGSKLGISPLMLAAMNGHVPAVKLLLDMGSDINAQIETNRNTALTLACFQGRAEVVSLLLDRKANVEHRAKTGLTPLMEAASGGYAEVGRVLLDKGADVNAPPVPSSRDTALTIAADKGHYKFCELLIHRGAHIDVRNKKGNTPLWLASNGGHFDVVQLLVQAGADVDAADNRKITPLMSAFRKGHVKVVQYLVKEVNQFPSDIECMRYIATITDKELLKKCHQCVETIVKAKDQQAAEANKNASILLKELDLEKSREESRKQALAAKREKRKEKRKKKKEEQKRKQEEDEENKPKENSELPEDEDEEENDEDVEQEVPIEPPSATTTTTIGISATSATFTNVFGKKRANVVTTPSTNRKNKKNKTKETPPTAHLILPEQHMSLAQQKADKNKINGEPRGGGAGGNSDSDNLDSTDCNSESSSGGKSQELNFVMDVNSSKYPSLLLHSQEEKTSTATSKTQTRLEGEVTPNSLSTSYKTVSLPLSSPNIKLNLTSPKRGQKREEGWKEVVRRSKKLSVPASVVSRIMGRGGCNITAIQDVTGAHIDVDKQKDKNGERMITIRGGTESTRYAVQLINALIQDPAKELEDLIPKNHIRTPASTKSIHANFSSGVGTTAASSKNAFPLGAPTLVTSQATTLSTFQPANKLNKNVPTNVRSSFPVSLPLAYPHPHFALLAAQTMQQIRHPRLPMAQFGGTFSPSPNTWGPFPVRPVNPGNTNSSPKHNNTSRLPNQNGTVLPSESAGLATASCPITVSSVVAASQQLCVTNTRTPSSVRKQLFACVPKTSPPATVISSVTSTCSSLPSVSSAPITSGQAPTTFLPASTSQAQLSSQKMESFSAVPPTKEKVSTQDQPMANLCTPSSTANSCSSSASNTPGAPETHPSSSPTPTSSNTQEEAQPSSVSDLSPMSMPFASNSEPAPLTLTSPRMVAADNQDTSNLPQLAVPAPRVSHRMQPRGSFYSMVPNATIHQDPQSIFVTNPVTLTPPQGPPAAVQLSSAVNIMNGSQMHINPANKSLPPTFGPATLFNHFSSLFDSSQVPANQGWGDGPLSSRVATDASFTVQSAFLGNSVLGHLENMHPDNSKAPGFRPPSQRVSTSPVGLPSIDPSGSSPSSSSAPLASFSGIPGTRVFLQGPAPVGTPSFNRQHFSPHPWTSASNSCDSPIPSVSSGSSSPLSATSAPPTLGQPKGVSASQDRKIPPPIGTERLARIRQGGSVAQAPAGTSFVAPVGHSGIWSFGVNAVSEGLSGWSQSVMGNHPMHQQLSDPSTFSQHQPMERDDSGMVAPSNIFHQPMASGFVDFSKGLPISMYGGTIIPSHPQLADVPGGPLFNGLHNPDPAWNPMIKVIQNSTECTDAQQASLLPSVPALKGEIPSPQLTRPKKRIGRPMVASPNQRHQDHLRPKVPAGVQELTHCPDTPLLPPSDSRGHNSSNSPSLQAGGAEGAGDRGRDTR

SEQ ID NO: 866734 - protein, 2092 aa, Homo sapiens
KAGADIELGCSTPLMEASQEGHLELVKYLLASGANVHATTATGDTALTYACENGHTDVADVLLQAGADLEHESEGGRTPLMKAARAGHLCTVQFLISKGANVNRATANNDHTVVSLACAGGHLAVVELLLAHGADPTHRLKDGSTMLIEAAKGGHTNVVSYLLDYPNNVLSVPTTDVSQLPPPSQDQSQVPRVPTHTLAMVVPPQEPDRTSQENSPALLGVQKGTSKQKSSSLQVADQDLLPSFHPYQPLECIVEETEGKLNELGQRISAIEKAQLKSLELIQGEPLNKDKIEELKKNREEQVQKKKKILKELQKVERQLQMKTQQQFTKEYLETKGQKDTVSLHQQCSHRGVFPEGEGDGSLPEDHFSELPQVDTILFKDNDVDDEQQSPPSAEQIDFVPVQPLSSPQCNFSSDLGSNGTNSLELQKVSGNQQIVGQPQIAITGHDQGLLVQEPDGLMVATPAQTLTDTLDDLIAAVSTRVPTGSNSSSQTTECLTPESCSQTTSNVASQSMPPVYPSVDIDAHTESNHDTALTLACAGGHEELVSVLIARDAKIEHRDKKGFTPLILAATAGHVGVVEILLDKGGDIEAQSERTKDTPLSLACSGGRQEVVDLLLARGANKEHRNVSDYTPLSLAASGGYVNIIKILLNAGAEINSRTGSKLGISPLMLAAMNGHVPAVKLLLDMGSDINAQIETNRNTALTLACFQGRAEVVSLLLDRKANVEHRAKTGLTPLMEAASGGYAEVGRVLLDKGADVNAPPVPSSRDTALTIAADKGHYKFCELLIHRGAHIDVRNKKGNTPLWLASNGGHFDVVQLLVQAGADVDAADNRKITPLMSAFRKGHVKVVQYLVKEVNQFPSDIECMRYIATITDKELLKKCHQCVETIVKAKDQQAAEANKNASILLKELDLEKSREESRKQALAAKREKRKEKRKKKKEEQKRKQEEDEENKPKENSELPEDEDEEENDEDVEQEVPIEPPSATTTTTIGISATSATFTNVFGKKRANVVTTPSTNRKNKKNKTKETPPTAHLILPEQHMSLAQQKADKNKINGEPRGGGAGGNSDSDNLDSTDCNSESSSGGKSQELNFVMDVNSSKYPSLLLHSQEEKTSTATSKTQTRLEGEVTPNSLSTSYKTVSLPLSSPNIKLNLTSPKRGQKREEGWKEVVRRSKKLSVPASVVSRIMGRGGCNITAIQDVTGAHIDVDKQKDKNGERMITIRGGTESTRYAVQLINALIQDPAKELEDLIPKNHIRTPASTKSIHANFSSGVGTTAASSKNAFPLGAPTLVTSQATTLSTFQPANKLNKNVPTNVRSSFPVSLPLAYPHPHFALLAAQTMQQIRHPRLPMAQFGGTFSPSPNTWGPFPVRPVNPGNTNSSPKHNNTSRLPNQNGTVLPSESAGLATASCPITVSSVVAASQQLCVTNTRTPSSVRKQLFACVPKTSPPATVISSVTSTCSSLPSVSSAPITSGQAPTTFLPASTSQAQLSSQKMESFSAVPPTKEKVSTQDQPMANLCTPSSTANSCSSSASNTPGAPETHPSSSPTPTSSNTQEEAQPSSVSDLSPMSMPFASNSEPAPLTLTSPRMVAADNQDTSNLPQLAVPAPRVSHRMQPRGSFYSMVPNATIHQDPQSIFVTNPVTLTPPQGPPAAVQLSSAVNIMNGSQMHINPANKSLPPTFGPATLFNHFSSLFDSSQVPANQGWGDGPLSSRVATDASFTVQSAFLGNSVLGHLENMHPDNSKAPGFRPPSQRVSTSPVGLPSIDPSGSSPSSSSAPLASFSGIPGTRVFLQGPAPVGTPSFNRQHFSPHPWTSASNSSTSAPPTLGQPKGVSASQDRKIPPPIGTERLARIRQGGSVAQAPAGTSFVAPVGHSGIWSFGVNAVSEGLSGWSQSVMGNHPMHQQLSDPSTFSQHQPMERDDSGMVAPSNIFHQPMASGFVDFSKGLPISMYGGTIIPSHPQLADVPGGPLFNGLHNPDPAWNPMIKVIQNSTECTDAQQASLLPSVPALKGEIPSPQLTRPKKRIGRPMVASPNQRHQDHLRPKVPAGVQELTHCPDTPLLPPSDSRGHNSSNSPSLQAGGAEGAGDRGRDTR

SEQ ID NO: 866735 - protein, 1987 aa, Homo sapiens
KAGADIELGCSTPLMEASQEGHLELVKYLLASGANVHATTATGDTALTYACENGHTDVADVLLQAGADLEHESEGGRTPLMKAARAGHLCTVQFLISKGANVNRATANNDHTVVSLACAGGHLAVVELLLAHGADPTHRLKDGSTMLIEAAKGGHTNVVSYLLDYPNNVLSVPTTDVSQLPPPSQDQSQVPRVPTHTLAMVVPPQEPDRTSQENSPALLGVQKGTSKQKSSSLQVADQDLLPSFHPYQPLECIVEETEGKLNELGQRISAIEKAQLKSLELIQGEPLNKDKIEELKKNREEQVQKKKKILKELQKVERQLQMKTQQQFTKEYLETKGQKDTVSLHQQCSHRGVFPEGEGDGSLPEDHFSELPQVDTILFKDNDVDDEQQSPPSAEQIDFVPVQPLSSPQCNFSSDLGSNGTNSLELQKVSGNQQIVGQPQIAITGHDQGLLVQEPDGLMVATPAQTLTDTLDDLIAAVSTRVPTGSNSSSQTTECLTPESCSQTTSNVASQSMPPVYPSVDIDAHTESNHDTALTLACAGGHEELVSVLIARDAKIEHRDKKGFTPLILAATAGHVGVVEILLDKGGDIEAQSERTKDTPLSLACSGGRQEVVDLLLARGANKEHRNVSDYTPLSLAASGGYVNIIKILLNAGAEINSRTGSKLGISPLMLAAMNGHVPAVKLLLDMGSDINAQIETNRNTALTLACFQGRAEVVSLLLDRKANVEHRAKTGLTPLMEAASGGYAEVGRVLLDKGADVNAPPVPSSRDTALTIAADKGHYKFCELLIHRGAHIDVRNKKGNTPLWLASNGGHFDVVQLLVQAGADVDAADNRKITPLMSAFRKELLKKCHQCVETIVKAKDQQAAEANKNASILLKELDLEKSREESRKQALAAKREKRKEKRKKKKEEQKRKQEEDEENKPKENSELPEDEDEEENDEDVEQEVPIEPPSATTTTTIGISATSATFTNVFGKKRANVVTTPSTNRKNKKNKTKETPPTAHLILPEQHMSLAQQKADKNKINGEPRGGGAGGNSDSDNLDSTDCNSESSSGGKSQELNFVMDVNSSKYPSLLLHSQEEKTSTATSKTQTRLEGEVTPNSLSTSYKTVSLPLSSPNIKLNLTSPKRGQKREEGWKEVVRRSKKLSVPASVVSRIMGRGGCNITAIQDVTGAHIDVDKQKDKNGERMITIRGGTESTRYAVQLINALIQDPAKELEDLIPKNHIRTPASTKSIHANFSSGVGTTAASSKNAFPLGAPTLVTSQATTLSTFQPANKLNKNVPTNVRSSFPVSLPLAYPHPHFALLAAQTMQQIRHPRLPMAQFGGTFSPSPNTWGPFPVRPVNPGNTNSSPKHNNTSRLPNQNGTVLPSESAGLATASCPITVSSVVAASQQLCVTNTRTPSSVRKQLFACVPKTSPPATVISSVTSTCSSLPSVSSAPITSGQAPTTFLPASTSQAQLSSQKMESFSAVPPTKEKVSTQDQPMANLCTPSSTANSCSSSASNTPGAPETHPSSSPTPTSSNTQEEAQPSSVSDLSPMSMPFASNSEPAPLTLTSPRMVAADNQDTSNLPQLAVPAPRVSHRMQPRGSFYSMVPNATIHQDPQSIFVTNPVTLTPPQGPPAAVQLSSAVNIMNGSQMHINPANKSLPPTFGPATLFNHFSSLFDSSQVPANQGWGDGPLSSRVATDASFTVQSAFLGNSVLGHLENMHPDNSKAPGFRPPSQRVSTSPVGLPSIDPSGSSPSSSSAPLASFSGIPGTRVFLQGPAPVGTPSFNRQHFSPHPWTSASNSCDSPIPSVSSGSSSPLSATSAPPTLGQPKGVSASQDRKIPPPIGTERLARIRQGGSVAQAPAGTSFVAPVGHSGIWSFGVNAVSEGLSGWSQSVMGNHPMHQQLSDPSTFSQHQPMERDDSGMVAPSNIFHQPMASGFVDFSKGLPISMYGGTIIPSHPQLADVPGGPLFNGLHNPDPAWNPMIKVIQNSTECTDAQQVKWA

SEQ ID NO: 866736 - protein, 1313 aa, Homo sapiens
YRRPTRPILTYLWDLKIKTMELLDTDSRRIVTRGWEGYAEVGRVLLDKGADVNAPPVPSSRDTALTIAADKGHYKFCELLIHRGAHIDVRNKKGNTPLWLASNGGHFDVVQLLVQAGADVDAADNRKITPLMSAFRKGHVKVVQYLVKEVNQFPSDIECMRYIATITDKELLKKCHQCVETIVKAKDQQAAEANKNASILLKELDLEKSREESRKQALAAKREKRKEKRKKKKEEQKRKQEEDEENKPKENSELPEDEDEEENDEDVEQEVPIEPPSATTTTTIGISATSATFTNVFGKKRANVVTTPSTNRKNKKNKTKETPPTAHLILPEQHMSLAQQKADKNKINGEPRGGGAGGNSDSDNLDSTDCNSESSSGGKSQELNFVMDVNSSKYPSLLLHSQEEKTSTATSKTQTRLEGEVTPNSLSTSYKTVSLPLSSPNIKLNLTSPKRGQKREEGWKEVVRRSKKLSVPASVVSRIMGRGGCNITAIQDVTGAHIDVDKQKDKNGERMITIRGGTESTRYAVQLINALIQDPAKELEDLIPKNHIRTPASTKSIHANFSSGVGTTAASSKNAFPLGAPTLVTSQATTLSTFQPANKLNKNVPTNVRSSFPVSLPLAYPHPHFALLAAQTMQQIRHPRLPMAQFGGTFSPSPNTWGPFPVRPVNPGNTNSSPKHNNTSRLPNQNGTVLPSESAGLATASCPITVSSVVAASQQLCVTNTRTPSSVRKQLFACVPKTSPPATVISSVTSTCSSLPSVSSAPITSGQAPTTFLPASTSQAQLSSQKMESFSAVPPTKEKVSTQDQPMANLCTPSSTANSCSSSASNTPGAPETHPSSSPTPTSSNTQEEAQPSSVSDLSPMSMPFASNSEPAPLTLTSPRMVAADNQDTSNLPQLAVPAPRVSHRMQPRGSFYSMVPNATIHQDPQSIFVTNPVTLTPPQGPPAAVQLSSAVNIMNGSQMHINPANKSLPPTFGPATLFNHFSSLFDSSQVPANQGWGDGPLSSRVATDASFTVQSAFLGNSVLGHLENMHPDNSKAPGFRPPSQRVSTSPVGLPSIDPSGSSPSSSSAPLASFSGIPGTRVFLQGPAPVGTPSFNRQHFSPHPWTSASNSCDSPIPSVSSGSSSPLSATSAPPTLGQPKGVSASQDRKIPPPIGTERLARIRQGGSVAQAPAGTSFVAPVGHSGIWSFGVNAVSEGLSGWSQSVMGNHPMHQQLSDPSTFSQHQPMERDDSGMVAPSNIFHQPMASGFVDFSKGLPISMYGGTIIPSHPQLADVPGGPLFNGLHNPDPAWNPMIKVIQNSTECTDAQQVKWA

SEQ ID NO: 866737 - protein, 1286 aa, Homo sapiens
ALTIAASLEEGTGGSINICSFIKKNSSNLCIPSRDTALTIAADKGHYKFCELLIHRGAHIDVRNKKGNTPLWLASNGGHFDVVQLLVQAGADVDAADNRKITPLMSAFRKGHVKVVQYLVKEVNQFPSDIECMRYIATITDKELLKKCHQCVETIVKAKDQQAAEANKNASILLKELDLEKSREESRKQALAAKREKRKEKRKKKKEEQKRKQEEDEENKPKENSELPEDEDEEENDEDVEQEVPIEPPSATTTTTIGISATSATFTNVFGKKRANVVTTPSTNRKNKKNKTKETPPTAHLILPEQHMSLAQQKADKNKINGEPRGGGAGGNSDSDNLDSTDCNSESSSGGKSQELNFVMDVNSSKYPSLLLHSQEEKTSTATSKTQTRLEGEVTPNSLSTSYKTVSLPLSSPNIKLNLTSPKRGQKREEGWKEVVRRSKKLSVPASVVSRIMGRGGCNITAIQDVTGAHIDVDKQKDKNGERMITIRGGTESTRYAVQLINALIQDPAKELEDLIPKNHIRTPASTKSIHANFSSGVGTTAASSKNAFPLGAPTLVTSQATTLSTFQPANKLNKNVPTNVRSSFPVSLPLAYPHPHFALLAAQTMQQIRHPRLPMAQFGGTFSPSPNTWGPFPVRPVNPGNTNSSPKHNNTSRLPNQNGTVLPSESAGLATASCPITVSSVVAASQQLCVTNTRTPSSVRKQLFACVPKTSPPATVISSVTSTCSSLPSVSSAPITSGQAPTTFLPASTSQAQLSSQKMESFSAVPPTKEKVSTQDQPMANLCTPSSTANSCSSSASNTPGAPETHPSSSPTPTSSNTQEEAQPSSVSDLSPMSMPFASNSEPAPLTLTSPRMVAADNQDTSNLPQLAVPAPRVSHRMQPRGSFYSMVPNATIHQDPQSIFVTNPVTLTPPQGPPAAVQLSSAVNIMNGSQMHINPANKSLPPTFGPATLFNHFSSLFDSSQVPANQGWGDGPLSSRVATDASFTVQSAFLGNSVLGHLENMHPDNSKAPGFRPPSQRVSTSPVGLPSIDPSGSSPSSSSAPLASFSGIPGTRVFLQGPAPVGTPSFNRQHFSPHPWTSASNSCDSPIPSVSSGSSSPLSATSAPPTLGQPKGVSASQDRKIPPPIGTERLARIRQGGSVAQAPAGTSFVAPVGHSGIWSFGVNAVSEGLSGWSQSVMGNHPMHQQLSDPSTFSQHQPMERDDSGMVAPSNIFHQPMASGFVDFSKGLPISMYGGTIIPSHPQLADVPGGPLFNGLHNPDPAWNPMIKVIQNSTECTDAQQVKWA

SEQ ID NO: 866738 - protein, 1811 aa, Homo sapiens
KAGADIELGCSTPLMEASQEGHLELVKYLLASGANVHATTATGDTALTYACENGHTDVADVLLQAGADLEHESEGGRTPLMKAARAGHLCTVQFLISKGANVNRATANNDHTVVSLACAGGHLAVVELLLAHGADPTHRLKDGSTMLIEAAKGGHTNVVSYLLDYPNNVLSVPTTDVSQLPPPSQDQSQVPRVPTHTLAMVVPPQEPDRTSQENSPALLGVQKGTSKQKSSSLQVADQDLLPSFHPYQPLECIVEETEGKLNELGQRISAIEKAQLKSLELIQGEPLNKDKIEELKKNREEQVQKKKKILKELQKVERQLQMKTQQQFTKEYLETKGQKDTVSLHQQCSHRGVFPEGEGDGSLPEDHFSELPQVDTILFKDNDVDDEQQSPPSAEQIDFVPVQPLSSPQCNFSSDLGSNGTNSLELQKVSGNQQIVGQPQIAITGHDQGLLVQEPDGLMVATPAQTLTDTLDDLIAAVSTRVPTGSNSSSQTTECLTPESCSQTTSNVASQSMPPVYPSVDIDAHTESNHDTALTLACAGGHEELVSVLIARDAKIEHRDKKGFTPLILAATAGHVGVVEILLDKGGDIEAQSERTKDTPLSLACSGGRQEVVDLLLARGANKEHRNVSDYTPLSLAASGGYVNIIKILLNAGAEINSRTGSKLGISPLMLAAMNGHVPAVKLLLDMGSDINAQIETNRNTALTLACFQGRAEVVSLLLDRKANVEHRAKTGLTPLMEAASGGYAEVGRVLLDKGADVNAPPVPSSRDTALTIAADKGHYKFCELLIHRGAHIDVRNKKGNTPLWLASNGGHFDVVQLLVQAGADVDAADNRKITPLMSAFRKGHVKVVQYLVKEVNQFPSDIECMRYIATITDKELLKKCHQCVETIVKAKDQQAAEANKNASILLKELDLEKSREESRKQALAAKREKRKEKRKKKKEEQKRKQEEDEENKPKENSELPEDEDEEENDEDVEQEVPIEPPSATTTTTIGISATSATFTNVFGKKRANVVTTPSTNRKNKKNKTKETPPTAHLILPEQHMSLAQQKADKNKINGEPRGGGAGGNSDSDNLDSTDCNSESSSGGKSQELNFVMDVNSSKYPSLLLHSQEEKTSTATSKTQTRLEGEVTPNSLSTSYKTVSLPLSSPNIKLNLTSPKRGQKREEGWKEVVRRSKKLSVPASVVSRIMGRGGCNITAIQDVTGAHIDVDKQKDKNGERMITIRGGTESTRYAVQLINALIQDPAKELEDLIPKNHIRTPASTKSIHANFSSGVGTTAASSKNAFPLGAPTLVTSQATTLSTFQPANKLNKNVPTNVRSSFPVSLPLAYPHPHFALLAAQTMQQIRHPRLPMAQFGGTFSPSPNTWGPFPVRPVNPGNTNSSPKHNNTSRLPNQNGTVLPSESAGLATASCPITVSSVVAASQQLCVTNTRTPSSVRKQLFACVPKTSPPATVISSVTSTCSSLPSVSSAPITSGQAPTTFLPASTSQAQLSSQKMESFSAVPPTKEKVSTQDQPMANLCTPSSTANSCSSSASNTPGAPETHPSSSPTPTSSNTQEEAQPSSVSDLSPMSMPFASNSEPAPLTLTSPRMVAADNQDTSNLPQLAVPAPRVSHRMQPRGSFYSMVPNATIHQDPQSIFVTNPVTLTPPQGPPAAVQLSSAVNIMNGSQMHINPANKSLPPTFGPATLFNHFSSLFDSSQVPANQGWGDGPLSSRVATDASFTVQSAFLGNSVLGHLGVSTSPVGLPSIDPSGSSPSSSSAPLASFSGIPGTRVFLQGPAPVGTPSFNRQHFSPHPWTSASNSCRNPGGTLPKEF

SEQ ID NO: 866739 - protein, 1243 aa, Homo sapiens
FVGTKGIPHLVTHDARTTRYPDPLIKVNDTIQIDLETGKITDFIKFDTGNLCMVTGGGSPLMSAFRKGHVKVVQYLVKEVNQFPSDIECMRYIATITDKELLKKCHQCVETIVKAKDQQAAEANKNASILLKELDLEKSREESRKQALAAKREKRKEKRKKKKEEQKRKQEEDEENKPKENSELPEDEDEEENDEDVEQEVPIEPPSATTTTTIGISATSATFTNVFGKKRANVVTTPSTNRKNKKNKTKETPPTAHLILPEQHMSLAQQKADKNKINGEPRGGGAGGNSDSDNLDSTDCNSESSSGGKSQELNFVMDVNSSKYPSLLLHSQEEKTSTATSKTQTRLEGEVTPNSLSTSYKTVSLPLSSPNIKLNLTSPKRGQKREEGWKEVVRRSKKLSVPASVVSRIMGRGGCNITAIQDVTGAHIDVDKQKDKNGERMITIRGGTESTRYAVQLINALIQDPAKELEDLIPKNHIRTPASTKSIHANFSSGVGTTAASSKNAFPLGAPTLVTSQATTLSTFQPANKLNKNVPTNVRSSFPVSLPLAYPHPHFALLAAQTMQQIRHPRLPMAQFGGTFSPSPNTWGPFPVRPVNPGNTNSSPKHNNTSRLPNQNGTVLPSESAGLATASCPITVSSVVAASQQLCVTNTRTPSSVRKQLFACVPKTSPPATVISSVTSTCSSLPSVSSAPITSGQAPTTFLPASTSQAQLSSQKMESFSAVPPTKEKVSTQDQPMANLCTPSSTANSCSSSASNTPGAPETHPSSSPTPTSSNTQEEAQPSSVSDLSPMSMPFASNSEPAPLTLTSPRMVAADNQDTSNLPQLAVPAPRVSHRMQPRGSFYSMVPNATIHQDPQSIFVTNPVTLTPPQGPPAAVQLSSAVNIMNGSQMHINPANKSLPPTFGPATLFNHFSSLFDSSQVPANQGWGDGPLSSRVATDASFTVQSAFLGNSVLGHLENMHPDNSKAPGFRPPSQRVSTSPVGLPSIDPSGSSPSSSSAPLASFSGIPGTRVFLQGPAPVGTPSFNRQHFSPHPWTSASNSCDSPIPSVSSGSSSPLSATSAPPTLGQPKGVSASQDRKIPPPIGTERLARIRQGGSVAQAPAGTSFVAPVGHSGIWSFGVNAVSEGLSGWSQSVMGNHPMHQQLSDPSTFSQHQPMERDDSGMVAPSNIFHQPMASGFVDFSKGLPISMYGGTIIPSHPQLADVPGGPLFNGLHNPDPAWNPMIKVIQNSTECTDAQQVKWA

SEQ ID NO: 866740 - protein, 1182 aa, Homo sapiens
MSAFRKGHVKVVQYLVKEVNQFPSDIECMRYIATITDKELLKKCHQCVETIVKAKDQQAAEANKNASILLKELDLEKSREESRKQALAAKREKRKEKRKKKKEEQKRKQEEDEENKPKENSELPEDEDEEENDEDVEQEVPIEPPSATTTTTIGISATSATFTNVFGKKRANVVTTPSTNRKNKKNKTKETPPTAHLILPEQHMSLAQQKADKNKINGEPRGGGAGGNSDSDNLDSTDCNSESSSGGKSQELNFVMDVNSSKYPSLLLHSQEEKTSTATSKTQTRLEGEVTPNSLSTSYKTVSLPLSSPNIKLNLTSPKRGQKREEGWKEVVRRSKKLSVPASVVSRIMGRGGCNITAIQDVTGAHIDVDKQKDKNGERMITIRGGTESTRYAVQLINALIQDPAKELEDLIPKNHIRTPASTKSIHANFSSGVGTTAASSKNAFPLGAPTLVTSQATTLSTFQPANKLNKNVPTNVRSSFPVSLPLAYPHPHFALLAAQTMQQIRHPRLPMAQFGGTFSPSPNTWGPFPVRPVNPGNTNSSPKHNNTSRLPNQNGTVLPSESAGLATASCPITVSSVVAASQQLCVTNTRTPSSVRKQLFACVPKTSPPATVISSVTSTCSSLPSVSSAPITSGQAPTTFLPASTSQAQLSSQKMESFSAVPPTKEKVSTQDQPMANLCTPSSTANSCSSSASNTPGAPETHPSSSPTPTSSNTQEEAQPSSVSDLSPMSMPFASNSEPAPLTLTSPRMVAADNQDTSNLPQLAVPAPRVSHRMQPRGSFYSMVPNATIHQDPQSIFVTNPVTLTPPQGPPAAVQLSSAVNIMNGSQMHINPANKSLPPTFGPATLFNHFSSLFDSSQVPANQGWGDGPLSSRVATDASFTVQSAFLGNSVLGHLENMHPDNSKAPGFRPPSQRVSTSPVGLPSIDPSGSSPSSSSAPLASFSGIPGTRVFLQGPAPVGTPSFNRQHFSPHPWTSASNSCDSPIPSVSSGSSSPLSATSAPPTLGQPKGVSASQDRKIPPPIGTERLARIRQGGSVAQAPAGTSFVAPVGHSGIWSFGVNAVSEGLSGWSQSVMGNHPMHQQLSDPSTFSQHQPMERDDSGMVAPSNIFHQPMASGFVDFSKGLPISMYGGTIIPSHPQLADVPGGPLFNGLHNPDPAWNPMIKVIQNSTECTDAQQVKWA

SEQ ID NO: 866741 - protein, 1622 aa, Homo sapiens
KAGADIELGCSTPLMEASQEGHLELVKYLLASGANVHATTATGDTALTYACENGHTDVADVLLQAGADLEHESEGGRTPLMKAARAGHLCTVQFLISKGANVNRATANNDHTVVSLACAGGHLAVVELLLAHGADPTHRLKDGSTMLIEAAKGGHTNVVSYLLDYPNNVLSVPTTDVSQLPPPSQDQSQVPRVPTHTLAMVVPPQEPDRTSQENSPALLGVQKGTSKQKSSSLQVADQDLLPSFHPYQPLECIVEETEGKLNELGQRISAIEKAQLKSLELIQGEPLNKDKIEELKKNREEQVQKKKKILKELQKVERQLQMKTQQQFTKEYLETKGQKDTVSLHQQCSHRGVFPEGEGDGSLPEDHFSELPQVDTILFKDNDVDDEQQSPPSAEQIDFVPVQPLSSPQCNFSSDLGSNGTNSLELQKVSGNQQIVGQPQIAITGHDQGLLVQEPDGLMVATPAQTLTDTLDDLIAAVSTRVPTGSNSSSQTTECLTPESCSQTTSNVASQSMPPVYPSVDIDAHTESNHDTALTLACAGGHEELVSVLIARDAKIEHRDKKGFTPLILAATAGHVGVVEILLDKGGDIEAQSERTKDTPLSLACSGGRQEVVDLLLARGANKEHRNVSDYTPLSLAASGGYVNIIKILLNAGAEINSRTGSKLGISPLMLAAMNGHVPAVKLLLDMGSDINAQIETNRNTALTLACFQGRAEVVSLLLDRKANVEHRAKTGLTPLMEAASGGYAEVGRVLLDKGADVNAPPVPSSRDTALTIAADKGHYKFCELLIHRGAHIDVRNKKGNTPLWLASNGGHFDVVQLLVQAGADVDAADNRKITPLMSAFRKGHVKVVQYLVKEVNQFPSDIECMRYIATITDKELLKKCHQCVETIVKAKDQQAAEANKNASILLKELDLEKSREESRKQALAAKREKRKEKRKKKKEEQKRKQEEDEENKPKENSELPEDEDEEENDEDVEQEVPIEPPSATTTTTIGISATSATFTNVFGKKRANVVTTPSTNRKNKKNKTKETPPTAHLILPEQHMSLAQQKADKNKINGEPRGGGAGGNSDSDNLDSTDCNSESSSGGKSQELNFVMDVNSSKYPSLLLHSQEEKTSTATSKTQTRLEGEVTPNSLSTSYKTVSLPLSSPNIKLNLTSPKRGQKREEGWKEVVRRSKKLSVPASVVSRIMGRGGCNITAIQDVTGAHIDVDKQKDKNGERMITIRGGTESTRYAVQLINALIQDPAKELEDLIPKNHIRTPASTKSIHANFSSGVGTTAASSKNAFPLGAPTLVTSQATTLSTFQPANKLNKNVPTNVRSSFPVSLPLAYPHPHFALLAAQTMQQIRHPRLPMAQFGGTFSPSPNTWGPFPVRPVNPGNTNSSPKHNNTSRLPNQNGTVLPSESAGLATASCPITVSSVVAASQQLCVTNTRTPSSVRKQLFACVPKTSPPATVISSVTSTCSSLPSVSSAPITSGQAPTTFLPASTSQAQLSSQKMESFSAVPPTKEKVSTQDQPMANLCTPSSTANSCSSSASNTPGAPETHPSSSPTPTSSNTQEEAQPSSVSDLSPMSMPATLYRADVNAQSSRLCGKCKRHDIRPKSDTLDGCASFVCYWKEEWDYWMGEF

SEQ ID NO: 866742 - protein, 956 aa, Homo sapiens
MATDSDNLDSTDCNSESSSGGKSQELNFVMDVNSSKYPSLLLHSQEEKTSTATSKTQTRLEGEVTPNSLSTSYKTVSLPLSSPNIKLNLTSPKRGQKREEGWKEVVRRSKKLSVPASVVSRIMGRGGCNITAIQDVTGAHIDVDKQKDKNGERMITIRGGTESTRYAVQLINALIQDPAKELEDLIPKNHIRTPASTKSIHANFSSGVGTTAASSKNAFPLGAPTLVTSQATTLSTFQPANKLNKNVPTNVRSSFPVSLPLAYPHPHFALLAAQTMQQIRHPRLPMAQFGGTFSPSPNTWGPFPVRPVNPGNTNSSPKHNNTSRLPNQNGTVLPSESAGLATASCPITVSSVVAASQQLCVTNTRTPSSVRKQLFACVPKTSPPATVISSVTSTCSSLPSVSSAPITSGQAPTTFLPASTSQAQLSSQKMESFSAVPPTKEKVSTQDQPMANLCTPSSTANSCSSSASNTPGAPETHPSSSPTPTSSNTQEEAQPSSVSDLSPMSMPFASNSEPAPLTLTSPRMVAADNQDTSNLPQLAVPAPRVSHRMQPRGSFYSMVPNATIHQDPQSIFVTNPVTLTPPQGPPAAVQLSSAVNIMNGSQMHINPANKSLPPTFGPATLFNHFSSLFDSSQVPANQGWGDGPLSSRVATDASFTVQSAFLGNSVLGHLENMHPDNSKAPGFRPPSQRVSTSPVGLPSIDPSGSSPSSSSAPLASFSGIPGTRVFLQGPAPVGTPSFNRQHFSPHPWTSASNSCDSPIPSVSSGSSSPLSATSAPPTLGQPKGVSASQDRKIPPPIGTERLARIRQGGSVAQAPAGTSFVAPVGHSGIWSFGVNAVSEGLSGWSQSVMGNHPMHQQLSDPSTFSQHQPMERDDSGMVAPSNIFHQPMASGFVDFSKGLPISMYGGTIIPSHPQLADVPGGPLFNGLHNPDPAWNPMIKVIQNSTECTDAQQVKWA

SEQ ID NO: 866743 - protein, 966 aa, Homo sapiens
ELLLLAFFSLLFMLQCASAEAHCNSESSSGGKSQELNFVMDVNSSKYPSLLLHSQEEKTSTATSKTQTRLEGEVTPNSLSTSYKTVSLPLSSPNIKLNLTSPKRGQKREEGWKEVVRRSKKLSVPASVVSRIMGRGGCNITAIQDVTGAHIDVDKQKDKNGERMITIRGGTESTRYAVQLINALIQDPAKELEDLIPKNHIRTPASTKSIHANFSSGVGTTAASSKNAFPLGAPTLVTSQATTLSTFQPANKLNKNVPTNVRSSFPVSLPLAYPHPHFALLAAQTMQQIRHPRLPMAQFGGTFSPSPNTWGPFPVRPVNPGNTNSSPKHNNTSRLPNQNGTVLPSESAGLATASCPITVSSVVAASQQLCVTNTRTPSSVRKQLFACVPKTSPPATVISSVTSTCSSLPSVSSAPITSGQAPTTFLPASTSQAQLSSQKMESFSAVPPTKEKVSTQDQPMANLCTPSSTANSCSSSASNTPGAPETHPSSSPTPTSSNTQEEAQPSSVSDLSPMSMPFASNSEPAPLTLTSPRMVAADNQDTSNLPQLAVPAPRVSHRMQPRGSFYSMVPNATIHQDPQSIFVTNPVTLTPPQGPPAAVQLSSAVNIMNGSQMHINPANKSLPPTFGPATLFNHFSSLFDSSQVPANQGWGDGPLSSRVATDASFTVQSAFLGNSVLGHLENMHPDNSKAPGFRPPSQRVSTSPVGLPSIDPSGSSPSSSSAPLASFSGIPGTRVFLQGPAPVGTPSFNRQHFSPHPWTSASNSCDSPIPSVSSGSSSPLSATSAPPTLGQPKGVSASQDRKIPPPIGTERLARIRQGGSVAQAPAGTSFVAPVGHSGIWSFGVNAVSEGLSGWSQSVMGNHPMHQQLSDPSTFSQHQPMERDDSGMVAPSNIFHQPMASGFVDFSKGLPISMYGGTIIPSHPQLADVPGGPLFNGLHNPDPAWNPMIKVIQNSTECTDAQQVKWA

SEQ ID NO: 866744 - protein, 962 aa, Homo sapiens
STGPRAESLLQCASRKQHCNSESSSGGKSQELNFVMDVNSSKYPSLLLHSQEEKTSTATSKTQTRLEGEVTPNSLSTSYKTVSLPLSSPNIKLNLTSPKRGQKREEGWKEVVRRSKKLSVPASVVSRIMGRGGCNITAIQDVTGAHIDVDKQKDKNGERMITIRGGTESTRYAVQLINALIQDPAKELEDLIPKNHIRTPASTKSIHANFSSGVGTTAASSKNAFPLGAPTLVTSQATTLSTFQPANKLNKNVPTNVRSSFPVSLPLAYPHPHFALLAAQTMQQIRHPRLPMAQFGGTFSPSPNTWGPFPVRPVNPGNTNSSPKHNNTSRLPNQNGTVLPSESAGLATASCPITVSSVVAASQQLCVTNTRTPSSVRKQLFACVPKTSPPATVISSVTSTCSSLPSVSSAPITSGQAPTTFLPASTSQAQLSSQKMESFSAVPPTKEKVSTQDQPMANLCTPSSTANSCSSSASNTPGAPETHPSSSPTPTSSNTQEEAQPSSVSDLSPMSMPFASNSEPAPLTLTSPRMVAADNQDTSNLPQLAVPAPRVSHRMQPRGSFYSMVPNATIHQDPQSIFVTNPVTLTPPQGPPAAVQLSSAVNIMNGSQMHINPANKSLPPTFGPATLFNHFSSLFDSSQVPANQGWGDGPLSSRVATDASFTVQSAFLGNSVLGHLENMHPDNSKAPGFRPPSQRVSTSPVGLPSIDPSGSSPSSSSAPLASFSGIPGTRVFLQGPAPVGTPSFNRQHFSPHPWTSASNSCDSPIPSVSSGSSSPLSATSAPPTLGQPKGVSASQDRKIPPPIGTERLARIRQGGSVAQAPAGTSFVAPVGHSGIWSFGVNAVSEGLSGWSQSVMGNHPMHQQLSDPSTFSQHQPMERDDSGMVAPSNIFHQPMASGFVDFSKGLPISMYGGTIIPSHPQLADVPGGPLFNGLHNPDPAWNPMIKVIQNSTECTDAQQVKWA

SEQ ID NO: 866745 - protein, 1326 aa, Homo sapiens
KAGADIELGCSTPLMEASQEGHLELVKYLLASGANVHATTATGDTALTYACENGHTDVADVLLQAGADLEHESEGGRTPLMKAARAGHLCTVQFLISKGANVNRATANNDHTVVSLACAGGHLAVVELLLAHGADPTHRLKDGSTMLIEAAKGGHTNVVSYLLDYPNNVLSVPTTDVSQLPPPSQDQSQVPRVPTHTLAMVVPPQEPDRTSQENSPALLGVQKGTSKQKSSSLQVADQDLLPSFHPYQPLECIVEETEGKLNELGQRISAIEKAQLKSLELIQGEPLNKDKIEELKKNREEQVQKKKKILKELQKVERQLQMKTQQQFTKEYLETKGQKDTVSLHQQCSHRGVFPEGEGDGSLPEDHFSELPQVDTILFKDNDVDDEQQSPPSAEQIDFVPVQPLSSPQCNFSSDLGSNGTNSLELQKVSGNQQIVGQPQIAITGHDQGLLVQEPDGLMVATPAQTLTDTLDDLIAAVSTRVPTGSNSSSQTTECLTPESCSQTTSNVASQSMPPVYPSVDIDAHTESNHDTALTLACAGGHEELVSVLIARDAKIEHRDKKGFTPLILAATAGHVGVVEILLDKGGDIEAQSERTKDTPLSLACSGGRQEVVDLLLARGANKEHRNVSDYTPLSLAASGGYVNIIKILLNAGAEINSRTGSKLGISPLMLAAMNGHVPAVKLLLDMGSDINAQIETNRNTALTLACFQGRAEVVSLLLDRKANVEHRAKTGLTPLMEAASGGYAEVGRVLLDKGADVNAPPVPSSRDTALTIAADKGHYKFCELLIHRGAHIDVRNKKGNTPLWLASNGGHFDVVQLLVQAGADVDAADNRKITPLMSAFRKGHVKVVQYLVKEVNQFPSDIECMRYIATITDKELLKKCHQCVETIVKAKDQQAAEANKNASILLKELDLEKSREESRKQALAAKREKRKEKRKKKKEEQKRKQEEDEENKPKENSELPEDEDEEENDEDVEQEVPIEPPSATTTTTIGISATSATFTNVFGKKRANVVTTPSTNRKNKKNKTKETPPTAHLILPEQHMSLAQQKADKNKINGEPRGGGAGGNSDSDNLDSTDCNSESSSGGKSQELNFVMDVNSSKYPSLLLHSQEEKTSTATSKTQTRLEGEVTPNSLSTSYKTVSLPLSSPNIKLNLTSPKRGQKREEGWKEVVRRSKKLSVPASVVSRIMGRGGCNITAIQDVTGAHIDVDKQKDKNGERMITIRGGTESTRYAVQLINALIQDPAKELEDLIPKNHIRTPASTKSIHANFSSGVGTTAASSKNAFPLGAPTLVTSQATTLSTTPLRLEQTISLTFVQLLSTLLLLSDPF

SEQ ID NO: 866746 - protein, 1220 aa, Homo sapiens
KAGADIELGCSTPLMEASQEGHLELVKYLLASGANVHATTATGDTALTYACENGHTDVADVLLQAGADLEHESEGGRTPLMKAARAGHLCTVQFLISKGANVNRATANNDHTVVSLACAGGHLAVVELLLAHGADPTHRLKDGSTMLIEAAKGGHTNVVSYLLDYPNNVLSVPTTDVSQLPPPSQDQSQVPRVPTHTLAMVVPPQEPDRTSQENSPALLGVQKGTSKQKSSSLQVADQDLLPSFHPYQPLECIVEETEGKLNELGQRISAIEKAQLKSLELIQGEPLNKDKIEELKKNREEQVQKKKKILKELQKVERQLQMKTQQQFTKEYLETKGQKDTVSLHQQCSHRGVFPEGEGDGSLPEDHFSELPQVDTILFKDNDVDDEQQSPPSAEQIDFVPVQPLSSPQCNFSSDLGSNGTNSLELQKVSGNQQIVGQPQIAITGHDQGLLVQEPDGLMVATPAQTLTDTLDDLIAAVSTRVPTGSNSSSQTTECLTPESCSQTTSNVASQSMPPVYPSVDIDAHTESNHDTALTLACAGGHEELVSVLIARDAKIEHRDKKGFTPLILAATAGHVGVVEILLDKGGDIEAQSERTKDTPLSLACSGGRQEVVDLLLARGANKEHRNVSDYTPLSLAASGGYVNIIKILLNAGAEINSRTGSKLGISPLMLAAMNGHVPAVKLLLDMGSDINAQIETNRNTALTLACFQGRAEVVSLLLDRKANVEHRAKTGLTPLMEAASGGYAEVGRVLLDKGADVNAPPVPSSRDTALTIAADKGHYKFCELLIHRGAHIDVRNKKGNTPLWLASNGGHFDVVQLLVQAGADVDAADNRKITPLMSAFRKGHVKVVQYLVKEVNQFPSDIECMRYIATITDKELLKKCHQCVETIVKAKDQQAAEANKNASILLKELDLEKSREESRKQALAAKREKRKEKRKKKKEEQKRKQEEDEENKPKENSELPEDEDEEENDEDVEQEVPIEPPSATTTTTIGISATSATFTNVFGKKRANVVTTPSTNRKNKKNKTKETPPTAHLILPEQHMSLAQQKADKNKINGEPRGGGAGGNSDSDNLDSTDCNSESSSGGKSQELNFVMDVNSSKYPSLLLHSQEEKTSTATSKTQTRLEGEVTPNSLSTSYKTVSLPLSSPNIKLNLTSPKRGQKREEGWKEVVRRSKKLSVPASVVSRIMGRGGCNITAIQDVKIKGQARWLTPIIPALWEAEV

SEQ ID NO: 866747 - protein, 1017 aa, Homo sapiens
KAGADIELGCSTPLMEASQEGHLELVKYLLASGANVHATTATGDTALTYACENGHTDVADVLLQAGADLEHESEGGRTPLMKAARAGHLCTVQFLISKGANVNRATANNDHTVVSLACAGGHLAVVELLLAHGADPTHRLKDGSTMLIEAAKGGHTNVVSYLLDYPNNVLSVPTTDVSQLPPPSQDQSQVPRVPTHTLAMVVPPQEPDRTSQENSPALLGVQKGTSKQKSSSLQVADQDLLPSFHPYQPLECIVEETEGKLNELGQRISAIEKAQLKSLELIQGEPLNKDKIEELKKNREEQVQKKKKILKELQKVERQLQMKTQQQFTKEYLETKGQKDTVSLHQQCSHRGVFPEGEGDGSLPEDHFSELPQVDTILFKDNDVDDEQQSPPSAEQIDFVPVQPLSSPQCNFSSDLGSNGTNSLELQKVSGNQQIVGQPQIAITGHDQGLLVQEPDGLMVATPAQTLTDTLDDLIAAVSTRVPTGSNSSSQTTECLTPESCSQTTSNVASQSMPPVYPSVDIDAHTESNHDTALTLACAGGHEELVSVLIARDAKIEHRDKKGFTPLILAATAGHVGVVEILLDKGGDIEAQSERTKDTPLSLACSGGRQEVVDLLLARGANKEHRNVSDYTPLSLAASGGYVNIIKILLNAGAEINSRTGSKLGISPLMLAAMNGHVPAVKLLLDMGSDINAQIETNRNTALTLACFQGRAEVVSLLLDRKANVEHRAKTGLTPLMEAASGGYAEVGRVLLDKGADVNAPPVPSSRDTALTIAADKGHYKFCELLIHRGAHIDVRNKKGNTPLWLASNGGHFDVVQLLVQAGADVDAADNRKITPLMSAFRKGHVKVVQYLVKEVNQFPSDIECMRYIATITDKELLKKCHQCVETIVKAKDQQAAEANKNASILLKELDLEKSREESRKQALAAKREKRKEKRKKKKEEQKRKQEEDEEKRHSKTKRSLGLSAVPVGEVTVTSGPPPSIPYAGAAAPPLPLPGPHTDGHSEKKKKTEEKDKERER

SEQ ID NO: 866748 - protein, 220 aa, Homo sapiens
GCVDLEDPGKLLVASNGGHFDVVQLLVQAGADVDAADNRKITPLMSAFRKGHVKVVQYLVKEVNQFPSDIECMRYIATITDKNGGKNVINVSETMVTAQKLLKLISKFSKAEDTKSMCKNHKHSYTPAIDNILQFLYTNNRQESQIMNGLPFTMVTKRIKYLGIQLMMGVKNLFKENYKPLLKEIREDTTNGKYSSSWWEDQSHENGILPSNIDSGYPSI

SEQ ID NO: 866749 - protein, 1807 aa, Homo sapiens
MALFQTFFMCLGTSKQKSSSLQVADQDLLPSFHPYQPLECIVEETEGKLNELGQRISAIEKAQLKSLELIQGEPLNKDKIEELKKNREEQVQKKKKILKELQKVERQLQMKTQQQFTKEYLETKGQKDTVSLHQQCSHRGVFPEGEGDGSLPEDHFSELPQVDTILFKDNDVDDEQQSPPSAEQIDFVPVQPLSSPQCNFSSDLGSNGTNSLELQKVSGNQQIVGQPQIAITGHDQGLLVQEPDGLMVATPAQTLTDTLDDLIAAVSTRVPTGSNSSSQTTECLTPESCSQTTSNVASQSMPPVYPSVDIDAHTESNHDTALTLACAGGHEELVSVLIARDAKIEHRDKKGFTPLILAATAGHVGVVEILLDKGGDIEAQSERTKDTPLSLACSGGRQEVVDLLLARGANKEHRNVSDYTPLSLAASGGYVNIIKILLNAGAEINSRTGSKLGISPLMLAAMNGHVPAVKLLLDMGSDINAQIETNRNTALTLACFQGRAEVVSLLLDRKANVEHRAKTGLTPLMEAASGGYAEVGRVLLDKGADVNAPPVPSSRDTALTIAADKGHYKFCELLIHRGAHIDVRNKKGNTPLWLASNGGHFDVVQLLVQAGADVDAADNRKITPLMSAFRKGHVKVVQYLVKEVNQFPSDIECMRYIATITDKELLKKCHQCVETIVKAKDQQAAEANKNASILLKELDLEKSREESRKQALAAKREKRKEKRKKKKEEQKRKQEEDEENKPKENSELPEDEDEEENDEDVEQEVPIEPPSATTTTTIGISATSATFTNVFGKKRANVVTTPSTNRKNKKNKTKETPPTAHLILPEQHMSLAQQKADKNKINGEPRGGGAGGNSDSDNLDSTDCNSESSSGGKSQELNFVMDVNSSKYPSLLLHSQEEKTSTATSKTQTRLEGEVTPNSLSTSYKTVSLPLSSPNIKLNLTSPKRGQKREEGWKEVVRRSKKLSVPASVVSRIMGRGGCNITAIQDVTGAHIDVDKQKDKNGERMITIRGGTESTRYAVQLINALIQDPAKELEDLIPKNHIRTPASTKSIHANFSSGVGTTAASSKNAFPLGAPTLVTSQATTLSTFQPANKLNKNVPTNVRSSFPVSLPLAYPHPHFALLAAQTMQQIRHPRLPMAQFGGTFSPSPNTWGPFPVRPVNPGNTNSSPKHNNTSRLPNQNGTVLPSESAGLATASCPITVSSVVAASQQLCVTNTRTPSSVRKQLFACVPKTSPPATVISSVTSTCSSLPSVSSAPITSGQAPTTFLPASTSQAQLSSQKMESFSAVPPTKEKVSTQDQPMANLCTPSSTANSCSSSASNTPGAPETHPSSSPTPTSSNTQEEAQPSSVSDLSPMSMPFASNSEPAPLTLTSPRMVAADNQDTSNLPQLAVPAPRVSHRMQPRGSFYSMVPNATIHQDPQSIFVTNPVTLTPPQGPPAAVQLSSAVNIMNGSQMHINPANKSLPPTFGPATLFNHFSSLFDSSQVPANQGWGDGPLSSRVATDASFTVQSAFLGNSVLGHLENMHPDNSKAPGFRPPSQRVSTSPVGLPSIDPSGSSPSSSSAPLASFSGIPGTRVFLQGPAPVGTPSFNRQHFSPHPWTSASNSCDSPIPSVSSGSSSPLSATSAPPTLGQPKGVSASQDRKIPPPIGTERLARIRQGGSVAQAPAGTSFVAPVGHSGIWSFGVNAVSEGLSGWSQSVMGNHPMHQQLSDPSTFSQHQPMERDDSGMVAPSNIFHQPMASGFVDFSKGLPISMYGGTIIPSHPQLADVPGGPLFNGLHNPDPAWNPMIKVIQNSTECTDAQQVKWA

SEQ ID NO: 866750 - protein, 1766 aa, Homo sapiens
KAGADIELGCSTPLMEASQEGHLELVKYLLASGANVHATTATGDTALTYACENGHTDVADVLLQAGADLEHESEGGRTPLMKAARAGHLCTVQFLISKGANVNRATANNDHTVVSLACAGGHLAVVELLLAHGADPTHRLKDGSTMLIEAAKGGHTNVVSYLLDYPNNVLSVPTTDVSQLPPPSQDQSQVPRVPTHTLAMVVPPQEPDRTSQENSPALLGVQKAVSTRVPTGSNSSSQTTECLTPESCSQTTSNVASQSMPPVYPSVDIDAHTESNHDTALTLACAGGHEELVSVLIARDAKIEHRDKKGFTPLILAATAGHVGVVEILLDKGGDIEAQSERTKDTPLSLACSGGRQEVVDLLLARGANKEHRNVSDYTPLSLAASGGYVNIIKILLNAGAEINSRTGSKLGISPLMLAAMNGHVPAVKLLLDMGSDINAQIETNRNTALTLACFQGRAEVVSLLLDRKANVEHRAKTGLTPLMEAASGGYAEVGRVLLDKGADVNAPPVPSSRDTALTIAADKGHYKFCELLIHRGAHIDVRNKKGNTPLWLASNGGHFDVVQLLVQAGADVDAADNRKITPLMSAFRKGHVKVVQYLVKEVNQFPSDIECMRYIATITDKELLKKCHQCVETIVKAKDQQAAEANKNASILLKELDLEKSREESRKQALAAKREKRKEKRKKKKEEQKRKQEEDEENKPKENSELPEDEDEEENDEDVEQEVPIEPPSATTTTTIGISATSATFTNVFGKKRANVVTTPSTNRKNKKNKTKETPPTAHLILPEQHMSLAQQKADKNKINGEPRGGGAGGNSDSDNLDSTDCNSESSSGGKSQELNFVMDVNSSKYPSLLLHSQEEKTSTATSKTQTRLEGEVTPNSLSTSYKTVSLPLSSPNIKLNLTSPKRGQKREEGWKEVVRRSKKLSVPASVVSRIMGRGGCNITAIQDVTGAHIDVDKQKDKNGERMITIRGGTESTRYAVQLINALIQDPAKELEDLIPKNHIRTPASTKSIHANFSSGVGTTAASSKNAFPLGAPTLVTSQATTLSTFQPANKLNKNVPTNVRSSFPVSLPLAYPHPHFALLAAQTMQQIRHPRLPMAQFGGTFSPSPNTWGPFPVRPVNPGNTNSSPKHNNTSRLPNQNGTVLPSESAGLATASCPITVSSVVAASQQLCVTNTRTPSSVRKQLFACVPKTSPPATVISSVTSTCSSLPSVSSAPITSGQAPTTFLPASTSQAQLSSQKMESFSAVPPTKEKVSTQDQPMANLCTPSSTANSCSSSASNTPGAPETHPSSSPTPTSSNTQEEAQPSSVSDLSPMSMPFASNSEPAPLTLTSPRMVAADNQDTSNLPQLAVPAPRVSHRMQPRGSFYSMVPNATIHQDPQSIFVTNPVTLTPPQGPPAAVQLSSAVNIMNGSQMHINPANKSLPPTFGPATLFNHFSSLFDSSQVPANQGWGDGPLSSRVATDASFTVQSAFLGNSVLGHLENMHPDNSKAPGFRPPSQRVSTSPVGLPSIDPSGSSPSSSSAPLASFSGIPGTRVFLQGPAPVGTPSFNRQHFSPHPWTSASNSCDSPIPSVSSGSSSPLSATSAPPTLGQPKGVSASQDRKIPPPIGTERLARIRQGGSVAQAPAGTSFVAPVGHSGIWSFGVNAVSEGLSGWSQSVMGNHPMHQQLSDPSTFSQHQPMERDDSGMVAPSNIFHQPMASGFVDFSKGLPISMYGGTIIPSHPQLADVPGGPLFNGLHNPDPAWNPMIKVIQNSTECTDAQQVKWA

SEQ ID NO: 866751 - protein, 2034 aa, Homo sapiens
KAGADIELGCSTPLMEASQEGHLELVKYLLASGANVHATTATGDTALTYACENGHTDVADVLLQAGADLEHESEGGRTPLMKAARAGHLCTVQFLISKGANVNRATANNDHTVVSLACAGGHLAVVELLLAHGADPTHRLKDGSTMLIEAAKGGHTNVVSYLLDYPNNVLSVPTTDVSQLPPPSQDQSQVPRVPTHTLAMVVPPQEPDRTSQENSPALLGVQKGTSKQKSSSLQVADQDLLPSFHPYQPLECIVEETEGKLNELGQRISAIEKAQLKSLELIQGEPLNKDKIEELKKNREEQVQKKKKILKELQKVERQLQMKTQQQFTKEYLETKGQKDTVSLHQQCSHRGVFPEGEGDGSLPEDHFSELPQVDTILFKDNDVDDEQQSPPSAEQIDFVPVQPLSSPQCNFSSDLGSNGTNSLELQKVSGNQQIVGQPQIAITGHDQGLLVQEPDGLMVATPAQTLTDTLDDLIAAVSTRVPTGSNSSSQTTECLTPESCSQTTSNVASQSMPPVYPSVDIDAHTESNHDTALTLACAGGHEELVSVLIARDAKIEHRDKKGFTPLILAATAGHVGVVEILLDKGGDIEAQSERTKDTPLSLACSGGRQEVVDLLLARGANKEHRNVSDYTPLSLAASGGYVNIIKILLNAGAEINSRTGSKLGISPLMLAAMNGHVPAVKLLLDMGSDINAQIETNRNTALTLACFQGRAEVVSLLLDRKANVEHRAKTGLTPLMEAASGGYAEVGRVLLDKGADVNAPPVPSSRDTALTIAADKGHYKFCELLIHRGAHIDVRNKKGNTPLWLASNGGHFDVVQLLVQAGADVDAADNRKITPLMSAFRKGHVKVVQYLVKEVNQFPSDIECMRYIATITDKELLKKCHQCVETIVKAKDQQAAEANKNASILLKELDLEKSREESRKQALAAKREKRKEKRKKKKEEQKRKQEEDEENKPKENSELPEDEDEEENDEDVEQEVPIEPPSATTTTTIGISATSATFTNVFGKKRANVVTTPSTNRKNKKNKTKETPPTAHLILPEQHMSLAQQKADKNKINGEPRGGGAGGNSDSDNLDSTDCNSESSSGGKSQELNFVMDVNSSKYPSLLLHSQEEKTSTATSKTQTRLEGEVTPNSLSTSYKTVSLPLSSPNIKLNLTSPKRGQKREEGWKEVVRRSKKLSVPASVVSRIMGRGGCNITAIQDVTGAHIDVDKQKDKNGERMITIRGGTESTRYAVQLINALIQDPAKELEDLIPKNHIRTPASTKSIHANFSSGVGTTAASSKNAFPLGAPTLVTSQATTLSTFQPANKLNKNVPTNVRSSFPVSLPLAYPHPHFALLAAQTMQQIRHPRLPMAQFGGTFSPSPNTWGPFPVRPVNPGNTNSSPKHNNTSRLPNQNGTVLPSESAGLATASCPITVSSVVAASQQLCVTNTRTPSSVRKQLFACVPKTSPPATVISSVTSTCSSLPSVSSAPITSGQAPTTFLPASTSQAQLSSQKMESFSAVPPTKEKVSTQDQPMANLCTPSSTANSCSSSASNTPGAPETHPSSSPTPTSSNTQEEAQPSSVSDLSPMSMPFASNSEPAPLTLTSPRMVAADNQDTSNLPQLAVPAPRVSHRMQPRGSFYSMVPNATIHQDPQSIFVTNPVTLTPPQGPPAAVQLSSAVNIMNGSQMHINPANKSLPPTFGPATLFNHFSSLFDSSQVPANQGWGDGPLSSRVATDASFTVQSAFLGNSVLGHLENMHPDNSKAPGFRPPSQRVSTSPVGLPSIDPSGSSPSSSSAPLASFSGIPGTRVFLQGPAPVGTPSFNRQHFSPHPWTSASNSCDSPIPSVSSGSSSPLSATSAPPTLGQPKGVSASQDRKIPPPIGTERLARIRQGGSVAQAPAGTSFVAPVGHSGIWSFGVNAVSEGLSGWSQSVMGNHPMHQQLSDPSTFSQHQPMERDDSGMVAPSNIFHQPMASGFVDFSKGLPISMYGGTIIPSHPQLADVPGGPLFNGLHNPDPAWNPMIKVIQNSTECTDAQQIWPGTWAPHIGNMHLKYVN

SEQ ID NO: 866752 - protein, 1769 aa, Homo sapiens
KAGADIELGCSTPLMEASQEGHLELVKYLLASGANVHATTATGDTALTYACENGHTDVADVLLQAGADLDKQEDMKTILEGIDPAKHQEHESEGGRTPLMKAARAGHLCTVQFLISKGANVNRATANNDHTVVSLACAGGHLAVVELLLAHGADPTHRLKDGSTMLIEAAKGGHTNVVSYLLDYPNNVLSVPTTDVSQLPPPSQDQSQEPDRTSQENSPALLGVQKAVSTRVPTGSNSSSQTTECLTPESCSQTTSNVASQSMPPVYPSVDIDAHTESNHDTALTLACAGGHEELVSVLIARDAKIEHRDKKGFTPLILAATAGHVGVVEILLDKGGDIEAQSERTKDTPLSLACSGGRQEVVDLLLARGANKEHRNVSDYTPLSLAASGGYVNIIKILLNAGAEINSRTGSKLGISPLMLAAMNGHVPAVKLLLDMGSDINAQIETNRNTALTLACFQGRAEVVSLLLDRKANVEHRAKTGLTPLMEAASGGYAEVGRVLLDKGADVNAPPVPSSRDTALTIAADKGHYKFCELLIHRGAHIDVRNKKGNTPLWLASNGGHFDVVQLLVQAGADVDAADNRKITPLMSAFRKGHVKVVQYLVKEVNQFPSDIECMRYIATITDKELLKKCHQCVETIVKAKDQQAAEANKNASILLKELDLEKSREESRKQALAAKREKRKEKRKKKKEEQKRKQEEDEENKPKENSELPEDEDEEENDEDVEQEVPIEPPSATTTTTIGISATSATFTNVFGKKRANVVTTPSTNRKNKKNKTKETPPTAHLILPEQHMSLAQQKADKNKINGEPRGGGAGGNSDSDNLDSTDCNSESSSGGKSQELNFVMDVNSSKYPSLLLHSQEEKTSTATSKTQTRLEGEVTPNSLSTSYKTVSLPLSSPNIKLNLTSPKRGQKREEGWKEVVRRSKKLSVPASVVSRIMGRGGCNITAIQDVTGAHIDVDKQKDKNGERMITIRGGTESTRYAVQLINALIQDPAKELEDLIPKNHIRTPASTKSIHANFSSGVGTTAASSKNAFPLGAPTLVTSQATTLSTFQPANKLNKNVPTNVRSSFPVSLPLAYPHPHFALLAAQTMQQIRHPRLPMAQFGGTFSPSPNTWGPFPVRPVNPGNTNSSPKHNNTSRLPNQNGTVLPSESAGLATASCPITVSSVVAASQQLCVTNTRTPSSVRKQLFACVPKTSPPATVISSVTSTCSSLPSVSSAPITSGQAPTTFLPASTSQAQLSSQKMESFSAVPPTKEKVSTQDQPMANLCTPSSTANSCSSSASNTPGAPETHPSSSPTPTSSNTQEEAQPSSVSDLSPMSMPFASNSEPAPLTLTSPRMVAADNQDTSNLPQLAVPAPRVSHRMQPRGSFYSMVPNATIHQDPQSIFVTNPVTLTPPQGPPAAVQLSSAVNIMNGSQMHINPANKSLPPTFGPATLFNHFSSLFDSSQVPANQGWGDGPLSSRVATDASFTVQSAFLGNSVLGHLENMHPDNSKAPGFRPPSQRVSTSPVGLPSIDPSGSSPSSSSAPLASFSGIPGTRVFLQGPAPVGTPSFNRQHFSPHPWTSASNSCDSPIPSVSSGSSSPLSATSAPPTLGQPKGVSASQDRKIPPPIGTERLARIRQGGSVAQAPAGTSFVAPVGHSGIWSFGVNAVSEGLSGWSQSVMGNHPMHQQLSDPSTFSQHQPMERDDSGMVAPSNIFHQPMASGFVDFSKGLPISMYGGTIIPSHPQLADVPGGPLFNGLHNPDPAWNPMIKVIQNSTECTDAQQVKWA

SEQ ID NO: 866753 - protein, 1507 aa, Homo sapiens
MPPVYPSVDIDAHTESNHDTALTLACAGGHEELVSVLIARDAKIEHRDKKGFTPLILAATAGHVGVVEILLDKGGDIEAQSERTKDTPLSLACSGGRQEVVDLLLARGANKEHRNVSDYTPLSLAASGGYVNIIKILLNAGAEINSRTGSKLGISPLMLAAMNGHVPAVKLLLDMGSDINAQIETNRNTALTLACFQGRAEVVSLLLDRKANVEHRAKTGLTPLMEAASGGYAEVGRVLLDKGADVNAPPVPSSRDTALTIAADKGHYKFCELLIHRGAHIDVRNKKGNTPLWLASNGGHFDVVQLLVQAGADVDAADNRKITPLMSAFRKGHVKVVQYLVKEVNQFPSDIECMRYIATITDKELLKKCHQCVETIVKAKDQQAAEANKNASILLKELDLEKSREESRKQALAAKREKRKEKRKKKKEEQKRKQEEDEENKPKENSELPEDEDEEENDEDVEQEVPIEPPSATTTTTIGISATSATFTNVFGKKRANVVTTPSTNRKNKKNKTKETPPTAHLILPEQHMSLAQQKADKNKINGEPRGGGAGGNSDSDNLDSTDCNSESSSGGKSQELNFVMDVNSSKYPSLLLHSQEEKTSTATSKTQTRLEGEVTPNSLSTSYKTVSLPLSSPNIKLNLTSPKRGQKREEGWKEVVRRSKKLSVPASVVSRIMGRGGCNITAIQDVTGAHIDVDKQKDKNGERMITIRGGTESTRYAVQLINALIQDPAKELEDLIPKNHIRTPASTKSIHANFSSGVGTTAASSKNAFPLGAPTLVTSQATTLSTFQPANKLNKNVPTNVRSSFPVSLPLAYPHPHFALLAAQTMQQIRHPRLPMAQFGGTFSPSPNTWGPFPVRPVNPGNTNSSPKHNNTSRLPNQNGTVLPSESAGLATASCPITVSSVVAASQQLCVTNTRTPSSVRKQLFACVPKTSPPATVISSVTSTCSSLPSVSSAPITSGQAPTTFLPASTSQAQLSSQKMESFSAVPPTKEKVSTQDQPMANLCTPSSTANSCSSSASNTPGAPETHPSSSPTPTSSNTQEEAQPSSVSDLSPMSMPFASNSEPAPLTLTSPRMVAADNQDTSNLPQLAVPAPRVSHRMQPRGSFYSMVPNATIHQDPQSIFVTNPVTLTPPQGPPAAVQLSSAVNIMNGSQMHINPANKSLPPTFGPATLFNHFSSLFDSSQVPANQGWGDGPLSSRVATDASFTVQSAFLGNSVLGHLENMHPDNSKAPGFRPPSQRVSTSPVGLPSIDPSGSSPSSSSAPLASFSGIPGTRVFLQGPAPVGTPSFNRQHFSPHPWTSASNSCDSPIPSVSSGSSSPLSATSAPPTLGQPKGVSASQDRKIPPPIGTERLARIRQGGSVAQAPAGTSFVAPVGHSGIWSFGVNAVSEGLSGWSQSVMGNHPMHQQLSDPSTFSQHQPMERDDSGMVAPSNIFHQPMASGFVDFSKGLPISMYGGTIIPSHPQLADVPGGPLFNGLHNPDPAWNPMIKVIQNSTECTDAQQVKWA

SEQ ID NO: 866754 - protein, 2034 aa, Homo sapiens; identical to SEQ ID NO: 866751

SEQ ID NO: 866755 - protein, 1659 aa, Homo sapiens
KAGADIELGCSTPLMEASQEGHLELVKYLLASGANVHATTATGDTALTYACENGHTDVADVLLQAGADLEHESEGGRTPLMKAARAGHLCTVQFLISKGANVNRATANNDHTVVSLACAGGHLAVVELLLAHGADPTHRLKDGSTMLIEAAKGGHTNVVSYLLDYPNNVLSVPTTDVSQLPPPSQDQSQVPRVPTHTLAMVVPPQEPDRTSQENSPALLGVQKGTSKQKSSSLQVADQDLLPSFHPYQPLECIVEETEGKLNELGQRISAIEKAQLKSLELIQGEPLNKDKIEELKKNREEQVQKKKKILKELQKVERQLQMKTQQQFTKEYLETKGQKDTVSLHQQCSHRGVFPEGEGDGSLPEDHFSELPQVDTILFKDNDVDDEQQSPPSAEQIDFVPVQPLSSPQCNFSSDLGSNGTNSLELQKVSGNQQIVGQPQIAITGHDQGLLVQEPDGLMVATPAQTLTDTLDDLIAAVSTRVPTGSNSSSQTTECLTPESCSQTTSNVASQSMPPVYPSVDIDAHTESNHDTALTLACAGGHEELVSVLIARDAKIEHRDKKGFTPLILAATAGHVGVVEILLDKGGDIEAQSERTKDTPLSLACSGGRQEVVDLLLARGANKEHRNVSDYTPLSLAASGGYVNIIKILLNAGAEINSRTGSKLGISPLMLAAMNGHVPAVKLLLDMGSDINAQIETNRNTALTLACFQGRAEVVSLLLDRKANVEHRAKTGLTPLMEAASGGYAEVGRVLLDKGADVNAPPVPSSRDTALTIAADKGHYKFCELLIHRGAHIDVRNKKGNTPLWLASNGGHFDVVQLLVQAGADVDAADNRKITPLMSAFRKGHVKVVQYLVKEVNQFPSDIECMRYIATITDKELLKKCHQCVETIVKAKDQQAAEANKNASILLKELDLEKSREESRKQALAAKREKRKEKRKKKKEEQKRKQEEDEENKPKENSELPEDEDEEENDEDVEQEVPIEPPSATTTTTIGISATSATFTNVFGKKRANVVTTPSTNRKNKKNKTKETPPTAHLILPEQHMSLAQQKADKNKINGEPRGGGAGGNSDSDNLDSTDCNSESSSGGKSQELNFVMDVNSSKYPSLLLHSQEEKTSTATSKTQTRLEGEVTPNSLSTSYKTVSLPLSSPNIKLNLTSPKRGQKREEGWKEVVRRSKKLSVPASVVSRIMGRGGCNITAIQDVTGAHIDVDKQKDKNGERMITIRGGTESTRYAVQLINALIQDPAKELEDLIPKNHIRTPASTKSIHANFSSGVGTTAASSKNAFPLGAPTLVTSQATTLSTFQPANKLNKNVPTNVRSSFPVSLPLAYPHPHFALLAAQTMQQIRHPRLPMAQFGGTFSPSPNTWGPFPVRPVNPGNTNSSPKHNNTSRLPNQNGTVLPSESAGLATASCPITVSSVVAASQQLCVTNTRTPSSVRKQLFACVPKTSPPATVISSVTSTCSSLPSVSSAPITSGQAPTTFLPASTSQAQLSSQKMESFSAVPPTKEKVSTQDQPMANLCTPSSTANSCSSSASNTPGAPETHPSSSPTPTSSNTQEEAQPSSVSDLSPMSMPFASNSEPAPLTLTSPRMVAADNQDTSNLPQLAVPAPRVSHRMQPRGSFYSMVPNATIHQDPQSIFVTNPVTLWEAEVGGSLEVRSLRPV

SEQ ID NO: 866756 - protein, 1829 aa, Homo sapiens
KAGADIELGCSTPLMEASQEGHLELVKYLLASGANVHATTATGDTALTYACENGHTDVADVLLQAGADLEHESEGGRTPLMKAARAGHLCTVQFLISKGANVNRATANNDHTVVSLACAGGHLAVVELLLAHGADPTHRLKDGSTMLIEAAKGGHTNVVSYLLDYPNNVLSVPTTDVSQLPPPSQDQSQVPRVPTHTLAMVVPPQEPDRTSQENSPALLGVQKGTSKQKSSSLQVADQDLLPSFHPYQPLECIVEETEGKLNELGQRISAIEKAQLKSLELIQGEPLNKDKIEELKKNREEQVQKKKKILKELQKVERQLQMKTQQQFTKEYLETKGQKDTVSLHQQCSHRGVFPEGEGDGSLPEDHFSELPQVDTILFKDNDVDDEQQSPPSAEQIDFVPVQPLSSPQCNFSSDLGSNGTNSLELQKVSGNQQIVGQPQIAITGHDQGLLVQEPDGLMVATPAQTLTDTLDDLIAAVSTRVPTGSNSSSQTTECLTPESCSQTTSNVASQSMPPVYPSVDIDAHTESNHDTALTLACAGGHEELVSVLIARDAKIEHRDKKGFTPLILAATAGHVGVVEILLDKGGDIEAQSERTKDTPLSLACSGGRQEVVDLLLARGANKEHRNVSDYTPLSLAASGGYVNIIKILLNAGAEINSRTGSKLGISPLMLAAMNGHVPAVKLLLDMGSDINAQIETNRNTALTLACFQGRAEVVSLLLDRKANVEHRAKTGLTPLMEAASGGYAEVGRVLLDKGADVNAPPVPSSRDTALTIAADKGHYKFCELLIHRGAHIDVRNKKGNTPLWLASNGGHFDVVQLLVQAGADVDAADNRKITPLMSAFRKGHVKVVQYLVKEVNQFPSDIECMRYIATITDKELLKKCHQCVETIVKAKDQQAAEANKNASILLKELDLEKSREESRKQALAAKREKRKEKRKKKKEEQKRKQEEDEENKPKENSELPEDEDEEENDEDVEQEVPIEPPSATTTTTIGISATSATFTNVFGKKRANVVTTPSTNRKNKKNKTKETPPTAHLILPEQHMSLAQQKADKNKINGEPRGGGAGGNSDSDNLDSTDCNSESSSGGKSQELNFVMDVNSSKYPSLLLHSQEEKTSTATSKTQTRLEGEVTPNSLSTSYKTVSLPLSSPNIKLNLTSPKRGQKREEGWKEVVRRSKKLSVPASVVSRIMGRGGCNITAIQDVTGAHIDVDKQKDKNGERMITIRGGTESTRYAVQLINALIQDPAKELEDLIPKNHIRTPASTKSIHANFSSGVGTTAASSKNAFPLGAPTLVTSQATTLSTFQPANKLNKNVPTNVRSSFPVSLPLAYPHPHFALLAAQTMQQIRHPRLPMAQFGGTFSPSPNTWGPFPVRPVNPGNTNSSPKHNNTSRLPNQNGTVLPSESAGLATASCPITVSSVVAASQQLCVTNTRTPSSVRKQLFACVPKTSPPATVISSVTSTCSSLPSVSSAPITSGQAPTTFLPASTSQAQLSSQKMESFSAVPPTKEKVSTQDQPMANLCTPSSTANSCSSSASNTPGAPETHPSSSPTPTSSNTQEEAQPSSVSDLSPMSMPFASNSEPAPLTLTSPRMVAADNQDTSNLPQLAVPAPRVSHRMQPRGSFYSMVPNATIHQDPQSIFVTNPVTLTPPQGPPAAVQLSSAVNIMNGSQMHINPANKSLPPTFGPATLFNHFSSLFDSSQVPANQGWGDGPLSSRVATDASFTVQSAFLGNSVLGHLENMHPDNSKAPGFRPPSQRVSTSPVGLPSIDPSGSSPSSSSAPLASFSGIPGTRVFLQGPAPVGTPSFNRQHFSPHPWTSASNSCRNPGGTLPKEF

SEQ ID NO: 866757 - protein, 1828 aa, Homo sapiens
KAGADIELGCSTPLMEASQEGHLELVKYLLASGANVHATTATGDTALTYACENGHTDVADVLLQAGADLEHESEGGRTPLMKAARAGHLCTVQFLISKGANVNRATANNDHTVVSLACAGGHLAVVELLLAHGADPTHRLKDGSTMLIEAAKGGHTNVVSYLLDYPNNVLSVPTTDVSQLPPPSQDQSQVPRVPTHTLAMVVPPQEPDRTSQENSPALLGVQKGTSKQKSSSLQVADQDLLPSFHPYQPLECIVEETEGKLNELGQRISAIEKAQLKSLELIQGEPLNKDKIEELKKNREEQVQKKKKILKELQKVERQLQMKTQQQFTKEYLETKGQKDTVSLHQQCSHRGVFPEGEGDGSLPEDHFSELPQVDTILFKDNDVDDEQQSPPSAEQIDFVPVQPLSSPQCNFSSDLGSNGTNSLELQKVSGNQQIVGQPQIAITGHDQGLLVQEPDGLMVATPAQTLTDTLDDLIAAVSTRVPTGSNSSSQTTECLTPESCSQTTSNVASQSMPPVYPSVDIDAHTESNHDTALTLACAGGHEELVSVLIARDAKIEHRDKKGFTPLILAATAGHVGVVEILLDKGGDIEAQSERTKDTPLSLACSGGRQEVVDLLLARGANKEHRNVSDYTPLSLAASGGYVNIIKILLNAGAEINSRTGSKLGISPLMLAAMNGHVPAVKLLLDMGSDINAQIETNRNTALTLACFQGRAEVVSLLLDRKANVEHRAKTGLTPLMEAASGGYAEVGRVLLDKGADVNAPPVPSSRDTALTIAADKGHYKFCELLIHRGAHIDVRNKKGNTPLWLASNGGHFDVVQLLVQAGADVDAADNRKITPLMSAFRKGHVKVVQYLVKEVNQFPSDIECMRYIATITDKELLKKCHQCVETIVKAKDQQAAEANKNASILLKELDLEKSREESRKQALAAKREKRKEKRKKKKEEQKRKQEEDEENKPKENSELPEDEDEEENDEDVEQEVPIEPPSATTTTTIGISATSATFTNVFGKKRANVVTTPSTNRKNKKNKTKETPPTAHLILPEQHMSLAQQKADKNKINGEPRGGGAGGNSDSDNLDSTDCNSESSSGGKSQELNFVMDVNSSKYPSLLLHSQEEKTSTATSKTQTRLEGEVTPNSLSTSYKTVSLPLSSPNIKLNLTSPKRGQKREEGWKEVVRRSKKLSVPASVVSRIMGRGGCNITAIQDVTGAHIDVDKQKDKNGERMITIRGGTESTRYAVQLINALIQDPAKELEDLIPKNHIRTPASTKSIHANFSSGVGTTAASSKNAFPLGAPTLVTSQATTLSTFQPANKLNKNVPTNVRSSFPVSLPLAYPHPHFALLAAQTMQQIRHPRLPMAQFGGTFSPSPNTWGPFPVRPVNPGNTNSSPKHNNTSRLPNQNGTVLPSESAGLATASCPITVSSVVAASQQLCVTNTRTPSSVRKQLFACVPKTSPPATVISSVTSTCSSLPSVSSAPITSGQAPTTFLPASTSQAQLSSQKMESFSAVPPTKEKVSTQDQPMANLCTPSSTANSCSSSASNTPGAPETHPSSSPTPTSSNTQEEAQPSSVSDLSPMSMPFASNSEPAPLTLTSPRMVAADNQDTSNLPQLAVPAPRVSHRMQPRGSFYSMVPNATIHQDPQSIFVTNPVTLTPPQGPPAAVQLSSAVNIMNGSQMHINPANKSLPPTFGPATLFNHFSSLFDSSQVPANQGWGDGPLSSRVATDASFTVQSAFLGNSVLGHLENMHPDNSKAPGFRPPSQRVSTSPVGLPSIDPSGSSPSSCLAGLPKVSEERFRLTSESTNQRVLWWSIAQTVILILTGIWQMRHLKSFFEAKKLV

SEQ ID NO: 866758 - protein, 979 aa, Homo sapiens
MSLAQQKADKNKINGEPRGGGAGGNSDSDNLDSTDCNSESSSGGKSQELNFVMDVNSSKYPSLLLHSQEEKTSTATSKTQTRLEGEVTPNSLSTSYKTVSLPLSSPNIKLNLTSPKRGQKREEGWKEVVRRSKKLSVPASVVSRIMGRGGCNITAIQDVTGAHIDVDKQKDKNGERMITIRGGTESTRYAVQLINALIQDPAKELEDLIPKNHIRTPASTKSIHANFSSGVGTTAASSKNAFPLGAPTLVTSQATTLSTFQPANKLNKNVPTNVRSSFPVSLPLAYPHPHFALLAAQTMQQIRHPRLPMAQFGGTFSPSPNTWGPFPVRPVNPGNTNSSPKHNNTSRLPNQNGTVLPSESAGLATASCPITVSSVVAASQQLCVTNTRTPSSVRKQLFACVPKTSPPATVISSVTSTCSSLPSVSSAPITSGQAPTTFLPASTSQAQLSSQKMESFSAVPPTKEKVSTQDQPMANLCTPSSTANSCSSSASNTPGAPETHPSSSPTPTSSNTQEEAQPSSVSDLSPMSMPFASNSEPAPLTLTSPRMVAADNQDTSNLPQLAVPAPRVSHRMQPRGSFYSMVPNATIHQDPQSIFVTNPVTLTPPQGPPAAVQLSSAVNIMNGSQMHINPANKSLPPTFGPATLFNHFSSLFDSSQVPANQGWGDGPLSSRVATDASFTVQSAFLGNSVLGHLENMHPDNSKAPGFRPPSQRVSTSPVGLPSIDPSGSSPSSSSAPLASFSGIPGTRVFLQGPAPVGTPSFNRQHFSPHPWTSASNSCDSPIPSVSSGSSSPLSATSAPPTLGQPKGVSASQDRKIPPPIGTERLARIRQGGSVAQAPAGTSFVAPVGHSGIWSFGVNAVSEGLSGWSQSVMGNHPMHQQLSDPSTFSQHQPMERDDSGMVAPSNIFHQPMASGFVDFSKGLPISMYGGTIIPSHPQLADVPGGPLFNGLHNPDPAWNPMIKVIQNSTECTDAQQVKWA

SEQ ID NO: 866759 - protein, 1169 aa, Homo sapiens
RPRGPPSSSYLPPSSYLPIATITDEELLKKCHQCVETIVKAKDQQAAEANKNASILLKELDLEKSREESRKQALAAKREKRKEKRKKKKEEQKRKQEEDEENKPKENSELPEDEDEEENDEDVEQEVPIEPPSATTTTTIGISATSATFTNVFGKKRANVVTTPSTNRKNKKNKTKETPPTAHLILPEQHMSLAQQKADKNKINGEPRGGGAGGNSDSDNLDSTDCNSESSSGGKSQELNFVMDVNSSKYPSLLLHSQEEKTSTATSKTQTRLEGEVTPNSLSTSYKTVSLPLSSPNIKLNLTSPKRGQKREEGWKEVVRRSKKLSVPASVVSRIMGRGGCNITAIQDVTGAHIDVDKQKDKNGERMITIRGGTESTRYAVQLINALIQDPAKELEDLIPKNHIRTPASTKSIHANFSSGVGTTAASSKNAFPLGAPTLVTSQATTLSTFQPANKLNKNVPTNVRSSFPVSLPLAYPHPHFALLAAQTMQQIRHPRLPMAQFGGTFSPSPNTWGPFPVRPVNPGNTNSSPKHNNTSRLPNQNGTVLPSESAGLATASCPITVSSVVAASQQLCVTNTRTPSSVRKQLFACVPKTSPPATVISSVTSTCSSLPSVSSAPITSGQAPTTFLPASTSQAQLSSQKMESFSAVPPTKEKVSTQDQPMANLCTPSSTANSCSSSASNTPGAPETHPSSSPTPTSSNTQEEAQPSSVSDLSPMSMPFASNSEPAPLTLTSPRMVAADNQDTSNLPQLAVPAPRVSHRMQPRGSFYSMVPNATIHQDPQSIFVTNPVTLTPPQGPPAAVQLSSAVNIMNGSQMHINPANKSLPPTFGPATLFNHFSSLFDSSQVPANQGWGDGPLSSRVATDASFTVQSAFLGNSVLGHLENMHPDNSKAPGFRPPSQRVSTSPVGLPSIDPSGSSPSSSSAPLASFSGIPGTRVFLQGPAPVGTPSFNRQHFSPHPWTSASNSCDSPIPSVSSGSSSPLSATSAPPTLGQPKGVSASQDRKIPPPIGTERLARIRQGGSVAQAPAGTSFVAPVGHSGIWSFGVNAVSEGLSGWSQSVMGNHPMHQQLSDPSTFSQHQPMERDDSGMVAPSNIFHQPMASGFVDFSKGLPISMYGGTIIPSHPQLADVPGGPLFNGLHNPDPAWNPMIKVIQNSTECTDAQQVKWA

SEQ ID NO: 866760 - protein, 1564 aa, Homo sapiens
KAGADIELGCSTPLMEASQEGHLELVKYLLASGANVHATTATGDTALTYACENGHTDVADVLLQAGADLEHESEGGRTPLMKAARAGHLCTVQFLISKGANVNRATANNDHTVVSLACAGGHLAVVELLLAHGADPTHRLKDGSTMLIEAAKGGHTNVVSYLLDYPNNVLSVPTTDVSQLPPPSQDQSQVPRVPTHTLAMVVPPQEPDRTSQENSPALLGVQKGTSKQKSSSLQVADQDLLPSFHPYQPLECIVEETEGKLNELGQRISAIEKAQLKSLELIQGEPLNKDKIEELKKNREEQVQKKKKILKELQKVERQLQMKTQQQFTKEYLETKGQKDTVSLHQQCSHRGVFPEGEGDGSLPEDHFSELPQVDTILFKDNDVDDEQQSPPSAEQIDFVPVQPLSSPQCNFSSDLGSNGTNSLELQKVSGNQQIVGQPQIAITGHDQGLLVQEPDGLMVATPAQTLTDTLDDLIAAVSTRVPTGSNSSSQTTECLTPESCSQTTSNVASQSMPPVYPSVDIDAHTESNHDTALTLACAGGHEELVSVLIARDAKIEHRDKKGFTPLILAATAGHVGVVEILLDKGGDIEAQSERTKDTPLSLACSGGRQEVVDLLLARGANKEHRNVSDYTPLSLAASGGYVNIIKILLNAGAEINSRTGSKLGISPLMLAAMNGHVPAVKLLLDMGSDINAQIETNRNTALTLACFQGRAEVVSLLLDRKANVEHRAKTGLTPLMEAASGGYAEVGRVLLDKGADVNAPPVPSSRDTALTIAADKGHYKFCELLIHRGAHIDVRNKKGNTPLWLASNGGHFDVVQLLVQAGADVDAADNRKITPLMSAFRKGHVKVVQYLVKEVNQFPSDIECMRYIATITDKELLKKCHQCVETIVKAKDQQAAEANKNASILLKELDLEKSREESRKQALAAKREKRKEKRKKKKEEQKRKQEEDEENKPKENSELPEDEDEEENDEDVEQEVPIEPPSATTTTTIGISATSATFTNVFGKKRANVVTTPSTNRKNKKNKTKETPPTAHLILPEQHMSLAQQKADKNKINGEPRGGGAGGNSDSDNLDSTDCNSESSSGGKSQELNFVMDVNSSKYPSLLLHSQEEKTSTATSKTQTRLEGEVTPNSLSTSYKTVSLPLSSPNIKLNLTSPKRGQKREEGWKEVVRRSKKLSVPASVVSRIMGRGGCNITAIQDVTGAHIDVDKQKDKNGERMITIRGGTESTRYAVQLINALIQDPAKELEDLIPKNHIRTPASTKSIHANFSSGVGTTAASSKNAFPLGAPTLVTSQATTLSTFQPANKLNKNVPTNVRSSFPVSLPLAYPHPHFALLAAQTMQQIRHPRLPMAQFGGTFSPSPNTWGPFPVRPVNPGNTNSSPKHNNTSRLPNQNGTVLPSESAGLATASCPITVSSVVAASQQLCVTNTRTPSSVRKQLFACVPKTSPPATVISSVTSTCSSLPSVSSAPITSGQAPTTFLPASTSQAQLSSQKMESFSAVPPTKEKVSTQDQPMANLCTPSSTANSCSSSASNTPGAPETHPSSSPTPTSSNTLDGCALVLERGR

SEQ ID NO: 866761 - protein, 988 aa, Homo sapiens
KAGADIELGCSTPLMEASQEGHLELVKYLLASGANVHATTATGDTALTYACENGHTDVADVLLQAGADLEHESEGGRTPLMKAARAGHLCTVQFLISKGANVNRATANNDHTVVSLACAGGHLAVVELLLAHGADPTHRLKDGSTMLIEAAKGGHTNVVSYLLDYPNNVLSVPTTDVSQLPPPSQDQSQVPRVPTHTLAMVVPPQEPDRTSQENSPALLGVQKGTSKQKSSSLQVADQDLLPSFHPYQPLECIVEETEGKLNELGQRISAIEKAQLKSLELIQGEPLNKDKIEELKKNREEQVQKKKKILKELQKVERQLQMKTQQQFTKEYLETKGQKDTVSLHQQCSHRGVFPEGEGDGSLPEDHFSELPQVDTILFKDNDVDDEQQSPPSAEQIDFVPVQPLSSPQCNFSSDLGSNGTNSLELQKVSGNQQIVGQPQIAITGHDQGLLVQEPDGLMVATPAQTLTDTLDDLIAAVSTRVPTGSNSSSQTTECLTPESCSQTTSNVASQSMPPVYPSVDIDAHTESNHDTALTLACAGGHEELVSVLIARDAKIEHRDKKGFTPLILAATAGHVGVVEILLDKGGDIEAQSERTKDTPLSLACSGGRQEVVDLLLARGANKEHRNVSDYTPLSLAASGGYVNIIKILLNAGAEINSRTGSKLGISPLMLAAMNGHVPAVKLLLDMGSDINAQIETNRNTALTLACFQGRAEVVSLLLDRKANVEHRAKTGLTPLMEAASGGYAEVGRVLLDKGADVNAPPVPSSRDTALTIAADKGHYKFCELLIHRGAHIDVRNKKGNTPLWLASNGGHFDVVQLLVQAGADVDAADNRKITPLMSAFRKGHVKVVQYLVKEVNQFPSDIECMRYIATITDKELLKKCHQCVETIVKAKDQQAAEANKNASILLKELDLEKSREESRKQALAAKREKRKEKRKKKKEEQKRKQEEDEENKPKENSELPEDEDEEENDEDVGARSSHRPPSAPKSV

SEQ ID NO: 866762 - protein, 508 aa, Homo sapiens
VAEPSAYGGRDVACASLVFGRLQHRGGDRKRGLLGRSSGDAASDQPFRCRSGSTADSSENYIKMKTFEGFCALHLAASQGHWKIVQILLEAGADPNATTLEETTPLFLAVENGQIDVLRLLLQHGANVNGSHSMCGWNSLHQASFQENAEIIKLLLRKGANKECQDDFGITPLFVAAQYGKLESLSILISSGANVNCQALDKATPLFIAAQEGHTKCVELLLSSGADPDLYCNEDSWQLPIHAAAQMGHTKILDLLIPLTNRACDTGLNKVSPVYSAVFGGHEDCLEILLRNGYSPDAQACLVFGFSSPVCMAFQKDCEFFGIVNILLKYGAQINELHLAYCLKYEKFSIFRYFLRKGCSLGPWNHIYEFVNHAIKAQAKYKEWLPHLLVAGFDPLILLCNSWIDSVSIDTLIFTLEFTNWKTLAPAVERMLSARASNAWILQQHIATVPSLTHLCRLEIRSSLKSERLRSDSYISQLPLPRSLHNYLLYEDVLRMYEVPELAAIQDG

SEQ ID NO: 866763 - protein, 211 aa, Homo sapiens
MDFTEAYADTCSTVGLAAREGNVKVLRKLLKKGRSVDVADNRGWMPIHEAAYHNSVECLQMLINADSSENYIKMKTFEGFCALHLAASQGHWKIVQILLEAGADPNATTLEETTPLFLAVENGQIDVLRLLLQHGANVNGSHSMCGWNSLHQASFQENAEIIKLLLRKGANKECQDDFGITPLFVAAQYGKLESLSILISSDMWSQSPNLK

SEQ ID NO: 866764 - protein, 360 aa, Homo sapiens
VAEPSAYGGRDVACASLVFGRLQHRGGDRKRGLLGRSSGDAASDQPFRCRSGSTADWSNKWILQRLTRTRALQLDLLAGWLAGWLAAGWLAGWLAGCWLAGWLAGWLLAGWLAGWLAAGWLAGWLAGCWLAGWLAGWLLAGWLAGWLAAGWLAGWLAGCWLAGWLAGWLLAGWLAGWLAAGWLAGWLAGCWLAGWLAGWLLAGWLAGWLAAGWLAGWLAGCWLAGWLAGWLLAGWLAGWLAAGWLAGWLAGCWLAGWLAGWLLAGWLAGWLAAGWLAGWLAGCMAWHGMAWHGMAVHGMAWHGMAWHGMPGLAWPGLAWPGLPGLAWPGLAWPGLLAWPGLAWPGLACLAWPGLAWPGLA

SEQ ID NO: 866765 - protein, 556 aa, Homo sapiens
MAMMPLVLHHPERQAELGSGLRDGGGAALRPPGRLVKQMDFTEAYADTCSTVGLAAREGNVKVLRKLLKKGRSVDVADNRGWMPIHEAAYHNSVECLQMLINADSSENYIKMKTFEGFCALHLAASQGHWKIVQILLEAGADPNATTLEETTPLFLAVENGQIDVLRLLLQHGANVNGSHSMCGWNSLHQASFQENAEIIKLLLRKGANKECQDDFGITPLFVAAQYGKLESLSILISSGANVNCQALDKATPLFIAAQEGHTKCVELLLSSGADPDLYCNEDSWQLPIHAAAQMGHTKILDLLIPLTNRACDTGLNKVSPVYSAVFGGHEDCLEILLRNGYSPDAQACLVFGFSSPVCMAFQKDCEFFGIVNILLKYGAQINELHLAYCLKYEKFSIFRYFLRKGCSLGPWNHIYEFVNHAIKAQAKYKEWLPHLLVAGFDPLILLCNSWIDSVSIDTLIFTLEFTNWKTLAPAVERMLSARASNAWILQQHIATVPSLTHLCRLEIRSSLKSERLRSDSYISQLPLPRSLHNYLLYEDVLRMYEVPELAAIQDG

SEQ ID NO: 866766 - protein, 473 aa, Homo sapiens
VKPLGILTLCSGEEPGLFSSYSSENYIKMKTFEGFCALHLAASQGHWKIVQILLEAGADPNATTLEETTPLFLAVENGQIDVLRLLLQHGANVNGSHSMCGWNSLHQASFQENAEIIKLLLRKGANKECQDDFGITPLFVAAQYGKLESLSILISSGANVNCQALDKATPLFIAAQEGHTKCVELLLSSGADPDLYCNEDSWQLPIHAAAQMGHTKILDLLIPLTNRACDTGLNKVSPVYSAVFGGHEDCLEILLRNGYSPDAQACLVFGFSSPVCMAFQKDCEFFGIVNILLKYGAQINELHLAYCLKYEKFSIFRYFLRKGCSLGPWNHIYEFVNHAIKAQAKYKEWLPHLLVAGFDPLILLCNSWIDSVSIDTLIFTLEFTNWKTLAPAVERMLSARASNAWILQQHIATVPSLTHLCRLEIRSSLKSERLRSDSYISQLPLPRSLHNYLLYEDVLRMYEVPELAAIQDG

SEQ ID NO: 866767 - protein, 445 aa, Homo sapiens
MKTFEGFCALHLAASQGHWKIVQILLEAGADPNATTLEETTPLFLAVENGQIDVLRLLLQHGANVNGSHSMCGWNSLHQASFQENAEIIKLLLRKGANKECQDDFGITPLFVAAQYGKLESLSILISSGANVNCQALDKATPLFIAAQEGHTKCVELLLSSGADPDLYCNEDSWQLPIHAAAQMGHTKILDLLIPLTNRACDTGLNKVSPVYSAVFGGHEDCLEILLRNGYSPDAQACLVFGFSSPVCMAFQKDCEFFGIVNILLKYGAQINELHLAYCLKYEKFSIFRYFLRKGCSLGPWNHIYEFVNHAIKAQAKYKEWLPHLLVAGFDPLILLCNSWIDSVSIDTLIFTLEFTNWKTLAPAVERMLSARASNAWILQQHIATVPSLTHLCRLEIRSSLKSERLRSDSYISQLPLPRSLHNYLLYEDVLRMYEVPELAAIQDG

SEQ ID NO: 866768 - protein, 547 aa, Homo sapiens [sequence omitted]

SEQ ID NO: 866769 - protein, 411 aa, Homo sapiens
MEEGRRCGHPAAVENGQIDVLRLLLQHGANVNGSHSMCGWNSLHQASFQENAEIIKLLLRKGANKECQDDFGITPLFVAAQYGKLESLSILISSGANVNCQALDKATPLFIAAQEGHTKCVELLLSSGADPDLYCNEDSWQLPIHAAAQMGHTKILDLLIPLTNRACDTGLNKVSPVYSAVFGGHEDCLEILLRNGYSPDAQACLVFGFSSPVCMAFQKDCEFFGIVNILLKYGAQINELHLAYCLKYEKFSIFRYFLRKGCSLGPWNHIYEFVNHAIKAQAKYKEWLPHLLVAGFDPLILLCNSWIDSVSIDTLIFTLEFTNWKTLAPAVERMLSARASNAWILQQHIATVPSLTHLCRLEIRSSLKSERLRSDSYISQLPLPRSLHNYLLYEDVLRMYEVPELAAIQDG

SEQ ID NO: 866770 - protein, 518 aa, Homo sapiens
MDFTEAYADTCSTVGLAAREGNVKVLRKLLKKGRSVDVADNRGWMPIHEAAYHNSVECLQMLINADSSENYIKMKTFEGFCALHLAASQGHWKIVQILLEAGADPNATTLEETTPLFLAVENGQIDVLRLLLQHGANVNGSHSMCGWNSLHQASFQENAEIIKLLLRKGANKECQDDFGITPLFVAAQYGKLESLSILISSGANVNCQALDKATPLFIAAQEGHTKCVELLLSSGADPDLYCNEDSWQLPIHAAAQMGHTKILDLLIPLTNRACDTGLNKVSPVYSAVFGGHEDCLEILLRNGYSPDAQACLVFGFSSPVCMAFQKDCEFFGIVNILLKYGAQINELHLAYCLKYEKFSIFRYFLRKGCSLGPWNHIYEFVNHAIKAQAKYKEWLPHLLVAGFDPLILLCNSWIDSVSIDTLIFTLEFTNWKTLAPAVERMLSARASNAWILQQHIATVPSLTHLCRLEIRSSLKSERLRSDSYISQLPLPRSLHNYLLYEDVLRMYEVPELAAIQDG

SEQ ID NO: 866771 - protein, 85 aa, Homo sapiens
VAEPSAYGGRDVACASLVFGRLQHRGGDRKRGLLGRSSGDAASDQPFRCRSGSTADWSNKWILQRLTRTRALQLDLLPGKAMLKS

SEQ ID NO: 866772 - protein, 352 aa, Homo sapiens
MALPFRKDLEKYKDLDEDELLGNLSETELKQLETVLDDLDPENALLPAGFRQKNQTSKSTTGPFDREHLLSYLEKEALEHKDREDYVPYTGEKKGKIFIPKQKPVQTFTEEKVSLDPELEEALTSASDTELCDLAAILGMHNLITNTKFCNIMGSSNGVDQEHFSNVVKGEKILPVFDEPPNPTNVEESLKRTKENDAHLVEVNLNNIKNIPIPTLKDFAKALETNTHVKCFSLAATRSNDPVATAFAEMLKVNKTLKSLNVESNFITGVGILALIDALRDNETLAELKIDNQRQQLGTAVELEMAKMLEENTNILKFGYQFTQQGPRTRAANAITKNNDLVRKRRVEGDHQ

SEQ ID NO: 866773 - protein, 352 aa, Homo sapiens; identical to SEQ ID NO: 866772

SEQ ID NO: 866774 - protein, 205 aa, Homo sapiens
RVWLPSEKKYGVDQEHISNVVKGEKILPVFDEPPNPTNVEESLKRTKENDAHLVEVNLNNIKNIPIPTLKDFAKALETNTHVKCFSLAATRSNDPVATAFAEMLKVNKTLKSLNVESNFITGVGILALIDALRDNETLAELKIDNQRQQLGTAVELEMAKMLEENTNILKFGYQFTQQGPRTRAANAITKNNDLVRKRRVEGDHQ

SEQ ID NO: 866775 - protein, 352 aa, Homo sapiens; identical to SEQ ID NO: 866772

SEQ ID NO: 866776 - protein, 300 aa, Homo sapiens
MALPFRKDLEKYKDLDEDELLGNLSETELKQLETVLDDLDPENALLPAGFRQKNQTSKSTTGPFDREHLLSYLEKEALEHKDREDYVPYTGEKKGKIFIPKQKPVQTFTEEKVSLDPELEEALTSASDTELCDLAAILGMHNLITNTKFCNIMGSSNGVDQEHFSNVVKGEKILPVFDEPPNPTNVEESLKRTKENDAHLVEVNLNNIKNIPIPTLKDFAKALETNTHVKCFSLAATRSNDPVATAFAEMLKVNKTLKSLNVESNFITGVGILALMGEDCAKIQQQQQQQTKYTWYLGKC

SEQ ID NO: 866777 - protein, 352 aa, Homo sapiens; identical to SEQ ID NO: 866772

SEQ ID NO: 866778 - protein, 352 aa, Homo sapiens; identical to SEQ ID NO: 866772

SEQ ID NO: 866779 - protein, 352 aa, Homo sapiens; identical to SEQ ID NO: 866772

SEQ ID NO: 866780 - protein, 111 aa, Homo sapiens
SGTSHEKALEKEELKMEETRVRTGGYRRRNRSCTTDPPPRFDVPPSLLLSFFFPRICSFLIVLDFIETAQFQQDWESGMEQASQATRKNWSPRLSVRHPRLHCPVSQLVDK

SEQ ID NO: 866781 - protein, 191 aa, Homo sapiens
MALPFRKDLEKYKDLDEDELLGNLSETELKQLETVLDDLDPENALLPAGFRQKNQTSKSTTGPFDREHLLSYLEKEALEHKDREDYVPYTGEKKGKIFIPKQKPVQTFTEEKVSLDPELEEALTSASDTELCDLAAILGMHNLITNTKFCNIMGSSNSLCCNSLCCNSLCCNSLCCNSLCCNSLCCNSLCC

SEQ ID NO: 866782 - protein, 536 aa, Homo sapiens
MLSFSLAAPKIKTADQDLVVDVGKPLTMVVPYDAYPKAEAEWFKENEPLSTKTIDTTAEQTSFRILEAKKGDKGRYKIVLQNKHGKAEGFINLKVIGKPLGLSDLIGKAQFKSKTAHSKNSSICEFQMFLGQYVDLEVTETFDGEVSLAWEEPLTDGGSKIIGYVVERRDIKRKTWVLATDRAESCEFTVTGLQKGGVEYLFRVSARNRVGTGEPVETDNPVEARSKYDVPGPPLNVTITDVNRFGVSLTWEPPEYDGGAEITNYVIELRDKTSIRWDTAMTVRAEDLSATVTDVVEGQEYSFRVRAQNRIGVGKPSAATPFVKVADPIERPSPPVNLTSSDQTQSSVQLKWEPPLKDGGSPILGYIIERCEEGKDNWIRCNMKLVPELTYKVTGLEKGNKYLYRVSAENKAGVSDPSEILGPLTADDAFGVEPTMDLSAFKDGLEVIVPNPITILVPSTGYPRPTATWCFGDKVLETGDRVKMKTLSAYAELVISPSERSDKGIYTLKLENRVKTISGEIDVNVIGKEQNIYHLR

SEQ ID NO: 866783 - protein, 151 aa, Homo sapiens
PPLLTATQLHLQPETWVSIFALPRAIVLAIHQRPGQVFTSLCWMGWPSRLCTVRCCRRSCEDTFFLTSQHRNVSRPVHVPVLVLLSAPSTLPHGGLLHARGCQYQTRAASAFSQFQPLLSTYLPSISTGCLPVILHSTRLTIYFQPALQFP

SEQ ID NO: 866784 - protein, 240 aa, Homo sapiens
MEQTWTRDYFAEDDGEMVPRTSHTAAFLSDTKDRGPPVQSQIWRSGEKVPFVQTYSLRAFEKPPQVQTQALRDFEKHLNDLKKENFSLKLRIYFLEERMQQKYEASREDIYKRNTELKVEVESLKRELQDKKQHLDKTWADVENLNSQNEAELRRQFEERQQETEHVYELLENKMQLLQEESRLAKNEAARMAALVEAEKECNLELSEKLKGVTKNWEDVPGDQVKPDQYTEALAQRDKI

SEQ ID NO: 866785 - protein, 111 aa, Homo sapiens
TDAVAGPDSEDTHPMCRSWGGKSCCLLRWRFVGKASHFPRLLPLPGEERPETKERAWKMEQTWTRDYFAEDDGERHMRLPLMFFSFRFILVFFSIDGLYAHCQARNPALVA

SEQ ID NO: 866786 - protein, 279 aa, Homo sapiens
MEQTWTRDYFAEDDGEMVPRTSHTAAFLSDTKDRGPPVQSQIWRSGEKVPFVQTYSLRAFEKPPQVQTQALRDFEKHLNDLKKENFSLKLRIYFLEERMQQKYEASREDIYKRNTELKVEVESLKRELQDKKQHLDKTWADVENLNSQNEAELRRQFEERQQETEHVYELLENKMQLLQEESRLAKNEAARMAALVEAEKECNLELSEKLKGVTKNWEDVPGDQVKPDQYTEALAQRDKRIEELNQSLAAQERLVEQLSREKQQLLHLLEEPTSMEVQL

SEQ ID NO: 866787 - protein, 203 aa, Homo sapiens
MEQTWTRDYFAEDDGEMVPRTSHTAAFLSDTKDRGPPVQSQIWRSGEKVPFVQTYSLRAFEKPPQVQTQALRDFEKHLNDLKKENFSLKLRIYFLEERMQQKYEASREDIYKRNTELKVEVESLKRELQDKKQHLDKTWADVENLNSQNEAELRRQFEERQQETEHVYELLENKMQLLQEEFRPSKRMKTFSGWGTFWLERQK

SEQ ID NO: 866788 - protein, 206 aa, Homo sapiens
LQLGLGGSRRVTAESWLGVGLHHLCLSSRSMFLCQGFRKYLPEHLNDLKKENFSLKLRIYFLEERMQQKYEASREDIYKRNTELKVEVESLKRELQDKKQHLDKTWADVENLNSQNEAELRRQFEERQQETEHVYELLENKMQLLQEESRLAKNEAARMAALVEAEKECNLELSEKLKGVTKNWEDVPGDQVKPDQYTEALAQRDK

SEQ ID NO: 866789 - protein, 42 aa, Homo sapiens
MEQTWTRDYFAEDDGERHMRWGILKSRGAYCCSQSVRKPIIS

SEQ ID NO: 866790 - protein, 173 aa, Homo sapiens
MSNGYRTLSQHLNDLKKENFSLKLRIYFLEERMQQKYEASREDIYKRNTELKVEVESLKRELQDKKQHLDKTWADVENLNSQNEAELRRQFEERQQETEHVYELLENKMQLLQEESRLAKNEAARMAALVEAEKECNLELSEKLKGVTKNWEDVPGDQVKPDQYTEALAQRDK

SEQ ID NO: 866791 - protein, 219 aa, Homo sapiens
MKGTDSGSCCRRRCDFGCCCRASRRAHYTPYRSGDATRTPQSPRQTPSRERRRPEPAGSWAAAAEEEEAAAAATPWMRDYFAEDDGEMVPRTSHTAAFLSDTKDRGPPVQSQIWRSGEKVPFVQTYSLRAFEKPPQVQTQALRDFEKHLNDLKKENFSLKLRIYFLEERMQQKYEASREDIYKRQLPTQTLGPADFGGLQLNLHLLLEWSSLCKRGWWK

SEQ ID NO: 866792 - protein, 239 aa, Homo sapiens
MEQTWTRDYFAEDDGEMVPRTSHTAAFLSDTKDRGPPVQSQIWRSGEKVPFVQTYSLRAFEKPPQVQTQALRDFEKHLNDLKKENFSLKLRIYFLEERMQQKYEASREDIYKRNTELKVEVESLKRELQDKKQHLDKTWADVENLNSQNEAELRRQFEERQQETEHVYELLENKMQLLQEESRLAKNEAARMAALVEAEKECNLELSEKLKGVTKNWEDVPGDQVKPDQYTEALAQRDK

SEQ ID NO: 866793 - protein, 313 aa, Homo sapiens
MEQTWTRDYFAEDDGEMVPRTSHTAAFLSDTKDRGPPVQSQIWRSGEKVPFVQTYSLRAFEKPPQVQTQALRDFEKHLNDLKKENFSLKLRIYFLEERMQQKYEASREDIYKRNTELKVEVESLKRELQDKKQHLDKTWADVENLNSQNEAELRRQFEERQQETEHVYELLENKMQLLQEESRLAKNEAARMAALVEAEKECNLELSEKLKGVTKNWEDVPGDQVKPDQYTEALAQRDKRIEELNQSLAAQERLVEQLSREKQQLLHLLEEPTSMEVQPMTEELLKQQKLNSHETTITQQSVSDSHLAELQEK

SEQ ID NO: 866794 - protein, 310 aa, Homo sapiens
MKGTDSGSCCRRRCDFGCCCRASRRAHYTPYRSGDATRTPQSPRQTPSRERRRPEPAGSWAAAAEEEEAAAAATPWMRDYFAEDDGEMVPRTSHTAAFLSDTKDRGPPVQSQIWRSGEKVPFVQTYSLRAFEKPPQVQTQALRDFEKHLNDLKKENFSLKLRIYFLEERMQQKYEASREDIYKRNTELKVEVESLKRELQDKKQHLDKTWADVENLNSQNEAELRRQFEERQQETEHVYELLENKMQLLQEESRLAKNEAARMAALVEAEKECNLELSEKLKGVTKNWEDVPGDQVKPDQYTEALAQRDK

SEQ ID NO: 866795 - protein, 179 aa, Homo sapiens
CLESQHFGRPRRADLKHLNDLKKENFSLKLRIYFLEERMQQKYEASREDIYKRNTELKVEVESLKRELQDKKQHLDKTWADVENLNSQNEAELRRQFEERQQETEHVYELLENKMQLLQEESRLAKNEAARMAALVEAEKECNLELSEKLKGVTKNWEDVPGDQVKPDQYTEALAQRDK

SEQ ID NO: 866796 - protein, 150 aa, Homo sapiens
MILAHGKLRLPGSSDSPASASRVAGITGMCHHAPLARLVSNTLPQVILPPLGLQQAEELPRRQEVEQNTPSLVPIIDNIMELTQRKKTASTPCDFIPNQSALLAHWLPPTHQIVLKNSALQTLGETDLSNNKTLVSCKNKNNGLLRLTAE

SEQ ID NO: 866797 - protein, 176 aa, Homo sapiens
MASSSGNDDDLTIPRAAINKMIKETLPNVRVANDARELVVNCCTEFIHLISSEANEICNKSEKKTISPEHVIQALESLGFGSYISEVKEVLQECKTVALKRRKASSRLENLGIPEEELLRQQQELFAKARQQQAELAQQEWLQMQQAAQQAQLAAASASASNQAGSSQDEEDDDDI

SEQ ID NO: 866798 - protein, 176 aa, Homo sapiens; identical to SEQ ID NO: 866797

SEQ ID NO: 866799 - protein, 176 aa, Homo sapiens; identical to SEQ ID NO: 866797

SEQ ID NO: 866800 - protein, 176 aa, Homo sapiens; identical to SEQ ID NO: 866797

SEQ ID NO: 866801 - protein, 176 aa, Homo sapiens; identical to SEQ ID NO: 866797

SEQ ID NO: 866802 - protein, 107 aa, Homo sapiens
PARHVTPAPTWAEEPPRPLAESPRQIPSVAAKMMCGAPSATQPATAETQHIADQVRSQLEEKENKKFPVFKAVSFKSQVVAGTNYFIKGARRRRGLRTPASVPISPS

SEQ ID NO: 866803 - protein, 107 aa, Homo sapiens; identical to SEQ ID NO: 866802

SEQ ID NO: 866804 - protein, 115 aa, Homo sapiens
PARHVTPAPTWAEEPPRPLAESPRQIPSVAAKMMCGAPSATQPATAETQHIADQVRSQLEEKENKKFPVFKAVSFKSQVVAGTNYFIKVECGPQEGLPRTGAGRKPPVQARAVWS

SEQ ID NO: 866805 - protein, 108 aa, Homo sapiens
PARHVTPAPTWAEEPPRPLAESPRQIPSVAAKMMCGAPSATQPATAETQHIADQVRSQLEEKENKKVHVGDEDFVHLRVFQSLPHENKPLTLSNYQTNKAKHDELTYF

SEQ ID NO: 866806 - protein, 115 aa, Homo sapiens; identical to SEQ ID NO: 866804

SEQ ID NO: 866807 - protein, 107 aa, Homo sapiens; identical to SEQ ID NO: 866802

SEQ ID NO: 866808 - protein, 107 aa, Homo sapiens; identical to SEQ ID NO: 866802

SEQ ID NO: 866809 - protein, 107 aa, Homo sapiens; identical to SEQ ID NO: 866802

SEQ ID NO: 866810 - protein, 107 aa, Homo sapiens; identical to SEQ ID NO: 866802

SEQ ID NO: 866811 - protein, 115 aa, Homo sapiens; identical to SEQ ID NO: 866804

SEQ ID NO: 866812 - protein, 577 aa, Homo sapiens [sequence omitted]

SEQ ID NO: 866813 - protein, 648 aa, Homo sapiens
MHGFAVFQELVTFRDVAIDFSRQEWEYLDPNQRDLYRDVMLENYRNLVSLGGHSISKPVVVDLLERGKEPWMILREETQFTDLDLQCEIISYIEVPTYETDISSTQLQSIYKREKLYECKKCQKKFSSGYQLILHHRFHVIERPYECKECGKNFRSGYQLTLHQRFHTGEKPYECTECGKNFRSGYQLTVHQRFHTGEKTYECRQCGKAFIYASHIVQHERIHTGGKPYECQECGRAFSQGGHLRIHQRVHTGEKPYKCKECGKTFSRRSNLVEHGQFHTDEKPYICEKCGKAFRRGHQLTVHQRVHTGKKPYECKECGKGYTTASYFLLHQRIHKGGKPYECKECKKTFTLYRNLTRHQNIHTGEKLFECKQCGKTYTTGSKLFQHQKTHTGEKPYECKECGKAFSLYGYLKQHQKIHTGMKHFECKECKKTFTLYRNLTRHQNIHTGKKLFECQECGKAYSTGSNLIQHRKTHTGEKPYKCKECGKTFSLHGYLNQHQKIHTGVKPYECKVCRKTFTFYRNLTLHQSIHTDEKPFECKECGKTFRRSSHLTAHQSIHADKKPYECKECGKAFKMYGYLTQHQKIHTGGKPYECKECGKAFSRASNLVQHERIHTGEKPYVCKQCGKTFRYGSALKAHQRIHRSIKV

SEQ ID NO: 866814 - protein, 135 aa, Homo sapiens
GQPRVRIPLLSLLGSLKPSELRGQVGHAFASAIFASAISLCVFTLLVEGKLKPPGASVRRCLQSNRDLGFRATFPTSHRGHGALGLNYISQRATGTPNLWLPFRFRVVLLQVSGISDIQGCGHRLLSAGVGIPGP

SEQ ID NO: 866815 - protein, 784 aa, Homo sapiens
GQPRVRIPLLSLLGSLKPSELRGQVGHAFASAIFASAISLCVFTLLVEGKLKPPGASVRRCLQSNRDLGFRATFPTSHRGHGALGLNYISQRATGTPNLWLPFRFRVVLLQALDSLEFECFQYWNPTKYGLIRSYNSKTMTCFQELVTFRDVAIDFSRQEWEYLDPNQRDLYRDVMLENYRNLVSLGGHSISKPVVVDLLERGKEPWMILREETQFTDLDLQCEIISYIEVPTYETDISSTQLQSIYKREKLYECKKCQKKFSSGYQLILHHRFHVIERPYECKECGKNFRSGYQLTLHQRFHTGEKPYECTECGKNFRSGYQLTVHQRFHTGEKTYECRQCGKAFIYASHIVQHERIHTGGKPYECQECGRAFSQGGHLRIHQRVHTGEKPYKCKECGKTFSRRSNLVEHGQFHTDEKPYICEKCGKAFRRGHQLTVHQRVHTGKKPYECKECGKGYTTASYFLLHQRIHKGGKPYECKECKKTFTLYRNLTRHQNIHTGEKLFECKQCGKTYTTGSKLFQHQKTHTGEKPYECKECGKAFSLYGYLKQHQKIHTGMKHFECKECKKTFTLYRNLTRHQNIHTGKKLFECQECGKAYSTGSNLIQHRKTHTGEKPYKCKECGKTFSLHGYLNQHQKIHTGVKPYECKVCRKTFTFYRNLTLHQSIHTDEKPFECKECGKTFRRSSHLTAHQSIHADKKPYECKECGKAFKMYGYLTQHQKIHTGGKPYECKECGKAFSRASNLVQHERIHTGEKPYVCKQCGKTFRYGSALKAHQRIHRSIKV

SEQ ID NO: 866816 - protein, 600 aa, Homo sapiens
RLECSGLISAHCNLYLPRSSDSPASASRVAGITDLDLQCEIISYIEVPTYETDISSTQLQSIYKREKLYECKKCQKKFSSGYQLILHHRFHVIERPYECKECGKNFRSGYQLTLHQRFHTGEKPYECTECGKNFRSGYQLTVHQRFHTGEKTYECRQCGKAFIYASHIVQHERIHTGGKPYECQECGRAFSQGGHLRIHQRVHTGEKPYKCKECGKTFSRRSNLVEHGQFHTDEKPYICEKCGKAFRRGHQLTVHQRVHTGKKPYECKECGKGYTTASYFLLHQRIHKGGKPYECKECKKTFTLYRNLTRHQNIHTGEKLFECKQCGKTYTTGSKLFQHQKTHTGEKPYECKECGKAFSLYGYLKQHQKIHTGMKHFECKECKKTFTLYRNLTRHQNIHTGKKLFECQECGKAYSTGSNLIQHRKTHTGEKPYKCKECGKTFSLHGYLNQHQKIHTGVKPYECKVCRKTFTFYRNLTLHQSIHTDEKPFECKECGKTFRRSSHLTAHQSIHADKKPYECKECGKAFKMYGYLTQHQKIHTGGKPYECKECGKAFSRASNLVQHERIHTGEKPYVCKQCGKTFRYGSALKAHQRIHRSIKV

SEQ ID NO: 866817 - protein, 608 aa, Homo sapiens
HTWLIFVFLVEMGFHHVGQAGLELLTSGDPPTSASESAGITDLDLQCEIISYIEVPTYETDISSTQLQSIYKREKLYECKKCQKKFSSGYQLILHHRFHVIERPYECKECGKNFRSGYQLTLHQRFHTGEKPYECTECGKNFRSGYQLTVHQRFHTGEKTYECRQCGKAFIYASHIVQHERIHTGGKPYECQECGRAFSQGGHLRIHQRVHTGEKPYKCKECGKTFSRRSNLVEHGQFHTDEKPYICEKCGKAFRRGHQLTVHQRVHTGKKPYECKECGKGYTTASYFLLHQRIHKGGKPYECKECKKTFTLYRNLTRHQNIHTGEKLFECKQCGKTYTTGSKLFQHQKTHTGEKPYECKECGKAFSLYGYLKQHQKIHTGMKHFECKECKKTFTLYRNLTRHQNIHTGKKLFECQECGKAYSTGSNLIQHRKTHTGEKPYKCKECGKTFSLHGYLNQHQKIHTGVKPYECKVCRKTFTFYRNLTLHQSIHTDEKPFECKECGKTFRRSSHLTAHQSIHADKKPYECKECGKAFKMYGYLTQHQKIHTGGKPYECKECGKAFSRASNLVQHERIHTGEKPYVCKQCGKTFRYGSALKAHQRIHRSIKV

SEQ ID NO: 866818 - protein, 305 aa, Homo sapiens
VTSGVRPGSRPLPRRRSCRPMAGGWAQGSRRAARLPEGGRLMAPASRLLALWALAAVALPGSGAEGDGGWRPGGPGAVAEEERCTVERRADLTYAEFVQQYAFVRPVILQGLTDNSRFRALCSRDRLLASFGDRVVRLSTANTYSYHKVDLPFQEYVEQLLHPQDPTSLGNDTLYFFGDNNFTEWASLFRHYSPPPFGLLGTAPAYSFGIAGAGSGVPFHWHGPGYSEVIYGRKRWFLYPPEKTPEFHPNKTTLAWLRDTYPALPPSARPLECTIRAGEVLYFPDRWWHATLNLDTSVFISTFLG

SEQ ID NO: 866819 - protein, 275 aa, Homo sapiens
VTSGVRPGSRPLPRRRSCRPMAGGWAQGSRRAARLPEGGRLMAPASRLLALWALAAVALPGSGAEGDGGWYAFVRPVILQGLTDNSRFRALCSRDRLLASFGDRVVRLSTANTYSYHKVDLPFQEYVEQLLHPQDPTSLGNDTLYFFGDNNFTEWASLFRHYSPPPFGLLGTAPAYSFGIAGAGSGVPFHWHGPGYSEVIYGRKRWFLYPPEKTPEFHPNKTTLAWLRDTYPALPPSARPLECTIRAGEVLYFPDRWWHATLNLDTSVFISTFLG

SEQ ID NO: 866820 - protein, 332 aa, Homo sapiens
RSLPGSVPVPGRCHDDEAAGQWLADGPKVPGVQRGCLRAAGSWRRRRGCSRSGRWRLWLYPAPGRRATAGGERPGRGRAVGSRAAGGARADPAVPSRRPGGPGAVAEEERCTVERRADLTYAEFVQQYAFVRPVILQGLTDNSRFRALCSRDRLLASFGDRVVRLSTANTYSYHKVDLPFQEYVEQLLHPQDPTSLGNDTLYFFGDNNFTEWASLFRHYSPPPFGLLGTAPAYSFGIAGAGSGVPFHWHGPGYSEVIYGRKRWFLYPPEKTPEFHPNKTTLAWLRDTYPALPPSARPLECTIRAGEVLYFPDRWWHATLNLDTSVFISTFLG

SEQ ID NO: 866821 - protein, 341 aa, Homo sapiens
VTSGVRPGSRPLPRRRSCRPMAGGWAQGSRRAARLPEGGRLMAPASRLLALWALAAVALPGSGAEGDGGWRPGGPGAVAEEERCTVERRADLTYAEFVQQYVLPLIAEVASCSPARLPRPPKAAFPGPRAHAWGWGGEAGGPAWPRLCPSFQRFRALCSRDRLLASFGDRVVRLSTANTYSYHKVDLPFQEYVEQLLHPQDPTSLGNDTLYFFGDNNFTEWASLFRHYSPPPFGLLGTAPAYSFGIAGAGSGVPFHWHGPGYSEVIYGRKRWFLYPPEKTPEFHPNKTTLAWLRDTYPALPPSARPLECTIRAGEVLYFPDRWWHATLNLDTSVFISTFLG

SEQ ID NO: 866822 - protein, 126 aa, Homo sapiens
VTSGVRPGSRPLPRRRSCRPMAGGWAQGSRRAARLPEGGRLMAPASRLLALWALAAVALPGSGAEGDGGWRPGGPGAVAEEERCTVERRADLTYAEFVQQYVLPLIAEVASCSPARLPRPPKAAFP

SEQ ID NO: 866823 - protein, 216 aa, Homo sapiens
RSLPGSVPVPGRCHDDEAAGQWLADGPKVPGVQRGCLRAAGSWRRRRGCSRSGRWRLWLYPAPGRRATAGGERPGRGRAVGSRAAGGARADPAVPAGARAGRGPWRRRSAARWSVGPTSPTRSSCSSTCAPDRGGRVLFTGPSAPTAQGRLPLTSRARVGLGRRGWRSGLAATLPFFPGTPSSGPSSCRDSRTTRGSGPCAPATGCWLRLGTEWSG

SEQ ID NO: 866824 - protein, 387 aa, Homo sapiens
VTSGVRPGSRPLPRRRSCRPMAGGWAQGSRRAARLPEGGRLMAPASRLLALWALAAVALPGSGAEGDGGWRPGGPGAVAEEERCTVERRADLTYAEFVQQYAFVRPVILQGLTDNSRFRALCSRDRLLASFGDRVVRLSTANTYSYHKVDLPFQEYVEQLLHPQDPTSLGNDTLYFFGDNNFTEWASLFRHYSPPPFGLLGTAPAYSFGIAGAGSGVPFHWHGPGYSEVIYGRKRWFLYPPEKTPEFHPNKTTLAWLRDTYPALPPSARPLECTIRAGERSVAGRRGPGQARGPQLISAAPPSSTRCCTSPTAGGMLRSTLTPASSSPPSSASQNSWQDCRSHTSTSHLVLTDFITQIVAAMASAQPTLTCFSSPQRGTITAQQKRC

SEQ ID NO: 866825 - protein, 386 aa, Homo sapiens
VTSGVRPGSRPLPRRRSCRPMAGGWAQGSRRAARLPEGGRLMAPASRLLALWALAAVALPGSGAEGDGGWRPGGPGAVAEEERCTVERRADLTYAEFVQQYAFVRPVILQGLTDNSVSACPSVPGHSRPCWARPLSPLPAPAEVPGPVLPRQVAGFVWGQSGPAEHRQHLLLPQRYAASPLGPAHLPTPGRLDQTVLTRLFPAVDLPFQEYVEQLLHPQDPTSLGNDTLYFFGDNNFTEWASLFRHYSPPPFGLLGTAPAYSFGIAGAGSGVPFHWHGPGYSEVIYGRKVSSGVGVEAWDSLTKTGKGELLLMPQRWFLYPPEKTPEFHPNKTTLAWLRDTYPALPPSARPLECTIRAGEVLYFPDRWWHATLNLDTSVFISTFLG

SEQ ID NO: 866826 - protein, 167 aa, Homo sapiens
VTSGVRPGSRPLPRRRSCRPMAGGWAQGSRRAARLPEGGRLMAPASRLLALWALAAVALPGSGAEGDGGWYAFVRPVILQGLTDNSVSACPSVPGHSRPCWARPLSPLPAPAEVPGPVLPRQVAGFVWGQSGPAEHRQHLLLPQSGLALPGVCGAAAAPPGPHLPGQ

SEQ ID NO: 866827 - protein, 305 aa, Homo sapiens; identical to SEQ ID NO: 866818

SEQ ID NO: 866828 - protein, 305 aa, Homo sapiens; identical to SEQ ID NO: 866818

SEQ ID NO: 866829 - protein, 384 aa, Homo sapiens
RSLPGSVPVPGRCHDDEAAGQWLADGPKVPGVQRGCLRAAGSWRRRRGCSRSGRWRLWLYPAPGRRATAGGERPGRGRAVGSRAAGGARADPAVPAGARAGRGPWRRRSAARWSVGPTSPTRSSCSSTCAPDRGGRVLFTGRVCPDRPRPPSPDLARTRGAGAARLAVRPGRDSALLSRYAFVRPVILQGLTDNSRFRALCSRDRLLASFGDRVVRLSTANTYSYHKVDLPFQEYVEQLLHPQDPTSLGNDTLYFFGDNNFTEWASLFRHYSPPPFGLLGTAPAYSFGIAGAGSGVPFHWHGPGYSEVIYGRKRWFLYPPEKTPEFHPNKTTLAWLRDTYPALPPSARPLECTIRAGEVLYFPDRWWHATLNLDTSVFISTFLG

SEQ ID NO: 866830 - protein, 197 aa, Homo sapiens
VTSGVRPGSRPLPRRRSCRPMAGGWAQGSRRAARLPEGGRLMAPASRLLALWALAAVALPGSGAEGDGGWRPGGPGAVAEEERCTVERRADLTYAEFVQQYAFVRPVILQGLTDNSVSACPSVPGHSRPCWARPLSPLPAPAEVPGPVLPRQVAGFVWGQSGPAEHRQHLLLPQSGLALPGVCGAAAAPPGPHLPGQ

SEQ ID NO: 866831 - protein, 262 aa, Homo sapiens
VTSGVRPGSRPLPRRRSCRPMAGGWAQGSRRAARLPEGGRLMAPASRLLALWALAAVALPGSGAEGDGGWRPGGPGAVAEEERCTVERRADLTYAEFVQQYAFVRPVILQGLTDNSRFRALCSRDRLLASFGDRVVRLSTANTYSYHKVDLPFQEYVEQLLHPQDPTSLGNGEAALGGGRGWGRLESPGARIPVPAVSVGRHPVLLRGQQLHRVGLSLSALLPTPIWPAGNRSSLQLWNRRSWLGGALPLAWTRVLRSDLRS

SEQ ID NO: 866832 - protein, 198 aa, Homo sapiens
VTSGVRPGSRPLPRRRSCRPMAGGWAQGSRRAARLPEGGRLMAPASRLLALWALAAVALPGSGAEGDGGWRPGGPGAVAEEERCTVERRADLTYAEFVQQYAFVRPVILQGLTDNSVSACPSVPGHSRPCWARPLSPLPAPAEVPGPVLPRQVAGFVWGQSGPAEHRQHLLLPQSGLALPGVCGAAAAPPGPHLPGQW

SEQ ID NO: 866833 - protein, 260 aa, Homo sapiens
VTSGVRPGSRPLPRRRSCRPMAGGWAQGSRRAARLPEGGRLMAPASRLLALWALAAVALPGSGAEGDGGWRPGGPGAVAEEERCTVERRADLTYAEFVQQYAFVRPVILQGLTDNSRFRALCSRDRLLASFGDRVVRLSTANTYSYHKVDLPFQEYVEQLLHPQDPTSLGNDTLYFFGDNNFTEWASLFRHYSPPPFGLLGTAPAYSFGIAGAGSGVPFHWHGPGYSEVIYGRKVLYFPDRWWHATLNLDTSVFISTFLG

SEQ ID NO: 866834 - protein, 305 aa, Homo sapiens; identical to SEQ ID NO: 866818

SEQ ID NO: 866835 - protein, 70 aa, Homo sapiens
MTMNVLEAGKWKSIVPAPGEGLLAVLHMMVFTDALHRERSVKWQAGVCYNGGKDFAVSLARPKAAEGIAD

SEQ ID NO: 866836 - protein, 167 aa, Homo sapiens
LHHLVDEEKARCLEGIGGHTRGLVASLDMQLEQAQGTRERLAQAECVLEQFGNEDHHKFIRKFHSMASRAEMPQARPLEGAFSPISFKPGLHQADIKLTVWKRLFRKVLPAPEPLKLDPATAHPLLELSKGNTVVQCGLLAQRRASQPERFDYSTCVLASRGFSCGR

SEQ ID NO: 866837 - protein, 96 aa, Homo sapiens
MPQARPLEGAFSPISFKPGLHQADIKLTVWKRLFRKVLPAPEPLKLDPATAHPLLELSKGNTVVQCGLLAQRRASQPERFDYSTCVLASRGFSCGR

SEQ ID NO: 866838 - protein, 220 aa, Homo sapiens
LHHLVDEEKARCLEGIGGHTRGLVASLDMQLEQAQGTRERLAQAECVLEQFGNEDHHKFIRKFHSMASRAEMPQARPLEGAFSPISFKPGLHQADIKLTVWKRLFRKVLPGSSPVLAPSRPWGKRDEEDTAPLLGEFRASISFCGPGLLPSTWPHRPSVISLPAPEPLKLDPATAHPLLELSKGNTVVQCGLLAQRRASQPERFDYSTCVLASRGFSCGR

SEQ ID NO: 866839 - protein, 110 aa, Homo sapiens
HPGIHLSSSSKIPAWQLRFSHLVGYGARYYSYLMSRAVASMVWKECFLQDPFNRAAGERYRREMLAHGGGREPMLMVEGMLQKCPSVDDFVSALVSDLDLDFETFLMDSE

SEQ ID NO: 866840 - protein, 755 aa, Homo sapiens
TRKRGRHVGRRGLLPWKRGARAPSESSRAGICVGGRDCSGARMLCVGRLGGLGARAAALPPRRAGRGSLEAGIRARRVSTSWSPVGAAFNVKPQGSRLDLFGERRGLFGVPELSAPEGFHIAQEKALRKTELLVDRACSTPPGPQTVLIFDELSDSLCRVADLADFVKIAHPEPAFREAAEEACRSIGTMVEKLNTNVDLYQSLQKLLADKKLVDSLDPETRRVAELFMFDFEISGIHLDKEKRKRAVDLNVKILDLSSTFLMGTNFPNKIEKHLLPEHIRRNFTSAGDHIIIDGLHAESPDDLVREAAYKIFLYPNAGQLKCLEELLSSRDLLAKLVGYSTFSHRALQGTIAKNPETVMQFLEKLSDKLSERTLKDFEMIRGMKMKLNPQNSEVMPWDPPYYSGVIRAERYNIEPSLYCPFFSLGACMEGLNILLNRLLGISLYAEQPAKGEVWSEDVRKLAVVHESEGLLGYIYCDFFQRADKPHQDCHFTIRGGRLKEDGDYQLPVVVLMLNLPRSSRSSPTLLTPGMMENLFHEMGHAMHSMLGRTRYQHVTGTRCPTDFAEVPSILMEYFANDYRVVNQFARHYQTGQPLPKNMVSRLCESKKVCAAADMQLQVFYATLDQIYHGKHPLRNSTTDILKETQEKFYGLPYVPNTAWQLRFSHLVGYGARYYSYLMSRAVASMVWKECFLQDPFNRAAGERYRREMLAHGGGREPMLMVEGMLQKCPSVDDFVSALVSDLDLDFETFLMDSE

SEQ ID NO: 866841 - protein, 755 aa, Homo sapiens; identical to SEQ ID NO: 866840

SEQ ID NO: 866842 - protein, 457 aa, Homo sapiens
TRKRGRHVGRRGLLPWKRGARAPSESSRAGICVGGRDCSGARMLCVGRLGGLGARAAALPPRRAGRGSLEAGIRARRVSTSWSPVGAAFNVKPQGSRLDLFGERRGLFGVPELSAPEGFHIAQEKALRKTELLVDRACSTPPGPQTVLIFDELSDSLCRVADLADFVKIAHPEPAFREAAEEACRSIGTMVEKLNTNVDLYQSLQKLLADKKLVDSLDPETRRVAELFMFDFEISGIHLDKEKRKRAVDLNVKILDLSSTFLMGTNFPNKIEKHLLPEHIRRNFTSAGDHIIIDGLHAESPDDLVREAAYKIFLYPNAGQLKCLEELLSSRDLLAKLVGYSTFSHRALQGTIAKNPETVMQFLEKLSDKLSERTLKDFEMIRGMKMKLNPQNSEVMPWDPPYYSGVIRAERYNIEPSLYCPFFSLGACMEGLNILLNRLLGISLYVCFRSVLLLMTS

SEQ ID NO: 866843 - protein, 755 aa, Homo sapiens; identical to SEQ ID NO: 866840

SEQ ID NO: 866844 - protein, 651 aa, Homo sapiens [sequence omitted]

SEQ ID NO: 866845 - protein, 287 aa, Homo sapiens
NIYTITITSIIQNKIQEESLDCHFTIRGGRLKEDGDYQLPVVVLMLNLPRSSRSSPTLLTPGMMENLFHEMGHAMHSMLGRTRYQHVTGTRCPTDFAEVPSILMEYFANDYRVVNQFARHYQTGQPLPKNMVSRLCESKKVCAAADMQLQVFYATLDQIYHGKHPLRNSTTDILKETQEKFYGLPYVPNTAWQLRFSHLVGYGARYYSYLMSRAVASMVWKECFLQDPFNRAAGERYRREMLAHGGGREPMLMVEGMLQKCPSVDDFVSALVSDLDLDFETFLMDSE

SEQ ID NO: 866846 - protein, 600 aa, Homo sapiens
TRKRGRHVGRRGLLPWKRGARAPSESSRAGICVGGRDCSGARMLCVGRLGGLGARAAALPPRRAGRGSLEAGIRARRVSTSWSPVGAAFNVKPQGSRLDLFGERRGLFGVPELSAPEGFHIAQEKALRKTELLVDRACSTPPGPQTVLIFDELSDSLCRVADLADFVKIAHPEPAFREAAEEACRSIGTMVEKLNTNVDLYQSLQKLLADKKLVDSLDPETRRVAELFMFDFEISGIHLDKEKRKRAVDLNVKILDLSSTFLMGTNFPNKIEKHLLPEHIRRNFTSAGDHIIIDGLHAESPDDLVREAAYKIFLYPNAGQLKCLEELLSSRDLLAKLVGYSTFSHRALQGTIAKNPETVMQFLEKLSDKLSERTLKDFEMIRGMKMKLNPQNSEVMPWDPPYYSGVIRAERYNIEPSLYCPFFSLGACMEGLNILLNRLLGISLYAEQPAKGEVWSEDVRKLAVVHESEGLLGYIYCDFFQRADKPHQDCHFTIRGGRLKEDGDYQLPVVVLMLNLPRSSRSSPTLLTPGMMENLFHEMGHAMHSMLGRTRYQHVTGTRCPTDFAEVPSILMEYFANDYRVVNQFARHYQTGQVGTVILS

SEQ ID NO: 866847 - protein, 271 aa, Homo sapiens
MNRTWPRRIWGSSQDEAELIREDIQGALHNYRSGRGERRAAALRATQEELQRDRSPAAETPPLQRRPSVRAVISTVERGAGRGRPQAKPIPEAEEAQRPEPVGTSSNADSASPDLGPRGPDLAVLQAEREVDILNHVFDDVESFVSRLQKSAEAARVLEHRERGRRSRRRAAGGKGHPGVGSEPPPDLFQMSPLSPGSPLPPLARADLTAILTGCSPLSACLVLARVPSPRPSAPLRGLADAAGQPPSEAEYTDVLQKIKYAFSLAGEDAP

SEQ ID NO: 866848 - protein, 207 aa, Homo sapiens
MGNHVKGTQTSLLVIYTNEFLQGTHPQNASKAQRPEPVGTSSNADSASPDLGPRGPDLAVLQAEREVDILNHVFDDVESFVSRLQKSAEAARVLEHRERGRRSRRRAAGGKGHPGVGSEPPPDLFQMSPLSPGSPLPPLARADLTAILTGCSPLSACLVLARVPSPRPSAPLRGLADAAGQPPSEAEYTDVLQKIKYAFSLAGEDAP

SEQ ID NO: 866849 - protein, 380 aa, Homo sapiens
MGRKAIVLAIANTSLAFPLCQHLVTFCLGEDDGVHTVEDASRKLAVMDSQGRVWAQEMLLRVSPDHVTLLDPASKEELESYPLGAIVRCDAVMPPGRSRSLLLLVCQEPERAQPDVHFFQGLRLGAELIREDIQGALHNYRSGRGERRAAALRATQEELQRDRSPAAETPPLQRRPSVRAVISTVERGAGRGRPQAKPIPEAEEAQRPEPVGTSSNADSASPDLGPRGPDLAVLQAEREVDILNHVFDDVESFVSRLQKSAEAARVLEHRERGRRSRRRAAGGKGHPGVGSEPPPDLFQMSPLSPGSPLPPLARADLTAILTGCSPLSACLVLARVPSPRPSAPLRGLADAAGQAALGGEYTDVLQKIKYAFSLAGEDAP

SEQ ID NO: 866850 - protein, 334 aa, Homo sapiens
MDSQGRVWAQEMLLRVSPDHVTLLDPASKEELESYPLGAIVRCDAVMPPGRSRSLLLLVCQEPERAQPDVHFFQGLRLGAELIREDIQGALHNYRSGRGERRAAALRATQEELQRDRSPAAETPPLQRRPSVRAVISTVERGAGRGRPQAKPIPEAEEAQRPEPVGTSSNADSASPDLGPRGPDLAVLQAEREVDILNHVFDDVESFVSRLQKSAEAARVLEHRERGRRSRRRAAGGKGHPGVGSEPPPDLFQMSPLSPGSPLPPLARADLTAILTGCSPLSACLVLARVPSPRPSAPLRGLADAAGQPPSEAEYTDVLQKIKYAFSLAGEDAP

SEQ ID NO: 866851 - protein, 491 aa, Homo sapiens
MSTATGPEAAPKPSAKSIYEQRKRYSTVVMADVSQYPVNHLVTFCLGEDDGVHTVEDASRKLAVMDSQGRVWAQEMLLRVSPDHVTLLDPASKEELESYPLGAIVRCDAVMPPGRSRSLLLLVCQEPERAQPDVHFFQGLRLGAELIREDIQGALHNYRSGRGERRAAALRATQEELQRDRSPAAETPPLQRRPSVRAVISTVERGAGRGRPQAKPIPEAEEAQRPEPVGTSSNADSASPDLGPRGPDLAVLQAEREVVSRKEGVWGQGQATGGGARAWKGGAGCGTGVLWSDFCVMEEGLGRGRGLVVGRGQVFGAWPDLGKCIGAQVQGFDGDGFGTREPWRPPPLSPEDILNHVFDDVESFVSRLQKSAEAARVLEHRERGRRSRRRAAGGKGHPGVGSEPPPDLFQMSPLSPGSPLPPLARADLTAILTGCSPLSACLVLARVPSPRPSAPLRGLADAAGQPPSEAEYTDVLQKIKYAFSLAGEDAP

SEQ ID NO: 866852 - protein, 398 aa, Homo sapiens
MSTATGPEAAPKPSAKSIYEQRKRYSTVVMADVSQYPVNHLVTFCLGEDDGVHTVEDASRKLAVMDSQGRVWAQEMLLRVSPDHVTLLDPASKEELESYPLGAIVRCDAVMPPGRSRSLLLLVCQEPERAQPDVHFFQGLRLGAELIREDIQGALHNYRSGRGERRAAALRATQEELQRDRSPAAETPPLQRRPSVRAVISTVERGAGRGRPQAKPIPEAEEAQRPEPVGTSSNADSASPDLGPRGPDLAVLQAEREVDILNHVFDDVESFVSRLQKSAEAARVLEHRERGRRSRRRAAGGKGHPGVGSEPPPDLFQMSPLSPGSPLPPLARADLTAILTGCSPLSACLVLARVPSPRPSAPLRGLADAAGQPPSEAEYTDVLQKIKYAFSLAGEDAP

SEQ ID NO: 866853 - protein, 61 aa, Homo sapiens
MQVILLEKVGAQAPENNPNIQRNRPPPTFPEGGRCTSRSVRGCPRGTTLLFLPKEGRPECV

SEQ ID NO: 866854 - protein, 259 aa, Homo sapiens
LSRQAQVQAVQLGRPSGSCRGGRAQLQEGVQKPQAMAVGNINELPENILLELFTHVPARQLLLNCRLVCSLWRDLIDLVTLWKRKCLREGFITEDWDQPVADWKIFYFLRSLHRNLLHNPCAEEGFEFWSLDVNGGDEWKVEDLSRDQRKEFPNDQVRSQARLRVQVPAVRSAPVVRARASGDLPARPGDHPAEERCQVEGGLPHILQLPARRPLHLVSARRRGHSLLGRLVRPEGHQQQHHHRAPAALTPPEPPSAEP

SEQ ID NO: 866855 - protein, 224 aa, Homo sapiens
MAVGNINELPENILLELFTHVPARQLLLNCRLVCSLWRDLIDLVTLWKRKCLREGFITEDWDQPVADWKIFYFLRSLHRNLLHNPCAEEGFEFWSLDVNGGDEWKVEDLSRDQRKEFPNDQVRSQARLRVQVPAVRSAPVVRARASGDLPARPGDHPAEERCQVEGGLPHILQLPARRPLHLVSARRRGHSLLGRLVRPEGHQQQHHHRAPAALTPPEPPSAEP

SEQ ID NO: 866856 - protein, 255 aa, Homo sapiens
MAVGNINELPENILLELFTHVPARQLLLNCRLVCSLWRDLIDLVTLWKRKCLREGFITEDWDQPVADWKIFYFLRSLHRNLLHNPCAEEGFEFWSLDVNGGDEWKVEDLSRDQRKEFPNDQVKKYFVTSYYTCLKSQVVDLKAEGYWEELMDTTRPDIEVKDWFAARPDCGSKYQLCVQLLSSAHAPLGTFQPDPATIQQKSDAKWREVSHTFSNYPPGVRYIWFQHGGVDTHYWAGWYGPRVTNSSITIGPPLP

SEQ ID NO: 866857 - protein, 165 aa, Homo sapiens
LSRQAQVQAVQLGRPSGSCRGGRAQLQEGVQKPQAMAVGNINELPENILLELFTHVPARQLLLNCRLVCSLWRDLIDLVTLWKRKCLREGFITEDWDQPVADWKIFYFLRSLHRNLLHNPCAEEGFEFWSLDVNGGDEWKVEDLSRDQRKEFPNDQVKKYFVTSY

SEQ ID NO: 866858 - protein, 290 aa, Homo sapiens
LSRQAQVQAVQLGRPSGSCRGGRAQLQEGVQKPQAMAVGNINELPENILLELFTHVPARQLLLNCRLVCSLWRDLIDLVTLWKRKCLREGFITEDWDQPVADWKIFYFLRSLHRNLLHNPCAEEGFEFWSLDVNGGDEWKVEDLSRDQRKEFPNDQVKKYFVTSYYTCLKSQVVDLKAEGYWEELMDTTRPDIEVKDWFAARPDCGSKYQLCVQLLSSAHAPLGTFQPDPATIQQKSDAKWREVSHTFSNYPPGVRYIWFQHGGVDTHYWAGWYGPRVTNSSITIGPPLP

SEQ ID NO: 866859 - protein, 174 aa, Homo sapiens [sequence omitted]

SEQ ID NO: 866860 - protein, 113 aa, Homo sapiens
AEGGLAPTRPRPPSLPGLRCAAANGGWGRHRCTGVRAQTLGGILRHSVGRGGCRRAGGLGAGGAQPRGWGWEWGWGDRKGPSLSPTLLPLPPRQEIMSSEILRRWLEPFGPPR

SEQ ID NO: 866861 - protein, 259 aa, Homo sapiens; identical to SEQ ID NO: 866854

SEQ ID NO: 866862 - protein, 224 aa, Homo sapiens; identical to SEQ ID NO: 866855

SEQ ID NO: 866863 - protein, 290 aa, Homo sapiens; identical to SEQ ID NO: 866858

SEQ ID NO: 866864 - protein, 259 aa, Homo sapiens; identical to SEQ ID NO: 866854

SEQ ID NO: 866865 - protein, 130 aa, Homo sapiens
MAVGNINELPENILLELFTHVPARQLLLNCRLVCSLWRDLIDLVTLWKRKCLREGFITEDWDQPVADWKIFYFLRSLHRNLLHNPCAEEGFEFWSLDVNGGDEWKVEDLSRDQRKEFPNDQVKKYFVTSY

SEQ ID NO: 866866 - protein, 162 aa, Homo sapiens
LVRSGMYGILGGQRIVAAAAERLQEGVQKPQAMAVGNINELPENILLELFTHVPARQLLLNCRLVCSLWRDLIDLVTLWKRKCLREGFITEDWDQPVADWKIFYFLRSLHRNLLHNPCAEEGFEFWSLDVNGGDEWKVEDLSRDQRKEFPNDQVKKYFVTSY

SEQ ID NO: 866867 - protein, 226 aa, Homo sapiens
MAVGNINELPENILLELFTHVPARQLLLNCRLVCSLWRDLIDLVTLWKRKCLREGFITEDWDQPVADWKIFYFLRSLHRNLLHNPCAEEGFEFWSLDVNGGDEWKVEDLSRDQRKEFPNDQVKKYFVTSYYTCLKSQVVDLKAEGYWEELMDTTRPDIEVKDWFAARPDCGSKYQLCVQLLSSAHAPLGTFQPDPATIQQKSDAKWRESPKFSNYRRVRSSRAELD

SEQ ID NO: 866868 - protein, 127 aa, Homo sapiens
RLRPRLAAVGPTGSYNYFFPLLLTHLEELVLPREAHGARNEAKGRGPSRGIPLYRQRLRRPGPRSEAGAQRGGQLHHPGRGRAQPVGHRPRAEPDVTSRSLPPPSGAARGLWLRDCGEHIVMFVPQS

SEQ ID NO: 866869 - protein, 913 aa, Homo sapiens
MSEFRIHHDVNELLSLLRVHGGDGAEVYIDLLQKNRTPYVTTTVSAHSAKVSTALGVALCRVKIAEFSRTPEDFLKKYDELKSKNTRNLDPLVYLLSKLTEDKETLQYLQQNAKERAELAAAAVGSSTTSINVPAAASKISMQELEELRKQLGSVATGSTLQQSLELKRKMLRDKQNKKNSGQHLPIFPAWVYERPALIGDFLIGAGISTDTALPIGTLPLASQESAVVEDLLYVLVGVDGRYVSAQPLAGRQSRTFLVDPNLDLSIRELVHRILPVAASYSAVTRFIEEKSSFEYGQVNHALAAAMRTLVKEHLILVSQLEQLHRQGLLSLQKLWFYIQPAMRTMDILASLATSVDKGECLGGSTLSLLHDRSFSYTGDSQAQELCLYLTKAASAPYFEVLEKWIYRGIIHDPYSEFMVEEHELRKERIQEDYNDKYWDQRYTIVQQQIPSFLQKMADKILSTGKYLNVVRECGHDVTCPVAKEIIYTLKERAYVEQIEKAFNYASKVLLDFLMEEKELVAHLRSIKRYFLMDQGDFFVHFMDLAEEELRKPVEDITPPRLEALLELALRMSTANTDPFKDDLKIDLMPHDLITQLLRVLAIETKQEKAMAHADPTELALSGLEAFSFDYIVKWPLSLIINRKALTRYQMLFRHMFYCKHVERQLCSVWISNKTAKQHSLHSAQWFAGAFTLRQRMLNFVQNIQYYMMFEVMEPTWHILEKNLKSASNIDDVLGHHTGFLDTCLKDCMLTNPELLKVFSKLMSVCVMFTNCMQKFTQSMKLDGELGGQTLEHSTVLGLPAGAEERARKELARKHLAEHADTVQLVSGFEATINKFDKNFSAHLLDLLARLSIYSTSDCEHGMASVISRLDFNGFYTERLERLSAERSQKATPQVPVLRGPPAPAPRVAVTAQ

SEQ ID NO: 866870 - protein, 701 aa, Homo sapiens
MGFTGTLPLASQESAVVEDLLYVLVGVDGRYVSAQPLAGRQSRTFLVDPNLDLSIRELVHRILPVAASYSAVTRFIEEKSSFEYGQVNHALAAAMRTLVKEHLILVSQLEQLHRQGLLSLQKLWFYIQPAMRTMDILASLATSVDKGECLGGSTLSLLHDRSFSYTGDSQAQELCLYLTKAASAPYFEVLEKWIYRGIIHDPYSEFMVEEHELRKERIQEDYNDKYWDQRYTIVQQQIPSFLQKMADKILSTGKYLNVVRECGHDVTCPVAKEIIYTLKERAYVEQIEKAFNYASKVLLDFLMEEKELVAHLRSIKRYFLMDQGDFFVHFMDLAEEELRKPVEDITPPRLEALLELALRMSTANTDPFKDDLKIDLMPHDLITQLLRVLAIETKQEKAMAHADPTELALSGLEAFSFDYIVKWPLSLIINRKALTRYQMLFRHMFYCKHVERQLCSVWISNKTAKQHSLHSAQWFAGAFTLRQRMLNFVQNIQYYMMFEVMEPTWHILEKNLKSASNIDDVLGHHTGFLDTCLKDCMLTNPELLKVFSKLMSVCVMFTNCMQKFTQSMKLDGELGGQTLEHSTVLGLPAGAEERARKELARKHLAEHADTVQLVSGFEATINKFDKNFSAHLLDLLARLSIYSTSDCEHGMASVISRLDFNGFYTERLERLSAERSQKATPQVPVLRGPPAPAPRVAVTAQ

SEQ ID NO: 866871 - protein, 786 aa, Homo sapiens
MSEFRIHHDVNELLSLLRVHGGDGAEVYIDLLQKNRTPYVTTTVSAHSAKVKIAEFSRTPEDFLKKYDELKSKNTRNLDPLVYLLSKLTEDKETLQYLQQNAKERAELAAAAVGSSTTSINVPAAASKISMQELEELRKQLGSVATGSTLQQSLELKRKMLRDKQNKKNSGQHLPIFPAWVYERPALIGDFLIGAGISTDTALPIGTLPLASQESAVVEDLLYVLVGVDGRYVSAQPLAGRQSRTFLVDPNLDLSIRELVHRILPVAASYSAVTRFIEEKSSFEYGQVNHALAAAMRTLVKEHLILVSQLEQLHRQGLLSLQKLWFYIQPAMRTMDILASLATSVDKGECLGGSTLSLLHDRSFSYTGDSQAQELCLYLTKAASAPYFEVLEKWIYRGIIHDPYSEFMVEEHELRKERIQEDYNDKYWDQRYTIVQQQIPSFLQKMADKILSTGKYLNVVRECGHDVTCPVAKEIIYTLKERAYVEQIEKAFNYASKVLLDFLMEEKELVAHLRSIKRYFLMDQGDFFVHFMDLAEEELRKPVEDITPPRLEALLELALRMSTANTDPFKDDLKIDLMPHDLITQLLRVLAIETKQEKAMAHADPTELALSGLEAFSFDYIVKWPLSLIINRKALTRYQMLFRHMFYCKHVERQLCSVWISNKTAKQHSLHSAQWFAGAFTLRQRMLNFVQNIQYYMMFEVMEPTWHILEKNLKSASNIDDVLGHHTGFLDTCLKDCMLTNPELLKVFSKLMSVCVMFTNCMQKFTQSMKLDGELGGQTLEHSTVA

SEQ ID NO: 866872 - protein, 724 aa, Homo sapiens
MSEFRIHHDVNELLSLLRVHGGDGAEVYIDLLQKNRTPYVTTTVSAHSAKVKIAEFSRTPEDFLKKYDELKSKNTRNLDPLVYLLSKLTEDKETLQYLQQNAKERAELAAAAVGSSTTSINVPAAASKISMQELEELRKQLGSVATGSTLQQSLELKRKMLRDKQNKKNSGQHLPIFPAWVYERPALIGDFLIGAGISTDTALPIGTLPLASQESAVVEDLLYVLVGVDGRYVSAQPLAGRQSRTFLVDPNLDLSIRELVHRILPVAASYSAVTRFIEEKSSFEYGQVNHALAAAMRTLVKEHLILVSQLEQLHRQGLLSLQKLWFYIQPAMRTMDILASLATSVDKGECLGGSTLSLLHDRSFSYTGDSQAQELCLYLTKAASAPYFEVLEKWIYRGIIHDPYSEFMVEEHELRKERIQEDYNDKYWDQRYTIVQQQIPSFLQKMADKILSTGKYLNVVRECGHDVTCPVAKEIIYTLKERAYVEQIEKAFNYASKVLLDFLMEEKELVAHLRSIKRYFLMDQGDFFVHFMDLAEEELRKPVEDITPPRLEALLELALRMSTANTDPFKDDLKIDLMPHDLITQLLRVLAIETKQEKAMAHADPTELALSGLEAFSFDYIVKWPLSLIINRKALTRYQMLFRHMFYCKHVERQLCSVWISNKTAKQHSLHSAQWCVLPLPPHALLKQRSLHSAQVVQRPPCALLVDSFLGFWKVSSGSARWWL

SEQ ID NO: 866873 - protein, 541 aa, Homo sapiens
MSGAVDRTSQAQELCLYLTKAASAPYFEVLEKWIYRGIIHDPYSEFMVEEHELRKERIQEDYNDKYWDQRYTIVQQQIPSFLQKMADKILSTGKYLNVVRECGHDVTCPVAKEIIYTLKERAYVEQIEKAFNYASKVLLDFLMEEKELVAHLRSIKRYFLMDQGDFFVHFMDLAEEELRKPVEDITPPRLEALLELALRMSTANTDPFKDDLKIDLMPHDLITQLLRVLAIETKQEKAMAHADPTELALSGLEAFSFDYIVKWPLSLIINRKALTRYQMLFRHMFYCKHVERQLCSVWISNKTAKQHSLHSAQWFAGAFTLRQRMLNFVQNIQYYMMFEVMEPTWHILEKNLKSASNIDDVLGHHTGFLDTCLKDCMLTNPELLKVFSKLMSVCVMFTNCMQKFTQSMKLDGELGGQTLEHSTVLGLPAGAEERARKELARKHLAEHADTVQLVSGFEATINKFDKNFSAHLLDLLARLSIYSTSDCEHGMASVISRLDFNGFYTERLERLSAERSQKATPQVPVLRGPPAPAPRVAVTAQ

SEQ ID NO: 866874 - protein, 664 aa, Homo sapiens
MSEFRIHHDVNELLSLLRVHGGDGAEVYIDLLQKNRTPYVTTTVSAHSAKVKIAEFSRTPEDFLKKYDELKSKNTRNLDPLVYLLSKLTEDKETLQYLQQNAKERAELAAAAVGSSTTSINVPAAASKISMQELEELRKQLGSVATGSTLQQSLELKRKMLRDKQNKKNSGQHLPIFPAWVYERPALIGDFLIGAGISTDTALPIGTLPLASQESAVVEDLLYVLVGVDGRYVSAQPLAGRQSRTFLVDPNLDLSIRELVHRILPVAASYSAVTRFIEEKSSFEYGQVNHALAAAMRTLVKEHLILVSQLEQLHRQGLLSLQKLWFYIQPAMRTMDILASLATSVDKGECLGGSTLSLLHDRSFSYTGDSQAQELCLYLTKAASAPYFEVLEKWIYRGIIHDPYSEFMVEEHELRKERIQEDYNDKYWDQRYTIVQQQIPSFLQKMADKILSTGKYLNVVRECGHDVTCPVAKEIIYTLKERAYVEQIEKAFNYASKVLLDFLMEEKELVAHLRSIKRYFLMDQGDFFVHFMDLAEEELRKPVEDITPPRLEALLELALRMSTANTDPFKDDLKLLRVLAIETKQEKAMAHADPTELALSGLEAFSFDYIVKWPLSLIINRKSLNRYQKSSGACAMEARGRRPGGWVDKTPRDRARPRGGGDTA

SEQ ID NO: 866875 - protein, 902 aa, Homo sapiens
MSEFRIHHDVNELLSLLRVHGGDGAEVYIDLLQKNRTPYVTTTVSAHSAKVKIAEFSRTPEDFLKKYDELKSKNTRNLDPLVYLLSKLTEDKETLQYLQQNAKERAELAAAAVGSSTTSINVPAAASKISMQELEELRKQLGSVATGSTLQQSLELKRKMLRDKQNKKNSGQHLPIFPAWVYERPALIGDFLIGAGISTDTALPIGTLPLASQESAVVEDLLYVLVGVDGRYVSAQPLAGRQSRTFLVDPNLDLSIRELVHRILPVAASYSAVTRFIEEKSSFEYGQVNHALAAAMRTLVKEHLILVSQLEQLHRQGLLSLQKLWFYIQPAMRTMDILASLATSVDKGECLGGSTLSLLHDRSFSYTGDSQAQELCLYLTKAASAPYFEVLEKWIYRGIIHDPYSEFMVEEHELRKERIQEDYNDKYWDQRYTIVQQQIPSFLQKMADKILSTGKYLNVVRECGHDVTCPVAKEIIYTLKERAYVEQIEKAFNYASKVLLDFLMEEKELVAHLRSIKRYFLMDQGDFFVHFMDLAEEELRKPVEDITPPRLEALLELALRMSTANTDPFKDDLKIDLMPHDLITQLLRVLAIETKQEKAMAHADPTELALSGLEAFSFDYIVKWPLSLIINRKALTRYQMLFRHMFYCKHVERQLCSVWISNKTAKQHSLHSAQWFAGAFTLRQRMLNFVQNIQYYMMFEVMEPTWHILEKNLKSASNIDDVLGHHTGFLDTCLKDCMLTNPELLKVFSKLMSVCVMFTNCMQKFTQSMKLDGELGGQTLEHSTVLGLPAGAEERARKELARKHLAEHADTVQLVSGFEATINKFDKNFSAHLLDLLARLSIYSTSDCEHGMASVISRLDFNGFYTERLERLSAERSQKATPQVPVLRGPPAPAPRVAVTAQ

SEQ ID NO: 866876 - protein, 214 aa, Homo sapiens
  misc_feature (5)..(5): Xaa can be any naturally occurring amino acid
MVRAXGYSDEGERERVTEHILEKNLKSASNIDDVLGHHTGFLDTCLKDCMLTNPELLKVFSKLMSVCVMFTNCMQKFTQSMKLDGELGGQTLEHSTVLGLPAGAEERARKELARKHLAEHADTVQLVSGFEATINKFDKNFSAHLLDLLARLSIYSTSDCEHGMASVISRLDFNGFYTERLERLSAERSQKATPQVPVLRGPPAPAPRVAVTAQ

SEQ ID NO: 866877 - protein, 95 aa, Homo sapiens
AVVSTHRVGHAPCWANVGQRNFSAHLLDLLARLSIYSTSDCEHGMASVISRGGWAPPRLSPSSAQSSACPCPAPPWLSPSSAQSSTCPCPTPPWP

SEQ ID NO: 866878 - protein, 701 aa, Homo sapiens; identical to SEQ ID NO: 866870

SEQ ID NO: 866879 - protein, 729 aa, Homo sapiens
MSKSETDPADEGTWLWGHGSGGCGATALSVPAGTLPLASQESAVVEDLLYVLVGVDGRYVSAQPLAGRQSRTFLVDPNLDLSIRELVHRILPVAASYSAVTRFIEEKSSFEYGQVNHALAAAMRTLVKEHLILVSQLEQLHRQGLLSLQKLWFYIQPAMRTMDILASLATSVDKGECLGGSTLSLLHDRSFSYTGDSQAQELCLYLTKAASAPYFEVLEKWIYRGIIHDPYSEFMVEEHELRKERIQEDYNDKYWDQRYTIVQQQIPSFLQKMADKILSTGKYLNVVRECGHDVTCPVAKEIIYTLKERAYVEQIEKAFNYASKVLLDFLMEEKELVAHLRSIKRYFLMDQGDFFVHFMDLAEEELRKPVEDITPPRLEALLELALRMSTANTDPFKDDLKIDLMPHDLITQLLRVLAIETKQEKAMAHADPTELALSGLEAFSFDYIVKWPLSLIINRKALTRYQMLFRHMFYCKHVERQLCSVWISNKTAKQHSLHSAQWFAGAFTLRQRMLNFVQNIQYYMMFEVMEPTWHILEKNLKSASNIDDVLGHHTGFLDTCLKDCMLTNPELLKVFSKLMSVCVMFTNCMQKFTQSMKLDGELGGQTLEHSTVLGLPAGAEERARKELARKHLAEHADTVQLVSGFEATINKFDKNFSAHLLDLLARLSIYSTSDCEHGMASVISRLDFNGFYTERLERLSAERSQKATPQVPVLRGPPAPAPRVAVTAQ

SEQ ID NO: 866880 - protein, 550 aa, Homo sapiens
MSEFRIHHDVNELLSLLRVHGGDGAEVYIDLLQKNRTPYVTTTVSAHSAKVKIAEFSRTPEDFLKKYDELKSKNTRNLDPLVYLLSKLTEDKETLQYLQQNAKERAELAAAAVGSSTTSINVPAAASKISMQELEELRKQLGSVATGSTLQQSLELKRKMLRDKQNKKNSGQHLPIFPAWVYERPALIGDFLIGAGISTDTALPIGTLPLASQESAVVEDLLYVLVGVDGRYVSAQPLAGRQSRTFLVDPNLDLSIRELVHRILPVAASYSAVTRFIEEKSSFEYGQVNHALAAAMRTLVKEHLILVSQLEQLHRQGLLSLQKLWFYIQPAMRTMDILASLATSVDKGECLGGSTLSLLHDRSFSYTGDSQAQELCLYLTKAASAPYFEVLEKWIYRGIIHDPYSEFMVEEHELRKERIQEDYNDKYWDQRYTIVQQQIPSFLQKMADKILSTGKYLNVVRECGHDVTCPVAKEIIYTLKERAYVEQIEKAFNYASKVLLDFLMEEKELVAHLRATSSCTSWTSRRRSSGSRWRTSRPLAWKRSWSWRCA

SEQ ID NO: 866881 - protein, 874 aa, Homo sapiens
MSEFRIHHDVNELLSLLRVHGGDGAEVYIDLLQKNRTPYVTTTVSAHSAKVKIAEFSRTPEDFLKKYDELKSKNTRNLDPLVYLLSKLTEDKETLQYLQQNAKERAELAAAAVGSSTTSINVPAAASKISMQELEELRKQLGSVATGSTLQQSLELKRKMLRDKQNKKNSGQHLPIFPAWVYERPALIGDFLIGAGISTDTALPIGTLPLASQESAVVEDLLYVLVGVDGRYVSAQPLAGRQSRTFLVDPNLDLSIRELVHRILPVAASYSAVTRFIEEKSSFEYGQVNHALAAAMRTLVKEHLILVSQLEQLHRQGLLSLQKLWFYIQPAMRTMDILASLATSVDKGECLGGSTLSLLHDRSFSYTGDSQAQELCLYLTKAASAPYFEVLEKWIYRGIIHDPYSEFMVEEHELRKERIQEDYNDKYWDQRYTIVQQQIPSFLQKMADKILSTGKYLNVVRECGHDVTCPVAKEIIYTLKERAYVEQIEKAFNYASKVLLDFLMEEKELVAHLRSIKRYFLMDQGDFFVHFMDLAEEELRKPVEDITPPRLEALLELALRMSTANTDPFKDDLKIDLMPHDLITQLLRVLAIETKQEKAMAHADPTELALSGLEAFSFDYIVKWPLSLIINRKALTRYQMLFRHMFYCKHVERQLCSVWISNKTAKQHSLHSAQWFAGAFTLRQRMLNFVQNIQYYMMFEVMEPTWHILEKNLKSASNIDDVLGHHTGFLDTCLKDCMLTNPELLKVFSKLMSVCVMFTNCMQKFTQSMKLDGELGGQTLEHSTVLGLPAGAEERARKELARKHLAEHADTVQLVSGFEATINKFDKNFSAHLLDLLARLSIYSTSDCEHGMASVISRSRLDVNGIKSCWDSWI

SEQ ID NO: 866882 - protein, 405 aa, Homo sapiens
MSEFRIHHDVNELLSLLRVHGGDGAEVYIDLLQKNRTPYVTTTVSAHSAKVKIAEFSRTPEDFLKKYDELKSKNTRNLDPLVYLLSKLTEDKETLQYLQQNAKERAELAAAAVGSSTTSINVPAAASKISMQELEELRKQLGSVATGSTLQQSLELKRKMLRDKQNKKNSGQHLPIFPAWVYERPALIGDFLIGAGISTDTALPIGTLPLASQESAVVEDLLYVLVGVDGRYVSAQPLAGRQSRTFLVDPNLDLSIRELVHRILPVAASYSAVTRFIEEKSSFEYGQVNHSPGGRHAHPGEGAPDSGVTAGAAAQAGPPFAAEALVLHPASHAHHGHPGLPRHLGGQRRMSWGVHAEPAPRQELQLHRGQPGAGAMPVPNQGGQCSLLRGSGEVDLQGHHPRPIQ

SEQ ID NO: 866883 - protein, 696 aa, Homo sapiens
MSEFRIHHDVNELLSLLRVHGGDGAEVYIDLLQKNRTPYVTTTVSAHSAKVKIAEFSRTPEDFLKKYDELKSKNTRNLDPLVYLLSKLTEDKETLQYLQQNAKERAELAAAAVGSSTTSINVPAAASKISMQELEELRKQLGSVATGSTLQQSLELKRKMLRDKQNKKNSGQHLPIFPAWVYERPALIGDFLIGAGISTDTALPIGTLPLASQESAVVEDLLYVLVGVDGRYVSAQPLAGRQSRTFLVDPNLDLSIRELVHRILPVAASYSAVTRFIEEKSSFEYGQVNHALAAAMRTLVKEHLILVSQLEQLHRQGLLSLQKLWFYIQPAMRTMDILASLATSVDKGECLGGSTLSLLHDRSFSYTGDSQAQELCLYLTKAASAPYFEVLEKWIYRGIIHDPYSEFMVEEHELRKERIQEDYNDKYWDQRYTIVQQQIPSFLQKMADKILSTGKYLNVVRECGHDVTCPVAKEIIYTLKERAYVEQIEKAFNYASKVLLDFLMEEKELVAHLRSIKRYFLMDQGDFFVHFMDLAEEELRKPVEDITPPRLEALLELALRMSTANTDPFKDDLKIDLMPHDLITQLLRVLAIETKQEKAMAHADPTELALSGLEAFSFDYIVKWPLSLIINRCGSAARAPARSSLRFGRSENCATRWPPRPTEDPRRLSPAFSVREIHGLSGGHGADCGVQTPCPR

SEQ ID NO: 866884 - protein, 456 aa, Homo sapiens
MDKILSTGKYLNVVRECGHDVTCPVAKEIIYTLKERAYVEQIEKAFNYASKVLLDFLMEEKELVAHLRSIKRYFLMDQGDFFVHFMDLAEEELRKPVEDITPPRLEALLELALRMSTANTDPFKDDLKIDLMPHDLITQLLRVLAIETKQEKAMAHADPTELALSGLEAFSFDYIVKWPLSLIINRKALTRYQMLFRHMFYCKHVERQLCSVWISNKTAKQHSLHSAQWFAGAFTLRQRMLNFVQNIQYYMMFEVMEPTWHILEKNLKSASNIDDVLGHHTGFLDTCLKDCMLTNPELLKVFSKLMSVCVMFTNCMQKFTQSMKLDGELGGQTLEHSTVLGLPAGAEERARKELARKHLAEHADTVQLVSGFEATINKFDKNFSAHLLDLLARLSIYSTSDCEHGMASVISRLDFNGFYTERLERLSAERSQKATPQVPVLRGPPAPAPRVAVTAQ

SEQ ID NO: 866885 - protein, 895 aa, Homo sapiens
EDYEGKLNKAQSFYERELDTLKRSQLFTAESLQASKEKEADLRKEFQGQEAILRKTIGKLKTELQMVQDEAGSLLDKCQKLQTALAIAENNVQVLQKQLDDAKEGEMALLSKHKEVESELAAARERLQQQASDLVLKASHIGMLQATQMTQEVTIKDLESEKSRVNERLSQLEEERAFLRSKTQSLDEEQKQQILELEKKVNEAKRTQQEYYERELKNLQSRLEEEVTQLNEAHSKTLEELAWKHHMAIEAVHSNAIRDKKKLQMDLEEQHNKDKLNLEEDKNQLQQELENLKEVLEDKLNTANQEIGHLQDMVRKSEQGLGSAEGLIASLQDSQERLQNELDLTKDSLKETKDALLNVEGELEQERQQHEETIAAMKEEEKLKVDKMAHDLEIKWTENLRQECSKLREELRLQHEEDKKSAMSQLLQLKDREKNAARDSWQKKVEDLLNQISLLKQNLEIQLSQSQTSLQQLQAQFTQERQRLTQELEELEEQHQQRHKSLKEAHVLAFQTMEEEKEKEQRALENHLQQKHSAELQSLKDAHRESMEGFRIEMEQELQTLRFELEDEGKAMLASLRSELNHQHAAAIDLLRHNHHQELAAAKMELERSIDISRRQSKEHICRITDLQEELRHREHHISELDKEVQHLHENISALTKELEFKGKEILRIRSESNQQIRLHEQDLNKRLEKELDVMTADHLREKNIMRADFNKTNELLKEINAALQVSLEEMEEKYLMRESKPEDIQMITELKAMLTERDQIIKKLIEDNKFYQLELVNRETNFNKVFNSSPTVGVINPLAKQKKKNDKSPTNRFVSVPNLSALESGGVGNGHPNRLDPIPNSPVHDIEFNSSKPLPQPVPPKGPKTFLSPAQSEASPVASPDPQRQEWFARYFTF

SEQ ID NO: 866886 - protein, 871 aa, Homo sapiens
EDYEGKLNKAQSFYERELDTLKRSQLFTAESLQASKEKEADLRKEFQGQEAILRKTIGKLKTELQMVQDEAGSLLDKCQKLQTALAIAENNVQVLQKQLDDAKEGEMALLSKHKEVESELAAARERLQQQASDLVLKASHIGMLQATQMTQEVTIKDLESEKSRVNERLSQLEEERAFLRSKTQSLDEEQKQQILELEKKVNEAKRTQQEYYERELKNLQSRLEEEVTQLNEAHSKTLEELAWKHHMAIEAVHSNAIRDKKKLQMDLEEQHNKDKLNLEEDKNQLQQELENLKEVLEDKLNTANQEIGHLQDMVRKSEQGLGSAEGLIASLQDSQERLQNELDLTKDSLKETKDALLNVEGELEQERQQHEETIAAMKEEEKLKVDKMAHDLEIKWTENLRQECSKLREELRLQHEEDKKSAMSQLLQLKDREKNAARDSWQKKVEDLLNQISLLKQNLEIQLSQSQTSLQQLQAQFTQERQRLTQELEELEEQHQQRHKSLKEAHVLAFQTMEEEKEKEQRALENHLQQKHSAELQSLKDAHRESMEGFRIEMEQELQTLRFELEDEGKAMLASLRSELNHQHAAAIDLLRHNHHQELAAAKMELERSIDISRRQSKEHICRITDLQEELRHREHHISELDKEVQHLHENISALTKELEFKGKEILRIRSESNQQIRLHEQDLNKRLEKELDVMTADHLREKNIMRADFNKTNELLKEINAALQVSLEEMEEKYLMRESKPEDIQMITELKAMLTERDQIIKKLIEDNKFYQLELVNRETNFNKVFNSSPTVGVINPLAKQKKKNDKSPTNRFVSVPNLSALESGGVGNGHPNRLDPIPNSPVHDIEFNSSKPLPQPVPPKGPKTFLRYQ

SEQ ID NO: 866887 - protein, 859 aa, Homo sapiens
EDYEGKLNKAQSFYERELDTLKRSQLFTAESLQASKEKEADLRKEFQGQEAILRKTIGKLKTELQMVQDEAGSLLDKCQKLQTALAIAENNVQVLQKQLDDAKEGEMALLSKHKEVESELAAARERLQQQASDLVLKASHIGMLQATQMTQEVTIKDLESEKSRVNERLSQLEEERAFLRSKTQSLDEEQKQQILELEKKVNEAKRTQQEYYERELKNLQSRLEEEVTQLNEAHSKTLEELAWKHHMAIEAVHSNAIRDKKKLQMDLEEQHNKDKLNLEEDKNQLQQELENLKEVLEDKLNTANQEIGHLQDMVRKSEQGLGSAEGLIASLQDSQERLQNELDLTKDSLKETKDALLNVEGELEQERQQHEETIAAMKEEEKLKVDKMAHDLEIKWTENLRQECSKLREELRLQHEEDKKSAMSQLLQLKDREKNAARDSWQKKVEDLLNQISLLKQNLEIQLSQSQTSLQQLQAQFTQERQRLTQELEELEEQHQQRHKSLKEAHVLAFQTMEEEKEKEQRALENHLQQKHSAELQSLKDAHRESMEGFRIEMEQELQTLRFELEDEGKAMLASLRSELNHQHAAAIDLLRHNHHQELAAAKMELERSIDISRRQSKEHICRITDLQEELRHREHHISELDKEVQHLHENISALTKELEFKGKEILRIRSESNQQIRLHEQDLNKRLEKELDVMTADHLREKNIMRADFNKTNELLKEINAALQVSLEEMEEKYLMRESKPEDIQMITELKAMLTERDQIIKKLIEDNKFYQLELVNRETNFNKVFNSSPTVGVINPLAKVSVRCMCMSSRNMTTGVSITHCCVPCNFPQRRPAQSEASPVASPDPQRQEWFARYFTF

SEQ ID NO: 866888 - protein, 839 aa, Homo sapiens
EDYEGKLNKAQSFYERELDTLKRSQLFTAESLQASKEKEADLRKEFQGQEAILRKTIGKLKTELQMVQDEAGSLLDKCQKLQTALAIAENNVQVLQKQLDDAKEGEMALLSKHKEVESELAAARERLQQQASDLVLKASHIGMLQATQMTQEVTIKDLESEKSRVNERLSQLEEERAFLRSKTQSLDEEQKQQILELEKKVNEAKRTQQEYYERELKNLQSRLEEEVTQLNEAHSKTLEELAWKHHMAIEAVHSNAIRDKKKLQMDLEEQHNKDKLNLEEDKNQLQQELENLKEVLEDKLNTANQEIGHLQDMVRKSEQGLGSAEGLIASLQDSQERLQNELDLTKDSLKETKDALLNVEGELEQERQQHEETIAAMKEEEKLKVDKMAHDLEIKWTENLRQECSKLREELRLQHEEDKKSAMSQLLQLKDREKNAARDSWQKKVEDLLNQISLLKQNLEIQLSQSQTSLQQLQAQFTQERQRLTQELEELEEQHQQRHKSLKEAHVLAFQTMEEEKEKEQRALENHLQQKHSAELQSLKDAHRESMEGFRIEMEQELQTLRFELEDEGKAMLASLRSELNHQHAAAIDLLRHNHHQELAAAKMELERSIDISRRQSKEHICRITDLQEELRHREHHISELDKEVQHLHENISALTKELEFKGKEILRIRSESNQQIRLHEQDLNKRLEKELDVMTADHLREKNIMRADFNKTNELLKEINAALQVSLEEMEEKYLMRESKPEDIQMITELKAMLTERDQIIKKLIEDNKFYQLELVNRETNFNKVFNSSPTVGVINPLAKQKKKNDKSPTNSPAQSEASPVASPDPQRQEWFARYFTF

SEQ ID NO: 866889 - protein, 871 aa, Homo sapiens; identical to SEQ ID NO: 866886

SEQ ID NO: 866890 - protein, 310 aa, Homo sapiens
EDYEGKLNKAQSFYERELDTLKRSQLFTAESLQASKEKEADLRKEFQGQEAILRKTIGKLKTELQMVQDEAGSLLDKCQKLQTALAIAENNVQVLQKQLDDAKEGEMALLSKHKEVESELAAARERLQQQASDLVLKASHIGMLQATQMTQEVTIKDLESEKSRVNERLSQLEEERAFLRSKTQSLDEEQKQQILELEKKVNEAKRTQQEYYERELKNLQSRLEEEVTQLNEAHSKTLEELAWKHHMAIEAVHSNAIRDKKKLQMDLEEQHNKDKLNLEEDKNQLQQELENLKEVLEDKLNTANQEARIL

SEQ ID NO: 866891 - protein, 477 aa, Homo sapiens
PRLDPSPPCECMSVTQRRCEAEGPSGGAAAASTSSSGSSPSPAVRSNWSPALRERTTKQPQRLSLRPRLLSARLRGQLPLAGLGWRARRAAAERRAVCSRSPRTTLHPLASGLGGRSGIPATSNCPAISNKDQHSISYTLSRAQTVVVEYTHDSNTDMFQIGRSTESPIDFVVTDTVPGSQSNSDTQSVQSTISRFACRIICERNPPFTARIYAAGFDSSKNIFLGEKAAKWKTSDGQMDGLTTNGVLVMHPRNGFTEDSKPGIWREISVCGNVFSLRETRSAQQRGKMVEIETNQLQDGSLIDLCGATLLWRTAEGLSHTPTVKHLEALRQEINAARPQCPVGFNTLAFPSMKRKDVVDEKQPWVYLNCGHVHGYHNWGNKEERDGKDRECPMCRSVGPYVPLWLGCEAGFYVDAGPPTHAFSPCGHVCSEKTTAYWSQIPLPHGTHTFHAACPFCAHQLAGEQGYIRLIFQGPLD

SEQ ID NO: 866892 - protein, 418 aa, Homo sapiens
MFSPDQENHPSKAPVKYGELIVLGYNGSLPNGDRGRRKSRFALFKRPKANGVKPSTVHIACTPQAAKAISNKDQHSISYTLSRAQTVVVEYTHDSNTDMFQIGRSTESPIDFVVTDTVPGSQSNSDTQSVQSTISRFACRIICERNPPFTARIYAAGFDSSKNIFLGEKAAKWKTSDGQMDGLTTNGVLVMHPRNGFTEDSKPGIWREISVCGNVFSLRETRSAQQRGKMVEIETNQLQDGSLIDLCGATLLWRTAEGLSHTPTVKHLEALRQEINAARPQCPVGFNTLAFPSMKRKDVVDEKQPWVYLNCGHVHGYHNWGNKEERDGKDRECPMCRSVGPYVPLWLGCEAGFYVDAGPPTHAFSPCGHVCSEKTTAYWSQIPLPHGTHTFHAACPFCAHQLAGEQGYIRLIFQGPLD

SEQ ID NO: 866893 - protein, 136 aa, Homo sapiens
PRLDPSPPCECMSVTQRRCEAEGPSGGAAAASTSSSGSSPSPAVRSNWSPALRERTTKQPQRLSLRPRLLSARLRGQLPLAGLGWRARRAAAERRAVCSRSPRTTLHPLASGLGGRSGIPATSNCPEIMQKVSQGS

SEQ ID NO: 866894 - protein, 418 aa, Homo sapiens; identical to SEQ ID NO: 866892

SEQ ID NO: 866895 - protein, 320 aa, Homo sapiens
MFQIGRSTESPIDFVVTDTVPGSQSNSDTQSVQSTISRFACRIICERNPPFTARIYAAGFDSSKNIFLGEKAAKWKTSDGQMDGLTTNGVLVMHPRNGFTEDSKPGIWREISVCGNVFSLRETRSAQQRGKMVEIETNQLQDGSLIDLCGATLLWRTAEGLSHTPTVKHLEALRQEINAARPQCPVGFNTLAFPSMKRKDVVDEKQPWVYLNCGHVHGYHNWGNKEERDGKDRECPMCRSVGPYVPLWLGCEAGFYVDAGPPTHAFSPCGHVCSEKTTAYWSQIPLPHGTHTFHAACPFCAHQLAGEQGYIRLIFQGPLD

SEQ ID NO: 866896 - protein, 418 aa, Homo sapiens; identical to SEQ ID NO: 866892

SEQ ID NO: 866897 - protein, 136 aa, Homo sapiens; identical to SEQ ID NO: 866893

SEQ ID NO: 866898 - protein, 337 aa, Homo sapiens [sequence omitted]

SEQ ID NO: 866899 - protein, 337 aa, Homo sapiens [sequence omitted]

SEQ ID NO: 866900 - protein, 337 aa, Homo sapiens [sequence omitted]

SEQ ID NO: 866901 - protein, 337 aa, Homo sapiens [sequence omitted]

SEQ ID NO: 866902 - protein, 259 aa, Homo sapiens
MINYENFLKVGEKAGAKCKQFFTAKVFAKLLHTDSYGRISIMQFFNYVMRKVWLHQTRIGLSLYDVAGQGYLRESDLENYILELIPTLPQLDGLEKSFYSFYVCTAVRKFFFFLDPLRTGKIKIQDILACSFLDDLLELRDEELSKESQETNWFSAPSALRVYGQYLNLDKDHNGMLSKEELSRYGTATMTNVFLDRVFQECLTYDGEMDYKTYLDFVLALENRKEPAALQYIFKLLDIENKGYLNVFSLNYFFRIYFY

SEQ ID NO: 866903 - protein, 162 aa, Homo sapiens [sequence omitted]

SEQ ID NO: 866904 - protein, 162 aa, Homo sapiens [sequence omitted]

SEQ ID NO: 866905 - protein, 127 aa, Homo sapiens
MDWKEVLRRRLATPNTCPNKKKSEQELKDEEMDLFTKYYSEWKGGRKNTNEFYKTIPRFYYRLPAEDEVLLQKLREESRAVFLQRKSRELLDNEELQNLWFLLDKHQTPPMIGRGSDDQLRKLFEGW

SEQ ID NO: 866906 - protein, 135 aa, Homo sapiens
MDWKEVLRRRLATPNTCPNKKKSEQELKDEEMDLFTKYYSEWKGGRKNTNEFYKTIPRFYYRLPAEDEVLLQKLREESRAVFLQRKSRELLDNEELQVRTKQKVALDVNHFSFVLLKSCRISWCLMESVLQSGTT

SEQ ID NO: 866907 - protein, 337 aa, Homo sapiens [sequence omitted]

SEQ ID NO: 866908 - protein, 337 aa, Homo sapiens [sequence omitted]

SEQ ID NO: 866909 - protein, 323 aa, Homo sapiens
MKNYRQFFTAKVFAKLLHTDSYGRISIMQFFNYVMRKVWLHQTRIGLSLYDVAGQGYLRESDLENYILELIPTLPQLDGLEKSFYSFYVCTAVRKFFFFLDPLRTGKIKIQDILACSFLDDLLELRDEELSKESQETNWFSAPSALRVYGQYLNLDKDHNGMLSKEELSRYGTATMTNVFLDRVFQECLTYDGEMDYKTYLDFVLALENRKEPAALQYIFKLLDIENKGYLNVFSLNYFFRAIQELMKIHGQDPVSFQDVKDEIFDMVKPKDPLKISLQDLINSNQGDTVTTILIDLNGFWTYENREALVANDSENSADLDDT

SEQ ID NO: 866910 - protein, 321 aa, Homo sapiens
MINYENFLKVGEKAGAKCKQFFTAKVFAKLLHTDSYGRISIMQFFNYVMRKVWLHQTRIGLSLYDVAGQGYLRESDLENYILELIPTLPQLDGLEKSFYSFYVCTAVRKFFFFLDPLRTGKIKIQDILACSFLDDLLELRDEELSKESQETNWFSAPSALRVYGQYLNLDKDHNGMLSKEELSRYGTATMTNVFLDRVFQECLTYDGEMDYKTYLDFVLALENRKEPAALQYIFKLLDIENKGYLNVFSLNYFFRAIQELMKIHGQDPVSFQDVKDEIFDMVKPKDPLKISLQDLINSNQGDTVTTILIDLNGFWTYENRL

SEQ ID NO: 866911 - protein, 162 aa, Homo sapiens [sequence omitted]

SEQ ID NO: 866912 - protein, 127 aa, Homo sapiens; identical to SEQ ID NO: 866905

SEQ ID NO: 866913 - protein, 84 aa, Homo sapiens
MDWKEVLRRRLATPNTCPNKKKSEQELKDEEMDLFTKYYSEWKGGRKNTNEFYKTIPRFYYRGGMRHQSNTFEKYIGLIQKGGT

SEQ ID NO: 866914 - protein, 707 aa, Homo sapiens
SLLVLPLGTSAVSAFAPAGFSLRDCLGGHLECRRQDYTPGESTSATKPLKTRGRRATPFPSAPRGRGLDVAKETGSGPASTQGNRREPRDPEGCTQASAARTGPMRTEGLDFRRWDCHFAARVRPHRWSGLGTAGRVRFPGGSWCSRLAARKDQMAFEDVAVYFSQEEWGLLDTAQRALYRRVMLDNFALVASLGLSTSRPRVVIQLERGEEPWVPSGTDTTLSRTTYRRRNPGSWSLTEDRDVSGEWPRAFPDTPPGMTTSVFPVAGACHSVKSLQRQRGASPSRERKPTGVSVIYWERLLLGSGSGQASVSLRLTSPLRPPEGVRLREKTLTEHALLGRQPRTPERQKPCAQEVPGRTFGSAQDLEAAGGRGHHRMGAVWQEPHRLLGGQEPSTWDELGEALHAGEKSFECRACSKVFVKSSDLLKHLRTHTGERPYECAQCGKAFSQTSHLTQHQRIHSGETPYACPVCGKAFRHSSSLVRHQRIHTAEKSFRCSECGKAFSHGSNLSQHRKIHAGGRPYACAQCGRRFCRNSHLIQHERTHTGEKPFVCALCGAAFSQGSSLFKHQRVHTGEKPFACPQCGRAFSHSSNLTQHQLLHTGERPFRCVDCGKAFAKGAVLLSHRRIHTGEKPFVCTQCGRAFRERPALFHHQRIHTGEKTVRRSRASLHPQARSVAGASSEGAPAKETEPTPASGPAAVSQPAEV

SEQ ID NO: 866915 - protein, 109 aa, Homo sapiens
MCDTLLRTSPPQCNGPSWQGQKGGLGAICFLWPSADQALSLPGASPPRKFMFSLMEKKKKKRLPSATQSRCCSFLYSSLDLQSTASCPYSRAWFSLNSSSRASLIKVSF

SEQ ID NO: 866916 - protein, 553 aa, Homo sapiens
MAFEDVAVYFSQEEWGLLDTAQRALYRRVMLDNFALVASLGLSTSRPRVVIQLERGEEPWVPSGTDTTLSRTTYRRRNPGSWSLTEDRDVSGEWPRAFPDTPPGMTTSVFPVAGACHSVKSLQRQRGASPSRERKPTGVSVIYWERLLLGSGSGQASVSLRLTSPLRPPEGVRLREKTLTEHALLGRQPRTPERQKPCAQEVPGRTFGSAQDLEAAGGRGHHRMGAVWQEPHRLLGGQEPSTWDELGEALHAGEKSFECRACSKVFVKSSDLLKHLRTHTGERPYECAQCGKAFSQTSHLTQHQRIHSGETPYACPVCGKAFRHSSSLVRHQRIHTAEKSFRCSECGKAFSHGSNLSQHRKIHAGGRPYACAQCGRRFCRNSHLIQHERTHTGEKPFVCALCGAAFSQGSSLFKHQRVHTGEKPFACPQCGRAFSHSSNLTQHQLLHTGERPFRCVDCGKAFAKGAVLLSHRRIHTGEKPFVCTQCGRAFRERPALFHHQRIHTGEKTVRRSRASLHPQARSVAGASSEGAPAKETEPTPASGPAAVSQPAEV

SEQ ID NO: 866917 - protein, 285 aa, Homo sapiens
SLLVLPLGTSAVSAFAPAGFSLRDCLGGHLECRRQDYTPGESTSATKPLKTRGRRATPFPSAPRGRGLDVAKETGSGPASTQGNRREPRDPEGCTQASAARTGPMRTEGLDFRRWDCHFAARVRPHRWSGLGTAGRVRFPGGSWCSRLAARKDQMAFEDVAVYFSQEEWGLLDTAQRALYRRVMLDNFALVASLGLSTSRPRVVIQLERGEEPWVPSGTDTTLSRTTYRRRNPAHPAPAPAHGRAALPLRGLWQGLRQGRRAAQPPAHSHGREALRVYAVWPRLP

SEQ ID NO: 866918 - protein, 707 aa, Homo sapiens; identical to SEQ ID NO: 866914

SEQ ID NO: 866919 - protein, 669 aa, Homo sapiens
SLLVLPLGTSAVSAFAPAGFSLRDCLGGHLECRRQDYTPGESTSATKPLKTRGRRATPFPSAPRGRGLDVAKETGSGPASTQGNRREPRDPEGCTQASAARTGPMRTEGLDFRRWDCHFAARVRPHRWSGLGTAGRVRFPGGSWCSRLAARKDQMAFEDVAVYFSQEEWGLLDTAQRALYRRVMLDNFALVASLGLSTSRPRVVIQLERGEEPWVPSGTDTTLSRTTYRRRNPGSWSLTEDRDVSGEWPRAFPDTPPGMTTSVFPVAGACHSVKSLQRQRGASPSRERKPTGVSVIYWERLLLGSGSGQASVSLRLTSPLRPPEGVRLREKTLTEHALLGRQPRTPERQKPCAQEVPGRTFGSAQDLEAAGGRGHHRMGAVWQEPHRLLGGQEPSTWDELGEALHAGEKSFECRACSKVFVKSSDLLKHYAPVCGKAFRHSSSLVRHQRIHTAEKSFRCSECGKAFSHGSNLSQHRKIHAGGRPYACAQCGRRFCRNSHLIQHERTHTGEKPFVCALCGAAFSQGSSLFKHQRVHTGEKPFACPQCGRAFSHSSNLTQHQLLHTGERPFRCVDCGKAFAKGAVLLSHRRIHTGEKPFVCTQCGRAFRERPALFHHQRIHTGEKTVRRSRASLHPQARSVAGASSEGAPAKETEPTPASGPAAVSQPAEV

SEQ ID NO: 866920 - protein, 707 aa, Homo sapiens; identical to SEQ ID NO: 866914

SEQ ID NO: 866921 - protein, 207 aa, Homo sapiens
  misc_feature (207)..(207): Xaa can be any naturally occurring amino acid
MFPFYSCWRTGLLLLLLAVAVRESWQTEEKTCDLVGEKGKESEKELALVKRLKPLFNKSFESTVGQGSDTYIYIFRVCREAGNHTSGAGLVQINKSNGKETVVGRLNETHIFNGSNWIMLIYKGGDEYDNHCGKEQRRAVVMISCNRHTLADNFNPVSEERGKVQDCFYLFEMDSSLACSPEISHLSVGSILLVTFALLGLPGLRFX

SEQ ID NO: 866922 - protein, 277 aa, Homo sapiens
MFPFYSCWRTGLLLLLLAVAVRESWQTEEKTCDLVGEKGKESEKELALVKRLKPLFNKSFESTVGQGSDTYIYIFRVCREAGNHTSGAGLVQINKSNGKETVVGRLNETHIFNGSNWIMLIYKGGDEYDNHCGKEQRRAVVMISCNRHTLADNFNPVSEERGKVQDCFYLFEMDSSLACSPEISHLSVGSILLVTFASLVAVYVVGGFLYQRLVVGAKGMEQFPHLAFWQDLGNLVADGCDFVCRSKPRNVPAAYRGVGDDQLGEESEERDDHLLPM

SEQ ID NO: 866923 - protein, 277 aa, Homo sapiens; identical to SEQ ID NO: 866922

SEQ ID NO: 866924 - protein, 277 aa, Homo sapiens; identical to SEQ ID NO: 866922

SEQ ID NO: 866925 - protein, 159 aa, Homo sapiens
MLIYKGGDEYDNHCGKEQRRAVVMISCNRHTLADNFNPVSEERGKVQDCFYLFEMDSSLACSPEISHLSVGSILLVTFASLVAVYVVGGFLYQRLVVGAKGMEQFPHLAFWQDLGNLVADGCDFVCRSKPRNVPAAYRGVGDDQLGEESEERDDHLLPM

SEQ ID NO: 866926 - protein, 159 aa, Homo sapiens; identical to SEQ ID NO: 866925

SEQ ID NO: 866927 - protein, 238 aa, Homo sapiens
YSKDPVLSGHVKRLKHCLINFESTVGQGSDTYIYIFRVCREAGNHTSGAGLVQINKSNGKETVVGRLNETHIFNGSNWIMLIYKGGDEYDNHCGKEQRRAVVMISCNRHTLADNFNPVSEERGKVQDCFYLFEMDSSLACSPEISHLSVGSILLVTFASLVAVYVVGGFLYQRLVVGAKGMEQFPHLAFWQDLGNLVADGCDFVCRSKPRNVPAAYRGVGDDQLGEESEERDDHLLPM

SEQ ID NO: 866928 - protein, 196 aa, Homo sapiens
MFPFYSCWRTGLLLLLLAVAVRESWQTEEKTCDCNWIMLIYKGGDEYDNHCGKEQRRAVVMISCNRHTLADNFNPVSEERGKVQDCFYLFEMDSSLACSPEISHLSVGSILLVTFASLVAVYVVGGFLYQRLVVGAKGMEQFPHLAFWQDLGNLVADGCDFVCRSKPRNVPAAYRGVGDDQLGEESEERDDHLLPM

SEQ ID NO: 866929 - protein, 277 aa, Homo sapiens; identical to SEQ ID NO: 866922

SEQ ID NO: 866930 - protein, 312 aa, Homo sapiens
MFPFYSCWRTGLLLLLLAVAVRESWQTEEKTCDLVGEKGKESEKELALVKRLKPLFNKSFESTVGQGSDTYIYIFRVCREAGNHTSGAGLVQINKSNGKETVVGRLNETHIFNGSNWIMLIYKGGDEYDNHCGKEQRRAVVMISCNRHTLADNFNPVSEERGKVQDCFYLFEMDSSLACSPEISHLSVGSILLVTFASLVAVYVVGGFLYQRLVVGAKGMEQFPHLAFWQDLGNLVAACGFDLFFNLLERERKQKWDIEGSAVLCAGCGMLLHLSLLLAQGSVFLPTFLWGKVFNPLMLPSSCLGHVPRNLD

SEQ ID NO: 866931 - protein, 277 aa, Homo sapiens; identical to SEQ ID NO: 866922

SEQ ID NO: 866932 - protein, 277 aa, Homo sapiens; identical to SEQ ID NO: 866922

SEQ ID NO: 866933 - protein, 288 aa, Homo sapiens
MFPFYSCWRTGLLLLLLAVAVRESWQTEEKTCDLVGEKGKESEKELALVKRLKPLFNKSFESTVGQGSDTYIYIFRVCREAGNHTSGAGLVQINKSNGKETVVGRLNETHIFNGSNWIMLIYKGGDEYDNHCGKEQRRAVVMISCNRHTLADNFNPVSEERGKVQDCFYLFEMDSSLACSPEISHLSVGSILLVTFASLVAVYVVGGFLYQRLVVGAKGMEQFPHLAFWQDLGNLVAPMGGIWLPVNPNGWHWRGGPRGGHRGPLPRVLAPPPNRRLAPHHWAGTQRR

SEQ ID NO: 866934 - protein, 277 aa, Homo sapiens; identical to SEQ ID NO: 866922

SEQ ID NO: 866935 - protein, 239 aa, Homo sapiens
MFPFYSCWRTGLLLLLLAVAVRESWQTEEKTCDLVGEKGKESEKELALVKRLKPLFNKSFESTVGQGSDTYIYIFRVCREAGNHTSGAGLVQINKSNGKETVVGRLNETHIFNGSNWIMLIYKGGDEYDNHCGKEQRRAVVMISCNRHTLADNFNPVSEERGKVQDCFYLFEMDSSLACSPEISHLSVGSILLVTFASLVAVYVVGGFLYQRLVVGAKGMEQFPHLAFWQDLGNLVASK

SEQ ID NO: 866936 - protein, 259 aa, Homo sapiens
MQSSPPAAVEREHRVVVGEKGKESEKELALVKRLKPLFNKSFESTVGQGSDTYIYIFRVCREAGNHTSGAGLVQINKSNGKETVVGRLNETHIFNGSNWIMLIYKGGDEYDNHCGKEQRRAVVMISCNRHTLADNFNPVSEERGKVQDCFYLFEMDSSLACSPEISHLSVGSILLVTFASLVAVYVVGGFLYQRLVVGAKGMEQFPHLAFWQDLGNLVADGCDFVCRSKPRNVPAAYRGVGDDQLGEESEERDDHLLPM

SEQ ID NO: 866937 - protein, 117 aa, Homo sapiens
MFPFYSCWRTGLLLLLLAVAVRESWQTEEKTCDLVGEKGKESEKELALVKRLKPLFNKSFESTVGQGSDTYIYIFRVCREAGNHTSGAGLVQINKSNGKETVVGRLNETHIFNGRQF

SEQ ID NO: 866938 - protein, 277 aa, Homo sapiens; identical to SEQ ID NO: 866922

SEQ ID NO: 866939 - protein, 283 aa, Homo sapiens
MFPFYSCWRTGLLLLLLAVAVRESWQTEEKTCDLVGEKGKESEKELALVKRLKPLFNKSFESTVGQGSDTYIYIFRVCREAGNHTSGAGLVQINKSNGKETVVGRLNETHIFNGSNWIMLIYKGGDEYDNHCGKEQRRAVVMISCNRHTLADNFNPVSEERGKVQDCFYLFEMDSSLACSPEISHLSVGSILLVTFASLVAVYVVGGFLYQRLVVGAKGMEQFPHLAFWQDLGNLVARKGTEAEVGHRGLCCPLRWVWNAAAPVPSAGSGKCLLAHISVGKGF

SEQ ID NO: 866940 - protein, 277 aa, Homo sapiens; identical to SEQ ID NO: 866922

SEQ ID NO: 866941 - protein, 195 aa, Homo sapiens [sequence omitted]

SEQ ID NO: 866942 - protein, 125 aa, Homo sapiens
PSPRPSHPGVSRPCASPDRHCERKTAGRDQSRCSFSRSLWAGAAPRGQERALESRSHHARSQRAVSFATPTRPFLFRRPLSPALPLCPCLALPSPSLPLSLFWPEPGPSHLLTGPLGLHRSPMAQ

SEQ ID NO: 866943 - protein, 155 aa, Homo sapiens
YQAPALPTPGSAGRVRPPTDTVNGRQQAAIRVAVHSAAASGPGRPPGARREPWSPAATMHAPSVLCPSPLPRARSSSVALCPLLYLSVLVWLSRHPPCLCLSSWPHRMAFREGGLGAWCRAGDRRESVTERGQGRGPEGVRDGGQREWMWGFEDV

SEQ ID NO: 866944 - protein, 117 aa, Homo sapiens
PSPRPSHPGVSRPCASPDRHCERKTAGRDQSRCSFSRSLWAGAAPRGQERALESRSHHARSQRAVSFATPTRPFLFRRPLSPALPLCPCLALPSPSLPLSLFWPEPGPSHLVTGGNR

SEQ ID NO: 866945 - protein, 125 aa, Homo sapiens; identical to SEQ ID NO: 866942

SEQ ID NO: 866946 - protein, 155 aa, Homo sapiens; identical to SEQ ID NO: 866943

SEQ ID NO: 866947 - protein, 125 aa, Homo sapiens; identical to SEQ ID NO: 866942

SEQ ID NO: 866948 - protein, 207 aa, Homo sapiens
MAVTITLKTLQQQTFKIRMEPDETVKVLKEKIEAEKGRDAFPVAGQKLIYAGKILSDDVPIRDYRIDEKNFVVVMVTKTKERPGITSDTPRRHSPHRLTPRDHYYSPFRAQAPPKTSRDNAHQDNTNPATDKEQGNQETHKRKGKHSTAHRHRSRHNRDRPQPGQQSTTPTPAPPGRGKEKEKPKTSTQQQPAPQRPAPAPRQHDNT

SEQ ID NO: 866949 - protein, 363 aa, Homo sapiens
MAVTITLKTLQQQTFKIRMEPDETVKVLKEKIEAEKGRDAFPVAGQKLIYAGKILSDDVPIRDYRIDEKNFVVVMVTKTKAGQGTSAPPEASPTAAPESSTSFPPAPTSGMSHPPPAAREDKSPSEESAPTTSPESVSGSVPSSGSSGREEDAASTLVTGSEYETMLTEIMSMGYERERVVAALRASYNNPHRAVEYLLTGIPGSPEPEHGSVQESQVSEQPATEAAGENPLEFLRDQPQFQNMRQVIQQNPALLPALLQQLGQENPQLLQQISRHQEQFIQMLNEPPGELADISDVEGEVGAIGEEAPQMNYIQVTPQEKEAIERLKALGFPESLVIQAYFACEKNENLAANFLLSQNFDDE

SEQ ID NO: 866950 - protein, 363 aa, Homo sapiens; identical to SEQ ID NO: 866949

SEQ ID NO: 866951 - protein, 220 aa, Homo sapiens
MAVTITLKTLQQQTFKIRMEPDETVKVLKEKIEAEKGRDAFPVAGQKLIYAGKILSDDVPIRDYRIDEKNFVVVMVTKTKAGQGTSAPPEASPTAAPESSTSFPPAPTSGMSHPPPAAREDKSPSEESAPTTSPESVSGSVPSSGSSGREEDAASTLVTGSEYETMLTEIMSMGYERERVVAALRASYNNPHRAVEYLLTQERTPWSSCGTSPSSRTCGR

SEQ ID NO: 866952 - protein, 253 aa, Homo sapiens [sequence omitted]

SEQ ID NO: 866953 - protein, 252 aa, Homo sapiens
QVAAGERKREQSLTQTLGTSWGRIPLMGSVPSSGSSGREEDAASTLVTGSEYETMLTEIMSMGYERERVVAALRASYNNPHRAVEYLLTGIPGSPEPEHGSVQESQVSEQPATEAAGENPLEFLRDQPQFQNMRQVIQQNPALLPALLQQLGQENPQLLQQISRHQEQFIQMLNEPPGELADISDVEGEVGAIGEEAPQMNYIQVTPQEKEAIERLKALGFPESLVIQAYFACEKNENLAANFLLSQNFDDE

SEQ ID NO: 866954 - protein, 363 aa, Homo sapiens; identical to SEQ ID NO: 866949

SEQ ID NO: 866955 - protein, 363 aa, Homo sapiens; identical to SEQ ID NO: 866949

SEQ ID NO: 866956 - protein, 107 aa, Homo sapiens
SDVEGEVGASSPGGSFSIWDVRQLPQGARSASGELADISDVEGEVGAIGEEAPQMNYIQVTPQEKEAIERLKALGFPESLVIQAYFACEKNENLAANFLLSQNFDDE

SEQ ID NO: 866957 - protein, 243 aa, Homo sapiens
MAVTITLKTLQQQTFKIRMEPDETVKVLKEKIEAEKGRDAFPVAGQKLIYAGKILSDDVPIRDYRIDEKNFVVVMVTKTKAGQGTSAPPEASPTAAPESSTSFPPAPTSGMSHPPPAAREDKSPSEESAPTTSPESVSGSVPSSGSSGREEDAASTLVTGSEYETMLTEIMSMGYERERVVAALRASYNNPHRAVEYLLTGIPGSPEPEHGSVPALCSQTERRLLASPSSEKPLRTPPHPLLG

SEQ ID NO: 866958 - protein, 236 aa, Homo sapiens
MAVTITLKTLQQQTFKIRMEPDETVKVLKEKIEAEKGRDAFPVAGQKLIYAGKILSDDVPIRDYRIDEKNFVVVMVTKTKAGQGTSAPPEASPTAAPESSTSFPPAPTSGMSHPPPAAREDKSPSEESAPTTSPESVSGSVPSSGSSGREEDAASTLVTGSEYETMLTEIMSMGYERERVVAALRASYNNPHRPADELHPGDAAGERSYREVEGPGLPREPGHPGLFRVCRTEPCL

SEQ ID NO: 866959 - protein, 303 aa, Homo sapiens
MAVTITLKTLQQQTFKIRMEPDETVKVLKEKIEAEKGRDAFPVAGQKLIYAGKILSDDVPIRDYRIDEKNFVVVMVTKTKAGQGTSAPPEASPTVTGSEYETMLTEIMSMGYERERVVAALRASYNNPHRAVEYLLTGIPGSPEPEHGSVQESQVSEQPATEAAGENPLEFLRDQPQFQNMRQVIQQNPALLPALLQQLGQENPQLLQQISRHQEQFIQMLNEPPGELADISDVEGEVGAIGEEAPQMNYIQVTPQEKEAIERVKALGFPESLGIQANTRGDTHGNWLQFPGVRIDDMMQEQA

SEQ ID NO: 866960 - protein, 363 aa, Homo sapiens; identical to SEQ ID NO: 866949

SEQ ID NO: 866961 - protein, 363 aa, Homo sapiens; identical to SEQ ID NO: 866949

SEQ ID NO: 866962 - protein, 452 aa, Homo sapiens
MAVTITLKTLQQQTFKIRMEPDETVKVLKEKIEAEKGRDAFPVAGQKLIYAGKILSDDVPIRDYRIDEKNFVVVMVTKTKAGQGTSAPPEASPTAAPESSTSFPPAPTSGMSHPPPAAREDKSPSEESAPTTSPESVSGSVPSSGSSGREEDAASTLVTGSEYETMLTEIMSMGYERERVVAALRASYNNPHRAVEYLLTVRWGFRLPGEALREYPGVTALMGGWEGKTCPEKPLGSDSSHYKASHRRLDVSDGWASGGQGRGLICVLPGHGGGWQQEVCALELKGPLTGIPGSPEPEHGSVQESQVSEQPATEAAGENPLEFLRDQPQFQNMRQVIQQNPALLPALLQQLGQENPQLLQQISRHQEQFIQMLNEPPGELADISDVEGEVGAIGEEAPQMNYIQVTPQEKEAIERLKALGFPESLVIQAYFACEKNENLAANFLLSQNFDDE

SEQ ID NO: 866963 - protein, 359 aa, Homo sapiens
DPHASGYSSIAIAVVYPKKPVKVLKEKIEAEKGRDAFPVAGQKLIYAGKILSDDVPIRDYRIDEKNFVVVMVTKTKAGQGTSAPPEASPTAAPESSTSFPPAPTSGMSHPPPAAREDKSPSEESAPTTSPESVSGSVPSSGSSGREEDAASTLVTGSEYETMLTEIMSMGYERERVVAALRASYNNPHRAVEYLLTGIPGSPEPEHGSVQESQVSEQPATEAAGENPLEFLRDQPQFQNMRQVIQQNPALLPALLQQLGQENPQLLQQISRHQEQFIQMLNEPPGELADISDVEGEVGAIGEEAPQMNYIQVTPQEKEAIERLKALGFPESLVIQAYFACEKNENLAANFLLSQNFDDE

SEQ ID NO: 866964 - protein, 363 aa, Homo sapiens; identical to SEQ ID NO: 866949

SEQ ID NO: 866965 - protein, 229 aa, Homo sapiens
MAVTITLKTLQQQTFKIRMEPDETVKVLKEKIEAEKGRDAFPVAGQKLIYAGKILSDDVPIRDYRIDEKNFVVVMVTKTKAGQGTSAPPEASPTAAPESSTSFPPAPTSGMSHPPPAAREDKSPSEESAPTTSPESVSGSVPSSGSSGREEDAASTLVTGSEYETMLTEIMSMGYERERVVAALRASYNNPHRPADELHPGDAAGERSYREVEGPGLPREPGHPGLFRV

SEQ ID NO: 866966 - protein, 171 aa, Homo sapiens
AHHDVRIVGIPGSPEPEHGSVQESQVSEQPATEAAGENPLEFLRDQPQFQNMRQVIQQNPALLPALLQQLGQENPQLLQQISRHQEQFIQMLNEPPGELADISDVEGEVGAIGEEAPQMNYIQVTPQEKEAIERLKALGFPESLVIQAYFACEKNENLAANFLLSQNFDDE

SEQ ID NO: 866967 - protein, 345 aa, Homo sapiens
MAVTITLKTLQQQTFKIRMEPDETVKVLKEKIEAEKGRDAFPVAGQKLIYAGKILSDDVPIRDYRIDEKNFVVVMVTKTKAGQGTSAPPEASPTAAPESSTSFPPAPTSGMSHPPPAAREDKSPSEESAPTTSPESVSGSVPSSGSSGREEDAASTLVTGSEYETMLTEIMSMGYERERVVAALRASYNNPHRAVEYLLTGIPGSPEPEHGSVQESQVSEQPATEAAGENPLEFLRDQPQFQNMRQVIQQNPALLPALLQQLGQENPQLLQQISRHQEQFIQMLNEPPGELADISDVEGEVGAIGEEAPQMNYIQVTPQEKEAIERLKALGFPESLVIQAYFACG

SEQ ID NO: 866968 - protein, 243 aa, Homo sapiens; identical to SEQ ID NO: 866957

SEQ ID NO: 866969 - protein, 243 aa, Homo sapiens; identical to SEQ ID NO: 866957

SEQ ID NO: 866970 - protein, 528 aa, Homo sapiens
MGHCRLCHGKFSSRSLRSISERAPGASMERPSAEERVLVRDFQRLLGVAVRQDPTLSPFVCKSCHAQFYQCHSLLKSFLQRVNASPAGRRKPCAKVGAQPPTGAEEGACLVDLITSSPQCLHGLVGWVHGHAASCGALPHLQRTLSSEYCGVIQVVWGCDQGHDYTMDTSSSCKAFLLDSALAVKWPWDKETAPRLPQHRGWNPGDAPQTSQGRGTGTPVGAETKTLPSTDVAQPPSDSDAVGPRSGFPPQPSLPLCRAPGQLGEKRFHLQPRMIGDVLSEDENDKKQNAQSSDESFEPYPERKVSGKKSESKEAKKSEEPRIRKKPGPKPGWKKKLRCEREELPTIYKCPYQGCTAVYRGADGMKKHIKEHHEEVRERPCPHPGCNKVFMIDRYLQRHVKLIHTEVRNYICDECGQTFKQRKHLLVHQMRHSGAKPLQCEVCGFQCRQRASLKYHMTKHKAETELDFACDQCGRRFEKAHNLNVHMSMVHPLTQTQDKALPLEAEPPPGPPSPSVTTEGQAVKPEPT

SEQ ID NO: 866971 - protein, 562 aa, Homo sapiens
MGHCRLCHGKFSSRSLRSISERAPGASMERPSAEERVLVRDFQRLLGVAVRQDPTLSPFVCKSCHAQFYQCHSLLKSFLQRVNASPAGRRKPCAKVGAQPPTGAEEGACLVDLITSSPQCLHGLVGWVHGHAASCGALPHLQRTLSSEYCGVIQVVWGCDQGHDYTMDTSSSCKAFLLDSALAVKWPWDKETAPRLPQHRGWNPGDAPQTSQGRGTGTPVGAETKTLPSTDVAQPPSDSDAVGPRSGFPPQPSLPLCRAPGQLGEKQLPSSTSDDRVKDEFSDLSEGDVLSEDENDKKQNAQSSDESFEPYPERKVSGKKSESKEAKKSEEPRIRKKPGPKPGWKKKLRCERCCLQREARPACRGRGSMHALHCREELPTIYKCPYQGCTAVYRGADGMKKHIKEHHEEVRERPCPHPGCNKVFMIDRYLQRHVKLIHTEVRNYICDECGQTFKQRKHLLVHQMRHSGAKPLQCEVCGFQCRQRASLKYHMTKHKAETELDFACDQCGRRFEKAHNLNVHMSMVHPLTQTQDKALPLEAEPPPGPPSPSVTTEGQAVKPEPT

SEQ ID NO: 866972 - protein, 352 aa, Homo sapiens
MGHCRLCHGKFSSRSLRSISERAPGASMERPSAEERVLVRDFQRLLGVAVRQDPTLSPFVCKSCHAQFYQCHSLLKSFLQRVNASPAGRRKPCAKVGAQPPTGAEEGACLVDLITSSPQCLHGLVGWVHGHAASCGALPHLQRTLSSEYCGVIQVVWGCDQGHDYTMDTSSSCKAFLLDSALAVKWPWDKETAPRLPQHRGWNPGDAPQTSQGRGTGTPVGAETKTLPSTDVAQPPSDSDAVGPRSGFPPQPSLPLCRAPGQLGEKQLPSSTSDDRVKDEFSDLSEGDVLSEDENDKKQNAQSSDESFEPYPERKVSGKKSESKEAKKSEEPRIRKKPGPKPGWKKKLRCER

SEQ ID NO: 866973 - protein, 138 aa, Homo sapiens [sequence omitted]

SEQ ID NO: 866974 - protein, 154 aa, Homo sapiens
VFPAVMVSHCHRRPPGGWSIRGLDSLDSPLSEVRNYICDECGQTFKQRKHLLVHQMRHSGAKPLQCEVCGFQCRQRASLKYHMTKHKAETELDFACDQCGRRFEKAHNLNVHMSMVHPLTQTQDKALPLEAEPPPGPPSPSVTTEGQAVKPEPT

SEQ ID NO: 866975 - protein, 626 aa, Homo sapiens
NAGSSRNLGPGSTRGILLASSAAMKRDRLGRFLSPGSSRQCGASDGGGGVSRTRGRPSLSGGPRVDGATARRAWGPVGSCGDAGEDGADEAGAGRALAMGHCRLCHGKFSSRSLRSISERAPGASMERPSAEERVLVRDFQRLLGVAVRQDPTLSPFVCKSCHAQFYQCHSLLKSFLQRVNASPAGRRKPCAKVGAQPPTGAEEGACLVDLITSSPQCLHGLVGWVHGHAASCGALPHLQRTLSSEYCGVIQVVWGCDQGHDYTMDTSSSCKAFLLDSALAVKWPWDKETAPRLPQHRGWNPGDAPQTSQGRGTGTPVGAETKTLPSTDVAQPPSDSDAVGPRSGFPPQPSLPLCRAPGQLGEKRFHLQPRMIGDVLSEDENDKKQNAQSSDESFEPYPERKVSGKKSESKEAKKSEEPRIRKKPGPKPGWKKKLRCEREELPTIYKCPYQGCTAVYRGADGMKKHIKEHHEEVRERPCPHPGCNKVFMIDRYLQRHVKLIHTEVRNYICDECGQTFKQRKHLLVHQMRHSGAKPLQCEVCGFQCRQRASLKYHMTKHKAETELDFACDQCGRRFEKAHNLNVHMSMVHPLTQTQDKALPLEAEPPPGPPSPSVTTEGQAVKPEPT

SEQ ID NO: 866976 - protein, 539 aa, Homo sapiens
MGHCRLCHGKFSSRSLRSISERAPGASMERPSAEERVLVRDFQRLLGVAVRQDPTLSPFVCKSCHAQFYQCHSLLKSFLQRVNASPAGRRKPCAKVGAQPPTGAEEGACLVDLITSSPQCLHGLVGWVHGHAASCGALPHLQRTLSSEYCGVIQVVWGCDQGHDYTMDTSSSCKAFLLDSALAVKWPWDKETAPRLPQHRGWNPGDAPQTSQGRGTGTPVGAETKTLPSTDVAQPPSDSDAVGPRSGFPPQPSLPLCRAPGQLGEKQLPSSTSDDRVKDEFSDLSEGDVLSEDENDKKQNAQSSDESFEPYPERKVSGKKSESKEAKKSEEPRIRKKPGPKPGWKKKLRCEREELPTIYKCPYQGCTAVYRGADGMKKHIKEHHEEVRERPCPHPGCNKVFMIDRYLQRHVKLIHTEVRNYICDECGQTFKQRKHLLVHQMRHSGAKPLQCEVCGFQCRQRASLKYHMTKHKAETELDFACDQCGRRFEKAHNLNVHMSMVHPLTQTQDKALPLEAEPPPGPPSPSVTTEGQAVKPEPT

SEQ ID NO: 866977 - protein, 522 aa, Homo sapiens
MGHCRLCHGKFSSRSLRSISERAPGASMERPSAEERVLVRDFQRLLGVAVRQDPTLSPFVCKSCHAQFYQCHSLLKSFLQRVNASPAGRRKPCAKVGAQPPTGAEEGACLAPSACTAWWGGCMDMRPAAGPCPTFRGHCPPSTAASSRSCGAATRATTTPWIPAPAARPSCWTVRWQSSGHGTKRRRHGCPSTEGGTLGMPLRPPRVEGQGPQLGLRPRPCPARMWPSLLRTATRWGPGRASHLSQACPFAGPQGSWVRSSFHLQPRMIGDVLSEDENDKKQNAQSSDESFEPYPERKVSGKKSESKEAKKSEEPRIRKKPGPKPGWKKKLRCEREELPTIYKCPYQGCTAVYRGADGMKKHIKEHHEEVRERPCPHPGCNKVFMIDRYLQRHVKLIHTEVRNYICDECGQTFKQRKHLLVHQMRHSGAKPLQCEVCGFQCRQRASLKYHMTKHKAETELDFACDQCGRRFEKAHNLNVHMSMVHPLTQTQDKALPLEAEPPPGPPSPSVTTEGQAVKPEPT

SEQ ID NO: 866978 - protein, 551 aa, Homo sapiens
MGHCRLCHGKFSSRSLRSISERAPGASMERPSAEERVLVRDFQRLLGVAVRQDPTLSPFVCKSCHAQFYQCHSLLKSFLQRVNASPAGRRKPCAKVGAQPPTGAEEGACLVDLITSSPQCLHGLVGWVHGHAASCGALPHLQRTLSSEYCGVIQVVWGCDQGHDYTMDTSSSCKAFLLDSALAVKWPWDKETAPRLPQHRGWNPGDAPQTSQGRGTGTPVGAETKTLPSTDVAQPPSDSDAVGPRSGFPPQPSLPLCRAPGQLGEKRFHLQPRMIGDVLSEDENDKKQNAQSSDESFEPYPERKVSGKKSESKEAKKSEEPRIRKKPGPKPGWKKKLRCEREELPTIYKCPYQGCTAVYRGADGMKKHIKEHHEEVRERPCPHPGCNKVFMIDRYLQRHVKLIHTEVRNYICDECGQTFKQRKHLLVHQMRHSGAKPLQKCESGPPPRAVALAPSYLPLSPRCEVCGFQCRQRASLKYHMTKHKAETELDFACDQCGRRFEKAHNLNVHMSMVHPLTQTQDKALPLEAEPPPGPPSPSVTTEGQAVKPEPT

SEQ ID NO: 866979 - protein, 134 aa, Homo sapiens
LGSPQEHRSPETSQEEAAVSVFQILPSPQAAMVSSQLARGHTSQNAEKAGWLGMALVEFSPYLVWKQGAKSYLFPPASLLPPTGFLTSQDQLEKVVRVGKRLLSEDCPANQLGFIPFTSTFCTRGRGKGGSPGS

SEQ ID NO: 866980 - protein, 134 aa, Homo sapiens; identical to SEQ ID NO: 866979

SEQ ID NO: 866981 - protein, 134 aa, Homo sapiens; identical to SEQ ID NO: 866979

SEQ ID NO: 866982 - protein, 134 aa, Homo sapiens; identical to SEQ ID NO: 866979

SEQ ID NO: 866983 - protein, 378 aa, Homo sapiens
MSKEPLILWLMIEFWWLYLTPVTSETVVTEVLGHRVTLPCLYSSWSHNSNSMCWGKDQCPYSGCKEALIRTDGMRVTSRKSAKYRLQGTIPRGDVSLTILNPSESDSGVYCCRIEVPGWFNDVKINVRLNLQRASTTTHRTATTTTRRTTTTSPTTTRQMTTTPAALPTTVVTTPDLTTGTPLQMTTIAVFTTANTCLSLTPSTLPEEATGLLTPEPSKEGPILTAESETVLPSDSWSSAESTSADTVLLTSKESKVWDLPSTSHVSMWKTSDSVSSPQPGASDTAVPEQNKTTKTGQMDGIPMSMKNEMPISQLLMIIAPSLGFVLFALFVAFLLRGKLMETYCSQKHTRLDYIGDSKNVLNDVQHGREDEDGLFTL

SEQ ID NO: 866984 - protein, 378 aa, Homo sapiens; identical to SEQ ID NO: 866983

SEQ ID NO: 866985 - protein, 779 aa, Homo sapiens
SPGVRVRGAGSGSPRAAAPPSRSVGGCGVSRGPGVSAGRGPRFAGPCERAQARVASGRASRWVNPASHAWGGPLAHLQTIVSCARSFVGATSPWSSCGCGSSGAIPRRLRESLDSRWSLSRVGPSNTATAGKPSPYGSCPSETPVLGSLACLASGHRPTKLAPKSRMHPEGRHSVTFVPSGAARGLSRMVPSSPAVEKQVPVEPGPDPELRSWRRLVCYLCFYGFMAQIRPGESFITPYLLGPDKNFTREQVTNEITPVLSYSYLAVLVPVFLLTDYLRYTPVLLLQGLSFVSVWLLLLLGHSVAHMQLMELFYSVTMAARIAYSSYIFSLVRPARYQRVAGYSRAAVLLGVFTSSVLGQLLVTVGRVSFSTLNYISLAFLTFSVVLALFLKRPKRSLFFNRDDRGRCETSASELERMNPGPGGKLGHALRVACGDSVLARMLRELGDSLRRPQLRLWSLWWVFNSAGYYLVVYYVHILWNEVDPTTNSARVYNGAADAASTLLGAITSFAAGFVKIRWARWSKLLIAGVTATQAGLVFLLAHTRHPSSIWLCYAAFVLFRGSYQFLVPIATFQIASSLSKELCALVFGVNTFFATIVKTIITFIVSDVRGLGLPVRKQFQLYSVYFLILSIIYFLGAMLDGLRHCQRGHHPRQPPAQGLRSAAEEKAAQALSVQDKGLGGLQPAQSPPLSPEDSLGAVGPASLEQRQSDPYLAQAPAPQAAEFLSPVTTPSPCTLCSAQASGPEAADETCPQLAVHPPGVSKLGLQCLPSDGVQNVNQ

SEQ ID NO: 866986 - protein, 528 aa, Homo sapiens
SPGVRVRGAGSGSPRAAAPPSRRHSVTFVPSGAARGLSRMVPSSPAVEKQVPVEPGPDPELRSWRRLVCYLCFYGFMAQIRPGESFITPYLLGPDKNFTREQVTNEITPVLSYSYLAVLVPVFLLTDYLRYTPVLLLQGLSFVSVWLLLLLGHSVAHMQLMELFYSVTMAARIAYSSYIFSLVRPARYQRVAGYSRAAVLLGVFTSSVLGQLLVTVGRVSFSTLNYISLAFLTFSVVLALFLKRPKRSLFFNRDDRGRCETSASELERMNPGPGGKLGHALRVACGDSVLARMLRELGDSLRRPQLRLWSLWWVFNSAGYYLVVYYVHILWNEVDPTTNSARVYNGAADAASTLLGAITSFAAGFVKIRWARWSKLLIAGVTATQAGLVFLLAHTRHPSSIWLCYAAFVLFRGSYQFLVPIATFQIASSLSKELCALVFGVNTFFATIVKTIITFIVSDVRGLGLPVRKQNEELHVASLSLWKSHLRLAADTLSSEGSSGSGPRSWFLSPTLRAALHGPVCPSEVCPS

SEQ ID NO: 866987 - protein, 630 aa, Homo sapiens
SPGVRVRGAGSGSPRAAAPPSRRHSVTFVPSGAARGLSRMVPSSPAVEKQVPVEPGPDPELRSWRRLVCYLCFYGFMAQIRPGESFITPYLLGPDKNFTREQVTNEITPVLSYSYLAVLVPVFLLTDYLRYTPVLLLQGLSFVSVWLLLLLGHSVAHMQLMELFYSVTMAARIAYSSYIFSLVRPARYQRVAGYSRAAVLLGVFTSSVLGQLLVTVGRVSFSTLNYISLAFLTFSVVLALFLKRPKRSLFFNRDDRGRCETSASELERMNPGPGGKLGHALRVACGDSVLARMLRELGDSLRRPQLRLWSLWWVFNSAGYYLVVYYVHILWNEVDPTTNSARVYNGAADAASTLLGAITSFAAGFVKIRWARWSKLLIAGVTATQAGLVFLLAHTRHPSSIWLCYAAFVLFRGSYQFLVPIATFQIASSLSKELCALVFGVNTFFATIVKTIITFIVSDVRGLGLPVRKQFQLYSVYFLILSIIYFLGAMLDGLRHCQRGHHPRQPPAQGLRSAAEEKAAQALSVQDKGLGGLQPAQSPPLSPEDSLGAVGPASLEQRQSDPYLAQAPAPQAAEFLSPVTTPSPCTLCSAQASGPEAADETCPQLAVHPPGVSKLGLQCLPSDGVQNVNQ

SEQ ID NO: 866988 - protein, 630 aa, Homo sapiens; identical to SEQ ID NO: 866987

SEQ ID NO: 866989 - protein, 551 aa, Homo sapiens
MSRSPRARGRVREPQGSRPAESQVTNEITPVLSYSYLAVLVPVFLLTDYLRYTPVLLLQGLSFVSVWLLLLLGHSVAHMQLMELFYSVTMAARIAYSSYIFSLVRPARYQRVAGYSRAAVLLGVFTSSVLGQLLVTVGRVSFSTLNYISLAFLTFSVVLALFLKRPKRSLFFNRDDRGRCETSASELERMNPGPGGKLGHALRVACGDSVLARMLRELGDSLRRPQLRLWSLWWVFNSAGYYLVVYYVHILWNEVDPTTNSARVYNGAADAASTLLGAITSFAAGFVKIRWARWSKLLIAGVTATQAGLVFLLAHTRHPSSIWLCYAAFVLFRGSYQFLVPIATFQIASSLSKELCALVFGVNTFFATIVKTIITFIVSDVRGLGLPVRKQFQLYSVYFLILSIIYFLGAMLDGLRHCQRGHHPRQPPAQGLRSAAEEKAAQALSVQDKGLGGLQPAQSPPLSPEDSLGAVGPASLEQRQSDPYLAQAPAPQAAEFLSPVTTPSPCTLCSAQASGPEAADETCPQLAVHPPGVSKLGLQCLPSDGVQNVNQ

SEQ ID NO: 866990 - protein, 146 aa, Homo sapiens
SPGVRVRGAGSGSPRAAAPPSRRHSVTFVPSGAARGLSRMVPSSPAVEKQVPVEPGPDPELRSWRRLVCYLCFYGFMAQIRPGESFITPYLLGPDKNFTREQARTGSCPGSGCRWRGWGWSGGAISLTPHEMPSAPGQSVPLPATH

SEQ ID NO: 866991 - protein, 630 aa, Homo sapiens; identical to SEQ ID NO: 866987

SEQ ID NO: 866992 - protein, 630 aa, Homo sapiens; identical to SEQ ID NO: 866987

SEQ ID NO: 866993 - protein, 630 aa, Homo sapiens; identical to SEQ ID NO: 866987

SEQ ID NO: 866994 - protein, 584 aa, Homo sapiens
AVEEVQGEEREGSGWLPRGSSALRPSTKTRRCLMRPQPAEPAPGGRGNEACSIHSEVTNEITPVLSYSYLAVLVPVFLLTDYLRYTPVLLLQGLSFVSVWLLLLLGHSVAHMQLMELFYSVTMAARIAYSSYIFSLVRPARYQRVAGYSRAAVLLGVFTSSVLGQLLVTVGRVSFSTLNYISLAFLTFSVVLALFLKRPKRSLFFNRDDRGRCETSASELERMNPGPGGKLGHALRVACGDSVLARMLRELGDSLRRPQLRLWSLWWVFNSAGYYLVVYYVHILWNEVDPTTNSARVYNGAADAASTLLGAITSFAAGFVKIRWARWSKLLIAGVTATQAGLVFLLAHTRHPSSIWLCYAAFVLFRGSYQFLVPIATFQIASSLSKELCALVFGVNTFFATIVKTIITFIVSDVRGLGLPVRKQFQLYSVYFLILSIIYFLGAMLDGLRHCQRGHHPRQPPAQGLRSAAEEKAAQALSVQDKGLGGLQPAQSPPLSPEDSLGAVGPASLEQRQSDPYLAQAPAPQAAEFLSPVTTPSPCTLCSAQASGPEAADETCPQLAVHPPGVSKLGLQCLPSDGVQNVNQ

SEQ ID NO: 866995 - protein, 207 aa, Homo sapiens
MCQTLRHPGGQPFPLVGPPVPHRSLRLASFPSLRAQPAPGQLPVPAATPLLGHRLMPENSQESHAMFNERQNVGTRCEAVPGCGRETPGCARQGAFLLDLEGHPMSWGREGRGAYPCDRTLPVATGRAQQNPQFVSGHVPTSDSAASPTCTLSQEAAVSRPAPQPEGFLLVTQNCLPQVPGQEMSLNFPAPSPVDILGVRHTSAHSH

SEQ ID NO: 866996 - protein, 201 aa, Homo sapiens
LSPTQPKIQHPDDKTQVKEEMMDNRGNSSLPDKLPIFPDSARLPLTRSFYLEPMVTFHVHPEAPVSSPYSEELPRLPFPSDSLILGNYSEPCPFSFPMPYPNYRGCEYSYGPAFTRKRNERERQRVKCVNEGYAQLRHHLPEEYLEKRLSKVETLRAAIKYINYLQSLLYPDKAETKNNPGKVSSMIATTSHHADPMFRIV

SEQ ID NO: 866997 - protein, 202 aa, Homo sapiens
VSAIISYLPVYLILIISVKEEMMDNRGNSSLPDKLPIFPDSARLPLTRSFYLEPMVTFHVHPEAPVSSPYSEELPRLPFPSDSLILGNYSEPCPFSFPMPYPNYRGCEYSYGPAFTRKRNERERQRVKCVNEGYAQLRHHLPEEYLEKRLSKVETLRAAIKYINYLQSLLYPDKAETKNNPGKVSSMIATTSHHADPMFRIV

SEQ ID NO: 866998 - protein, 842 aa, Homo sapiens
MDISKGLPGMQGGLHIWISENRKMVPVPEGAYGNFFEEHCYVILHVPQSPKATQGASSDLHYWVGKQAGAEAQGAAEAFQQRLQDELGGQTVLHREAQGHESDCFCSYFRPGIIYRKGGLASDLKHVETNLFNIQRLLHIKGRKHVSATEVELSWNSFNKGDIFLLDLGKMMIQWNGPKTSISEKARGLALTYSLRDRERGGGRAQIGVVDDEAKAPDLMQIMEAVLGRRVGSLRAATPSKDINQLQKANVRLYHVYEKGKDLVVLETFYILDQGGFKIYVWQGRMSSLQERKAAFSRAVGFIQAKGYPTYTNVEVVNDGAESAAFKQLFRTWSEKRRRNQKLGGRDKSIHVKLDVGKLHTQPKLAAQLRMVDDGSGKVEVWCIQDLHRQPVDPKRHGQLCAGNCYLVLYTYQRLGRVQYILYLWQGHQATADEIEALNSNAEELDVMYGGVLVQEHVTMGSEPPHFLAIFQGQLVIFQERAGHHGKGQSASTTRLFQVQGTDSHNTRTMEVPARASSLNSSDIFLLVTASVCYLWFGKGCNGDQREMARVVVTVISRKNEETVLEGQEPPHFWEALGGRAPYPSNKRLPEEVPSFQPRLFECSSHMGCLVLAEVGFFSQEDLDKYDIMLLDTWQEIFLWLGEAASEWKEAVAWGQEYLKTHPAGRSPATPIVLVKQGHEPPTFIGWFFTWDPYKWTSHPSHKEVVDGSPAAASTISEITAEVNNLRLSRWPGNGRAGAVALQALKGSQDSSENDLVRSPKSAGSRTSSSVSSTSATINGGLRREQLMHQAVEDLPEGVDPARREFYLSDSDFQDIFGKSKEEFYSMATWRQRQEKKQLGFF

SEQ ID NO: 866999 - protein, 320 aa, Homo sapiens
SFLHEQRGTLYPEQSGVLGEKPRGSEEGPGLPLLRSGFPGPGVGHLCHGLGCPSGWLTALLSVLARLPEEVPSFQPRLFECSSHMGCLVLAEVGFFSQEDLDKYDIMLLDTWQEIFLWLGEAASEWKEAVAWGQEYLKTHPAGRSPATPIVLVKQGHEPPTFIGWFFTWDPYKWTSHPSHKEVVDGSPAAASTISEITAEVNNLRLSRWPGNGRAGAVALQALKGSQDSSENDLVRSPKSAGSRTSSSVSSTSATINGGLRREQLMHQAVEDLPEGVDPARREFYLSDSDFQDIFGKSKEEFYSMATWRQRQEKKQLGFF

SEQ ID NO: 867000 - protein, 833 aa, Homo sapiens
SSPSPPAPPSSPQHIYTNTRTLGPPEPEATQGASSDLHYWVGKQAGAEAQGAAEAFQQRLQDELGGQTVLHREAQGHESDCFCSYFRPGIIYRKGGLASDLKHVETNLFNIQRLLHIKGRKHVSATEVELSWNSFNKGDIFLLDLGKMMIQWNGPKTSISEKARGLALTYSLRDRERGGGRAQIGVVDDEAKAPDLMQIMEAVLGRRVGSLRAATPSKDINQLQKANVRLYHVYEKGKDLVVLELATPPLTQDLLQEEDFYILDQGGFKIYVWQGRMSSLQERKAAFSRAVGFIQAKGYPTYTNVEVVNDGAESAAFKQLFRTWSEKRRRNQKLGGRDKSIHVKLDVGKLHTQPKLAAQLRMVDDGSGKVEVWCIQDLHRQPVDPKRHGQLCAGNCYLVLYTYQRLGRVQYILYLWQGHQATADEIEALNSNAEELDVMYGGVLVQEHVTMGSEPPHFLAIFQGQLVIFQERAGHHGKGQSASTTRLFQVQGTDSHNTRTMEVPARASSLNSSDIFLLVTASVCYLWFGKGCNGDQREMARVVVTVISRKNEETVLEGQEPPHFWEALGGRAPYPSNKRLPEEVPSFQPRLFECSSHMGCLVLAEVGFFSQEDLDKYDIMLLDTWQEIFLWLGEAASEWKEAVAWGQEYLKTHPAGRSPATPIVLVKQGHEPPTFIGWFFTWDPYKWTSHPSHKEVVDGSPAAASTISEITAEVNNLRLSRWPGNGRAGAVALQALKGSQDSSENDLVRSPKSAGSRTSSSVSSTSATINGGLRREQLMHQAVEDLPEGVDPARREFYLSDSDFQDIFGKSKEEFYSMATWRQRQEKKQLGFF

SEQ ID NO: 867001 - protein, 856 aa, Homo sapiens
MDISKGLPGMQGGLHIWISENRKMVPVPEGAYGNFFEEHCYVILHVPQSPKATQGASSDLHYWVGKQAGAEAQGAAEAFQQRLQDELGGQTVLHREAQGHESDCFCSYFRPGIIYRKGGLASDLKHVETNLFNIQRLLHIKGRKHVSATEVELSWNSFNKGDIFLLDLGKMMIQWNGPKTSISEKARGLALTYSLRDRERGGGRAQIGVVDDEAKAPDLMQIMEAVLGRRVGSLRAATPSKDINQLQKANVRLYHVYEKGKDLVVLELATPPLTQDLLQEEDFYILDQGGFKIYVWQGRMSSLQERKAAFSRAVGFIQAKGYPTYTNVEVVNDGAESAAFKQLFRTWSEKRRRNQKLGGRDKSIHVKLDVGKLHTQPKLAAQLRMVDDGSGKVEVWCIQDLHRQPVDPKRHGQLCAGNCYLVLYTYQRLGRVQYILYLWQGHQATADEIEALNSNAEELDVMYGGVLVQEHVTMGSEPPHFLAIFQGQLVIFQERAGHHGKGQSASTTRLFQVQGTDSHNTRTMEVPARASSLNSSDIFLLVTASVCYLWFGKGCNGDQREMARVVVTVISRKNEETVLEGQEPPHFWEALGGRAPYPSNKRLPEEVPSFQPRLFECSSHMGCLVLAEVGFFSQEDLDKYDIMLLDTWQEIFLWLGEAASEWKEAVAWGQEYLKTHPAGRSPATPIVLVKQGHEPPTFIGWFFTWDPYKWTSHPSHKEVVDGSPAAASTISEITAEVNNLRLSRWPGNGRAGAVALQALKGSQDSSENDLVRSPKSAGSRTSSSVSSTSATINGGLRREQLMHQAVEDLPEGVDPARREFYLSDSDFQDIFGKSKEEFYSMATWRQRQEKKQLGFF

SEQ ID NO: 867002 - protein, 531 aa, Homo sapiens
AAGPGILEGWLRSGRGGDGVGGGQRAPLTPTVPPSDKSIHVKLDVGKLHTQPKLAAQLRMVDDGSGKVEVWCIQDLHRQPVDPKRHGQLCAGNCYLVLYTYQRLGRVQYILYLWQGHQATADEIEALNSNAEELDVMYGGVLVQEHVTMGSEPPHFLAIFQGQLVIFQERAGHHGKGQSASTTRLFQVQGTDSHNTRTMEVPARASSLNSSDIFLLVTASVCYLWFGKGCNGDQREMARVVVTVISRKNEETVLEGQEPPHFWEALGGRAPYPSNKRLPEEVPSFQPRLFECSSHMGCLVLAEVGFFSQEDLDKYDIMLLDTWQEIFLWLGEAASEWKEAVAWGQEYLKTHPAGRSPATPIVLVKQGHEPPTFIGWFFTWDPYKWTSHPSHKEVVDGSPAAASTISEITAEVNNLRLSRWPGNGRAGAVALQALKGSQDSSENDLVRSPKSAGSRTSSSVSSTSATINGGLRREQLMHQAVEDLPEGVDPARREFYLSDSDFQDIFGKSKEEFYSMATWRQRQEKKQLGFF

SEQ ID NO: 867003 - protein, 444 aa, Homo sapiens
SSPSPPAPPSSPQHIYTNTRTLGPPEPEATQGASSDLHYWVGKQAGAEAQGAAEAFQQRLQDELGGQTVLHREAQGHESDCFCSYFRPGIIYRKGGLASDLKHVETNLFNIQRLLHIKGRKHVSATEVELSWNSFNKGDIFLLDLGKMMIQWNGPKTSISEKARGLALTYSLRDRERGGGRAQIGVVDDEAKAPDLMQIMEAVLGRRVGSLRAATPSKDINQLQKANVRLYHVYEKGKDLVVLELATPPLTQDLLQEEDFYILDQGGFKIYVWQGRMSSLQERKAAFSRAVGFIQAKGYPTYTNVEVVNDGAESAAFKQLFRTWSEKRRRNQKLGGRDKSIHVKLDVGKLHTQPKLAAQLRMVDDGSGKVEVWCIQDLHRQPVDPKRHGQLCAGNCYLVLYTYQRLGRVQYILYLWQGHQATADEIEVLQGLSPEEHRYRVCSE

SEQ ID NO: 867004 - protein, 856 aa, Homo sapiens; identical to SEQ ID NO: 867001

SEQ ID NO: 867005 - protein, 859 aa, Homo sapiens
SSPSPPAPPSSPQHIYTNTRTLGPPEPEATQGASSDLHYWVGKQAGAEAQGAAEAFQQRLQDELGGQTVLHREAQGHESDCFCSYFRPGIIYRKGGLASDLKHVETNLFNIQRLLHIKGRKHVSATEVELSWNSFNKGDIFLLDLGKMMIQWNGPKTSISEKARGLALTYSLRDRERGGGRAQIGVVDDEAKAPDLMQIMEAVLGRRVGSLRAATPSKDINQLQKANVRLYHVYEKGKDLVVLELATPPLTQDLLQEEDFYILDQGGFKIYVWQGRMSSLQERKAAFSRAVGFIQAKGYPTYTNVEVVNDGAESAAFKQLFRTWSEKRRRNQKLGGRDKSIHVKLDVGKLHTQPKLAAQLRMVDDGSGKVEGLPGILPESAWLQVCTPQEEETTLTDVWCIQDLHRQPVDPKRHGQLCAGNCYLVLYTYQRLGRVQYILYLWQGHQATADEIEALNSNAEELDVMYGGVLVQEHVTMGSEPPHFLAIFQGQLVIFQERAGHHGKGQSASTTRLFQVQGTDSHNTRTMEVPARASSLNSSDIFLLVTASVCYLWFGKGCNGDQREMARVVVTVISRKNEETVLEGQEPPHFWEALGGRAPYPSNKRLPEEVPSFQPRLFECSSHMGCLVLAEVGFFSQEDLDKYDIMLLDTWQEIFLWLGEAASEWKEAVAWGQEYLKTHPAGRSPATPIVLVKQGHEPPTFIGWFFTWDPYKWTSHPSHKEVVDGSPAAASTISEITAEVNNLRLSRWPGNGRAGAVALQALKGSQDSSENDLVRSPKSAGSRTSSSVSSTSATINGGLRREQLMHQAVEDLPEGVDPARREFYLSDSDFQDIFGKSKEEFYSMATWRQRQEKKQLGFF

SEQ ID NO: 867006 - protein, 672 aa, Homo sapiens
SSPSPPAPPSSPQHIYTNTRTLGPPEPEATQGASSDLHYWVGKQAGAEAQGAAEAFQQRLQDELGGQTVLHREAQGHESDCFCSYFRPGIIYRKGGLASDLKHVETNLFNIQRLLHIKGRKHVSATEVELSWNSFNKGDIFLLDLGKMMIQWNGPKTSISEKARGLALTYSLRDRERGGGRAQIGVVDDEAKAPDLMQIMEAVLGRRVGSLRAATPSKDINQLQKANVRLYHVYEKGKDLVVLELATPPLTQDLLQEEDFYILDQGGFKIYVWQGRMSSLQERKAAFSRAVGFIQAKGYPTYTNVEVVNDGAESAAFKQLFRTWSEKRRRNQKLGGRDKSIHVKLDVGKLHTQPKLAAQLRMVDDGSGKVEGLPGILPESAWLQVCTPQEEETTLTDVWCIQDLHRQPVDPKRHGQLCAGNCYLVLYTYQRLGRVQYILYLWQGHQATADEIEALNSNAEELDVMYGGVLVQEHVTMGSEPPHFLAIFQGQLVIFQERAGHHGKGQSASTTRLFQVQGTDSHNTRTMEVPARASSLNSSDIFLLVTASVCYLWFGKGCNGDQREMARVVVTVISRKNEETVLEGQEPPHFWEALGGRAPYPSNKRLPEEVPSFQPRLFECSSHMGCLVLAEVGFFSQEDLDKYDIMLLDTWQEVRWLSLPGGAVNGGVFLFV

SEQ ID NO: 867007 - protein, 79 aa, Homo sapiens
MVSLNGIEWNHHQMEMNGIVIEWNRMDSLNGIDGIIEWNGMEQSMNSNGIIIEWNRMESSSGIEWNYDQMESNVIIIKW

SEQ ID NO: 867008 - protein, 614 aa, Homo sapiens
MDGKVAVQECGPPAVSWVPEEGEKLDQEDEDQVKDRGQWTNKMEFVLSVAGEIIGLGNVWRFPYLCYKNGGGAFFIPYFIFFFVCGIPVFFLEVALGQYTSQGSVTAWRKICPLFQGIGLASVVIESYLNVYYIIILAWALFYLFSSFTSELPWTTCNNFWNTEHCTDFLNHSGAGTVTPFENFTSPVMEFWERRVLGITSGIHDLGSLRWELALCLLLAWVICYFCIWKGVKSTGKVVYFTATFPYLMLVILLIRGVTLPGAYQGIIYYLKPDLFRLKDPQVWMDAGTQIFFSFAICQGCLTALGSYNKYHNNCYKDCIALCFLNSATSFVAGFVVFSILGFMSQEQGVPISEVAESGPGLAFIAFPKAVTMMPLSQLWSCLFFIMLIFLGLDSQFVCVECLVTASIDMFPRQLRKSGRRELLILTIAVMCYLIGLFLVTEGGMYIFQLFDYYASSGICLLFLSLFEVVCISWVYGADRFYDNIEDMIGYRPWPLVKISWLFLTPGLCLATFLFSLSKYTPLKYNNVYVYPPWGYSIGWFLALSSMVCVPLFVVITLLKTRGPFRKRLRQLITPDSSLPQPKQHPCLDGSAGRNFGPSPTREGLIAGEKETHL

SEQ ID NO: 867009 - protein, 614 aa, Homo sapiens; identical to SEQ ID NO: 867008

SEQ ID NO: 867010 - protein, 60 aa, Homo sapiens
MLGRHSLWEGTIVFIKGGLFGGRHLIATPRVMRIPLWGCLLLERTAFVHGERSYNWNAHC

SEQ ID NO: 867011 - protein, 614 aa, Homo sapiens; identical to SEQ ID NO: 867008

SEQ ID NO: 867012 - protein, 366 aa, Homo sapiens [sequence omitted]

SEQ ID NO: 867013 - protein, 74 aa, Homo sapiens
MLPAGEIGASPAAPSCSVGTKGQGRESADKGELTPYGPAFIDKNCVTLDRCETLEPHRADDRIMMQYQPCTHES

SEQ ID NO: 867014 - protein, 792 aa, Homo sapiens
MLPAGEIGASPAAPCCSESGDERKNLEEKSDINVTVLIGSKQVSEGTDNGDLPSYVSAFIEKEVGNDLKSLKKLDKLIEQRTVSKMQLEEQVLTISSEIPKRIRSALKNAEESKQFLNQFLEQETHLFSAINSHLLTAQPWMDDLGTMISQIEEIERHLAYLKWISQIEELSDNIQQYLMTNNVPEAASTLVSMAELDIKLQESSCTHLLGFMRATVKFWHKILKDKLTSDFEEILAQLHWPFIAPPQSQTVGLSRPASAPEIYSYLETLFCQLLKLQTSDELLTEPKQLPEKYSLPASPSVILPIQVMLTPLQKRFRYHFRGNRQTNVLSKPEWYLAQVLMWIGNHTEFLDEKIQPILDKVGSLVNARLEFSRGLMMLVLEKLATDIPCLLYDDNLFCHLVDEVLLFERELHSVHGYPGTFASCMHILSEETCFQRWLTVERKFALQKMDSMLSSEAAWVSQYKDITDVDEMKVPDCAETFMTLLLVITDRYKNLPTASRKLQFLELQKDLVDDFRIRLTQVMKEETRASLGFRYCAILNAVNYISTVLADWADNVFFLQLQQAALEVFAENNTLSKLQLGQLASMESSVFDDMINLLERLKHDMLTRQVDHVFREVKDAAKLYKKERWLSLPSQSEQAVMSLSSSACPLLLTLRDHLLQLEQQLCFSLFKIFWQMLVEKLDVYIYQEIILANHFNEGGAAQLQFDMTRNLFPLFSHYCKRPENYFKHIKEACIVLNLNVGSALLLKDVLQSASGQLPATAALNEVGIYKLAQQDVEILLNLRTNWPNTGK

SEQ ID NO: 867015 - protein, 764 aa, Homo sapiens
MLPAGEIGASPAAPCCSESGDERKNLEEKSDINVTVLIGSKQVSEGTDNGDLPSYVSAFIEKEVGNDLKSLKKLDKLIEQRTVSKMQLEEQFLEQETHLFSAINSHLLTAQPWMDDLGTMISQIEEIERHLAYLKWISQIEELSDNIQQYLMTNNVPEAASTLVSMAELDIKLQESSCTHLLGFMRATVKFWHKILKDKLTSDFEEILAQLHWPFIAPPQSQTVGLSRPASAPEIYSYLETLFCQLLKLQTSDELLTEPKQLPEKYSLPASPSVILPIQVMLTPLQKRFRYHFRGNRQTNVLSKPEWYLAQVLMWIGNHTEFLDEKIQPILDKVGSLVNARLEFSRGLMMLVLEKLATDIPCLLYDDNLFCHLVDEVLLFERELHSVHGYPGTFASCMHILSEETCFQRWLTVERKFALQKMDSMLSSEAAWVSQYKDITDVDEMKVPDCAETFMTLLLVITDRYKNLPTASRKLQFLELQKDLVDDFRIRLTQVMKEETRASLGFRYCAILNAVNYISTVLADWADNVFFLQLQQAALEVFAENNTLSKLQLGQLASMESSVFDDMINLLERLKHDMLTRQVDHVFREVKDAAKLYKKERWLSLPSQSEQAVMSLSSSACPLLLTLRDHLLQLEQQLCFSLFKIFWQMLVEKLDVYIYQEIILANHFNEGGAAQLQFDMTRNLFPLFSHYCKRPENYFKHIKEACIVLNLNVGSALLLKDVLQSASGQLPATAALNEVGIYKLAQQDVEILLNLRTNWPNTGK

SEQ ID NO: 867016 - protein, 792 aa, Homo sapiens; identical to SEQ ID NO: 867014

SEQ ID NO: 867017 - protein, 774 aa, Homo sapiens
MLPAGEIGASPAAPCCSESGDERKNLEEKSDINVTVLIGSKQVSEGTDNGDLPSYVSAFIEKEVGNDLKSLKKLDKLIEQRTVSKMQLEEQVLTISSEIPKRIRSALNLFSAINSHLLTAQPWMDDLGTMISQIEEIERHLAYLKWISQIEELSDNIQQYLMTNNVPEAASTLVSMAELDIKLQESSCTHLLGFMRATVKFWHKILKDKLTSDFEEILAQLHWPFIAPPQSQTVGLSRPASAPEIYSYLETLFCQLLKLQTSDELLTEPKQLPEKYSLPASPSVILPIQVMLTPLQKRFRYHFRGNRQTNVLSKPEWYLAQVLMWIGNHTEFLDEKIQPILDKVGSLVNARLEFSRGLMMLVLEKLATDIPCLLYDDNLFCHLVDEVLLFERELHSVHGYPGTFASCMHILSEETCFQRWLTVERKFALQKMDSMLSSEAAWVSQYKDITDVDEMKVPDCAETFMTLLLVITDRYKNLPTASRKLQFLELQKDLVDDFRIRLTQVMKEETRASLGFRYCAILNAVNYISTVLADWADNVFFLQLQQAALEVFAENNTLSKLQLGQLASMESSVFDDMINLLERLKHDMLTRQVDHVFREVKDAAKLYKKERWLSLPSQSEQAVMSLSSSACPLLLTLRDHLLQLEQQLCFSLFKIFWQMLVEKLDVYIYQEIILANHFNEGGAAQLQFDMTRNLFPLFSHYCKRPENYFKHIKEACIVLNLNVGSALLLKDVLQSASGQLPATAALNEVGIYKLAQQDVEILLNLRTNWPNTGK

SEQ ID NO: 867018 - protein, 138 aa, Homo sapiens
VPLYLVSRLYLVSRLYLVSRLYLVSRLYLVARLYLVSRLYLVSRLYLVSRLYLVSRLYLVSRLYLVSRLYLVPRLYLVSALPCLGSTLSRLYLVSRLYLVLVKSRSCDFLFHEADKYEAVEKILKNEIKLSNFIIFTD

SEQ ID NO: 867019 - protein, 251 aa, Homo sapiens
MNWEWGPADQFSVTFSPFHVNRIARDRLPWICFSKNSVSAQSIDRTGGCVCVSCWVFLISYIIQNHTISHQRVADTMLPPMALPSVSWMLLSCLMLLSQVQGEEPQRELPSARIRCPKGSKAYGSHCYALFLSPKSWTDADLACQKRPSGNLVSVLSGAEGSFVSSLVKSIGNSYSYVWIGLHDPTQGTEPNGEGWEWSSSDVMNYFAWERNPSTISSPGHCASLSRSTAFLRWKDYNCNVRLPYVCKFTD

SEQ ID NO: 867020 - protein, 175 aa, Homo sapiens
MLPPMALPSVSWMLLSCLMLLSQVQGEEPQRELPSARIRCPKGSKAYGSHCYALFLSPKSWTDADLACQKRPSGNLVSVLSGAEGSFVSSLVKSIGNSYSYVWIGLHDPTQGTEPNGEGWEWSSSDVMNYFAWERNPSTISSPGHCASLSRSTAFLRWKDYNCNVRLPYVCKFTD

SEQ ID NO: 867021 - protein, 547 aa, Homo sapiens
MFYYPNVLQRHTGCFATIWLAATRGSRLVKREYLRVNVVKTCEEILNYVLVRVQPPQPGLPRPRFSLYLSAQLQIGVIRVYSQQCQYLVEDIQHILERLHRAQLQIRIDMETELPSLLLPNHLAMMETLEDAPDPFFGMMSVDPRLPSPFDIPQIRHLLEAAIPERVEEIPPEVPTEPREPERIPVTVLPPEAITILEAEPIRMLEIEGERELPEVSRRELDLLIAEEEEAILLEIPRLPPPAPAEVEGIGEALGPEELRLTGWEPGALLMEVTPPEELRLPAPPSPERRPPVPPPPRRRRRRRLLFWDKETQISPEKFQEQLQTRAHCWECPMVQPPERTIRGPAELFRTPTLSGWLPPELLGLWTHCAQPPPKALRRELPEEAAAEEERRKIEVPSEIEVPREALEPSVPLMVSLEISLEAAEEEKSRISLIPPEERWAWPEVEAPEAPALPVVPELPEVPMEMPLVLPPELELLSLEAVHRAVALELQANREPDFSSLVSPLSPRRMAARVFYLLLVLSAQQILHVKQEKPYGRLLIQPGPRFH

SEQ ID NO: 867022 - protein, 547 aa, Homo sapiens; identical to SEQ ID NO: 867021

SEQ ID NO: 867023 - protein, 603 aa, Homo sapiens
MFYYPNVLQRHTGCFATIWLAATRGSRLVKREYLRVNVVKTCEEILNYVLVRVQPPQPGLPRPRFSLYLSAQLQIGVIRVYSQQCQYLVEDIQHILERLHRAQLQIRIDMETELPSLLLPNHLAMMETLEDAPDPFFGMMSVDPRLPSPFDIPQIRHLLEAAIPERVEEIPPEVPTEPREPERIPVTVLPPEAITILEAEPIRMLEIEGERELPEVSRRELDLLIAEEEEAILLEIPRLPPPAPAEVEGIGEALGPEELRLTGWEPGALLMEVTPPEELRLPAPPSPERRPPVPPPPRRRRRRRLLFWDKETQISPEKFQEQLQTRAHCWECPMVQPPERTIRGPAELFRTPTLSGWLPPELLGLWTHCAQPPPKALRRELPEEAAAEEERRKIEVPSEIEVTAPPVYCIAPVPGLPDQLAALSCYESQQHRLTGLVPSEAQVPDAWGLSSTSPIPRVPREALEPSVPLMVSLEISLEAAEEEKSRISLIPPEERWAWPEVEAPEAPALPVVPELPEVPMEMPLVLPPELELLSLEAVHRAVALELQANREPDFSSLVSPLSPRRMAARVFYLLLVLSAQQILHVKQEKPYGRLLIQPGPRFH

SEQ ID NO: 867024 - protein, 547 aa, Homo sapiens; identical to SEQ ID NO: 867021

SEQ ID NO: 867025 - protein, 688 aa, Homo sapiens
MFYYPNVLQRHTGCFATIWLAATRGSRLVKREYLRVNVVKTCEEILNYVLVRVQPPQPGLPRPRFSLYLSAQLQIGVIRVYSQQCQYLVEDIQHILERLHRAQLQIRIDMETELPSLLLPNHLAMMETLEDAPDPFFGMMSVDPRLPSPFDIPQIRHLLEAAIPERVEEIPPEVPTEPREPERIPVTVLPPEAITILEAEPIRMLEIEGERELPEVSRRELDLLIAEEEEAILLEIPRLPPPAPAEVEGIGEALGPEELRLTGWEPGALLMEVTPPEELRLPAPPSPERRPPVPPPPRRRRRRRLLFWDKETQISPEKFQEQLQTRAHCWECPMVQPPERTIRGPAELFRTPTLSGWLPPELLGLWTHCAQPPPKALRRELPEEAAAEEERRKIEVPSEIEVPREALEPSVPLMVSLEISLEAAEEEKSRISLIPPEERWAWPEVEAPEAPALPVVPELPEVPMEMPLVLPPELELLSLEAVHRAVALELQANREPDFSSLVSPLSPRRMAARVFYLLLGECMHVCVCMWGRDTETRGPYRDSPDLPSPRLLTSALSATDSSRETRKAIWSPPDPAGAQIPLRLESIYKAARKPATSSKPRRASLGPAYLISECAFPAFLLSELLFKQKTSCFYYSKKKKKKPRGTHTIRGGGNKRVMNWAPGHITGFPDPRFVDQGGTLRGPPKGSE

SEQ ID NO: 867026 - protein, 468 aa, Homo sapiens
WLSTSSSLPTEDIQHILERLHRAQLQIRIDMETELPSLLLPNHLAMMETLEDAPDPFFGMMSVDPRLPSPFDIPQIRHLLEAAIPERVEEIPPEVPTEPREPERIPVTVLPPEAITILEAEPIRMLEIEGERELPEVSRRELDLLIAEEEEAILLEIPRLPPPAPAEVEGIGEALGPEELRLTGWEPGALLMEVTPPEELRLPAPPSPERRPPVPPPPRRRRRRRLLFWDKETQISPEKFQEQLQTRAHCWECPMVQPPERTIRGPAELFRTPTLSGWLPPELLGLWTHCAQPPPKALRRELPEEAAAEEERRKIEVPSEIEVPREALEPSVPLMVSLEISLEAAEEEKSRISLIPPEERWAWPEVEAPEAPALPVVPELPEVPMEMPLVLPPELELLSLEAVHRAVALELQANREPDFSSLVSPLSPRRMAARVFYLLLVLSAQQILHVKQEKPYGRLLIQPGPRFH

SEQ ID NO: 867027 - protein, 134 aa, Homo sapiens [sequence omitted]

SEQ ID NO: 867028 - protein, 94 aa, Homo sapiens
QGLFWEYLDTAADKGFISQLAKGRTLQFLALASARGKGLMGQSPLGVVAEVTPPEELRLPAPPSPEVSSLPSNPPPPPLCPPPQGLPPQAQGHC

SEQ ID NO: 867029 - protein, 202 aa, Homo sapiens
MVQPPERTIRGPAELFRTPTLSGWLPPELLGLWTHCAQPPPKALRRELPEEAAAEEERRKIEVPSEIEVPREALEPSVPLMVSLEISLEAAEEEKSRISLIPPEERWAWPDGRRTRQEAPCNSAQVDAIESPIEGCPWDDSPLWRACPPRDSEVDLNLEAAAPWARCHWSFEAKRRSPILRRTGVTLSAPASMRRPGLQPRR

SEQ ID NO: 867030 - protein, 658 aa, Homo sapiens
MFYYPNVLQRHTGCFATIWLAATRGSRLVKREYLRVNVVKTCEEILNYVLVRVQPPQPGLPRPRFSLYLSAQLQIGVIRVYSQQCQYLVEDIQHILERLHRAQLQIRIDMETELPSLLLPNHLAMMETLEDAPDPFFGMMSVDPRLPSPFDIPQIRHLLEAAIPERVEEIPPEVPTEPREPERIPVTVLPPEAITILEAEPIRMLEIEGERELPEVSRRELDLLIAEEEEAILLEIPRLPPPAPAEVEGIGEALGPEELRLTGWEPGALLMEVTPPEELRLPAPPSPEVSSLPSNPPPPPLCPPPQGLPPQAQGHCQLTGVLNADDKRCPFLRPIVSGLRFPDGYPYARYELLKCMETPHKPSPGSSRGGCGVLLAVHQNDRKRSNGQPCPYLALPTQQRRPPVPPPPRRRRRRRLLFWDKETQISPEKFQEQLQTRAHCWECPMVQPPERTIRGPAELFRTPTLSGWLPPELLGLWTHCAQPPPKALRRELPEEAAAEEERRKIEVPSEIEVPREALEPSVPLMVSLEISLEAAEEEKSRISLIPPEERWAWPEVEAPEAPALPVVPELPEVPMEMPLVLPPELELLSLEAVHRAVALELQANREPDFSSLVSPLSPRRMAARVFYLLLVLSAQQILHVKQEKPYGRLLIQPGPRFH

SEQ ID NO: 867031 - protein, 685 aa, Homo sapiens
MFYYPNVLQRHTGCFATIWLAATRGSRLVKREYLRVNVVKTCEEILNYVLVRVQPPQPGLPRPRFSLYLSAQLQIGVIRVYSQQCQYLVEDIQHILERLHRAQLQIRIDMETELPSLLLPNHLAMMETLEDAPDPFFGMMSVDPRLPSPFDIPQIRHLLEAAIPERVEEIPPEVPTEPREPERIPVTVLPPEAITILEAEPIRMLEIEGERELPEVSRRELDLLIAEEEEAILLEIPRLPPPAPAEYGQELLDQVGCQCWEGSPHFSCPFPLRVEGIGEALGPEELRLTGWEPGALLMEVTPPEELRLPAPPSPEVSSLPSNPPPPPLCPPPQGLPPQAQGHCQLTGVLNADDKRCPFLRPIVSGLRFPDGYPYARYELLKCMETPHKPSPGSSRGGCGVLLAVHQNDRKRSNGQPCPYLALPTQQRRPPVPPPPRRRRRRRLLFWDKETQISPEKFQEQLQTRAHCWECPMVQPPERTIRGPAELFRTPTLSGWLPPELLGLWTHCAQPPPKALRRELPEEAAAEEERRKIEVPSEIEVPREALEPSVPLMVSLEISLEAAEEEKSRISLIPPEERWAWPEVEAPEAPALPVVPELPEVPMEMPLVLPPELELLSLEAVHRAVALELQANREPDFSSLVSPLSPRRMAARVFYLLLVLSAQQILHVKQEKPYGRLLIQPGPRFH

SEQ ID NO: 867032 - protein, 547 aa, Homo sapiens; identical to SEQ ID NO: 867021

SEQ ID NO: 867033 - protein, 247 aa, Homo sapiens
MFYYPNVLQRHTGCFATIWLAATRGSRLVKREYLRVNVVKTCEEILNYVLVRVQPPQPGLPRPRFSLYLSAQLQIGVIRVYSQQCQYLVEDIQHILERLHRAQLQIRIDMETELPSLLLPNHLAMMETLEDAPDPFFGMMSVDPRLPSPFDIPQIRHLLEAAIPERVEEIPPEVPTEPREPERIPVTVLPPEAITILEAEPIRMLEIEGERELPEVSRRELDLLIAEEEEAILLETSRGSTAGYSEV

SEQ ID NO: 867034 - protein, 152 aa, Homo sapiens
MGMPLVTVTAATFPTLSCPPRAWPEVEAPEAPALPVVPELPEVPMEMPLVLPPELELLSLEAVHRYQGGGTLMGWTRAEASANVLDPYRAVALELQANREPDFSSLVSPLSPRRMAARVFYLLLVLSAQQILHVKQEKPYGRLLIQPGPRFH

SEQ ID NO: 867035 - protein, 1090 aa, Homo sapiens
MATLLSHPQQRPPFLRQAIKIRRRRVRDLQDPPPQMAPEIQPPSHHFSPEQRALLYEDALYTVLHRLGHPEPNHVTEASELLRYLQEAFHVEPEEHQQTLQRVRELEKPIFCLKATVKQAKGILGKDVSGFSDPYCLLGIEQGVGVPGGSPGSRHRQKAVVRHTIPEEETHRTQVITQTLNPVWDETFILEFEDITNASFHLDMWDLDTVESVRQKLGELTDLHGLRRIFKEARKDKGQDDFLGNVVLRLQDLRCREDQWYPLEPRTETYPDRGQCHLQFQLIHKRRATSASRSQPSYTVHLHLLQQLVSHEVTQHEAGSTSWDGSLSPQAATVLFLHATQKDLSDFHQSMAQWLAYSRLYQSLEFPSSCLLHPITSIEYQWIQGRLKAEQQEELAASFSSLLTYGLSLIRRFRSVFPLSVSDSPARLQSLLRVLVQMCKMKAFGELCPNTAPLPQLVTEALQTGTTEWFHLKQQHHQPMVQGIPEAGKALLGLVQDVIGDLHQCQRTWDKIFHNTLKIHLFSMAFRELQWLVAKRVQDHTTVVGDVVSPEMGESLFQLYISLKELCQLRMSSSERDGVLALDNFHRWFQPAIPSWLQKTYNEALARVQRAVQMDELVPLGELTKHSTSAVDLSTCFAQISHTARQLDWPDPEEAFMITVKFVEDTCRLALVYCSLIKARARELSSGQKDQGQAANMLCVVVNDMEQLRLVIGKLPAQLAWEALEQRVGAVLEQGQLQNTLHAQLQSALAGLGHEIRTGVRTLAEQLEVGIAKHIQKLVGVRESVLPEDAILPLMKFLEVELCYMNTNLVQENFSSLLTLLWTHTLTVLVEAAAAQRSSSLASNRLKIALQNLEICFHAEGCGLPPKALHTATFQALQRDLELQAASSRELIRKYFCSRIQQQAETTSEELGAVTVKASYRASEQKLRVELLSASSLLPLDSNGSSDPFVQLTLEPRHEFPELAARETQKHKKDLHPLFDETFEFLVPAEPCRKAGACLLLTVLDYDTLGADDLEGEAFLPLREVPGLSGSEEPGEVPQTRLPLTYPAPNGDPILQLLEGRKGDREAQVFVRLRRHRAKQASQHALRPAP

SEQ ID NO: 867036 - protein, 943 aa, Homo sapiens
MATLLSHPQQRPPFLRQAIKIRRRRVRDLQDPPPQMAPEIQPPSHHFSPEQRALLYEDALYTVLHRLGHPEPNHVTEASELLRYLQEAFHVEPEEHQQTLQRVRELEKPIFCLKATVKQAKGILGKDVSGFSDPYCLLGIEQGVGVPGGSPGSRHRQKAVVRHTIPEEETHRTQVITQTLNPVWDETFILEFEDITNASFHLDMWDLDTVESVRQKLGELTDLHGLRRIFKEARKDKGQDDFLGNVVLRLQDLRCREDQWYPLEPRTETYPDRGQCHLQFQLIHKRVGRVLGQWPCPALAAVCWVAGLAAPSVRPCLLTEASLQRATSASRSQPSYTVHLHLLQQLVSHEVTQHELLGLGAAGAALQVLTSSTCSPQAGSTSWDGSLSPQAATVLFLHATQKDLSDFHQSMAQWLAYSRLYQSLEFPSSCLLHPITSIEYQWIQGRLKAEQQEELAASFSSLLTYGLSLIRRFRSVFPLSVSDSPARLQSLLRVLVQMCKMKAFGELCPNTAPLPQLVTEALQTGTTEWFHLKQQHHQPMVQGIPEAGKALLGLVQDVIGDLHQCQRTWDKIFHNTLKIHLFSMAFRELQWLVAKRVQDHTTVVGDVVSPEMGESLFQLYISLKELCQLRMSSSERDGVLALDNFHRWFQPAIPSWLQKTYNEALARVQRAVQMDELVPLGELTKHSTSAVDLSTCFAQISHTARQLDWPDPEEAFMITVKFVEDTCRLALVYCSLIKARARELSSGQKDQGQAANMLCVVVNDMEQLRLVIGKLPAQLAWEALEQRVGAVLEQGQLQNTLHAQLQSALAGLGHEIRTGVRTLAEQLEVGIAKHIQKLVGVRESVLPEDAILPLMKFLEVELCYMNTNLVQENFSRSVAAPALGALATSPSPPTAPPSWAPASVLRGVAAPALGALATSPSPPTAPLSWASASVLRGGGESLW

SEQ ID NO: 867037 - protein, 943 aa, Homo sapiens; identical to SEQ ID NO: 867036

SEQ ID NO: 867038 - protein, 1276 aa, Homo sapiens
MATLLSHPQQRPPFLRQAIKIRRRRVRDLQDPPPQMAPEVGVTSLGRELALGSTVVSGTGALLSGPTSRRLGLGTSDPPLPTPPWGEPPGPAEQGLPDGLWATVGLRPCGLRLSEPLPPGWPDPIPYSSSFRRADSIRWGCPCCGVSCSGSSRPPGRRGTPLTSAAEPHFRCWVRSKPPLISRAVPSGEGREVGCGCGGLALLGTHGPQPRRAQDGPPGGLLGEQIQPPSHHFSPEQRALLYEDALYTVLHRLGHPEPNHVTEASELLRYLQEAFHVEPEEHQQTLQRVRELEKPIFCLKATVKQAKGILGKDVSGFSDPYCLLGIEQGVGVPGGSPGSRHRQKAVVRHTIPEEETHRTQVITQTLNPVWDETFILEFEDITNASFHLDMWDLDTVESVRQKLGELTDLHGLRRIFKEARKDKGQDDFLGNVVLRLQDLRCREDQWYPLEPRTETYPDRGQCHLQFQLIHKRRATSASRSQPSYTVHLHLLQQLVSHEVTQHEAGSTSWDGSLSPQAATVLFLHATQKDLSDFHQSMAQWLAYSRLYQSLEFPSSCLLHPITSIEYQWIQGRLKAEQQEELAASFSSLLTYGLSLIRRFRSVFPLSVSDSPARLQSLLRVLVQMCKMKAFGELCPNTAPLPQLVTEALQTGTTEWFHLKQQHHQPMVQGIPEAGKALLGLVQDVIGDLHQCQRTWDKIFHNTLKIHLFSMAFRELQWLVAKRVQDHTTVVGDVVSPEMGESLFQLYISLKELCQLRMSSSERDGVLALDNFHRWFQPAIPSWLQKTYNEALARVQRAVQMDELVPLGELTKHSTSAVDLSTCFAQISHTARQLDWPDPEEAFMITVKFVEDTCRLALVYCSLIKARARELSSGQKDQGQAANMLCVVVNDMEQLRLVIGKLPAQLAWEALEQRVGAVLEQGQLQNTLHAQLQSALAGLGHEIRTGVRTLAEQLEVGIAKHIQKLVGVRESVLPEDAILPLMKFLEVELCYMNTNLVQENFSSLLTLLWTHTLTVLVEAAAPSSSSSLASNRLKIALQNLEICFHAEGCGLPPKALHTATFQALQRDLELQAASSRELIRKYFCSRIQQQAETTSEELGAVTVKASYRASEQKLRVELLSASSLLPLDSNGSSDPFVQLTLEPRHEFPELAARETQKHKKDLHPLFDETFEFLVPAEPCRKAGACLLLTVLDYDTLGADDLEGEAFLPLREVPGLSGSEEPGEVPQTRLPLTYPAPNGDPILQLLEGRKGDREAQVFVRLRRHRAKQASQHALRPAP

SEQ ID NO: 867039 - protein, 944 aa, Homo sapiens
MRLGGGKFGRDRLQLHGSGLWSLTASSGGIHPPGPSTTPFSPYREFEDITNASFHLDMWDLDTVESVRQKLGELTDLHGLRRIFKEARKDKGQDDFLGNVVLRLQDLRCREDQWYPLEPRTETYPDRGQCHLQFQLIHKRRATSASRSQPSYTVHLHLLQQLVSHEVTQHEAGSTSWDGSLSPQAATVLFLHATQKDLSDFHQSMAQWLAYSRLYQSLEFPSSCLLHPITSIEYQWIQGRLKAEQQEELAASFSSLLTYGLSLIRRFRSVFPLSVSDSPARLQSLLRVLVQMCKMKAFGELCPNTAPLPQLVTEALQTGTTEWFHLKQQHHQPMVQGIPEAGKALLGLVQDVIGDLHQCQRTWDKIFHNTLKIHLFSMAFRELQWLVAKRVQDHTTVVGDVVSPEMGESLFQLYISLKELCQLRMSSSERDGVLALDNFHRWFQPAIPSWLQKTYNEALARVQRAVQMDELVPLGELTKHSTSAVDLSTCFAQISHTARQLDWPDPEEAFMITVKFVEDTCRLALVYCSLIKARARELSSGQKDQGQAANMLCVVVNDMEQLRLVIGKLPAQLAWEALEQRVGAVLEQGQLQNTLHAQLQSALAGLGHEIRTGVRTLAEQLEVGIAKHIQKLVGVRESVLPEDAILPLMKFLEVELCYMNTNLVQENFSSLLTLLWTHTLTVLVEAAAPSSSSSLASNRLKIALQNLEICFHAEGCGLPPKALHTATFQALQRDLELQAASSRELIRKYFCSRIQQQAETTSEELGAVTVKASYRASEQKLRVELLSASSLLPLDSNGSSDPFVQLTLEPRHEFPELAARETQKHKKDLHPLFDETFEFLVPAEPCRKAGACLLLTVLDYDTLGADDLEGEAFLPLREVPGLSGSEEPGEVPQTRLPLTYPAPNGDPILQLLEGRKGDREAQVFVRLRRHRAKQASQHALRPAP

SEQ ID NO: 867040 - protein, 886 aa, Homo sapiens
HGLGIPACQDLRCREDQWYPLEPRTETYPDRGQCHLQFQLIHKRVGRVLGQWPCPALAAVCWVAGLAAPSVRPCLLTEASLQRATSASRSQPSYTVHLHLLQQLVSHEVTQHEAGSTSWDGSLSPQAATVLFLHATQKDLSDFHQSMAQWLAYSRLYQSLEFPSSCLLHPITSIEYQWIQGRLKAEQQEELAASFSSLLTYGLSLIRRFRSVFPLSVSDSPARLQSLLRVLVQMCKMKAFGELCPNTAPLPQLVTEALQTGTTEWFHLKQQHHQPMVQGIPEAGKALLGLVQDVIGDLHQCQRTWDKIFHNTLKIHLFSMAFRELQWLVAKRVQDHTTVVGDVVSPEMGESLFQLYISLKELCQLRMSSSERDGVLALDNFHRWFQPAIPSWLQKTYNEALARVQRAVQMDELVPLGELTKHSTSAVDLSTCFAQISHTARQLDWPDPEEAFMITVKFVEDTCRLALVYCSLIKARARELSSGQKDQGQAANMLCVVVNDMEQLRLVIGKLPAQLAWEALEQRVGAVLEQGQLQNTLHAQLQSALAGLGHEIRTGVRTLAEQLEVGIAKHIQKLVGVRESVLPEDAILPLMKFLEVELCYMNTNLVQENFSSLLTLLWTHTLTVLVEAAAPSSSSSLASNRLKIALQNLEICFHAEGCGLPPKALHTATFQALQRDLELQAASSRELIRKYFCSRIQQQAETTSEELGAVTVKASYRASEQKLRVELLSASSLLPLDSNGSSDPFVQLTLEPRHEFPELAARETQKHKKDLHPLFDETFEFLVPAEPCRKAGACLLLTVLDYDTLGADDLEGEAFLPLREVPGLSGSEEPGEVPQTRLPLTYPAPNGDPILQLLEGRKGDREAQVFVRLRRHRAKQASQHALRPAP

SEQ ID NO: 867041 - protein, 694 aa, Homo sapiens
MATLLSHPQQRPPFLRQAIKIRRRRVRDLQDPPPQMAPEIQPPSHHFSPEQRALLYEDALYTVLHRLGHPEPNHVTEASELLRYLQEAFHVEPEEHQQTLQRVRELEKPIFCLKATVKQAKGILGKDVSGFSDPYCLLGIEQGVGVPGGSPGSRHRQKAVVRHTIPEEETHRTQVITQTLNPVWDETFILEFEDITNASFHLDMWDLDTVESVRQKLGELTDLHGLRRIFKEARKDKGQDDFLGNVVLRLQDLRCREDQWYPLEPRTETYPDRGQCHLQFQLIHKRVGRVLGQLAMPSSCGGLLGCGAGCTQCEALSAHRGLIAESHFGQPLAAELHRAPPPPAAACVPRGHPARVGHEIRTGVRTLAEQLEVGIAKHIQKLVGVRESVLPEDAILPLMKFLEVELCYMNTNLVQENFSSLLTLLWTHTLTVLVEAAAPSSSSSLASNRLKIALQNLEICFHAEGCGLPPKALHTATFQALQRDLELQAASSRELIRKYFCSRIQQQAETTSEELGAVTVKASYRASEQKLRVELLSASSLLPLDSNGSSDPFVQLTLEPRHEFPELAARETQKHKKDLHPLFDETFEFLVPAEPCRKAGACLLLTVLDYDTLGADDLEGEAFLPLREVPGLSGSEEPGEVPQTRLPLTYPAPNGDPILQLLEGRKGDREAQVFVRLRRHRAKQASQHALRPAP

SEQ ID NO: 867042 - protein, 326 aa, Homo sapiens
PGRFQGCRGGQCGWDRLSNGEGKAEGHSAPDEVPGGGALLHEHQLGAGELQQPPDPALDPHTHSAGGGGRSQRSSSLASNRLKIALQNLEICFHAEGCGLPPKALHTATFQALQRDLELQAASSRELIRKYFCSRIQQQAETTSEELGAVTVKASYRASEQKLRVELLSASSLLPLDSNGSSDPFVQLTLEPRHEFPELAARETQKHKKDLHPLFDETFEFLVPAEPCRKAGACLLLTVLDYDTLGADDLEGEAFLPLREVPGLSGSEEPGEVPQTRLPLTYPAPNGDPILQLLEGRKGDREAQVFVRLRRHRAKQASQHALRPAP

SEQ ID NO: 867043 - protein, 281 aa, Homo sapiens
MATLLSHPQQRPPFLRQAIKIRRRRVRDLQDPPPQMAPEIQPPSHHFSPEQRALLYEDALYTVLHRLGHPEPNHVTEASELLRYLQEAFHVEPEEHQQTLQRVRELEKPIFCLKATVKQAKGILGKDVSGFSDPYCLLGIEQGVGVPGGSPGSRHRQKAVVRHTIPEEETHRTQVITQTLNPVWDETFILEFEDITNASFHLDMWDLDTVESVRQKLGELTDLHGLRRIFKEARKDKGQDDFLGNVVLRLQVRRMRKGAQERGRGRGLGGVLGRGSVSSQS

SEQ ID NO: 867044 - protein, 111 aa, Homo sapiens [sequence omitted]

SEQ ID NO: 867045 - protein, 943 aa, Homo sapiens; identical to SEQ ID NO: 867036

SEQ ID NO: 867046 - protein, 1055 aa, Homo sapiens
MAPEIQPPSHHFSPEQRALLYEDALYTVLHRLGHPEPNHVTEASELLRYLQEAFHVEPEEHQQTLQRVRELEKPIFCLKATVKQAKGILGKDVSGFSDPYCLLGIEQGVGVPGGSPGSRHRQKAVVRHTIPEEETHRTQVITQTLNPVWDETFILEFEDITNASFHLDMWDLDTVESVRQKLGELTDLHGLRRIFKEARKDKGQDDFLGNVVLRLQDLRCREDQWYPLEPRTETYPDRGQCHLQFQLIHKRRATSASRSQPSYTVHLHLLQQLVSHEVTQHEAGSTSWDGSLSPQAATVLFLHATQKDLSDFHQSMAQWLAYSRLYQSLEFPSSCLLHPITSIEYQWIQGRLKAEQQEELAASFSSLLTYGLSLIRRFRSVFPLSVSDSPARLQSLLRVLVQMCKMKAFGELCPNTAPLPQLVTEALQTGTTEWFHLKQQHHQPMVQGIPEAGKALLGLVQDVIGDLHQCQRTWDKIFHNTLKIHLFSMAFRELQWLVAKRVQDHTTVVGDVVSPEMGESLFQLYISLKELCQLRMSSSERDGVLALDNFHRWFQPAIPSWLQKTYNEALARVQRAVQMDELVPLGELTKHSTSAVDLSTCFAQISHTARQLDWPDPEEAFMITVKFVEDTCRLALVYCSLIKARARELSSGQKDQGQAANMLCVVVNDMEQLRLVIGKLPAQLAWEALEQRVGAVLEQGQLQNTLHAQLQSALAGLGHEIRTGVRTLAEQLEVGIAKHIQKLVGVRESVLPEDAILPLMKFLEVELCYMNTNLVQENFSSLLTLLWTHTLTVLVEAAAPSSSSSLASNRLKIALQNLEICFHAEGCGLPPKALHTATFQALQRDLELQAASSRELIRKYFCSRIQQQAETTSEELGAVTVKASYRASEQKLRVELLSASSLLPLDSNGSSDPFVQLTLEPRHEFPELAARETQKHKKDLHPLFDETFEFLVPAEPCRKAGACLLLTVLDYDTLGADDLEGEAFLPLREVPGLSGSEEPGEVPQTRLPLTYPAPNGDPILQLLEGRKGDREAQVFVRLRRHRAKQASQHALRPAP

SEQ ID NO: 867047 - protein, 1286 aa, Homo sapiens
MATLLSHPQQRPPFLRQAIKIRRRRVRDLQDPPPQMAPEVGVTSLGRELALGSTVVSGTGALLSGPTSRRLGLGTSDPPLPTPPWGEPPGPAEQGLPDGLWATVGLRPCGLRLSEPLPPGWPDPIPYSSSFRRADSIRWGCPCCGVSCSGSSRPPGRRGTPLTSAAEPHFRCWVRSKPPLISRAVPSGEGREVGCGCGGLALLGTHGPQPRRAQDGPPGGLLGEQIQPPSHHFSPEQRALLYEDALYTVLHRLGHPEPNHVTEASELLRYLQEAFHVEPEEHQQTLQRVRELEKPIFCLKATVKQAKGILGKDVSGFSDPYCLLGIEQGVGVPGGSPGSRHRQKAVVRHTIPEEETHRTQVITQTLNPVWDETFILALNHALFSNREFEDITNASFHLDMWDLDTVESVRQKLGELTDLHGLRRIFKEARKDKGQDDFLGNVVLRLQDLRCREDQWYPLEPRTETYPDRGQCHLQFQLIHKRRATSASRSQPSYTVHLHLLQQLVSHEVTQHEAGSTSWDGSLSPQAATVLFLHATQKDLSDFHQSMAQWLAYSRLYQSLEFPSSCLLHPITSIEYQWIQGRLKAEQQEELAASFSSLLTYGLSLIRRFRSVFPLSVSDSPARLQSLLRVLVQMCKMKAFGELCPNTAPLPQLVTEALQTGTTEWFHLKQQHHQPMVQGIPEAGKALLGLVQDVIGDLHQCQRTWDKIFHNTLKIHLFSMAFRELQWLVAKRVQDHTTVVGDVVSPEMGESLFQLYISLKELCQLRMSSSERDGVLALDNFHRWFQPAIPSWLQKTYNEALARVQRAVQMDELVPLGELTKHSTSAVDLSTCFAQISHTARQLDWPDPEEAFMITVKFVEDTCRLALVYCSLIKARARELSSGQKDQGQAANMLCVVVNDMEQLRLVIGKLPAQLAWEALEQRVGAVLEQGQLQNTLHAQLQSALAGLGHEIRTGVRTLAEQLEVGIAKHIQKLVGVRESVLPEDAILPLMKFLEVELCYMNTNLVQENFSSLLTLLWTHTLTVLVEAAAPSSSSSLASNRLKIALQNLEICFHAEGCGLPPKALHTATFQALQRDLELQAASSRELIRKYFCSRIQQQAETTSEELGAVTVKASYRASEQKLRVELLSASSLLPLDSNGSSDPFVQLTLEPRHEFPELAARETQKHKKDLHPLFDETFEFLVPAEPCRKAGACLLLTVLDYDTLGADDLEGEAFLPLREVPGLSGSEEPGEVPQTRLPLTYPAPNGDPILQLLEGRKGDREAQVFVRLRRHRAKQASQHALRPAP

SEQ ID NO: 867048 - protein, 769 aa, Homo sapiens
MSVGSLSPQAATVLFLHATQKDLSDFHQSMAQWLAYSRLYQSLEFPSSCLLHPITSIEYQWIQGRLKAEQQEELAASFSSLLTYGLSLIRRFRSVFPLSVSDSPARLQSLLRVLVQMCKMKAFGELCPNTAPLPQLVTEALQTGTTEWFHLKQQHHQPMVQGIPEAGKALLGLVQDVIGDLHQCQRTWDKIFHNTLKIHLFSMAFRELQWLVAKRVQDHTTVVGDVVSPEMGESLFQLYISLKELCQLRMSSSERDGVLALDNFHRWFQPAIPSWLQKTYNEALARVQRAVQMDELVPLGELTKHSTSAVDLSTCFAQISHTARQLDWPDPEEAFMITVKFVEDTCRLALVYCSLIKARARELSSGQKDQGQAANMLCVVVNDMEQLRLVIGKLPAQLAWEALEQRVGAVLEQGQLQNTLHAQLQSALAGLGHEIRTGVRTLAEQLEVGIAKHIQKLVGVRESVLPEDAILPLMKFLEVELCYMNTNLVQENFSSLLTLLWTHTLTVLVEAAAPSSSSSLASNRLKIALQNLEICFHAEGCGLPPKALHTATFQALQRDLELQAASSRELIRKYFCSRIQQQAETTSEELGAVTVKASYRASEQKLRVELLSASSLLPLDSNGSSDPFVQLTLEPRHEFPELAARETQKHKKDLHPLFDETFEFLVPAEPCRKAGACLLLTVLDYDTLGADDLEGEAFLPLREVPGLSGSEEPGEVPQTRLPLTYPAPNGDPILQLLEGRKGDREAQVFVRLRRHRAKQASQHALRPAP

SEQ ID NO: 867049 - protein, 985 aa, Homo sapiens
MATLLSHPQQRPPFLRQAIKIRRRRVRDLQDPPPQMAPEIQPPSHHFSPEQRALLYEDALYTVLHRLGHPEPNHVTEASELLRYLQEAFHVEPEEHQQTLQRVRELEKPIFCLKATVKQAKGILGKDVSGFSDPYCLLGIEQGVGVPGGSPGSRHRQKAVVRHTIPEEETHRTQVITQTLNPVWDETFILEFEDITNASFHLDMWDLDTVESVRQKLGELTDLHGLRRIFKEARKDKGQDDFLGNVVLRLQDLRCREDQWYPLEPRTETYPDRGQCHLQFQLIHKRRATSASRSQPSYTVHLHLLQQLVSHEVTQHEAGSTSWDGSLSPQAATVLFLHATQKDLSDFHQSMAQWLAYSRLYQSLEFPSSCLLHPITSIEYQWIQGRLKAEQQEELAASFSSLLTYGLSLIRRFRSVFPLSVSDSPARLQSLLRVLVQMCKMKAFGELCPNTAPLPQLVTEALQTGTTEWFHLKQQHHQPMVQGIPEAGKALLGLVQDVIGDLHQCQRTWDKIFHNTLKIHLFSMAFRELQWLVAKRVQDHTTVVGDVVSPEMGESLFQLYISLKELCQLRMSSSERDGVLALDNFHRWFQPAIPSWLQKTYNEALARVQRAVQMDELVPLGELTKHSTSAVDLSTCFAQISHTARQLDWPDPEEAFMITVKFVEDTCRLALVYCSLIKARARELSSGQKDQGQAANMLCVVVNDMEQLRLVIGKLPAQLAWEALEQRVGAVLEQGQLQNTLHAQLQSALAGLGHEIRTGVRTLAEQLEVGIAKHIQKLVGVRESVLPEDAILPLMKFLEVELCYMNTNLVQENFSSLLTLLWTHTLTVLVEAAAAQRSSSLASNRLKIALQNLEICFHAEGCGLPPKALHTATFQALQRDLELQAASSRELIRKYFCSRIQQQAETTSEELGAVTVKASYRASEQKLRVELLSASSLLPLDSNGSSDPFVQLTLEPRHEFPELAARETQKHKKDLHPLFDETFEL

SEQ ID NO: 867050 - protein, 231 aa, Homo sapiens [sequence omitted]

SEQ ID NO: 867051 - protein, 186 aa, Homo sapiens
MATLLSHPQQRPPFLRQAIKIRRRRVRDLQDPPPQMAPEIQPPSHHFSPEQRALLYEDALYTVLHRLGHPEPNHVTEASELLRYLQEAFHVEPEEHQQTLQRVRELEKPIFCLKATVKQAKGILGKDVSGFSDPYCLLGIEQGVGVPGGSPGSRHRQGWHRQTEAERTVWLLCLLRTPPPRTAPAT

SEQ ID NO: 867052 - protein, 122 aa, Homo sapiens
MATLLSHPQQRPPFLRQAIKIRRRRVRDLQDPPPQMAPEVGVTSLGRELALGSTVVSGTGALLSGPTSRRLGLGTSDPPLPTPPWGEPPGPAEQGLPDGLWATVGLRPCGLRLSEPLPSRLA

SEQ ID NO: 867053 - protein, 122 aa, Homo sapiens
MVTMMKEKVNTHFSFPLRLDMTPYTEDFLMGKSERKEGFKEVSDHSKDSESYEYDLIGVTVHTGTADGGHYYSFIRDIVNPHAYKNNKWYLFNDAEVKPFDSAQLASECFGGEMTVSFIQKL

SEQ ID NO: 867054 - protein, 477 aa, Homo sapiens
MEIYFFHLFLLYTFNILISLGPYFPCRENIKLIGGKSNIRPPRPELNMCLLPTMVETSKGKDDVYDRMLLDYFFSYHQFIHLLCRVAINCEKFTETLVKLSVLVAYEGLPLHLALFPKLWTELCQTQSAMSKNCIKLLCEDPVFAEYIKCILMDERTFLNNNIVYTFMTHFLLKVQSQVFSEANCANLISTLITNLISQYQNLQSDFSNRVEISKASASLNGDLRALALLLSVHTPKQLNPALIPTLQELLSKCRTCLQQRNSLQEQEAKERKTKDDEGATPIKRRRVSSDEEHTVDSCISDMKTETREVLTPTSTSDNETRDSSIIDPGTEQDLPSPENSSVKEYRMEVPSSFSEDMSNIRSQHAEEQSNNGRYDDCKEFKDLHCSKDSTLAEEESEFPSTSISAVLSDLADLRSCDGQALPSQDPEVALSLSCGHSRGLFSHMQQHDILDTLCRTIESTIHVVTRISGKGNQAAS

SEQ ID NO: 867055 - protein, 348 aa, Homo sapiens [sequence omitted]

SEQ ID NO: 867056 - protein, 567 aa, Homo sapiens
MDKQPLNTGGQKDMTEFFTDLITKIEEMSPELKNTVKSLFGGVITNNVVSLDCEHVSQTAEEFYTVRCQVADMKNIYESLDEVTIKDTLEGDNMYTCSHCGKKVRAEKRACFKKLPRILSFNTMRYTFNMVTMMKEKVNTHFSFPLRLDMTPYTEDFLMGKSERKEGFKEVSDHSKDSESYEYDLIGVTVHTGTADGGHYYSFIRDIVNPHAYKNNKWYLFNDAEVKPFDSAQLASECFGGEMTTKTYDSVTDKFMDFSFEKTHSAYMLFYKRMEPEEENGREYKFDVSSELLEWIWHDNMQFLQDKNIFEHTYFGFMWQLCSCIPSTLPDPKAVSLMTAKLSTSFVLETFIHSKEKPTMLQWIELLTKQFNNSQAACEWFLDRMADDDWWPMQILIKCPNQIVRQMFQRLCIHVIQRLRPVHAHLYLQPGMEDGSDDMDTSVEDIGGRSCVTRFVRTLLLIMEHGVKPHSKHLTEYFAFLYEFAKMGEEESQFLLSLQAISTMVHFYMGTKGPENPQVEVLSEEEGEEEEEEEDILSLAEEKYRPAALEKMIALVALLVEQSRSER

SEQ ID NO: 867057 - protein, 739 aa, Homo sapiens
ESECKAYNPRPVCKTYTMDKQPLNTGGQKDMTEFFTDLITKIEEMSPELKNTVKSLFGGVITNNVVSLDCEHVSQTAEEFYTVRCQVADMKNIYESLDEVTIKDTLEGDNMYTCSHCGKKVRAEKRACFKKLPRILSFNTMRYTFNMVTMMKEKVNTHFSFPLRLDMTPYTEDFLMGKSERKEGFKEVSDHSKDSESYEYDLIGVTVHTGTADGGHYYSFIRDIVNPHAYKNNKWYLFNDAEVKPFDSAQLASECFGGEMTTKTYDSVTDKFMDFSFEKTHSAYMLFYKRMEPEEENGREYKFDVSSELLEWIWHDNMQFLQDKNIFEHTYFGFMWQLCSCIPSTLPDPKAVSLMTAKLSTSFVLETFIHSKEKPTMLQWIELLTKQFNNSQAACEWFLDRMADDDWWPMQILIKCPNQIVRQMFQRLCIHVIQRLRPVHAHLYLQPGMEDGSDDMDTSVEDIGGRSCVTRFVRTLLLIMEHGVKPHSKHLTEYFAFLYEFAKMGEEESQFLLSLQAISTMVHFYMGTKGPENPQVEVLSEEEGEEEEEEEDILSLAEEKYRPAALEKMIALVALLVEQSRSERHLTLSQTDMAALTGGKGFPFLFQHIRDGINIRQTCNLIFSLCRYNNRLAEHIVSMLFTSIAKLTPEAANPFFKLLTMLMEFAGGPPGMPPFASYILQRIWEVIEYNPSQCLDWLAVQTPRNKLAHSWVLQNMENWVERFLLAHNYPRVRTCKSNI

SEQ ID NO: 867058 - protein, 348 aa, Homo sapiens [sequence omitted]

SEQ ID NO: 867059 - protein, 281 aa, Homo sapiens
RSVKRESYSRIRHPSEIPKHVLLLNGDLRALALLLSVHTPKQLNPALIPTLQELLSKCRTCLQQRNSLQEQEAKERKTKDDEGATPIKRRRVSSDEEHTVDSCISDMKTETREVLTPTSTSDNETRDSSIIDPGTEQDLPSPENSSVKEYRMEVPSSFSEDMSNIRSQHAEEQSNNGRYDDCKEFKDLHCSKDSTLAEEESEFPSTSISAVLSDLADLRSCDGQALPSQDPEVALSLSCGHSRGLFSHMQQHDILDTLCRTIESTIHVVTRISGKGNQAAS

SEQ ID NO: 867060 - protein, 299 aa, Homo sapiens
ESECKAYNPRPVCKTYTMDKQPLNTGGQKDMTEFFTDLITKIEEMSPELKNTVKSLFGGVITNNVVSLDCEHVSQTAEEFYTVRCQVADMKNIYESLDEVTIKDTLEGDNMYTCSHCGKKVRAEKRACFKKLPRILSFNTMRYTFNMVTMMKEKVNTHFSFPLRLDMTPYTEDFLMGKSERKEGFKEVSDHSKDSESYEYDLIGVTVHTGTADGGHYYSFIRDIVNPHAYKNNKWYLFNDAEVKPFDSAQLASECFGGEMTTKTYDSVTDKFMDFSFEKTHSAYMLFYKRMEPEDELEQ

SEQ ID NO: 867061 - protein, 124 aa, Homo sapiens
YSLWRQVSDELLRQLCPCGFGAPVCTFSLHLEHGLTPEERKRQSQTGSLGRGHGANALTGETGEAASPPVLRLLPTGAGFAGHKDGHHPRCLFLSHIGWLLLVCLSPGPVSGMGASVPAPINAD

SEQ ID NO: 867062 - protein, 550 aa, Homo sapiens
YSLWRQVSDELLRQVWVRGSGGSWDWDRGVRRESAIPCYTERWQLLTGCFWGMGCLGLLLLQGKKRVPLPTASQPLGYLLAGNLQTEFNKLGSAEGRGGPWQMWGLEEDRSYQGLRPLCWAFACTIVSQAVVSLWLWCACVHFLPPPGAWANTGGKEKTESDRVSGAPSPLLSNGAGLRASGWGGGGGDPVGAITEEEAGPAPSPEFQRCQCALKPQAGRAQDRILDGGKGQSWKGDYREGERKEGRAMTQSTYRMAGSQSSWAGFLAIPHTPRHRENFGTGGDSTDDLFEIEEPRNQTKKYHMVTLVSDTAMTPIASVDTIAVCLFAGAWGGAMVPMHLLGRLEKPLLLLCCASFLLGLALLGIKTDITPVAYFFLTLGGFFLFAYLLVRFLEWGLRSQLQSMQTESPGPSGNARDNEAFEVPVYEEAVVGLESQCRPQELDQPPPYSTVVIPPAPEEEQPSHPEGSRRAKLEQRRMASEGSMAQEGSPGRAPINLRLRGPRAVSTAPDLQSLAAVPTLEPLTPPPAYDVCFGHPDDDSVFYEDNWAPP

SEQ ID NO: 867063 - protein, 181 aa, Homo sapiens
YSLWRQVSDELLRQLCPCGFGAPVCTFSLHLEHGLTPEERKRQSQTGDNEAFEVPVYEEAVVGLESQCRPQELDQPPPYSTVVIPPAPEEEQPSHPEGSRRAKLEQRRMASEGSMAQEGSPGRAPINLRLRGPRAVSTAPDLQSLAAVPTLEPLTPPPAYDVCFGHPDDDSVFYEDNWAPP

SEQ ID NO: 867064 - protein, 216 aa, Homo sapiens
MVPMHLLGRLEKPLLLLCCASFLLGLALLGIKTDITPVAYFFLTLGGFFLFAYLLVRFLEWGLRSQLQSMQTESPGPSGNARDNEAFEVPVYEEAVVGLESQCRPQELDQPPPYSTVVIPPAPEEEQPSHPEGSRRAKLEQRRMASEGSMAQEGSPGRAPINLRLRGPRAVSTAPDLQSLAAVPTLEPLTPPPAYDVCFGHPDDDSVFYEDNWAPP

SEQ ID NO: 867065 - protein, 436 aa, Homo sapiens
YSLWRQVSDELLRQVWVRGSGGSWDWDRGVRRESAIPCYTERWQLLTGCFWGMGCLGLLLLQGKKRVPLPTASQPLGYLLAGNLQTEFNKLGSAEGRGGPWQMWGLEEDRSYQGLRPLCWAFACTIVSQAVVSLWLWCACVHFLPPPGAWANTGGKEKTESDRVSGAPSPLLSNGAGLRASGWGGGGGDPVGAITEEEAGPAPSPEFQRCQCALKPQAGRAQDRILDGGKGQSWKGDYREGERKEGRAMTQSTYRMAGSQSSWAGFLAIPHTPRHRENFGTGGDSTDDLFEIEEPRNQTKKYHMVTLVSDTAMTPIASVDTIAVCLFAGAWGGAMVPMHLLGRLEKPLLLLCCASFLLGLALLGIKTDITPVAYFFLTLGGFFLFAYLLVRFLEWGLRSQLQSMQTESPGPSGNARELRVGIVRGIHLGPILPLSL

SEQ ID NO: 867066 - protein, 216 aa, Homo sapiens; identical to SEQ ID NO: 867064

SEQ ID NO: 867067 - protein, 165 aa, Homo sapiens
YSLWRQVSDELLRQVWVRGSGGSWDWDRGVRRESAIPCYTERWQLLTGCFWGMGCLGLLLLQGKKRVPLPTASQPLGYLLAGNLQTEFNKLGSAEGRGGPWQMWGLEEDRSYQGLRPLCWAFACTIVSQAVVSLWLWCACVHFLPPPGAWANTGGKEKTESDRGQ

SEQ ID NO: 867068 - protein, 216 aa, Homo sapiens; identical to SEQ ID NO: 867064

SEQ ID NO: 867069 - protein, 579 aa, Homo sapiens
MVQYELWAALPGASGVALACCFVAAAVALRWSGRRTARGAVVRARQRQRAGLENMDRAAQRFRLQNPDLDSEALLALPLPQLVQKLHSRELAPEAVLFTYVGKAWEVNKGTNCVTSYLADCETQLSQAPRQGLLYGVPVSLKECFTYKGQDSTLGLSLNEGVPAECDSVVVHVLKLQGAVPFVHTNVPQSMFSYDCSNPLFGQTVNPWKSSKSPGGSSGGEGALIGSGGSPLGLGTDIGGSIRFPSSFCGICGLKPTGNRLSKSGLKGCVYGQEAVRLSVGPMARDVESLALCLRALLCEDMFRLDPTVPPLPFREEVYTSSQPLRVGYYETDNYTMPSPAMRRAVLETKQSLEAAGHTLVPFLPSNIPHALETLSTGGLFSDGGHTFLQNFKGDFVDPCLGDLVSILKLPQWLKGLLAFLVKPLLPRLSAFLSNMKSRSAGKLWELQHEIEVYRKTVIAQWRALDLDVVLTPMLAPALDLNAPGRATGAVSYTMLYNCLDFPAGVVPVTTVTAEDEAQMEHYRGYFGDIWDKMLQKGMKKSVGLPVAVQCVALPWQEELCLRFMREVERLMTPEKQSS

SEQ ID NO: 867070 - protein, 582 aa, Homo sapiens
EENNIFKRSRKKERQILPVLQVQLLAAGLLATKPGGHVVYSTCSLSHLQNEYVVQGAIELLANQYSIQNPDLDSEALLALPLPQLVQKLHSRELAPEAVLFTYVGKAWEVNKGTNCVTSYLADCETQLSQAPRQGLLYGVPVSLKECFTYKGQDSTLGLSLNEGVPAECDSVVVHVLKLQGAVPFVHTNVPQSMFSYDCSNPLFGQTVNPWKSSKSPGGSSGGEGALIGSGGSPLGLGTDIGGSIRFPSSFCGICGLKPTGNRLSKSGLKGCVYGQEAVRLSVGPMARDVESLALCLRALLCEDMFRLDPTVPPLPFREEVYTSSQPLRVGYYETDNYTMPSPAMRRAVLETKQSLEAAGHTLVPFLPSNIPHALETLSTGGLFSDGGHTFLQNFKGDFVDPCLGDLVSILKLPQWLKGLLAFLVKPLLPRLSAFLSNMKSRSAGKLWELQHEIEVYRKTVIAQWRALDLDVVLTPMLAPALDLNAPGRATGAVSYTMLYNCLDFPAGVVPVTTVTAEDEAQMEHYRGYFGDIWDKMLQKGMKKSVGLPVAVQCVALPWQEELCLRFMREVERLMTPEKQSS

SEQ ID NO: 867071 - protein, 297 aa, Homo sapiens [sequence omitted]

SEQ ID NO: 867072 - protein, 563 aa, Homo sapiens
MVQYELWAALPGASGVALACCFVAAAVALRWSGRRTARGAVVRARQRQRAGLENMDRAAQRFRLQNPDLDSEALLALPLPQLVQKLHSRELAPEAVLFTYVGKAWEVNKGTNCVTSYLADCETQLSQAPRQGLLYGVPVSLKECFTYKGQDSTLGLSLNEGVPAECDSVVVHVLKLQGAVPFVHTNVPQSMFSYDCSNPLFGQTVNPWKSSKSPGGSSGGEGALIGSGGSPLGLGTDIGGSIRFPSSFCGICGLKPTGNRLSKSGLKGCVYGQEAVRLSVGPMARDVESLALCLRALLCEDMFRLDPTVPPLPFREEVYTSSQPLRVGYYETDNYTMPSPAMRRAVLETKQSLEAAGHTLVPFLPSNIPHALETLSTGGLFSDGGHTFLQNFKGDFVDPCLGDLVSILKLPQWLKGLLAFLVKPLLPRLSAFLSNMKSRSAGKLWELQHEIEVYRKTVIAQWRALDLDVVLTPMLAPALDLNAPGRATGVVPVTTVTAEDEAQMEHYRGYFGDIWDKMLQKGMKKSVGLPVAVQCVALPWQEELCLRFMREVERLMTPEKQSS

SEQ ID NO: 867073 - protein, 144 aa, Homo sapiens [sequence omitted]

SEQ ID NO: 867074 - protein, 579 aa, Homo sapiens; identical to SEQ ID NO: 867069

SEQ ID NO: 867075 - protein, 579 aa, Homo sapiens; identical to SEQ ID NO: 867069

SEQ ID NO: 867076 - protein, 273 aa, Homo sapiens
MVQYELWAALPGASGVALACCFVAAAVALRWSGRRTARGAVVRARQRQRAGLENMDRAAQRFRLQNPDLDSEALLALPLPQLVQKLHSRELAPEAVLFTYVGKAWEVNKGTNCVTSYLADCETQLSQAPRQGLLYGVPVSLKECFTYKGQDSTLGLSLNEGVPAECDSVVVHVLKLQGAVPFVHTNVPQSMFSYDCSNPLFGQTVNPWKSSKSPGGSSGGEGALIGSGGSPLGLGTDIGGSIRFPSSFCGICGLKPTGNRLSSTPMWQPMGMT

SEQ ID NO: 867077 - protein, 469 aa, Homo sapiens
MVQYELWAALPGASGVALACCFVAAAVALRWSGRRTARGAVVRARQRQRAGLENMDRAAQRFRLQNPDLDSEALLALPLPQLVQKLHSRELAPEAVLFTYVGKAWEVNKGTNCVTSYLADCETQLSQAPRQGLLYGVPVSLKECFTYKGQDSTLGLSLNEGVPAECDSVVVHVLKLQGAVPFVHTNVPQSMFSYDCSNPLFGQTVNPWKSSKSPGGSSGGEGALIGSGGSPLGLGTDIGGSIRFPSSFCLVPFLPSNIPHALETLSTGGLFSDGGHTFLQNFKGDFVDPCLGDLVSILKLPQWLKGLLAFLVKPLLPRLSAFLSNMKSRSAGKLWELQHEIEVYRKTVIAQWRALDLDVVLTPMLAPALDLNAPGRATGAVSYTMLYNCLDFPAGVVPVTTVTAEDEAQMEHYRGYFGDIWDKMLQKGMKKSVGLPVAVQCVALPWQEELCLRFMREVERLMTPEKQSS

SEQ ID NO: 867078 - protein, 286 aa, Homo sapiens
MVQYELWAALPGASGVALACCFVAAAVALRWSGRRTARGAVVRARQRQRAGLENMDRAAQRFRLQNPDLDSEALLALPLPQLVQKLHSRELAPEAVLFTYVGKAWEVNKGTNCVTSYLADCETQLSQAPRQGLLYGVPVSLKECFTYKGQDSTLGLSLNEGVPAECDSVVVHVLKLQGAVPFVHTNVPQSMFSYDCSNPLFGQTVNPWKSSKSPGGSSGGEGALIGSGGSPLGLGTDIGGSIRFPSSFCGICGLKPTGNRLRSTPALSPCVWGTMRLTTIPCPPRP

SEQ ID NO: 867079 - protein, 235 aa, Homo sapiens
MFGRRELSLVRRRWTGSLHREWDCCGPGEQAGKDVGMGVPGPSILFPSKGDFVDPCLGDLVSILKLPQWLKGLLAFLVKPLLPRLSAFLSNMKSRSAGKLWELQHEIEVYRKTVIAQWRALDLDVVLTPMLAPALDLNAPGRATGAVSYTMLYNCLDFPAGVVPVTTVTAEDEAQMEHYRGYFGDIWDKMLQKGMKKSVGLPVAVQCVALPWQEELCLRFMREVERLMTPEKQSS

SEQ ID NO: 867080 - protein, 148 aa, Homo sapiens
VTTLLLPSSAGKLWELQHEIEVYRKTVIAQWRALDLDVVLTPMLAPALDLNAPGRATGAVSYTMLYNCLDFPAGVVPVTTVTAEDEAQMEHYRGYFGDIWDKMLQKGMKKSVGLPVAVQCVALPWQEELCLRFMREVERLMTPEKQSS

SEQ ID NO: 867081 - protein, 474 aa, Homo sapiens
MVQYELWAALPGASGVALACCFVAAAVALRWSGRRTARGAVVRARQRQRAGLENMDRAAQRFRLQNPDLDSEALLALPLPQLVQKLHSRELAPEAVLFTYVGKAWEVNKGTNCVTSYLADCETQLSQAPRQGLLYGVPVSLKECFTYKGQDSTLGLSLNEGVPAECDSVVVHVLKLQGAVPFVHTNVPQSMFSYDCSNPLFGQTVNPWKSSKSPGGSSGGEGALIGSGGSPLGLGTDIGGSIRFPSSFCGICGLKPTGNRLSRYGGWRALLGPSLCDLGLASNLSGLQAGIRSPGFCWEEALQYHWPGVGPSFQSGECSELLCGCGDGGGWPFPVSSILCFLSSKSGLKGCVYGQEAVRLSVGPMARDVESLALCLRALLCEDMFRLDPTVPPLPFREEVYTSSQPLRVGYYETDNYTMPSPAMRRAVLETKQSLEAAGHTLVPFLPSNIPHALETLSTGGLFSDGGHTFLQNL

SEQ ID NO: 867082 - protein, 116 aa, Homo sapiens
SCSEDPKDFEHHPQTDTAEEPGAVSCRCAWLGTEWKALGQNLHRSLELGRVGGYVSEGCIHLEAPQALHSRSALRLRQMALLAVEGLIGTTFPGVMMEQGRQALAWGPKVGMQLII

SEQ ID NO: 867083 - protein, 171 aa, Homo sapiens
RSSAAAKLRGQKRSGASAAPAASAAAALAPSATRTRRSASQAGSKSQAVEKPPSEKPRLRRSSPRAQEEGPGEPPPPELALLPPPPPPPPTPATPTSSASNLDLGEQRERWETFQKRQKLTSEGAAKLLLDTFEYQGLVKHTGGCHCGAVRFEVWASADLHIFDCKYRNYI

SEQ ID NO: 867084 - protein, 171 aa, Homo sapiens; identical to SEQ ID NO: 867083

SEQ ID NO: 867085 - protein, 118 aa, Homo sapiens
EELCGRQAARAEAVRGLRGPRGLRGRCLGTQRHPPPPTPATPTSSASNLDLGEQRERWETFQKRQKLTSEGAAKLLLDTFEYQGLVKHTGGCHCGAVRFEVWASADLHIFDCKYRNYI

SEQ ID NO: 867086 - protein, 171 aa, Homo sapiens; identical to SEQ ID NO: 867083

SEQ ID NO: 867087 - protein, 268 aa, Homo sapiens
RSSAAAKLRGQKRSGASAAPAASAAAALAPSATRTRRSASQAGSKSQAVEKPPSEKPRLRRSSPRAQEEGPGEPPPPELALLPPPPPPPPTPATPTSSASNLDLGEQRERWETFQKRQKLTSEGAAKLLLDTFEYQGLVKHTGGCHCGAVRFEVWASADLHIFDCNCSICKKKQNRHFIVPASRFKLLKGAEHITTYTFNTHKAQHTFCKRCGVQSFYTPRSNPGGFGIAPHCLDEGTVRSMVTEEFNGSDWEKAMKEHKTIKNMSKE

SEQ ID NO: 867088 - protein, 176 aa, Homo sapiens
PGVYRTRSCAGRLLVLGRSGASAAPAASAAAALAPSATRTRRSASQAGSKSQAVEKPPSEKPRLRRSSPRAQEEGPGEPPPPELALLPPPPPPPPTPATPTSSASNLDLGEQRERWETFQKRQKLTSEGAAKLLLDTFEYQGLVKHTGGCHCGAVRFEVWASADLHIFDCKYRNYI

SEQ ID NO: 867089 - protein, 171 aa, Homo sapiens; identical to SEQ ID NO: 867083

SEQ ID NO: 867090 - protein, 385 aa, Homo sapiens
TAAPSVRSARAAAPHLRPVPTALSCRPHLQPRTCRLHLQPRALPGSSMADQAPFDTDVNTLTRFVMEEGRKARGTGELTQLLNSLCTAVKAISSAVRKAGIAHLYGIAGSTNVTGDQVKKLDVLSNDLVMNMLKSSFATCVLVSEEDKHAIIVEPEKRGKYVVCFDPLDGSSNIDCLVSVGTIFGIYRKKSTDEPSEKDALQPGRNLVAAGYALYGSATMLVLAMDCGVNCFMLDPAIGEFILVDKDVKIKKKGKIYSLNEGYAKDFDPAVTEYIQRKKFPPDNSAPYGARYVGSMVADVHRTLVYGGIFLYPANKKSPNGKLRLLYECNPMAYVMEKAGGMATTGKEAVLDVIPTDIHQRAPVILGSPDDVLEFLKVYEKHSAQ

SEQ ID NO: 867091 - protein, 395 aa, Homo sapiens
FTRRRLAWPSCTTSAADTRGGSRSVSPPARSRGPHLPPAPAAPHLRPVPTALSCRPHLQPRTCRLHLQPRALPGSSMADQAPFDTDVNTLTRFVMEEGRKARGTGELTQLLNSLYGIAGSTNVTGDQVKKLDVLSNDLVMNMLKSSFATCVLVSEEDKHAIIVEPEKRGKYVVCFDPLDGSSNIDCLVSVGTIFGIYRKKSTDEPSEKDALQPGRNLVAAGYALYGSATMLVLAMDCGVNCFMLDPAIGEFILVDKDVKIKKKGKIYSLNEGYAKDFDPAVTEYIQRKKFPPDNSAPYGARYVGSMVADVHRTLVYGGIFLYPANKKSPNGKLRLLYECNPMAYVMEKAGGMATTGKEAVLDVIPTDIHQRAPVILGSPDDVLEFLKVYEKHSAQ

SEQ ID NO: 867092 - protein, 313 aa, Homo sapiens
HILEIQILNSSRILGILRRGLDEGFRRGPSDGYGIAGSTNVTGDQVKKLDVLSNDLVMNMLKSSFATCVLVSEEDKHAIIVEPEKRGKYVVCFDPLDGSSNIDCLVSVGTIFGIYRKKSTDEPSEKDALQPGRNLVAAGYALYGSATMLVLAMDCGVNCFMLDPAIGEFILVDKDVKIKKKGKIYSLNEGYAKDFDPAVTEYIQRKKFPPDNSAPYGARYVGSMVADVHRTLVYGGIFLYPANKKSPNGKLRLLYECNPMAYVMEKAGGMATTGKEAVLDVIPTDIHQRAPVILGSPDDVLEFLKVYEKHSAQ

SEQ ID NO: 867093 - protein, 277 aa, Homo sapiens
EIPGVSFLAFSEIATQPGQPFRDVVTTLGPALFWQSGPRFFIWASRLCQRGKYVVCFDPLDGSSNIDCLVSVGTIFGIYRKKSTDEPSEKDALQPGRNLVAAGYALYGSATMLVLAMDCGVNCFMLDPAIGEFILVDKDVKIKKKGKIYSLNEGYAKDFDPAVTEYIQRKKFPPDNSAPYGARYVGSMVADVHRTLVYGGIFLYPANKKSPNGKLRLLYECNPMAYVMEKAGGMATTGKEAVLDVIPTDIHQRAPVILGSPDDVLEFLKVYEKHSAQ

SEQ ID NO: 867094 - protein, 166 aa, Homo sapiens
MLVLAMDCGVNCFMLDPAIGEFILVDKDVKIKKKGKIYSLNEGYAKDFDPAVTEYIQRKKFPPDNSAPYGARYVGSMVADVHRTLVYGGIFLYPANKKSPNGKLRLLYECNPMAYVMEKAGGMATTGKEAVLDVIPTDIHQRAPVILGSPDDVLEFLKVYEKHSAQ

SEQ ID NO: 867095 - protein, 427 aa, Homo sapiens
FTRRRLAWPSCTTSAADTRGGSRSVSPPARSRGPHLPPAPAAPHLRPVPTALSCRPHLQPRTCRLHLQPRALPGSSMADQAPFDTDVNTLTRFVMEEGRKARGTGELTQLLNSLCTAVKAISSAVRKAGIAHLYGIAGSTNVTGDQVKKLDVLSNDLVMNMLKSSFATCVLVSEEDKHAIIVEPEKRGKYVVCFDPLDGSSNIDCLVSVGTIFGIYRKKSTDEPSEKDALQPGRNLVAAGYALYGSATMLVLAMDCGVNCFMLDPAIGEFILVDKDVKIKKKGKIYSLNEGYAKDFDPAVTEYIQRKKFPPDNSAPYGARYVGSMVADVHRTLVYGGIFLYPANKKSPNGKLRLLYECNPMAYVMEKAGGMATTGKEAVLDVIPTDIHQRAPVILGSPDDVLEFLKVYEKHFCLTQQYPDLLCTLHS

SEQ ID NO: 867096 - protein, 414 aa, Homo sapiens
FTRRRLAWPSCTTSAADTRGGSRSVSPPARSRGPHLPPAPAAPHLRPVPTALSCRPHLQPRTCRLHLQPRALPGSSMADQAPFDTDVNTLTRFVMEEGRKARGTGELTQLLNSLCTAVKAISSAVRKAGIAHLYGIAGSTNVTGDQVKKLDVLSNDLVMNMLKSSFATCVLVSEEDKHAIIVEPEKRGKYVVCFDPLDGSSNIDCLVSVGTIFGIYRKKSTDEPSEKDALQPGRNLVAAGYALYGSATMLVLAMDCGVNCFMLDPAIGEFILVDKDVKIKKKGKIYSLNEGYAKDFDPAVTEYIQRKKFPPDNSAPYGARYVGSMVADVHRTLVYGGIFLYPANKKSPNGKLRLLYECNPMAYVMEKAGGMATTGKEAVLDVIPTDIHQRAPVILGSPDDVLEFLKVYEKHSAQ

SEQ ID NO: 867097 - protein, 280 aa, Homo sapiens
REDPALQRQGDQVKKLDVLSNDLVMNMLKSSFATCVLVSEEDKHAIIVEPEKRGKYVVCFDPLDGSSNIDCLVSVGTIFGIYRKKSTDEPSEKDALQPGRNLVAAGYALYGSATMLVLAMDCGVNCFMLDPAIGEFILVDKDVKIKKKGKIYSLNEGYAKDFDPAVTEYIQRKKFPPDNSAPYGARYVGSMVADVHRTLVYGGIFLYPANKKSPNGKLRLLYECNPMAYVMEKAGGMATTGKEAVLDVIPTDIHQRAPVILGSPDDVLEFLKVYEKHSAQ

SEQ ID NO: 867098 - protein, 333 aa, Homo sapiens
FTRRRLAWPSCTTSAADTRGGSRSVSPPARSRGPHLPPAPAAPHLRPVPTALSCRPHLQPRTCRLHLQPRALPGSSMADQAPFDTDVNTLTRFVMEEGRKARGTGELTQLLNSLCTAVKAISSAVRKAGIAHLYGIAGSTNVTGDQVKKLDVLSNDLVMNMLKSSFATCVLVSEEDKHAIIVEPEKRGKYVVCFDPLDGSSNIDCLVSVGTIFGIYRKKSTDEPSEKDALQPGRNLVAAGYALYGSATMLVLAMDCGVNCFMLDPAIGEFILVDKDVKIKKKVSTSRGRSSPQIIQLLMGPGMWAPWWLMFIALWSTEGYFCTPLTRRAPMES

SEQ ID NO: 867099 - protein, 134 aa, Homo sapiens
MDVESKKLEETPRKLSFLFSAILILAGLNLQDNSAPYGARYVGSMVADVHRTLVYGGIFLYPANKKSPNGKLRLLYECNPMAYVMEKAGGMATTGKEAVLDVIPTDIHQRAPVILGSPDDVLEFLKVYEKHSAQ

SEQ ID NO: 867100 - protein, 2313 aa, Homo sapiens
PEALNVIVRLIEQAPIQMGEEAVRWAKLVIPLVVHSAQKVHLRGATALEMGMPLLLQKQQEIASITEQLMTTKLISELQKLFMSKNETYVLKLWPLFVKLLGRTLHRSGSFINSLLQLEELGFRSGAPMIKKIAFIAWKSLIDNFALNPDILCSAKRLKLLMQPLSSIHVRTETLALTKLEVWWYLLMRLGPHLPANFEQVCVPLIQSTISIDSNASPQGNSCHVATSPGLNPMTPVHKGASSPYGAPGTPRMNLSSNLGGMATIPSIQLLGLEMLLHFLLGPEALSFAKQNKLVLSLEPLEHPLISSPSFFSKHANTLITAVHDSFVAVGKDAPDVVVSAIWKELISLVKSVTESGNKKEKPGSEVLTLLLKSLESIVKSEVFPVSKTLVLMEITIKGLPQKVLGSPAYQVANMDILNGTPALFLIQLIFNNFLECGVSDERFFLSLESLVGCVLSGPTSPLAFSDSVLNVINQNAKQLENKEHLWKMWSVIVTPLTELINQTNEVNQGDALEHNFSAIYGALTLPVNHIFSEQRFPVATMKTLLRTWSELYRAFARCAALVATAEENLCCEELSSKIMSSLEDEGFSNLLFVDRIIYIITVMVDCIDFSPYNIKYQPKVKSPQRPSDWSKKKNEPLGKLTSLFKLIVKVIYSFHTLSFKEAHSDTLFTIGNSITGIISSVLGHISLPSMIRKIFATLTRPLALFYENSKLDEVPKVYSCLNNKLEKLLGEIIACLQFSYTGTYDSELLEQLSPLLCIIFLHKNKQIRKQSAQFWNATFAKVMMLVYPEELKPVLTQAKQKFLLLLPGLETVEMMEESSGPYSDGTENSQLNVKISGMERKSNGKRDSFLAQTKNKKENMKPAAKLKLESSSLKVKGEILLEEEKSTDFVFIPPEGKDAKERILTDHQKEVLKTKRCDIPAMYNNLDVSQDTLFTQYSQEEPMEIPTLTRKPKEDSKMMITEEQMDSDIVIPQDVTEDCGMAEHLEKSSLSNNECGSLDKTSPEMSNSNNDERKKALISSRKTSTECASSTENSFVVSSSSVSNTTVAGTPPYPTSRRQTFITLEKFDGSENRPFSPSPLNNISSTVTVKNNQETMIKTDFLPKAKQREGTFSKSDSEKIVNGTKRSSRRAGKAEQTGNKRSKPLMRSEPEKNTEESVEGIVVLENNPPGLLNQTECVSDNQVHLSESTMEHDNTKLKAATVENAVLLETNTVEEKNVEINLESKENTPPVVISADQMVNEDSQVQITPNQKTLRRSSRRRSEVVESTTESQDKENSHQKKERRKEEEKPLQKSPLHIKDDVLPKQKLIAEQTLQENLIEKGSNLHEKTLGETSANAETEQNKKKADPENIKSEGDGTQDIVDKSSEKLVRGRTRYQTRRASQGLLSSIENSESDSSEAKEEGSRKKRSGKWKNKSNESVDIQDQEEKVVKQECIKAENQSHDYKATSEEDVSIKSPICEKQDESNTVICQDSTVTSDLLQVPDDLPNVCEEKNETSKYAEYSFTSLPVPESNLRTRNAIKRLHKRDSFDNCSLGESSKIGISDISSLSEKTFQTLECQHKRSRRVRRSKGCDCCGEKSQPQEKSLIGLKNTENNDVEISETKKADVQAPVSPSETSQANPYSEGQFLDEHHSVNFHLGLKEDNDTINDSLIVSETKSKENTMQESLPSGIVNFREEICDMDSSEAMSLESQESPNENFKTVGPCLGDSKNVSQESLETKEEKPEETPKMELSLENVTVEGNACKVTESNLEKAKTMELNVGNEASFHGQERTKTGISEEAAIEENKRNDDSEADTAKLNAKEVATEEFNSDISLSDNTTPVKLNAQTEISEQTAAGELDGGNDVSDLHSSEETNTKMKNYEEMMIGEAMAETGHDGETENEGITTKTSKPDEAETNMLTAEMDNFVCDTVEMSTEEGIIDANKTETNTEYSKSEEKLDNNQMVMESDILQEDHHTSQKVEEPSQCLASGTAISELIIEDNNASPQKLRELDPSLVSANDSPSGMQTRCVWSPLASPSTSILKRGLKRSQEDEISSPVNKVRRVSFADPIYQAGLADDIDRRCSIVRSHSSNSSPIGKSVKTSPTTQSKHNTTSAKGFLSPGSRSPKFKSSKKCLISEMAKESIPCPTESVYPPLVNCVAPVDIILPQITSNMWARGLGQLIRAKNIKTIGDLSTLTASEIKTLPIRSPKVSNVKKALRIYHEQQVKTRGLEEIPVFDISEKTVNGIENKSLSPDEERLVSDIIDPVALEIPLSKNLVAQISALALQLDSEDLHNYSGSQLFEMHEKLSCMANSVIKNLQSRWRSPSHENSI

SEQ ID NO: 867101 - protein, 2287 aa, Homo sapiens
PEALNVIVRLIEQAPIQMGEEAVRWAKLVIPLVVHSAQKVHLRGATALEMGMPLLLQKQQEIASITEQLMTTKLISELQKLFMSKNETYVLKLWPLFVKLLGRTLHRSGSFINSLLQLEELGFRSGAPMIKKIAFIAWKSLIDNFALNPDILCSAKRLKLLMQPLSSIHVRTETLALTKLEVWWYLLMRLGPHLPANFEQVCVPLIQSTISIDSNASPQGNSCHVATSPGLNPMTPVHKGASSPYGAPGTPRMNLSSNLGGMATIPSIQLLGLEMLLHFLLGPEALSFAKQNKLVLSLEPLEHPLISSPSFFSKHANTLITAVHDSFVAVGKDAPDVVVSAIWKELISLVKSVTESGNKKEKPGSEVLTLLLKSLESIVKSEVFPVSKTLVLMEITIKGLPQKVLGSPAYQVANMDILNGTPALFLIQLIFNNFLECGVSDERFFLSLESLVGCVLSGPTSPLAFSDSVLNVINQNAKQLENKEHLWKMWSVIVTPLTELINQTNEVNQGDALEHNFSAIYGALTLPVNHIFSEQRFPVATMKTLLRTWSELYRAFARCAALVATAEENLCCEELSSKIMSSLEDEGFSNLLFVDRIIYIITVMVDCIDFSPYNIKYQPKVKSPQRPSDWSKKKNEPLGKLTSLFKLIVKVIYSFHTLSFKEAHSDTLFTIGNSITGIISSVLGHISLPSMIRKIFATLTRPLALFYENSKLDEVPKVYSCLNNKLEKLLGEIIACLQFSYTGTYDSELLEQLSPLLCIIFLHKNKQIRKQSAQFWNATFAKVMMLVYPEELKPVLTQAKQKFLLLLPGLETVEMMEESSGPYSDGTENSQLNVKISGMERKSNGKRDSFLAQTKNKKENMKPAAKLKLESSSLKVKGEILLEEEKSTDFVFIPPEGKDAKERILTDHQKEVLKTKRCDIPAMYNNLDVSQDTLFTQYSQEEPMEIPTLTRKPKEDSKMMITEEQMDSDIVIPQDVTEDCGMAEHLEKSSLSNNECGSLDKTSPEMSNSNNDERKKALISSRKTSTECASSTENSFVVSSSSVSNTTVAGTPPYPTSRRQTFITLEKFDGSENRPFSPSPLNNISSTVTVKNNQETMIKTDFLPKAKQREGTFSKSDSEKIVNGTKRSSRRAGKAEQTGNKRSKPLMRSEPEKNTEESVEGIVVLENNPPGLLNQTECVSDNQVHLSESTMEHDNTKLKAATVENAVLLETNTVEEKNVEINLESKENTPPVVISADQMVNEDSQVQITPNQKTLRRSSRRRSEVVESTTESQDKENSHQKKERRKEEEKPLQKSPLHIKDDVLPKQKLIAEQTLQENLIEKGSNLHEKTLGETSANAETEQNKKKADPENIKSEGDGTQDIVDKSSEKLVRGRTRYQTRRASQGLLSSIENSESDSSEAKEEGSRKKRSGKWKNKSNESVDIQDQEEKVVKQECIKAENQSHDYKATSEEDVSIKSPICEKQDESNTVICQDSTVTSDLLQVPDDLPNVCEEKNETSKYAEYSFTSLPVPESNLRTRNAIKRLHKRDSFDNCSLGESSKIGISDISSLSEKTFQTLECQHKRSRRVRRSKGCDCCGEKSQPQEKSLIGLKNTENNDVEISETKKADVQAPVSPSETSQANPYSEGQFLDEHHSVNFHLGLKEDNDTINDSLIVSETKSKENTMQESLPSGIVNFREEICDMDSSEAMSLESQESPNENFKTVGPCLGDSKNVSQESLETKEEKPEETPKMELSLENVTVEGNACKVTESNLEKAKTMELNVGNEASFHGQERTKTGISEEAAIEENKRNDDSEADTAKLNAKEVATEEFNSDISLSDNTTPVKLNAQTEISEQTAAGELDGGNDVSDLHSSEETNTKMKNYEEMMIGEAMAETGHDGETENEGITTKTSKPDEAETNMLTAEMDNFVCDTVEMSTEEGIIDANKTETNTEYSKSEEKLDNNQMVMESDILQEDHHTSQKVEEPSQCLASGTAISELIIEDNNASPQKLRELDPSLVSANDSPSGMQTRCVWSPLASPSTSILKRGLKRSQEDEISSPVNKVRRVSFADPIYQAGLADDIDRRCSIVRSHSSNSSPIGKSVKTSPTTQSKISEMAKESIPCPTESVYPPLVNCVAPVDIILPQITSNMWARGLGQLIRAKNIKTIGDLSTLTASEIKTLPIRSPKVSNVKKALRIYHEQQVKTRGLEEIPVFDISEKTVNGIENKSLSPDEERLVSDIIDPVALEIPLSKNLVAQISALALQLDSEDLHNYSGSQLFEMHEKLSCMANSVIKNLQSRWRSPSHENSI

SEQ ID NO: 867102 - protein, 2287 aa, Homo sapiens; identical to SEQ ID NO: 867101

SEQ ID NO: 867103 - protein, 2313 aa, Homo sapiens; identical to SEQ ID NO: 867100

SEQ ID NO: 867104 - protein, 2313 aa, Homo sapiens; identical to SEQ ID NO: 867100

SEQ ID NO: 867105 - protein, 1825 aa, Homo sapiens
MWSVIVTPLTELINQTNEVNQGDALEHNFSAIYGALTLPVNHIFSEQRFPVATMKTLLRTWSELYRAFARCAALVATAEENLCCEELSSKIMSSLEDEGFSNLLFVDRIIYIITVMVDCIDFSPYNIKYQPKVKSPQRPSDWSKKKNEPLGKLTSLFKLIVKVIYSFHTLSFKEAHSDTLFTIGNSITGIISSVLGHISLPSMIRKIFATLTRPLALFYENSKLDEVPKVYSCLNNKLEKLLGEIIACLQFSYTGTYDSELLEQLSPLLCIIFLHKNKQIRKQSAQFWNATFAKVMMLVYPEELKPVLTQAKQKFLLLLPGLETVEMMEESSGPYSDGTENSQLNVKISGMERKSNGKRDSFLAQTKNKKENMKPAAKLKLESSSLKVKGEILLEEEKSTDFVFIPPEGKDAKERILTDHQKEVLKTKRCDIPAMYNNLDVSQDTLFTQYSQEEPMEIPTLTRKPKEDSKMMITEEQMDSDIVIPQDVTEDCGMAEHLEKSSLSNNECGSLDKTSPEMSNSNNDERKKALISSRKTSTECASSTENSFVVSSSSVSNTTVAGTPPYPTSRRQTFITLEKFDGSENRPFSPSPLNNISSTVTVKNNQETMIKTDFLPKAKQREGTFSKSDSEKIVNGTKRSSRRAGKAEQTGNKRSKPLMRSEPEKNTEESVEGIVVLENNPPGLLNQTECVSDNQVHLSESTMEHDNTKLKAATVENAVLLETNTVEEKNVEINLESKENTPPVVISADQMVNEDSQVQITPNQKTLRRSSRRRSEVVESTTESQDKENSHQKKERRKEEEKPLQKSPLHIKDDVLPKQKLIAEQTLQENLIEKGSNLHEKTLGETSANAETEQNKKKADPENIKSEGDGTQDIVDKSSEKLVRGRTRYQTRRASQGLLSSIENSESDSSEAKEEGSRKKRSGKWKNKSNESVDIQDQEEKVVKQECIKAENQSHDYKATSEEDVSIKSPICEKQDESNTVICQDSTVTSDLLQVPDDLPNVCEEKNETSKYAEYSFTSLPVPESNLRTRNAIKRLHKRDSFDNCSLGESSKIGISDISSLSEKTFQTLECQHKRSRRVRRSKGCDCCGEKSQPQEKSLIGLKNTENNDVEISETKKADVQAPVSPSETSQANPYSEGQFLDEHHSVNFHLGLKEDNDTINDSLIVSETKSKENTMQESLPSGIVNFREEICDMDSSEAMSLESQESPNENFKTVGPCLGDSKNVSQESLETKEEKPEETPKMELSLENVTVEGNACKVTESNLEKAKTMELNVGNEASFHGQERTKTGISEEAAIEENKRNDDSEADTAKLNAKEVATEEFNSDISLSDNTTPVKLNAQTEISEQTAAGELDGGNDVSDLHSSEETNTKMKNYEEMMIGEAMAETGHDGETENEGITTKTSKPDEAETNMLTAEMDNFVCDTVEMSTEEGIIDANKTETNTEYSKSEEKLDNNQMVMESDILQEDHHTSQKVEEPSQCLASGTAISELIIEDNNASPQKLRELDPSLVSANDSPSGMQTRCVWSPLASPSTSILKRGLKRSQEDEISSPVNKVRRVSFADPIYQAGLADDIDRRCSIVRSHSSNSSPIGKSVKTSPTTQSKHNTTSAKGFLSPGSRSPKFKSSKKCLISEMAKESIPCPTESVYPPLVNCVAPVDIILPQITSNMWARGLGQLIRAKNIKTIGDLSTLTASEIKTLPIRSPKVSNVKKALRIYHEQQVKTRGLEEIPVFDISEKTVNGIENKSLSPDEERLVSDIIDPVALEIPLSKNLVAQISALALQLDSEDLHNYSGSQLFEMHEKLSCMANSVIKNLQSRWRSPSHENSI

SEQ ID NO: 867106 - protein, 337 aa, Homo sapiens
PEALNVIVRLIEQAPIQMGEEAVRWAKLVIPLVVHSAQKVHLRGATALEMGMPLLLQKQQEIASITEQLMTTKLISELQKLFMSKNETYVLKLWPLFVKLLGRTLHRSGSFINSLLQLEELGFRSGAPMIKKIAFIAWKSLIDNFALNPDILCSAKRLKLLMQPLSSIHVRTETLALTKLEVWWYLLMRLGPHLPANFEQVCVPLIQSTISIDSNASPQGNSCHVATSPGLNPMTPVHKGASSPYGAPGTPRMNLSSNLGGMATIPSIQLLGLEMLLHFLLGPEALSFAKQNKLVLSLEKKKKMLGGGHRNLNHSWGAVVGRLTSRTGREGFHTKAG

SEQ ID NO: 867107 - protein, 179 aa, Homo sapiens
PEALNVIVRLIEQAPIQMGEEAVRWAKLVIPLVVHSAQKVHLRGATALEMGMPLLLQKQQEIASITEQLMTTKLISELQKLFMSKNETYVLKLWPLFVKLLGRTPKVAKNWSHTTCMFPAEVKQGYALPFCFSSHTLNRCPFYNPCNATFFTFLCFSWWFHCLNLEPKAWVQVLSSLCS

SEQ ID NO: 867108 - protein, 2287 aa, Homo sapiens; identical to SEQ ID NO: 867101

SEQ ID NO: 867109 - protein, 2313 aa, Homo sapiens; identical to SEQ ID NO: 867100

SEQ ID NO: 867110 - protein, 2287 aa, Homo sapiens; identical to SEQ ID NO: 867101

SEQ ID NO: 867111 - protein, 2313 aa, Homo sapiens; identical to SEQ ID NO: 867100

SEQ ID NO: 867112 - protein, 426 aa, Homo sapiens
PEALNVIVRLIEQAPIQMGEEAVRWAKLVIPLVVHSAQKVHLRGATALEMGMPLLLQKQQEIASITEQLMTTKLISELQKLFMSKNETYVLKLWPLFVKLLGRTLHRSGSFINSLLQLEELGFRSGAPMIKKIAFIAWKSLIDNFALNPDILCSAKRLKLLMQPLSSIHVRTETLALTKLEVWWYLLMRLGPHLPANFEQVCVPLIQSTISIDSNASPQGNSCHVATSPGLNPMTPVHKGASSPYGAPGTPRMNLSSNLGGMATIPSIQLLGLEMLLHFLLGPEALSFAKQNKLVLSLEPLEHPLISSPSFFSKHANTLITAVHDSFVAVGKDAPDVVVSAIWKELISLVKSVTESGNKKEKPGSEVLTLLLKSLESIVKSEVFPVSKTLVLMEITIKGLPQKVLGSPAYQVANMDILNASILNVI

SEQ ID NO: 867113 - protein, 142 aa, Homo sapiens
AGDAQPGLVECGSLLRTPGAGAALAAPGLAECSAPEGQCLRSVRGPAPRVGGEAAAQSPHATPPAPSFRVARFRPPRPPFCSRGSAAVGWEPKRESRGICGRRHAVVPAAGGGGVLEQPEPEHGGAQHPQQTGIQRPILSLL

SEQ ID NO: 867114 - protein, 194 aa, Homo sapiens
MPSSPLRVAVVCSSNQNRSMEAHNILSKRGFSVRSFGTGTHVKLPGPAPDKPNVYDFKTTYDQMYNDLLRKDKELYTQNGILHMLDRNKRIKPRPERFQNCKDLFDLILTCEERVYDQVVEDLNSREQETCQPVHVVNVDIQDNHEEATLGAFLICELCQCIQHTEDMENEIDELLQEFEEKSGRTFLHTVCFY

SEQ ID NO: 867115 - protein, 194 aa, Homo sapiens; identical to SEQ ID NO: 867114

SEQ ID NO: 867116 - protein, 167 aa, Homo sapiens
KLLTPTCSHGTGTHVKLPGPAPDKPNVYDFKTTYDQMYNDLLRKDKELYTQNGILHMLDRNKRIKPRPERFQNCKDLFDLILTCEERVYDQVVEDLNSREQETCQPVHVVNVDIQDNHEEATLGAFLICELCQCIQHTEDMENEIDELLQEFEEKSGRTFLHTVCFY

SEQ ID NO: 867117 - protein, 122 aa, Homo sapiens
MISYTQNGILHMLDRNKRIKPRPERFQNCKDLFDLILTCEERVYDQVVEDLNSREQETCQPVHVVNVDIQDNHEEATLGAFLICELCQCIQHTEDMENEIDELLQEFEEKSGRTFLHTVCFY

SEQ ID NO: 867118 - protein, 130 aa, Homo sapiens
MFMISCTMIFLGKTKNSIHRMGFYICWTEIRERFQNCKDLFDLILTCEERVYDQVVEDLNSREQETCQPVHVVNVDIQDNHEEATLGAFLICELCQCIQHTEDMENEIDELLQEFEEKSGRTFLHTVCFY

SEQ ID NO: 867119 - protein, 105 aa, Homo sapiens
MNDSLKLHRYTIKADHKREEHQSSSWLRDGFATPRAQTWETCQPVHVVNVDIQDNHEEATLGAFLICELCQCIQHTEDMENEIDELLQEFEEKSGRTFLHTVCFY

SEQ ID NO: 867120 - protein, 195 aa, Homo sapiens
VETGFHHVGQAGLELLSSSDPPASASQSAGITGESHRARPIFQADGPCVELAVEQGGLVFSDGEGSQCQSRFTPGLAGGWGVPDQLVLSWRFAQVSSNHQRLRFEAHSLCSPNCRVQKPLGLGWACSRQSWGLSHIDCLFPGFGASDVCVTLSQSDLNSREQETCQPVHVVNVDIQDNHEEATLGAFLICELCQC

SEQ ID NO: 867121 - protein, 194 aa, Homo sapiens; identical to SEQ ID NO: 867114

SEQ ID NO: 867122 - protein, 146 aa, Homo sapiens
SRGVPNLSLRAHFHYVLSIGAVFAIIGGFIHCFPLFSGYTLEQTYAKIHFTIIFIGVNLTFFPQHFLGLSGMPRRYSDYPNEDLNLSVVNVDIQDNHEEATLGAFLICELCQCIQHTEDMENEIDELLQEFEEKSGRTFLHTVCFY

SEQ ID NO: 867123 - protein, 194 aa, Homo sapiens; identical to SEQ ID NO: 867114

SEQ ID NO: 867124 - protein, 121 aa, Homo sapiens
NLSASTSLCYSDEGNKRIKPRPERFQNCKDLFDLILTCEERVYDQVVEDLNSREQETCQPVHVVNVDIQDNHEEATLGAFLICELCQCIQHTEDMENEIDELLQEFEEKSGRTFLHTVCFY

SEQ ID NO: 867125 - protein, 228 aa, Homo sapiens
MISCTMIFLGKTKNSIHRMGFYICWTEIRERFQNCKDLFDLILTCEERVYDQVVEGRPASPCTWSMWTSRTTTRRPPWGRFSSVSSASVSSTRKTWRTRSTSCCRSSRRRVAAPFCTPSASTEPSPPLELPVVHTFSFLTFVFTYRCSAGDGSITQINYAKTPDESNQVSSFPLLLMSRILITKFFFFNQKGKTTVCVHFPTYLCLRVPAFPPSSPPGRTVQSPAAAC

SEQ ID NO: 867126 - protein, 211 aa, Homo sapiens
STYLSHQSDLRPERDGPFLLPVLSSLLYHPGLAYPSISSSGATPVFDNIWNQGLVSQDLFSVYLSADDQSGSVVIFGGIDSSYYTGSLNWVPVTVEGYWQITVDSITMNGEAIACAEGCQAIVDTGTSLLTGPTSPIANIQKRHRSQRELRWRHGGQLLSHQQPARHRLHHQWSPVPRATQCLHPAERGELHQWLPGHEPPHRIWRALDPG

SEQ ID NO: 867127 - protein, 187 aa, Homo sapiens
STYLSHQSDLRPERDGPFLLPVLSSLLYHPGLAYPSISSSGATPVFDNIWNQGLVSQDLFSVYLSADDQSGSVVIFGGIDSSYYTGSLNWVPVTVEGYWQITVDSITMNGEAIACAEGCQAIVDTGTSLLTGPTSPIANIQKRHRSQRELRWRHGGQLLSHQQPARHRLHHQWSPSGTPGSQWSPPG

SEQ ID NO: 867128 - protein, 187 aa, Homo sapiens
MNGEAIACAEGCQAIVDTGTSLLTGPTSPIANIQKRHRSQRELRWRHGGQLLSHQQPARHRLHHQWSPVPRATQCLHPAERGELHQWLPGHEPPHRIWRALDPVSGEVVPKGTPAGPVDLKDGDPGGEHYSPEEDAHSWAPDIAFDFGSVLCRLRQGKASRKNQKDVDQPETRQESTPPPDTPRDKG

SEQ ID NO: 867129 - protein, 104 aa, Homo sapiens [sequence omitted]

SEQ ID NO: 867130 - protein, 124 aa, Homo sapiens
SSWYLPVPSTVRQITVYSITMNGEAIACAEGCQAIVDTGTSLLTGPTSPIANIQKRHRSQRELRWRHGGQLLSHQQPARHRLHHQWSPVPRATQCLHPAERGELHQWLPGHEPPHRIWRALDPG

SEQ ID NO: 867131 - protein, 211 aa, Homo sapiens; identical to SEQ ID NO: 867126

SEQ ID NO: 867132 - protein, 211 aa, Homo sapiens; identical to SEQ ID NO: 867126

SEQ ID NO: 867133 - protein, 211 aa, Homo sapiens; identical to SEQ ID NO: 867126

SEQ ID NO: 867134 - protein, 211 aa, Homo sapiens; identical to SEQ ID NO: 867126

SEQ ID NO: 867135 - protein, 153 aa, Homo sapiens
TYTNSSWYLSPLALSTLALHHWLSLHTGSLNWVPVTVEGYWQITVDSITMNGEAIACAEGCQAIVDTGTSLLTGPTSPIANIQKRHRSQRELRWRHGGQLLSHQQPARHRLHHQWSPVPRATQCLHPAERGELHQWLPGHEPPHRIWRALDPG

SEQ ID NO: 867136 - protein, 210 aa, Homo sapiens
STYLSHQSDLRPERDGPFLLPVLSSLLYHPGLAYPSISSSGATPVFDNIWNQGLVSQDLFSVYLSADDQSGSVVIFGGIDSSYYTGSLNWVPVTVEGYWQITVDSITMNGEAIACAEGCQAIVDTGTSLLTGPTSPIANIQKRHRSQRELRWRHGGQLLSHQQPARHRLHHQWSPGRPMGARKAGIFQTKKPFSGGLNEPSANGAPFNRA

SEQ ID NO: 867137 - protein, 130 aa, Homo sapiens
HIRTRVGTSLHTGSLNWVPVTVEGYWQITVDSITMNGEAIACAEGCQAIVDTGTSLLTGPTSPIANIQKRHRSQRELRWRHGGQLLSHQQPARHRLHHQWSPVPRATQCLHPAGCPKASSGRTETSSVER

SEQ ID NO: 867138 - protein, 149 aa, Homo sapiens
SPLTFHSDDQSGSVVIFGGIDSSYYTGSLNWVPVTVEGYWQITVDSITMNGEAIACAEGCQAIVDTGTSLLTGPTSPIANIQKRHRSQRELRWRHGGQLLSHQQPARHRLHHQWSPLQSGSRKCDRNKDRENVNKQIRKNRNTGRSGML

SEQ ID NO: 867139 - protein, 138 aa, Homo sapiens
HIRTRVGTSLHTGSLNWVPVTVEGYWQITVDSITMNGEAIACAEGCQAIVDTGTSLLTGPTSPIANIQKRHRSQRELRWRHGGQLLSHQQPARHRLHHQWSPVPRATQCLHPAERGELHQWLPGHEPPHRIWRALDPG

SEQ ID NO: 867140 - protein, 153 aa, Homo sapiens; identical to SEQ ID NO: 867135

SEQ ID NO: 867141 - protein, 211 aa, Homo sapiens; identical to SEQ ID NO: 867126

SEQ ID NO: 867142 - protein, 98 aa, Homo sapiens
TYSNRVGTEQRELRLDMVVSCSAISSLPDIVFTINGVQYPVPPSAYILQSEGSCISGFQGMNLPTESGELWILGDVFIRQYFTVFDRANNQVGLAPVA

SEQ ID NO: 867143 - protein, 186 aa, Homo sapiens
STYLSHQSDLRPERDGPFLLPVLSSLLYHPGLAYPSISSSGATPVFDNIWNQGLVSQDLFSVYLSADDQSGSVVIFGGIDSSYYTGSLNWVPVTVEGYWQITVDSITMNGEAIACAEGCQAIVDTGTSLLTGPTSPIANIQKRHRSQRELRWRHGGQLLSHQQPARHRLHHQWSPVERGYQLESYM

SEQ ID NO: 867144 - protein, 116 aa, Homo sapiens
STYLSHQSDLRPERDGPFLLPVLSSLLYHPGLAYPSISSSGATPVFDNIWNQGLVSQDLFSVYLSADDQSGSVVIFGGIDSSYYTGSLNWVPVTVEGYWQITVDRWREGTNSSRIC

SEQ ID NO: 867145 - protein, 174 aa, Homo sapiens
MTSEVIEDEKQFYSKAKTYWKQIPPTVDGMLGGYGHISSIDINSSRKFLQRFLREGPNKTGTSCALDCGAGIGRITKRLLLPLFREVDMVDITEDFLVQAKTYLGEEGKRVRNYFCCGLQDFTPEPDSYDVIWIQWVIGEGSTALPCSPVCLLPLAFPIRCQDQGFALLQQVGQ

SEQ ID NO: 867146 - protein, 141 aa, Homo sapiens [sequence omitted]

SEQ ID NO: 867147 - protein, 223 aa, Homo sapiens
MTSEVIEDEKQFYSKAKTYWKQIPPTVDGMLGGYGHISSIDINSSRKFLQRFLREGPNKTGTSCALDCGAGIGRITKRLLLPLFREVDMVDITEDFLVQAKTYLGEEGKRVRNYFCCGLQDFTPEPDSYDVIWIQWVIGHLTDQHLAEFLRRCKGSLRPNGIIVIKDNMAQEGVILDDVDSSVCRDLDVVRRIICSAGLSLLAEERQENLPDEIYHVYSFALR

SEQ ID NO: 867148 - protein, 223 aa, Homo sapiens; identical to SEQ ID NO: 867147

SEQ ID NO: 867149 - protein, 223 aa, Homo sapiens; identical to SEQ ID NO: 867147

SEQ ID NO: 867150 - protein, 135 aa, Homo sapiens
MVDITEDFLVQAKTYLGEEGKRVRNYFCCGLQDFTPEPDSYDVIWIQWVIGHLTDQHLAEFLRRCKGSLRPNGIIVIKDNMAQEGVILDDVDSSVCRDLDVVRRIICSAGLSLLAEERQENLPDEIYHVYSFALR

SEQ ID NO: 867151 - protein, 223 aa, Homo sapiens; identical to SEQ ID NO: 867147

SEQ ID NO: 867152 - protein, 135 aa, Homo sapiens; identical to SEQ ID NO: 867150

SEQ ID NO: 867153 - protein, 145 aa, Homo sapiens
MTSEVIEDEKQFYSKAKTYWKQIPPTVDGMLGGYGHISSIDINSSRKFLQRFLREGPNKTGTSCALDCGAGIGRITKRLLLPLFREVDMVDITEDFLVQAKTYLGEEGKRATSPISTWPSSCGAARAASAPTASSSSKTTWPRRA

SEQ ID NO: 867154 - protein, 174 aa, Homo sapiens; identical to SEQ ID NO: 867145

SEQ ID NO: 867155 - protein, 83 aa, Homo sapiens
KRRRGKCSLKLFRQMWVRDSWAGHSLGSAPCASSSRVTWKQKRLIIWASSLSPPTVSPSRKMMQVNTVSPSLVVALTSAPRRA

SEQ ID NO: 867156 - protein, 223 aa, Homo sapiens; identical to SEQ ID NO: 867147

SEQ ID NO: 867157 - protein, 223 aa, Homo sapiens; identical to SEQ ID NO: 867147

SEQ ID NO: 867158 - protein, 174 aa, Homo sapiens; identical to SEQ ID NO: 867145

SEQ ID NO: 867159 - protein, 145 aa, Homo sapiens; identical to SEQ ID NO: 867153

SEQ ID NO: 867160 - protein, 135 aa, Homo sapiens; identical to SEQ ID NO: 867150

SEQ ID NO: 867161 - protein, 145 aa, Homo sapiens; identical to SEQ ID NO: 867153

SEQ ID NO: 867162 - protein, 145 aa, Homo sapiens; identical to SEQ ID NO: 867153

SEQ ID NO: 867163 - protein, 174 aa, Homo sapiens; identical to SEQ ID NO: 867145

SEQ ID NO: 867164 - protein, 242 aa, Homo sapiens
  misc_feature (180)..(180): Xaa can be any naturally occurring amino acid
MQKIFAREILDSRGNPTVEVDLHTAKGRFRAAVPSGASTGIYEALELRDGDKGRYLGKGVLKAVENINSTLGPALLQKKLSVADQEKVDKFMIELDGTENKSKFGANAILGVSLAVCKAGAAEKGVPLYRHIADLAGNPDLILPVPAFNVINGGSHAGNKLAMQEFMILPVGASLQSMGXARSTHSGVIRQFGRCPWVRRVRPLGKEAGVKGPGVPQGPLMAGPEENETERAGNDENTGQRE

SEQ ID NO: 867165 - protein, 180 aa, Homo sapiens
MQKIFAREILDSRGNPTVEVDLHTAKGRFRAAVPSGASTGIYEALELRDGDKGRYLGKGVLKAVENINSTLGPALLQKKLSVADQEKVDKFMIELDGTENKSKFGANAILGVSLAVCKAGAAEKGVPLYRHIADLAGNPDLILPVPVSAATRPSQISPGQSQPRPARVGPPGKSTFQTSS

SEQ ID NO: 867166 - protein, 138 aa, Homo sapiens
MLNSPSCSSESRIKAGPTASPGNSSYEPTPKGGYQKRGLPGPKRASGPSLSLRSQHQGYMGSQQVSMGYSLYNLRNLMSTLRSQGWVSGHPREPEVGGKHAMLPAIAPPVGARKKSPRGPEPRARAAAKAQGQSYSSA

SEQ ID NO: 867167 - protein, 43 aa, Homo sapiens
MALLLGLLSALLLGPRTGLELPRLAGGGRRRARGTRCRPDRGS

SEQ ID NO: 867168 - protein, 280 aa, Homo sapiens
MAMQKIFAREILDSRGNPTVEVDLHTAKGRFRAAVPSGASTGIYEALELRDGDKGRYLGKGVLKAVENINSTLGPALLQKKLSVADQEKVDKFMIELDGTENKSKFGANAILGVSLAVCKAGAAEKGVPLYRHIADLAGNPDLILPVPAFNVINGGSHAGNKLAMQEFMILPVGASSFKEAMRIGAEVYHHLKGVIKAKYGKDATNVGDEGGFAPNILENNEALELLKTAIQAAGYPDKVVIGMDVAASEFYRNGKYDLDFKSPDDPARHITGEKLGDAV

SEQ ID NO: 867169 - protein, 366 aa, Homo sapiens
RATEGPTHVQPPFAPLPGQAPSQGLSLRALDRARPHPSPSLRVQTGAVPRTAQASQYRDVDERFPGDGGPDGGRVLVAHDGRVLTAMAMQKIFAREILDSRGNPTVEVDLHTAKGRFRAAVPSGASTGIYEALELRDGDKGRYLGKGVLKAVENINSTLGPALLQKKLSVADQEKVDKFMIELDGTENKSKFGANAILGVSLAVCKAGAAEKGVPLYRHIADLAGNPDLILPVPAFNVINGGSHAGNKLAMQEFMILPVGASSFKEAMRIGAEVYHHLKGVIKAKYGKDATNVGDEGGFAPNILENNEALELLKTAIQAAGYPDKVVIGMDVAASEFYRNGKYDLDFKSPDDPARHITGEKLGDAV

SEQ ID NO: 867170 - protein, 280 aa, Homo sapiens; identical to SEQ ID NO: 867168

SEQ ID NO: 867171 - protein, 278 aa, Homo sapiens
MQKIFAREILDSRGNPTVEVDLHTAKGRFRAAVPSGASTGIYEALELRDGDKGRYLGKGVLKAVENINSTLGPALLQKKLSVADQEKVDKFMIELDGTENKSKFGANAILGVSLAVCKAGAAEKGVPLYRHIADLAGNPDLILPVPAFNVINGGSHAGNKLAMQEFMILPVGASSFKEAMRIGAEVYHHLKGVIKAKYGKDATNVGDEGGFAPNILENNEALELLKTAIQAAGYPDKVVIGMDVAASEFYRNGKYDLDFKSPDDPARHITGEKLGDAV

SEQ ID NO: 867172 - protein, 289 aa, Homo sapiens
MAVMRTLRAMAMQKIFAREILDSRGNPTVEVDLHTAKGRFRAAVPSGASTGIYEALELRDGDKGRYLGKGVLKAVENINSTLGPALLQKKLSVADQEKVDKFMIELDGTENKSKFGANAILGVSLAVCKAGAAEKGVPLYRHIADLAGNPDLILPVPAFNVINGGSHAGNKLAMQEFMILPVGASSFKEAMRIGAEVYHHLKGVIKAKYGKDATNVGDEGGFAPNILENNEALELLKTAIQAAGYPDKVVIGMDVAASEFYRNGKYDLDFKSPDDPARHITGEKLGDAV

SEQ ID NO: 867173 - protein, 278 aa, Homo sapiens; identical to SEQ ID NO: 867171

SEQ ID NO: 867174 - protein, 278 aa, Homo sapiens; identical to SEQ ID NO: 867171

SEQ ID NO: 867175 - protein, 278 aa, Homo sapiens; identical to SEQ ID NO: 867171

SEQ ID NO: 867176 - protein, 278 aa, Homo sapiens; identical to SEQ ID NO: 867171

SEQ ID NO: 867177 - protein, 74 aa, Homo sapiens
MRSLRGGEGHCPSCHLDSELHPNLQRRHPSHGHAENLCPGNLGLQGQPHGGGGPAHGQGPIPSSCAQWGFHGYL

SEQ ID NO: 867178 - protein, 277 aa, Homo sapiens
MQKIFAREILDSRGNPTVEVDLHTAKGRFRAAVPSGASTGIYEALELRDGDKGRYLGKGVLKAVENINSTLGPALLQKKLSVADQEKVDKFMIELDGTENKSKFGANAILGVSLAVCKAGAAEKGVPLYRHIADLAGNPDLILPVPAFNVINGGSHAGNKLAMQEFMILPVGASSFKEAMRIGAEVYHHLKGVIKAKYGKDATNVGDEGGFAPNILENNEALELLKTAIQAAGYPDKVVIGMVGPWFFAEAVVLVGTPGTGADACLDPGRLAGRAPG

SEQ ID NO: 867179 - protein, 94 aa, Homo sapiens
SDCCVRHQIGSVPNDQCKLAQSNGWGVMVSHRSGETEDTFIADLVVGLCTGQIKTGAPCRSERLAKYNQLMRIEEALGDKAIFAGRKFRNPKAK

SEQ ID NO: 867180 - protein, 43 aa, Homo sapiens; identical to SEQ ID NO: 867167

SEQ ID NO: 867181 - protein, 278 aa, Homo sapiens; identical to SEQ ID NO: 867171

SEQ ID NO: 867182 - protein, 278 aa, Homo sapiens; identical to SEQ ID NO: 867171

SEQ ID NO: 867183 - protein, 187 aa, Homo sapiens
MIELDGTENKSKFGANAILGVSLAVCKAGAAEKGVPLYRHIADLAGNPDLILPVPAFNVINGGSHAGNKLAMQEFMILPVGASSFKEAMRIGAEVYHHLKGVIKAKYGKDATNVGDEGGFAPNILENNEALELLKTAIQAAGYPDKVVIGMDVAASEFYRNGKYDLDFKSPDDPARHITGEKLGDAV

SEQ ID NO: 867184 - protein, 235 aa, Homo sapiens
MQKIFAREILDSRGNPTVEVDLHTAKGRFRAAVPSGASTGIYEALELRDGDKGRYLGKAKFGANAILGVSLAVCKAGAAEKGVPLYRHIADLAGNPDLILPVPAFNVINGGSHAGNKLAMQEFMILPVGASSFKEAMRIGAEVYHHLKGVIKAKYGKDATNVGDEGGFAPNILENNEALELLKTAIQAAGYPDKVVIGMDVAASEFYRNGKYDLDFKSPDDPARHITGEKLGDAV

SEQ ID NO: 867185 - protein, 278 aa, Homo sapiens; identical to SEQ ID NO: 867171

SEQ ID NO: 867186 - protein, 113 aa, Homo sapiens
MIELDGTENKSKFGANATKGRFRAAVPSGASTGIYEALELRDGDKGRYLGKGVLKAVENINSTLGPALLQKIKTGAPCRSERLAKYNQLMRIEEALGDKAIFAGRKFRNPKAK

SEQ ID NO: 867187 - protein, 469 aa, Homo sapiens
MARGLGAPHWVAVGLLTWATLGLLVAGLGGHDDLHDDLQEDFHGHSHRHSHEDFHHGHSHAHGHGHTHESIWHGHTHDHDHGHSHEDLHHGHSHGYSHESLYHRGHGHDHEHSHGGYGESGAPGIKQDLDAVTLWAYALGATVLISAAPFFVLFLIPVESNSPRHRSLLQILLSFASGGLLGDAFLHLIPHALEPHSHHTLEQPGHGHSHSGQGPILSVGLWVLSGIVAFLVVEKFVRHVKGGHGHSHGHGHAHSHTRGSHGHGRQERSTKEKQSSEEEEKETRGVQKRRGGSTVPKDGPVRPQNAEEEKRGLDLRVSGYLNLAADLAHNFTDGLAIGASFRGGRGLGILTTMTVLLHEVPHEVGDFAILVQSGCSKKQAMRLQLLTAVGALAGTACALLTEGGAVGSEIAGGAGPGWVLPFTAGGFIYVATVSVLPELLREASPLQSLLEVLGLLGGVIMMVLIAHLE

SEQ ID NO: 867188 - protein, 469 aa, Homo sapiens; identical to SEQ ID NO: 867187

SEQ ID NO: 867189 - protein, 469 aa, Homo sapiens; identical to SEQ ID NO: 867187

SEQ ID NO: 867190 - protein, 468 aa, Homo sapiens
RPGIAVVDLLSTGGTYWLLLSGLRGVVDRERYRGVDFIILIITVISASQNEDFHHGHSHAHGHGHTHESIWHGHTHDHDHGHSHEDLHHGHSHGYSHESLYHRGHGHDHEHSHGGYGESGAPGIKQDLDAVTLWAYALGATVLISAAPFFVLFLIPVESNSPRHRSLLQILLSFASGGLLGDAFLHLIPHALEPHSHHTLEQPGHGHSHSGQGPILSVGLWVLSGIVAFLVVEKFVRHVKGGHGHSHGHGHAHSHTRGSHGHGRQERSTKEKQSSEEEEKETRGVQKRRGGSTVPKDGPVRPQNAEEEKRGLDLRVSGYLNLAADLAHNFTDGLAIGASFRGGRGLGILTTMTVLLHEVPHEVGDFAILVQSGCSKKQAMRLQLLTAVGALAGTACALLTEGGAVGSEIAGGAGPGWVLPFTAGGFIYVATVSVLPELLREASPLQSLLEVLGLLGGVIMMVLIAHLE

SEQ ID NO: 867191 - protein, 129 aa, Homo sapiens
MTTCTTICKRTSMATATGTHMKISTMATAMPMAMATLTRASGMDIPTITTMDIHMRIYTMAIAMATPMRASTTGTGGHSADLSSSIFCPLPYPRGVELSPASLSTSDLAQFCFRWAPGRCFPAPHSSCS

SEQ ID NO: 867192 - protein, 264 aa, Homo sapiens
MDTPTGGQGPILSVGLWVLSGIVAFLVVEKFVRHVKGGHGHSHGHGHAHSHTRGSHGHGRQERSTKEKQSSEEEEKETRGVQKRRGGSTVPKDGPVRPQNAEEEKRGLDLRVSGYLNLAADLAHNFTDGLAIGASFRGGRGLGILTTMTVLLHEVPHEVGDFAILVQSGCSKKQAMRLQLLTAVGALAGTACALLTEGGAVGSEIAGGAGPGWVLPFTAGGFIYVATVSVLPELLREASPLQSLLEVLGLLGGVIMMVLIAHLE

SEQ ID NO: 867193 - protein, 241 aa, Homo sapiens
MARGLGAPHWVAVGLLTWATLGLLVAGLGGHDDLHDDLQEDFHGHSHRHSHEDFHHGHSHAHGHGHTHESIWHGHTHDHDHGHSHEDLHHGHSHGYSHESLYHRGHGHDHEHSHGGYGESGAPGIKQDLDAVTLWAYALGATVLISAAPFFVLFLIPVESNSPRHRSLLQILLSFASGGLLGDAFLHLIPHALEPHSHHTLEQPGHGHSHSGQGPILSVGLWVLSGIVAFLVCLTMLHLEG

SEQ ID NO: 867194 - protein, 241 aa, Homo sapiens
  misc_feature (230)..(230): Xaa can be any naturally occurring amino acid
  misc_feature (232)..(232): Xaa can be any naturally occurring amino acid
MARGLGAPHWVAVGLLTWATLGLLVAGLGGHDDLHDDLQEDFHGHSHRHSHEDFHHGHSHAHGHGHTHESIWHGHTHDHDHGHSHEDLHHGHSHGYSHESLYHRGHGHDHEHSHGGYGESGAPGIKQDLDAVTLWAYALGATVLISAAPFFVLFLIPVESNSPRHRSLLQILLSFASGGLLGDAFLHLIPHALEPHSHHTLEQPGHGHSHSARAPFCLCDRGALATVGVXMXCLTMLHLEG

SEQ ID NO: 867195 - protein, 469 aa, Homo sapiens; identical to SEQ ID NO: 867187

SEQ ID NO: 867196 - protein, 469 aa, Homo sapiens; identical to SEQ ID NO: 867187

SEQ ID NO: 867197 - protein, 394 aa, Homo sapiens
CVVFQRITQIRRLSHGHSHGYSHESLYHRGHGHDHEHSHGGYGESGAPGIKQDLDAVTLWAYALGATVLISAAPFFVLFLIPVESNSPRHRSLLQILLSFASGGLLGDAFLHLIPHALEPHSHHTLEQPGHGHSHSGQGPILSVGLWVLSGIVAFLVVEKFVRHVKGGHGHSHGHGHAHSHTRGSHGHGRQERSTKEKQSSEEEEKETRGVQKRRGGSTVPKDGPVRPQNAEEEKRGLDLRVSGYLNLAADLAHNFTDGLAIGASFRGGRGLGILTTMTVLLHEVPHEVGDFAILVQSGCSKKQAMRLQLLTAVGALAGTACALLTEGGAVGSEIAGGAGPGWVLPFTAGGFIYVATVSVLPELLREASPLQSLLEVLGLLGGVIMMVLIAHLE

SEQ ID NO: 867198 - protein, 336 aa, Homo sapiens
MTSTCMTVSVSMSMTVTNVLFLIPVESNSPRHRSLLQILLSFASGGLLGDAFLHLIPHALEPHSHHTLEQPGHGHSHSGQGPILSVGLWVLSGIVAFLVVEKFVRHVKGGHGHSHGHGHAHSHTRGSHGHGRQERSTKEKQSSEEEEKETRGVQKRRGGSTVPKDGPVRPQNAEEEKRGLDLRVSGYLNLAADLAHNFTDGLAIGASFRGGRGLGILTTMTVLLHEVPHEVGDFAILVQSGCSKKQAMRLQLLTAVGALAGTACALLTEGGAVGSEIAGGAGPGWVLPFTAGGFIYVATVSVLPELLREASPLQSLLEVLGLLGGVIMMVLIAHLE

SEQ ID NO: 867199 - protein, 322 aa, Homo sapiens
MARGLGAPHWVAVGLLTWATLGLLVAGLGGHDDLHDDLQEDFHGHSHRHSHEDFHHGHSHAHGHGHTHESIWHGHTHDHDHGHSHEDLHHGHSHGYSHESLYHRGHGHDHEHSHGGYGESGAPGIKQDLDAVTLWAYALGATVLISAAPFFVLFLIPVESNSPRHRSLLQILLSFASGGLLGDAFLHLIPHALEPHSHHTLEQPGHGHSHSGQGPILSVGLWVLSGIVAFLVVEKFVRHVKGGHGHSHGHGHAHSHTRGSHGHGRQERSTKEKQSSEEEEKETRGVQKRRGGSTEEESHFLMYFRGRTDRTGLWIGCWERDG

SEQ ID NO: 867200 - protein, 241 aa, Homo sapiens; identical to SEQ ID NO: 867194
  misc_feature (230)..(230): Xaa can be any naturally occurring amino acid
  misc_feature (232)..(232): Xaa can be any naturally occurring amino acid

SEQ ID NO: 867201 - protein, 459 aa, Homo sapiens
MTAEEMKATESGAQSAPLPMEGVDISPKQDEGVLKVIKREGTGTEMPMIGDRVFVHYTGWLLDGTKFDSSLDRKDKFSFDLGKGEVIKAWDIAIATMKVGEVCHITCKPEYAYGSAGSPPKIPPNATLVFEVELFEFKGEDLTEEEDGGIIRRIQTRGEGYAKPNEGAIVEVALEGYYKDKLFDQRELRFEIGEGENLDLPYGLERAIQRMEKGEHSIVYLKPSYAFGSVGKEKFQIPPNAELKYELHLKSFEKAKESWEMNSEEKLEQSTIVKERGTVYFKEGKYKQALLQYKKIVSWLEYESSFSNEEAQKAQALRLASHLNLAMCHLKLQAFSAAIESCNKALELDSNNEKGLFRRGEAHLAVNDFELARADFQKVLQLYPNNKAAKTQLAVCQQRIRRQLAREKKLYANMFERLAEEENKAKAEASSGDHPTDTEMKEEQKSNTAGSQSQVETEA

SEQ ID NO: 867202 - protein, 69 aa, Homo sapiens
MTAEEMKATESGAQSAPLPMEGVDISPKQDEGVLKVRGGGACGGVGTRGPAGRPSAAPGARGRARVEAA

SEQ ID NO: 867203 - protein, 460 aa, Homo sapiens
MTAEEMKATESGAQSAPLPMEGVDISPKQDEGVLKVIKREGTGTEMPMIGDRVFVHYTGWLLDGTKFDSSLDRKDKFSFDLGKGGEVIKAWDIAIATMKVGEVCHITCKPEYAYGSAGSPPKIPPNATLVFEVELFEFKGEDLTEEEDGGIIRRIQTRGEGYAKPNEGAIVEVALEGYYKDKLFDQRELRFEIGEGENLDLPYGLERAIQRMEKGEHSIVYLKPSYAFGSVGKEKFQIPPNAELKYELHLKSFEKAKESWEMNSEEKLEQSTIVKERGTVYFKEGKYKQALLQYKKIVSWLEYESSFSNEEAQKAQALRLASHLNLAMCHLKLQAFSAAIESCNKALELDSNNEKGLFRRGEAHLAVNDFELARADFQKVLQLYPNNKAAKTQLAVCQQRIRRQLAREKKLYANMFERLAEEENKAKAEASSGDHPTDTEMKEEQKSNTAGSQSQVETEA

SEQ ID NO: 867204 - protein, 459 aa, Homo sapiens; identical to SEQ ID NO: 867201

SEQ ID NO: 867205 - protein, 459 aa, Homo sapiens; identical to SEQ ID NO: 867201

SEQ ID NO: 867206 - protein, 459 aa, Homo sapiens; identical to SEQ ID NO: 867201

SEQ ID NO: 867207 - protein, 363 aa, Homo sapiens
CSALSAAPPLSAAPPLSGSAGSPPKIPPNATLVFEVELFEFKGEDLTEEEDGGIIRRIQTRGEGYAKPNEGAIVEVALEGYYKDKLFDQRELRFEIGEGENLDLPYGLERAIQRMEKGEHSIVYLKPSYAFGSVGKEKFQIPPNAELKYELHLKSFEKAKESWEMNSEEKLEQSTIVKERGTVYFKEGKYKQALLQYKKIVSWLEYESSFSNEEAQKAQALRLASHLNLAMCHLKLQAFSAAIESCNKALELDSNNEKGLFRRGEAHLAVNDFELARADFQKVLQLYPNNKAAKTQLAVCQQRIRRQLAREKKLYANMFERLAEEENKAKAEASSGDHPTDTEMKEEQKSNTAGSQSQVETEA

SEQ ID NO: 867208 - protein, 459 aa, Homo sapiens; identical to SEQ ID NO: 867201

SEQ ID NO: 867209 - protein, 459 aa, Homo sapiens; identical to SEQ ID NO: 867201

SEQ ID NO: 867210 - protein, 459 aa, Homo sapiens; identical to SEQ ID NO: 867201

SEQ ID NO: 867211 - protein, 317 aa, Homo sapiens
FAFESRYPKQFIQTHGEGYAKPNEGAIVEVALEGYYKDKLFDQRELRFEIGEGENLDLPYGLERAIQRMEKGEHSIVYLKPSYAFGSVGKEKFQIPPNAELKYELHLKSFEKAKESWEMNSEEKLEQSTIVKERGTVYFKEGKYKQALLQYKKIVSWLEYESSFSNEEAQKAQALRLASHLNLAMCHLKLQAFSAAIESCNKALELDSNNEKGLFRRGEAHLAVNDFELARADFQKVLQLYPNNKAAKTQLAVCQQRIRRQLAREKKLYANMFERLAEEENKAKAEASSGDHPTDTEMKEEQKSNTAGSQSQVETEA

SEQ ID NO: 867212 - protein, 313 aa, Homo sapiens
LRNPARLNQAHGEGYAKPNEGAIVEVALEGYYKDKLFDQRELRFEIGEGENLDLPYGLERAIQRMEKGEHSIVYLKPSYAFGSVGKEKFQIPPNAELKYELHLKSFEKAKESWEMNSEEKLEQSTIVKERGTVYFKEGKYKQALLQYKKIVSWLEYESSFSNEEAQKAQALRLASHLNLAMCHLKLQAFSAAIESCNKALELDSNNEKGLFRRGEAHLAVNDFELARADFQKVLQLYPNNKAAKTQLAVCQQRIRRQLAREKKLYANMFERLAEEENKAKAEASSGDHPTDTEMKEEQKSNTAGSQSQVETEA

SEQ ID NO: 867213 - protein, 345 aa, Homo sapiens
MTAEEMKATESGAQSAPLPMEGVDISPKQDEGVLKVIKREGTGTEMPMIGDRVFVHYTGWLLDGTKFDSSLDRKDKFSFDLGKGEVIKAWDIAIATMKVGEVCHITCKPEYAYGSAGSPPKIPPNATLVFEVELFEFKGEDLTEEEDGGIIRRIQTRGEGYAKPNEGAIVEVALEGYYKDKLFDQRELRFEIGEGENLDLPYGLERAIQRMEKGEHSIVYLKPSYAFGSVGKEKFQIPPNAELKYELHLKSFEKAKESWEMNSEEKLEQSTIVKERGTVYFKEGKYKQALLQYKKLYANMFERLAEEENKAKAEASSGDHPTDTEMKEEQKSNTAGSQSQVETEA

SEQ ID NO: 867214 - protein, 459 aa, Homo sapiens; identical to SEQ ID NO: 867201

SEQ ID NO: 867215 - protein, 198 aa, Homo sapiens
LPAVLLFCSSFIPVSVGWSPEEASALALFSSSASLSSILEYESSFSNEEAQKAQALRLASHLNLAMCHLKLQAFSAAIESCNKALELDSNNEKGLFRRGEAHLAVNDFELARADFQKVLQLYPNNKAAKTQLAVCQQRIRRQLAREKKLYANMFERLAEEENKAKAEASSGDHPTDTEMKEEQKSNTAGSQSQVETEA

SEQ ID NO: 867216 - protein, 415 aa, Homo sapiens
MTAEEMKATESGAQSAPLPMEGVDISPKQDEGVLKVIKREGTGTEMPMIGDRVFVHYTGWLLDGTKFDSSLDRKDKFSFDLGKGEVIKAWDIAIATMKVGEVCHITCKPEYAYGSAGSPPKIPPNATLVFEVELFEFKGEDLTEEEDGGIIRRIQTRGEGYAKPNEGAIVEVALEGYYKDKLFDQRELRFEIGEGENLDLPYGLERAIQRMEKGEHSIVYLKPSYAFGSVGKEKFQIPPNAELKYELHLKSFEKAKESWEMNSEEKLEQSTIVKERGTVYFKEGKYKQALLQYKKIVSWLEYESSFSNEEAQKAQALRLASHLNLAMCHLKLQAFSAAIESCNKALELDSNNEKGLFRRGEAHLAVNDFELARADFQKVLQLYPNNKAAKTQLAVCQQRIRRQLAREKKLFSARC

SEQ ID NO: 867217 - protein, 358 aa, Homo sapiens
MTAEEMKATESGAQSAPLPMEGVDISPKQDEGVLKVIKREGTGTEMPMIGDRVFVHYTGWLLDGTKFDSSLDRKDKFSFDLGKGEVIKAWDIAIATMKVGEVCHITCKPEYAYGSAGSPPKIPPNATLVFEVELFEFKGEDLTEEEDGGIIRRIQTRGEGYAKPNEGAIVEVALEGYYKDKLFDQRELRFEIGEGENLDLPYGLERAIQRMEKGEHSIVYLKPSYAFGSVGKEKFQIPPNAELKYELHLKSFEKAKESWEMNSEEKLEQSTIVKERGTVYFKEGKYKQALLQYKKIVSWLEYESSFSNEEAQKAQALRLASHLNLAMCHLKLQAFSAAIESCNKALEQTRTHASQEHR

SEQ ID NO: 867218 - protein, 342 aa, Homo sapiens
MTAEEMKATESGAQSAPLPMEGVDISPKQDEGVLKVIKREGTGTEMPMIGDRVFVHYTGWLLDGTKFDSSLDRKDKFSFDLGKGEVIKAWDIAIATMKVGEVCHITCKPEYAYGSAGSPPKIPPNATLVFEVELFEFKGEDLTEEEDGGIIRRIQTRGEGYAKPNEGAIVEVALEGYYKDKLFDQRELRFEIGEGENLDLPYGLERAIQRMEKGEHSIVYLKPSYAFGSVGKEKFQIPPNAELKYELHLKSFEKAKESWEMNSEEKLEQSTIVKERGTVYFKEGKYKQALLQYKKIVSWLEYESSFSNEEAQKAQALRLASHLNLAMCHLKLQAFSAGYREL

SEQ ID NO: 867219 - protein, 313 aa, Homo sapiens
MTAEEMKATESGAQSAPLPMEGVDISPKQDEGVLKVIKREGTGTEMPMIGDRVFVHYTGWLLDGTKFDSSLDRKDKFSFDLGKGEVIKAWDIAIATMKVGEVCHITCKPEYAYGSAGSPPKIPPNATLVFEVELFEFKGEDLTEEEDGGIIRRIQTRGEGYAKPNEGAIVEVALEGYYKDKLFDQRELRFEIGEGENLDLPYGLERAIQRMEKGEHSIVYLKPSYAFGSVGKEKFQIPPNAELKYELHLKSFEKAKESWEMNSEEKLEQSTIVKERGTVYFKEGKYKQALLQYKKIVSWLEYESVITAWVHYF

SEQ ID NO: 867220 - protein, 112 aa, Homo sapiens
MTAEEMKATESGAQSAPLPMEGVDISPKQDEGVLKVIKREGTGTEMPMIGDRVFVHYTGWLLDGTKFDSSLDRKDKFSFDHPLFPVLVFPLSVSPLGQVVSQNPLSLFSARC

SEQ ID NO: 867221 - protein, 150 aa, Homo sapiens
MTAEEMKATESGAQSAPLPMEGVDISPKQDEGVLKIMGTSSVCSSGSPVACDFPFSLQRPAVFYEIVIQVIKREGTGTEMPMIGDRVFVHYTGWLLDGTKFDSSLDRKDKFSFDLGKGGEVIKAWDIAIATMKVGEVALCLWSSTDDSSR

SEQ ID NO: 867222 - protein, 271 aa, Homo sapiens
PSGAASRGPPRWWRCQGSPTRAVEHGPGRGATPHSAFLALRPLCDAGATGFRRPPGVPCRRRDPARSPLAARRPLPRPRGGRARGMPGAVVPSPLRRLPEPGLRGVGRGGGALLWSLPPSDRSTTNSLGSCGEGILTWARTTCLGSEQVPGRIRDGEFPACVLCLLPIRCCVLILAFPPLSSACAAPTSGGLYLVQKCICLCTRLLGTSSVCSSGSPVACDFPFSLQRPAVFYEIVIPGKLISPLIHHSFPFTFLLLKAPVYSSWKLSLGG

SEQ ID NO: 867223 - protein, 493 aa, Homo sapiens
MTAEEMKATESGAQSAPLPMEGVDISPKQDEGVLKIMGTSSVCSSGSPVACDFPFSLQRPAVFYEIVIQVIKREGTGTEMPMIGDRVFVHYTGWLLDGTKFDSSLDRKDKFSFDLGKGEVIKAWDIAIATMKVGEVCHITCKPEYAYGSAGSPPKIPPNATLVFEVELFEFKGEDLTEEEDGGIIRRIQTRGEGYAKPNEGAIVEVALEGYYKDKLFDQRELRFEIGEGENLDLPYGLERAIQRMEKGEHSIVYLKPSYAFGSVGKEKFQIPPNAELKYELHLKSFEKAKESWEMNSEEKLEQSTIVKERGTVYFKEGKYKQALLQYKKIVSWLEYESSFSNEEAQKAQALRLASHLNLAMCHLKLQAFSAAIESCNKALELDSNNEKGLFRRGEAHLAVNDFELARADFQKVLQLYPNNKAAKTQLAVCQQRIRRQLAREKKLYANMFERLAEEENKAKAEASSGDHPTDTEMKEEQKSNTAGSQSQVETEA

SEQ ID NO: 867224 - protein, 414 aa, Homo sapiens
MPMIGDRVFVHYTGWLLDGTKFDSSLDRKDKFSFDLGKGEVIKAWDIAIATMKVGEVCHITCKPEYAYGSAGSPPKIPPNATLVFEVELFEFKGEDLTEEEDGGIIRRIQTRGEGYAKPNEGAIVEVALEGYYKDKLFDQRELRFEIGEGENLDLPYGLERAIQRMEKGEHSIVYLKPSYAFGSVGKEKFQIPPNAELKYELHLKSFEKAKESWEMNSEEKLEQSTIVKERGTVYFKEGKYKQALLQYKKIVSWLEYESSFSNEEAQKAQALRLASHLNLAMCHLKLQAFSAAIESCNKALELDSNNEKGLFRRGEAHLAVNDFELARADFQKVLQLYPNNKAAKTQLAVCQQRIRRQLAREKKLYANMFERLAEEENKAKAEASSGDHPTDTEMKEEQKSNTAGSQSQVETEA

SEQ ID NO: 867225 - protein, 546 aa, Homo sapiens
MTAEEMKATESGAQSAPLPMEGVDISPKQDEGVLKVIKREGTGTEMPMIGDRVFVHYTGWLLDGTKFDSSLDRKDKFSFDLGKGEVIKAWDIAIATMKVGEVCHITCKPEYAYGSAGSPPKIPPNATLVFEVELFEFKGEDLTEEEDGGIIRRIQTRGEGYAKPNEGAIVEGETVQSGLSILILIFRPCVALGKTLPFSEPIFLSIKCGVGPYSLHITPDLRTQENLGMMGVMQGGLWHPSSVTCPLTTLVHCLSFMPVALEGYYKDKLFDQRELRFEIGEGENLDLPYGLERAIQRMEKGEHSIVYLKPSYAFGSVGKEKFQIPPNAELKYELHLKSFEKAKESWEMNSEEKLEQSTIVKERGTVYFKEGKYKQALLQYKKIVSWLEYESSFSNEEAQKAQALRLASHLNLAMCHLKLQAFSAAIESCNKALELDSNNEKGLFRRGEAHLAVNDFELARADFQKVLQLYPNNKAAKTQLAVCQQRIRRQLAREKKLYANMFERLAEEENKAKAEASSGDHPTDTEMKEEQKSNTAGSQSQVETEA

SEQ ID NO: 867226 - protein, 459 aa, Homo sapiens; identical to SEQ ID NO: 867201

SEQ ID NO: 867227 - protein, 290 aa, Homo sapiens [sequence omitted]

SEQ ID NO: 867228 - protein, 446 aa, Homo sapiens
MTAEEMKATESGAQSAPLPMEGVDISPKQDEGVLKVIKREGTGTEMPMIGDRVFVHYTGWLLDGTKFDSSLDRKDKFSFDLGKGEVIKAWDIAIATMKVGEVCHITCKPEYAYGSAGSPPKIPPNATLVFEVELFEFKGEDLTEEEDGGIIRRIQTRGEGYAKPNEGAIVEVALEGYYKDKLFDQRELRFEIGEGENLDLPYGLERAIQRMEKGEHSIVYLKPSYAFGSVGKEKFQIPPNAELKYELHLKSFEKAKESWEMNSEEKLEQSTIVKERGTVYFKEGKYKQALLQYKKIVSWLEYESSFSNEEAQKAQALRLASHLNLAMCHLKLQAFSAAIESCNKALELDSNNEKGLFRRGEAHLAVNDFELARADFQKVLQLYPNNKAAKTQLAVCQQRIRRQLAREKKLYANMFERLAEEENKAKAEASSLEKLDSYSSQDTIFL

SEQ ID NO: 867229 - protein, 382 aa, Homo sapiens
MTAEEMKATESGAQSAPLPMEGVDISPKQDEGVLKVIKREGTGTEMPMIGDRVFVHYTGWLLDGTKFDSSLDRKDKFSFDLGKGEVIKAWDIAIATMKVGEVCHITCKPEYAYGSAGSPPKIPPNATLVFEVELFEFKGEDLTEEEDGGIIRRIQTRGEGYAKPNEGAIVEVALEGYYKDKLFDQRELRFEIGEGENLDLPYGLERAIQRMEKGEHSIVYLKPSYAFGSVGKEKFQIPPNAELKYELHLKSFEKAKESWEMNSEEKLEQSTIVKERGTVYFKEGKYKQALLQYKKIVSWLEYESSFSNEEAQKAQALRLASHLNLAMCHLKLQAFSAAIESCNKALELDSNNEKGLFRRGEAHLAVNDFELARADFQKVLRT

SEQ ID NO: 867230 - protein, 314 aa, Homo sapiens
MTAEEMKATESGAQSAPLPMEGVDISPKQDEGVLKVIKREGTGTEMPMIGDRVFVHYTGWLLDGTKFDSSLDRKDKFSFDLGKGEVIKAWDIAIATMKVGEVCHITCKPEYAYGSAGSPPKIPPNATLVFEVELFEFKGEDLTEEEDGGIIRRIQTRGEGYAKPNEGAIVEVALEGYYKDKLFDQRELRFEIGEGENLDLPYGLERAIQRMEKGEHSIVYLKPSYAFGSVGKEKFQIPPNAELKYELHLKSFEKAKESWEMNSEEKLEQSTIVKERGTVYFKEGKYKQALLQYKKIVSWLEYESVLTAWGSSRS

SEQ ID NO: 867231 - protein, 312 aa, Homo sapiens
MTAEEMKATESGAQSAPLPMEGVDISPKQDEGVLKVIKREGTGTEMPMIGDRVFVHYTGWLLDGTKFDSSLDRKDKFSFDLGKGEVIKAWDIAIATMKVGEVCHITCKPEYAYGSAGSPPKIPPNATLVFEVELFEFKGEDLTEEEDGGIIRRIQTRGEGYAKPNEGAIVEVALEGYYKDKLFDQRELRFEIGEGENLDLPYGLERAIQRMEKGEHSIVYLKPSYAFGSVGKEKFQIPPNAELKYELHLKSFEKAKESWEMNSEEKLEQSTIVKERGTVYFKEGKYKQALLQYKKIVSWLEYESIVFPRGAH

SEQ ID NO: 867232 - protein, 112 aa, Homo sapiens; identical to SEQ ID NO: 867220

SEQ ID NO: 867233 - protein, 99 aa, Homo sapiens
RVTAVQGMPKALPPPPALSAPCLTLPRLSQVLHCTGQVKVYNNCPPHNSLCGYKEPLLSCLIIMCEPIQHPSHMDIPLDSKTFLSRHSMDMKFTYCDDR

SEQ ID NO: 867234 - protein, 870 aa, Homo sapiens
MTADKEKKRSSSERRKEKSRDAARCRRSKETEVFYELAHELPLPHSVSSHLDKASIMRLAISFLRTHKLLSSVCSENESEAEADQQMDNLYLKALEGFIAVVTQDGDMIFLSENISKFMGLTQVELTGHSIFDFTHPCDHEEIRENLSLKNGSGFGKKSKDMSTERDFFMRMKCTVTNRGRTVNLKSATWKVLHCTGQVKVYNNCPPHNSLCGYKEPLLSCLIIMCEPIQHPSHMDIPLDSKTFLSRHSMDMKFTYCDDRITELIGYHPEELLGRSAYEFYHALDSENMTKSHQNLCTKGQVVSGQYRMLAKHGGYVWLETQGTVIYNPRNLQPQCIMCVNYVLSEIEKNDVVFSMDQTESLFKPHLMAMNSIFDSSGKGAVSEKSNFLFTKLKEEPEELAQLAPTPGDAIISLDFGNQNFEESSAYGKAILPPSQPWATELRSHSTQSEAGSLPAFTVPQAAAPGSTTPSATSSSSSCSTPNSPEDYYTSLDNDLKIEVIEKLFAMDTEAKDQCSTQTDFNELDLETLAPYIPMDGEDFQLSPICPEERLLAENPQSTPQHCFSAMTNIFQPLAPVAPHSPFLLDKFQQQLESKKTEPEHRPMSSIFFDAGSKASLPPCCGQASTPLSSMGGRSNTQWPPDPPLHFGPTKWAVGDQRTEFLGAAPLGPPVSPPHVSTFKTRSAKGFGARGPDVLSPAMVALSNKLKLKRQLEYEEQAFQDLSGGDPPGGSTSHLMWKRMKNLRGGSCPLMPDKPLSANVPNDKFTQNPMRGLGHPLRHLPLPQPPSAISPGENSKSRFPPQCYATQYQDYSLSSAHKVSGMASRLLGPSFESYLLPELTRYDCEVNVPVLGSSTLLQGGDLLRALDQAT

SEQ ID NO: 867235 - protein, 870 aa, Homo sapiens; identical to SEQ ID NO: 867234

SEQ ID NO: 867236 - protein, 768 aa, Homo sapiens
MTADKEKKRSSSERRKEKSRDAARCRRSKETEVFYELAHELPLPHSVSSHLDKASIMRLAISFLRTHKLLSSVCSENESEAEADQQMDNLYLKALEGFIAVVTQDGDMIFLSENISKFMGLTQVELTGHSIFDFTHPCDHEEIRENLSLKNGSGFGKKSKDMSTERDFFMRMKCTVTNRGRTVNLKSATWKVLHCTGQVKVYNNCPPHNSLCGYKEPLLSCLIIMCEPIQHPSHMDIPLDSKTFLSRHSMDMKFTYCDDRITELIGYHPEELLGRSAYEFYHALDSENMTKSHQNLCTKGQVVSGQYRMLAKHGGYVWLETQGTVIYNPRNLQPQCIMCVNYVLSEIEKNDVVFSMDQTESLFKPHLMAMNSIFDSSGKGAVSEKSNFLFTKLKEEPEELAQLAPTPGDAIISLDFGNQNFEESSAYGKAILPPSQPWATELRSHSTQSEAGSLPAFTVPQAAAPGSTTPSATSSSSSCSTPNSPEDYYTSLDNDLKIEVIEKLFAMDTEAKDQCSTQTDFNELDLETLAPYIPMDGEDFQLSPICPEERLLAENPQSTPQHCFSAMTNIFQPLAPVAPHSPFLLDKFQQQLESKKTEPEHRPMSSIFFDAGSKASLPPCCGQASTPLSSMGGRSNTQWPPDPPLHFGPTKWAVGDQRTEFLGAAPLGPPVSPPHVSTFKTRSAKGFGARGPDVLSPAMVALSNKLKLKRQLEYEEQAFQDLSGGDPPGGSTSHLMWKRMKNLRGGSCPLMPDKPLSANVPNADKFTQ

SEQ ID NO: 867237 - protein, 366 aa, Homo sapiens
MTADKEKKRSSSERRKEKSRDAARCRRSKETEVFYELAHELPLPHSVSSHLDKASIMRLAISFLRTHKLLSSVCSENESEAEADQQMDNLYLKALEGFIAVVTQDGDMIFLSENISKFMGLTQVELTGHSIFDFTHPCDHEEIRENLSLKNGSGFGKKSKDMSTERDFFMRMKCTVTNRGRTVNLKSATWKVLHCTGQVKVYNNCPPHNSLCGYKEPLLSCLIIMCEPIQHPSHMDIPLDSKTFLSRHSMDMKFTYCDDRITELIGYHPEELLGRSAYEFYHALDSENMTKSHQNLCTKGQVVSGQYRMLAKHGGYVWLETQGTVIYNPRNLQPQCIMCVNYVLSEVSPSLPQLHGALSCNFFLPY

SEQ ID NO: 867238 - protein, 234 aa, Homo sapiens
MTADKEKKRSSSERRKEKSRDAARCRRSKETEVFYELAHELPLPHSVSSHLDKASIMRLAISFLRTHKLLSSVCSENESEAEADQQMDNLYLKALEGFIAVVTQDGDMIFLSENISKFMGLTQVELTGHSIFDFTHPCDHEEIRENLSLKNGILNCVYFLLAPTGWESASPLSTGIREIAHGPCDAGKMDVLNTQKYLLLALHGAWCPTTRGHLWVRTLSLGGFITQESSISAK

SEQ ID NO: 867239 - protein, 103 aa, Homo sapiens
VSNPRLFLKLPHTCAAARTSRFPLSWVSAPHLRQWFWRQTRSPGMQQAVGQTPLKEQSEIRAALLVSPSHKEVDTFPNVRFRPLSYGTNPSFRHGKPAARALI

SEQ ID NO: 867240 - protein, 38 aa, Homo sapiens
MTADKEKKRDTIEESRRLPYCKVSTLVSRQERRKIRGY

SEQ ID NO: 867241 - protein, 809 aa, Homo sapiens
MTADKEKKRSSSERRKEKSRDAARCRRSKETEVFYELAHELPLPHSVSSHLDKASIMRLAISFLRTHKLLSSVCSENESEAEADQQMDNLYLKALEGFIAVVTQDGDMIFLSENISKFMGLTQVELTGHSIFDFTHPCDHEEIRENLSLKNGSGFGKKSKDMSTERDFFMRMKCTVTNRGRTVNLKSATWKVLHCTGQVKVYNNCPPHNSLCGYKEPLLSCLIIMCEPIQHPSHMDIPLDSKTFLSRHSMDMKFTYCDDRITELIGYHPEELLGRSAYEFYHALDSENMTKSHQNLCTKGQVVSGQYRMLAKHGGYVWLETQGTVIYNPRNLQPQCIMCVNYVLSEIEKNDVVFSMDQTESLFKPHLMAMNSIFDSSGKGAVSEKSNFLFTKLKEEPEELAQLAPTPGDAIISLDFGNQNFEESSAYGKAILPPSQPWATELRSHSTQSEAGSLPAFTVPQAAAPGSTTPSATSSSSSCSTPNSPEDYYTSLDNDLKIEVIEKLFAMDTEAKDQCSTQTDFNELDLETLAPYIPMDGEDFQLSPICPEERLLAENPQSTPQHCFSAMTNIFQPLAPVAPHSPFLLDKFQQQLESKKTEPEHRPMSSIFFDAGSKASLPPCCGQASTPLSSMGGRSNTQWPPDPPLHFGPTKWAVGDQRTEFLGAAPLGPPVSPPHVSTFKTRSAKGFGARGPDVLSPAMVALSNKLKLKRQLEYEEQAFQDLSGGDPPGGSTSHLMWKRMKNLRGGSCPLMPDKPLSANVPNASICHQSRGEQQEQVPPTVLRHPVPGLQPVVSPQGVRHGKPAARALI

SEQ ID NO: 867242 - protein, 735 aa, Homo sapiens
MTADKEKKRSSSERRKEKSRDAARCRRSKETEVFYELAHELPLPHSVSSHLDKASIMRLAISFLRTHKLLSSVCSENESEAEADQQMDNLYLKALEGFIAVVTQDGDMIFLSENISKFMGLTQVELTGHSIFDFTHPCDHEEIRENLSLKNGSGFGKKSKDMSTERDFFMRMKCTVTNRGRTVNLKSATWKVLHCTGQVKVYNNCPPHNSLCGYKEPLLSCLIIMCEPIQHPSHMDIPLDSKTFLSRHSMDMKFTYCDDRITELIGYHPEELLGRSAYEFYHALDSENMTKSHQNLCTKGQVVSGQYRMLAKHGGYVWLETQGTVIYNPRNLQPQCIMCVNYVLSEIEKNDVVFSMDQTESLFKPHLMAMNSIFDSSGKGAVSEKSNFLFTKLKEEPEELAQLAPTPGDAIISLDFGNQNFEESSAYGKAILPPSQPWATELRSHSTQSEAGSLPAFTVPQAAAPGSTTPSATSSSSSCSTPNSPEDYYTSLDNDLKIEVIEKLFAMDTEAKDQCSTQTDFNELDLETLAPYIPMDGEDFQLSPICPEERLLAENPQSTPQHCFSAMTNIFQPLAPVAPHSPFLLDKFQQQLESKKTEPEHRPMSSILSAKGFGARGPDVLSPAMVALSNKLKLKRQLEYEEQAFQDLSGGDPPGGSTSHLMWKRMKNLRGGSCPLMPDKPLSANVPNASICHQSRGEQQEQVPPTVLRHPVPGLQPVVSPQGVRHGKPAARALI

SEQ ID NO: 867243 - protein, 172 aa, Homo sapiens
MLGTPYKLKLKRQLEYEEQAFQDLSGGDPPGGSTSHLMWKRMKNLRGGSCPLMPDKPLSANVPNDKFTQNPMRGLGHPLRHLPLPQPPSAISPGENSKSRFPPQCYATQYQDYSLSSAHKVSGMASRLLGPSFESYLLPELTRYDCEVNVPVLGSSTLLQGGDLLRALDQAT

SEQ ID NO: 867244 - protein, 206 aa, Homo sapiens
MTADKEKKRSSSERRKEKSRDAARCRRSKETEVFYELAHELPLPHSVSSHLDKASIMRLAISFLRTHKLLSSVCSENESEAEADQQMDNLYLKALEGFIAVVTQDGDMIFLSENISKFMGLTQVELTGHSIFDFTHPCDHEEIRENLSLKNGILNCVYFLLAPTGWESASPLSTGIREIAHGPCDAGKMDVLKKFKYVACEMRLGH

SEQ ID NO: 867245 - protein, 136 aa, Homo sapiens
MTADKEKKRSSSERRKEKSRDAARCRRSKETEVFYELAHELPLPHSVSSHLDKASIMRLAISFLRTHKLLSSAVTFTVNPAVRGGQGQDQGRTWAPRGCGEHGLGEPRTAFADFSICCHLAIRPILHTRLSPQEAF

SEQ ID NO: 867246 - protein, 56 aa, Homo sapiens
PTRKFAYLGRLAHEVGWKYQAVTATLEEKRKEKAKIHYRKKKQLMRLRKQAEKNME

SEQ ID NO: 867247 - protein, 43 aa, Homo sapiens
MVGWKYQAVTATLEEKRKEKAKIHYRKKKQLMRLRKQAEKNME

SEQ ID NO: 867248 - protein, 107 aa, Homo sapiens
MEADASVDMFSKVLEHQLLQTTKLVEEHLDSEIQKLDQMDEDELERLKEKRLQALRKAQQQKQEWLSKGHGEYREIPSERDFFQEVKESEHMWFAISTETPHSGVKY

SEQ ID NO: 867249 - protein, 70 aa, Homo sapiens
GHSTIRTARENPEWTVSLVNTACFLIERISRVDDLKYGLETILKAIVNSCDPSVGQAHGRCLECNTARIE

SEQ ID NO: 867250 - protein, 107 aa, Homo sapiens
MEADASVDMFSKVLEHQLLQTTKLVEEHLDSEIQKLDQMDEDELERLKEKRLQALRKAQQQKQEWLSKGHGEYREIPSERDFFQEVKESEHMWFAISTETPHSALHI

SEQ ID NO: 867251 - protein, 126 aa, Homo sapiens
MEADASVDMFSKVLEHQLLQTTKLVEEHLDSEIQKLDQMDEDELERLKEKRLQALRKAQQQKQEWLSKGHGEYREIPSERDFFQEVKESEHMWFAISTETPHSETTSGICPEHSDLLSDVALPFEV

SEQ ID NO: 867252 - protein, 107 aa, Homo sapiens; identical to SEQ ID NO: 867248

SEQ ID NO: 867253 - protein, 107 aa, Homo sapiens; identical to SEQ ID NO: 867248

SEQ ID NO: 867254 - protein, 107 aa, Homo sapiens; identical to SEQ ID NO: 867248

SEQ ID NO: 867255 - protein, 107 aa, Homo sapiens; identical to SEQ ID NO: 867248

SEQ ID NO: 867256 - protein, 107 aa, Homo sapiens; identical to SEQ ID NO: 867248

SEQ ID NO: 867257 - protein, 154 aa, Homo sapiens
MEADASVDMFSKVLEHQLLQTTKLVEEHLDSEIQKLDQMDEDELERLKEKRLQALRKAQQQKQMESRCDTLAGVQWCHLNSLQPPLPGFKQLFCLSHPSSWDYRRTPPCLEWLSKGHGEYREIPSERDFFQEVKESEHMWFAISTETPHSGVKY

SEQ ID NO: 867258 - protein, 106 aa, Homo sapiens
MEADASVDMFSKVLEHQLLQTTKLVEEHLDSEIQKLDQMDEDELERLKEKRLQALRKAQQQKQEWLSKGHGEYREIPSERDFFQEVKESEHMWFAISTETPHSVEI

SEQ ID NO: 867259 - protein, 162 aa, Homo sapiens
MEADASVDMFSKVLEHQLLQTTKLVEEHLDSEIQKLDQMDEDELERLKEKRLQALRKAQQQKQRMGFLKDIGGRIHEGKIPQVNRDFFFNGKGFPNGGNSQVGTQHLVLWAQLSFPFLNPDSGRPNRGGKYTSSFIPPPQQNHTISRHPNGAGALAVFLHSP

SEQ ID NO: 867260 - protein, 488 aa, Homo sapiens
MVLQKEPAGAVIWGFGTPGATVTVTLRQGQETIMKKVTSVKAHSDTWMVVLDPMKPGGPFEVMAQQTLEKINFTLRVHDVLFGDVWLCSGQSNMQMTVLQIFNATRELSNTAAYQSVRILSVSPIQAEQELEDLVAVDLQWSKPTSENLGHGYFKYMSAVCWLFGRHLYDTLQYPIGLIASSWGGTPIEAWSSGRSLKACGVPKQGSIPYDSVTGPSKHSVLWNAMIHPLCNMTLKGVVWYQGESNINYNTDLYNCTFPALIEDWRETFHRGSQGQTERFFPFGLVQLSSDLSKKSSDDGFPQIRWHQTADFGYVPNPKMPNTFMAVAMDLCDRDSPFGSIHPRDKQTVAYRLHLGARALAYGEKNLTFEGPLPEKIELLAHKGLLNLTYYQQIQVQKKDNKIFEISCCSDHRCKWLPASMNTVSTQSLTLAIDSCHGTVVALRYAWTTWPCEYKQCPLYHPSSALPAPPFIAFITDQGPGHQSNVAK

SEQ ID NO: 867261 - protein, 577 aa, Homo sapiens
KTTAAEKGRVQPSPEVAGGCEDCKRVESASPPPRPRPCREPTFPVLGGGQILASMVAPGLVLGLVLPLILWADRSAGIGFRFASYINNDMVLQKEPAGAVIWGFGTPGATVTVTLRQGQETIMKKVTSVKAHSDTWMVVLDPMKPGGPFEVMAQQTLEKINFTLRVHDVLFGDVWLCSGQSNMQMTVLQIFNATRELSNTAAYQSVRILSVSPIQAEQELEDLVAVDLQWSKPTSENLGHGYFKYMSAVCWLFGRHLYDTLQYPIGLIASSWGGTPIEAWSSGRSLKACGVPKQGSIPYDSVTGPSKHSVLWNAMIHPLCNMTLKGVVWYQGESNINYNTDLYNCTFPALIEDWRETFHRGSQGQTERFFPFGLVQLSSDLSKKSSDDGFPQIRWHQTADFGYVPNPKMPNTFMAVAMDLCDRDSPFGSIHPRDKQTVAYRLHLGARALAYGEKNLTFEGPLPEKIELLAHKGLLNLTYYQQIQVQKKDNKIFEISCCSDHRCKWLPASMNTVSTQSLTLAIDSCHGTVVALRYAWTTWPCEYKQCPLYHPSSALPAPPFIAFITDQGPGHQSNVAK

SEQ ID NO: 867262 - protein, 577 aa, Homo sapiens; identical to SEQ ID NO: 867261

SEQ ID NO: 867263 - protein, 488 aa, Homo sapiens; identical to SEQ ID NO: 867260

SEQ ID NO: 867264 - protein, 748 aa, Homo sapiens
SRILRTKPVESMLEGTGTTTAHGTKLAQVLTTVDLISLGVGSCVGTGMYVVSGLVAKEMAGPGVIVSFIIAAVASILSGVCYAEFGVRVPKTTGSAYTYSYVTVGEFVAFFIGWNLILEYLIGTAAGASALSSMFDSLANHTISRWMADSVGTLNGLGKGEESYPDLLALLIAVIVTIIVALGVKNSIGFNNVLNVLNLAVWVFIMIAGLFFINGKYWAEGQFLPHGWSGVLQGAATCFYAFIGFDIIATTGEEAKNPNTSIPYAITASLVICLTAYVSVSVILTLMVPYYTIDTESPLMEMFVAHGFYAAKFVVAIGSVAGLTVSLLGSLFPMPRVIYAMAGDGLLFRFLAHVSSYTETPVVACIVSGFLAALLALLVSLRDLIEMMSIGTLLAYTLVSVCVLLLRYQPESDIDGFVKFLSEEHTKKKEGILADCEKEACSPVSEGDEFSGPATNTCGAKNLPSLGDNEMLIGKSDKSTYNVNHPNYGTVDMTTGIEADESENIYLIKLKKLIGPHYYTMRIRLGLPGKMDRPTAATGHTVTICVLLLFILMFIFCSFIIFGSDYISEQSWWAILLVVLMVLLISTLVFVILQQPENPKKLPYMAPCLPFVPAFAMLVNIYLMLKLSTITWIRFAVWCFVGLLIYFGYGIWNSTLEISAREEALHQSTYQRYDVDDPFSVEEGFSYATEGESQEDWGGPTEDKGFYYQQMSDAKANGRTSSKAKSKSKHKQNSEALIANDELDYSPE

SEQ ID NO: 867265 - protein, 748 aa, Homo sapiens; identical to SEQ ID NO: 867264

SEQ ID NO: 867266 - protein, 70 aa, Homo sapiens
QRLILERILQLQAKERQELPASTRSWDRRPGQSLPQILQKEATLQHLTETQHFFLFQMERIHQSGMSSYL

SEQ ID NO: 867267 - protein, 518 aa, Homo sapiens
MWRLPGARAALRVIRTAVEKLSRAEAGSQTAAGAMERAVVRCVPSEPKLSLSFALADGSHKNMQRDQSEPLGRVLSRIATNALKGHAKAAAAKKSRKSRPNASGGAACSGPGPEPAVFCEPVVKLYYREEAVAEDVLNVDAWQDGAVLQIGDVKYKVERNPPAFTELQLPRYIMAGFPVCPKLSLEFGDPASSLFRWYKEAKPGAAEPEVGVPSSLSPSSPSSSWTETDVEERVYTPSNADIGLRLKLHCTPGDGQRFGHSRELESVCVVEAGPGTCTFDHRHLYTKKVTEDALIRTVSYNILADTYAQTEFSRTVLYPYCAPYALELDYRQNLIQKELTGYNADVICLQEVDRAVFSDSLVPALEAFGLEGVFRIKQHEGLATFYRKSKFSLLSQHDISFYEALESDPLHKELLEKLVLYPSAQEKVLQRSSVLQVSVLQSTKDSSKRICVANTHLYWHPKGGYIRLIQMAVALAHIRHVSCDLYPGIPVIFCGDFNSTPSTGMFHFVINGSIPRGS

SEQ ID NO: 867268 - protein, 518 aa, Homo sapiens; identical to SEQ ID NO: 867267

SEQ ID NO: 867269 - protein, 518 aa, Homo sapiens; identical to SEQ ID NO: 867267

SEQ ID NO: 867270 - protein, 518 aa, Homo sapiens; identical to SEQ ID NO: 867267

SEQ ID NO: 867271 - protein, 472 aa, Homo sapiens
MWRLPGARAALRVIRTAVEKLSRAEAGSQTAAGAMERAVVRCVPSEPKLSLSFALADGSHKNMQRDQSEPLGRVLSRIATNALKGHAKAAAAKKSRKSRPNASGGAACSGPGPEPAVFCEPVVKLYYREEAVAEDVLNVDAWQDGAVLQIGDVKYKVERNPPAFTELQLPRYIMAGFPVCPKLSLEFGDPASSLFRWLRLKLHCTPGDGQRFGHSRELESVCVVEAGPGTCTFDHRHLYTKKVTEDALIRTVSYNILADTYAQTEFSRTVLYPYCAPYALELDYRQNLIQKELTGYNADVICLQEVDRAVFSDSLVPALEAFGLEGVFRIKQHEGLATFYRKSKFSLLSQHDISFYEALESDPLHKELLEKLVLYPSAQEKVLQRSSVLQVSVLQSTKDSSKRICVANTHLYWHPKGGYIRLIQMAVALAHIRHVSCDLYPGIPVIFCGDFNSTPSTGMFHFVINGSIPRGS

SEQ ID NO: 867272 - protein, 518 aa, Homo sapiens; identical to SEQ ID NO: 867267

SEQ ID NO: 867273 - protein, 779 aa, Homo sapiens
MTHTRRKSLPMLSSGLTGRREPLQMEDSNMEQGVEGVEPGMPESPGHLTGRRKNYPLRKRPLVPEKPKACKVLLTRLENVAGPRSADEADELPPDLPKPPSPAPSSEDPGLAQPRKRRLASLNAEALNNLLLEREDTSSLAGTRRSRAGDPHRSRDRDRATGGWSSSKKRPRLGDLGGGSRDLSPEPAPDEGPRRDGDPAPKRLASLNAAAFLKLSQERELPLRLPRAHAEVDGRSTEPPAPKAPRPKWPKVNGKNYPKAWQGASSGEAAGPPGWQGCPDEPWPSATPCGPSVQPSHKPLSKALESPLGLRPHLPLLMGGQAALKPEPGRPGEESPAPKQELHQPSFPTPQLSPLPMPGNPADYNGLCVGPELTALGSFYLYCGQEGLQCGGYSPCPMLPEGKLSPVAAPHEEGLLLAPSSVPSGTPFQHPPWGSSRYCSSEDTGVNGYSICGVLPLSVTHAGTTCGGCPYKMPFAAGCRSLGQLEFPLPEAGHPASPAHPLLGCPVPSVPPAAEPVPHLQTPTSEPQTVARACPQSAKPPSGSKSGLRTGSSCRHTARSKAARRPSHPKQPRVQRPRPRRRRRRRTNGWVPVGAACEKAVYVLDEPEPAIRKSYQAVERHGETIRVRDTVLLKSGPRKTSTPYVAKISALWENPESGELMMSLLWYYRPEHLQGGRSPSMHEPLQNEVFASRHQDQNSVACIEEKCYVLTFAEYCRFCAMAKRRGEGLPSRKTALVPPSADYSTPPHRTVPEDTDPELVFLCRHVYDFRHGRILKNPQ

SEQ ID NO: 867274 - protein, 560 aa, Homo sapiens
RPGPAGAQSRAVRAARSGWKYSMTHTRRKSLPMLSSGLTGRREPLQMEDSNMEQGVEGVEPGMPESPGHLTGRRKNYPLRKRPLVPEKPKACKVLLTRLENVAGPRSADEADELPPDLPKPPSPAPSSEDPGLAQPRKRRLASLNAEALNNLLLEREDTSSLAGTRRSRAGDPHRSRDRDRATGGWSSSKKRPRLGDLGGGSRDLSPEPAPDEGPRRDGDPAPKRLASLNAAAFLKLSQERELPLRLPRAHAEVDGRSTEPPAPKAPRPKWPKVNGKNYPKAWQGASSGEAAGPPGWQGCPDEPWPSATPCGPSVQPSHKPLSKALESPLGLRPHLPLLMGGQAALKPEPGRPGEESPAPKQELHQPSFPTPQLSPLPMPGNPADYNGLCVGPELTALGSFYLYCGQEGLQCGGYSPCPMLPEGKLSPVAAPHEEGLLLAPSSVPSGTPFQHPPWGSSRYCSSEDTGVNGYSICGVLPLSVTHAGTTCGGCPYKMPFAAGCRSLGQLEFPLPEAGHPASPAHPLLGCPVPSVPPAAEPVPHLLILNKLFGGRCLSGRMGQ

SEQ ID NO: 867275 - protein, 43 aa, Homo sapiens
MTHTRRKSLPMLSSGLTGRREPLQMEDSNMEQGVEGVEPGMPE

SEQ ID NO: 867276 - protein, 801 aa, Homo sapiens
RPGPAGAQSRAVRAARSGWKYSMTHTRRKSLPMLSSGLTGRREPLQMEDSNMEQGVEGVEPGMPESPGHLTGRRKNYPLRKRPLVPEKPKACKVLLTRLENVAGPRSADEADELPPDLPKPPSPAPSSEDPGLAQPRKRRLASLNAEALNNLLLEREDTSSLAGTRRSRAGDPHRSRDRDRATGGWSSSKKRPRLGDLGGGSRDLSPEPAPDEGPRRDGDPAPKRLASLNAAAFLKLSQERELPLRLPRAHAEVDGRSTEPPAPKAPRPKWPKVNGKNYPKAWQGASSGEAAGPPGWQGCPDEPWPSATPCGPSVQPSHKPLSKALESPLGLRPHLPLLMGGQAALKPEPGRPGEESPAPKQELHQPSFPTPQLSPLPMPGNPADYNGLCVGPELTALGSFYLYCGQEGLQCGGYSPCPMLPEGKLSPVAAPHEEGLLLAPSSVPSGTPFQHPPWGSSRYCSSEDTGVNGYSICGVLPLSVTHAGTTCGGCPYKMPFAAGCRSLGQLEFPLPEAGHPASPAHPLLGCPVPSVPPAAEPVPHLQTPTSEPQTVARACPQSAKPPSGSKSGLRTGSSCRHTARSKAARRPSHPKQPRVQRPRPRRRRRRRTNGWVPVGAACEKAVYVLDEPEPAIRKSYQAVERHGETIRVRDTVLLKSGPRKTSTPYVAKISALWENPESGELMMSLLWYYRPEHLQGGRSPSMHEPLQNEVFASRHQDQNSVACIEEKCYVLTFAEYCRFCAMAKRRGEGLPSRKTALVPPSADYSTPPHRTVPEDTDPELVFLCRHVYDFRHGRILKNPQ

SEQ ID NO: 867277 - protein, 801 aa, Homo sapiens; identical to SEQ ID NO: 867276

SEQ ID NO: 867278 - protein, 558 aa, Homo sapiens
SLECSSYSMPRIPASPLSCCPPDMLGPCMLLLLLLLGLRLQLSLGIIPVEEENPDFWNREAAEALGAAKKLQPAQTAAKNLIIFLGDGMGVSTVTAARILKGQKKDKLGPEIPLAMDRFPYVALSKTYNVDKHVPDSGATATAYLCGVKGNFQTIGLSAAARFNQCNTTRGNEVISVMNRAKKAGKSVGVVTTTRVQHASPAGTYAHTVNRNWYSDADVPASARQEGCQDIATQLISNMDIDVILGGGRKYMFRMGTPDPEYPDDYSQGGTRLDGKNLVQEWLAKRQGARYVWNRTELMQASLDPSVTHLMGLFEPGDMKYEIHRDSTLDPSLMEMTEAALRLLSRNPRGFFLFVEGGRIDHGHHESRAYRALTETIMFDDAIERAGQLTSEEDTLSLVTADHSHVFSFGGYPLRGSSIFGLAPGKARDRKAYTVLLYGNGPGYVLKDGARPDVTESESGSPEYRQQSAVPLDEETHAGEDVAVFARGPQAHLVHGVQEQTFIAHVMAFAACLEPYTACDLAPPAGTTDAAHPGRSVVPALLPLLAGTLLLLETATAP

SEQ ID NO: 867279 - protein, 516 aa, Homo sapiens
MLSPWPVEEENPDFWNREAAEALGAAKKLQPAQTAAKNLIIFLGDGMGVSTVTAARILKGQKKDKLGPEIPLAMDRFPYVALSKTYNVDKHVPDSGATATAYLCGVKGNFQTIGLSAAARFNQCNTTRGNEVISVMNRAKKAGKSVGVVTTTRVQHASPAGTYAHTVNRNWYSDADVPASARQEGCQDIATQLISNMDIDVILGGGRKYMFRMGTPDPEYPDDYSQGGTRLDGKNLVQEWLAKRQGARYVWNRTELMQASLDPSVTHLMGLFEPGDMKYEIHRDSTLDPSLMEMTEAALRLLSRNPRGFFLFVEGGRIDHGHHESRAYRALTETIMFDDAIERAGQLTSEEDTLSLVTADHSHVFSFGGYPLRGSSIFGLAPGKARDRKAYTVLLYGNGPGYVLKDGARPDVTESESGSPEYRQQSAVPLDEETHAGEDVAVFARGPQAHLVHGVQEQTFIAHVMAFAACLEPYTACDLAPPAGTTDAAHPGRSVVPALLPLLAGTLLLLETATAP

SEQ ID NO: 867280 - protein, 443 aa, Homo sapiens
PEKSSECLCPQTYNVDKHVPDSGATATAYLCGVKGNFQTIGLSAAARFNQCNTTRGNEVISVMNRAKKAGKSVGVVTTTRVQHASPAGTYAHTVNRNWYSDADVPASARQEGCQDIATQLISNMDIDVILGGGRKYMFRMGTPDPEYPDDYSQGGTRLDGKNLVQEWLAKRQGARYVWNRTELMQASLDPSVTHLMGLFEPGDMKYEIHRDSTLDPSLMEMTEAALRLLSRNPRGFFLFVEGGRIDHGHHESRAYRALTETIMFDDAIERAGQLTSEEDTLSLVTADHSHVFSFGGYPLRGSSIFGLAPGKARDRKAYTVLLYGNGPGYVLKDGARPDVTESESGSPEYRQQSAVPLDEETHAGEDVAVFARGPQAHLVHGVQEQTFIAHVMAFAACLEPYTACDLAPPAGTTDAAHPGRSVVPALLPLLAGTLLLLETATAP

SEQ ID NO: 867281 - protein, 243 aa, Homo sapiens
VPIRRRLWHRDSTLDPSLMEMTEAALRLLSRNPRGFFLFVEGGRIDHGHHESRAYRALTETIMFDDAIERAGQLTSEEDTLSLVTADHSHVFSFGGYPLRGSSIFGLAPGKARDRKAYTVLLYGNGPGYVLKDGARPDVTESESGSPEYRQQSAVPLDEETHAGEDVAVFARGPQAHLVHGVQEQTFIAHVMAFAACLEPYTACDLAPPAGTTDAAHPGRSVVPALLPLLAGTLLLLETATAP

SEQ ID NO: 867282 - protein, 467 aa, Homo sapiens
SLECSSYSMPRIPASPLSCCPPDMLGPCMLLLLLLLGLRLQLSLGIIPVEEENPDFWNREAAEALGAAKKLQPAQTAAKNLIIFLGDGMGVSTVTAARILKGQKKDKLGPEIPLAMDRFPYVALSKTYNVDKHVPDSGATATAYLCGVKGNFQTIGLSAAARFNQCNTTRGNEVISVMNRAKKAGKSVGVVTTTRVQHASPAGTYAHTVNRNWYSDADVPASARQEGCQDIATQLISNMDIDVILGGGRKYMFRMGTPDPEYPDDYSQGGTRLDGKNLVQEWLAKRQGARYVWNRTELMQASLDPSVTHLMGLFEPGDMKYEIHRDSTLDPSLMEMTEAALRLLSRNPRGFFLFVEGGRIDHGHHESRAYRALTETIMFDDAIERAGQLTSEEDTLSLVTADHSHVFSFGGYPLRGSSIFGLAPGKARDRKAYTVLLYGNGPGYVLKDGARPDVTESESGECRGVAP

SEQ ID NO: 867283 - protein, 558 aa, Homo sapiens; identical to SEQ ID NO: 867278

SEQ ID NO: 867284 - protein, 428 aa, Homo sapiens
RRTKLRPPYQFAAYLCGVKGNFQTIGLSAAARFNQCNTTRGNEVISVMNRAKKAGKSVGVVTTTRVQHASPAGTYAHTVNRNWYSDADVPASARQEGCQDIATQLISNMDIDVILGGGRKYMFRMGTPDPEYPDDYSQGGTRLDGKNLVQEWLAKRQGARYVWNRTELMQASLDPSVTHLMGLFEPGDMKYEIHRDSTLDPSLMEMTEAALRLLSRNPRGFFLFVEGGRIDHGHHESRAYRALTETIMFDDAIERAGQLTSEEDTLSLVTADHSHVFSFGGYPLRGSSIFGLAPGKARDRKAYTVLLYGNGPGYVLKDGARPDVTESESGSPEYRQQSAVPLDEETHAGEDVAVFARGPQAHLVHGVQEQTFIAHVMAFAACLEPYTACDLAPPAGTTDAAHPGRSVVPALLPLLAGTLLLLETATAP

SEQ ID NO: 867285 - protein, 558 aa, Homo sapiens; identical to SEQ ID NO: 867278

SEQ ID NO: 867286 - protein, 94 aa, Homo sapiens
RGNEVISVMNRAKKAGELGPAAGSRPGHRRWSHILTSDTLGKSVGVVTTTRVQHASPAGTYAHTVNRNWYSDADVPASARQEGCQDIATQLISN

SEQ ID NO: 867287 - protein, 69 aa, Homo sapiens
LKAQLTPRLFWSCLEWALHPMTGVLIRRERQRVDRHKGEGRVKMETEIGMIQPQAKKHLRPSEVGRGKE

SEQ ID NO: 867288 - protein, 185 aa, Homo sapiens
MRRGPWASLPGRRRRWPSTPTSARAASSPRRRCLAPRGTQCTRRAPTLYPLRCTTTITTTPTCTPRRPWRRRRRTAVDREKQPSEGAFSENNAENESGGDKPPIDPNNPAANWLHARSTRKKRCPYTKHQTLELEKEFLFNMYLTRDRRYEVARLLNLTERQVKIWFQNRRMKMKKINKDRAKDE

SEQ ID NO: 867289 - protein, 159 aa, Homo sapiens
FLGQEKGLQAWTCRLANGLDFGLLSVSSAAARSRLSFLPSFPCLPFLFYLFFLFFFFPLLLPAFFSSVGLFFIFRLCQILSHLLISFPKHPWGGAQSWLQESLGGLTFLCGSSRGWEVCRGRARVGRLPRAVGLGLVCYSADKASVMITTGWRQPCVSS

SEQ ID NO: 867290 - protein, 272 aa, Homo sapiens
MATTGALGNYYVDSFLLGADAADELSVGRYAPGTLGQPPRQAATLAEHPDFSPCSFQSKATVFGASWNPVHAAGANAVPAAVYHHHHHHPYVHPQAPVAAAAPDGRYMRSWLEPTPGALSFAGLPSSRPYGIKPEPLSARRGDCPTLDTHTLSLTDYACGSPPVDREKQPSEGAFSENNAENESGGDKPPIDPNNPAANWLHARSTRKKRCPYTKHQTLELEKEFLFNMYLTRDRRYEVARLLNLTERQVKIWFQNRRMKMKKINKDRAKDE

SEQ ID NO: 867291 - protein, 185 aa, Homo sapiens; identical to SEQ ID NO: 867288

SEQ ID NO: 867292 - protein, 93 aa, Homo sapiens
VRLLLLNPVFLFPADNPAANWLHARSTRKKRCPYTKHQTLELEKEFLFNMYLTRDRRYEVARLLNLTERQVKIWFQNRRMKMKKINKDRAKDE

SEQ ID NO: 867293 - protein, 272 aa, Homo sapiens; identical to SEQ ID NO: 867290

SEQ ID NO: 867294 - protein, 241 aa, Homo sapiens
  misc_feature (75)..(79): Xaa can be any naturally occurring amino acid
  misc_feature (83)..(84): Xaa can be any naturally occurring amino acid
  misc_feature (88)..(91): Xaa can be any naturally occurring amino acid
  misc_feature (96)..(97): Xaa can be any naturally occurring amino acid
  misc_feature (101)..(101): Xaa can be any naturally occurring amino acid
  misc_feature (114)..(114): Xaa can be any naturally occurring amino acid
  misc_feature (117)..(117): Xaa can be any naturally occurring amino acid
  misc_feature (130)..(131): Xaa can be any naturally occurring amino acid
  misc_feature (134)..(134): Xaa can be any naturally occurring amino acid
  misc_feature (138)..(138): Xaa can be any naturally occurring amino acid
  misc_feature (141)..(141): Xaa can be any naturally occurring amino acid
  misc_feature (145)..(145): Xaa can be any naturally occurring amino acid
  misc_feature (169)..(169): Xaa can be any naturally occurring amino acid
  misc_feature (171)..(171): Xaa can be any naturally occurring amino acid
  misc_feature (181)..(181): Xaa can be any naturally occurring amino acid
  misc_feature (190)..(191): Xaa can be any naturally occurring amino acid
  misc_feature (195)..(195): Xaa can be any naturally occurring amino acid
  misc_feature (199)..(199): Xaa can be any naturally occurring amino acid
  misc_feature (205)..(205): Xaa can be any naturally occurring amino acid
  misc_feature (216)..(216): Xaa can be any naturally occurring amino acid
  misc_feature (219)..(219): Xaa can be any naturally occurring amino acid
  misc_feature (221)..(221): Xaa can be any naturally occurring amino acid
MATTGALGNYYVDSFLLGADAADELSVGRYAPGTLGQPPRQAATLAEHPDFSPCSFQSKATVFGASWNPVHAAGXXXXXAGGXXLARXXXXGRVGXXPRGXARGGRGGGAGGGXGWXVVGGGGVGGGGRXXGGXGAWXGGXGGGXERVGGGARARKGGDLVRSGCEQLXNXWSRDLRLVAXVGVSLPGVXXEEKXQTPXRKGRRXASGKEQSGVEXSEXGXAGVTKARPQSESPEYSPKAG

SEQ ID NO: 867295 - protein, 73 aa, Homo sapiens
TGGRRLPRGWAGPGQARWQGSLLGGGGSGGGGGGGGRGSPSRAAPELVGDLGSFLLLGSTFLSTARHCLHYFS

SEQ ID NO: 867296 - protein, 131 aa, Homo sapiens
RHLFKYYLDGRNLSGPYSPGAEVDREKQPSEGAFSENNAENESGGDKPPIDPNNPAANWLHARSTRKKRCPYTKHQTLELEKEFLFNMYLTRDRRYEVARLLNLTERQVKIWFQNRRMKMKKINKDRAKDE

SEQ ID NO: 867297 - protein, 236 aa, Homo sapiens
MATTGALGNYYVDSFLLGADAADELSVGRYAPGTLGQPPRQAATLAEHPDFSPCSFQSKATVFGASWNPVHAAGANAVPAAVYHHHHHHPYVHPQAPVAAAAPDGRYMRSWLEPTPGALSFAGLPSSRPYGIKPEPLSARRGDCPTLDTHTLSLTDYACGSPPVDREKQPSEGAFSENNAENESGGDKPPIDPSKCLLPSNPPPPPRRPPGSAGPPGFSRACLRPRWKPLELGPGA

SEQ ID NO: 867298 - protein, 128 aa, Homo sapiens
MEHSEGAPGDPAGTVVPQELLEEMLWFFRVEDASPWNHSILALAAVVVIISMVLLGRSIQASRKEKMQPPEKETPEVLHLDEAKDHNSLNNLRETLLSEKPNLAQVELELKERDVLSVFLPDVPETES

SEQ ID NO: 867299 - protein, 123 aa, Homo sapiens
MEHSEGAPGDPAGTVVPQELLEEMLWFFRVEDASPWNHSILALAAVVVIISMVLLGRSIQASRKEKMQPPEKETPEVLHLDEAKDHNSLNNLRETLLSEKPNLAQVELEASEGSEKPHPKPDT

SEQ ID NO: 867300 - protein, 712 aa, Homo sapiens
MSQWYELQQLDSKFLEQVHQLYDDSFPMEIRQYLAQWLEKQDWEHAANDVSFATIRFHDLLSQLDDQYSRFSLENNFLLQHNIRKSKRNLQDNFQEDPIQMSMIIYSCLKEERKILENAQRFNQAQSGNIQSTVMLDKQKELDSKVRNVKDKVMCIEHEIKSLEDLQDEYDFKCKTLQNREHETNGVAKSDQKQEQLLLKKMYLMLDNKRKEVVHKIIELLNVTELTQNALINDELVEWKRRQQSACIGGPPNACLDQLQNWFTIVAESLQQVRQQLKKLEELEQKYTYEHDPITKNKQVLWDRTFSLFQQLIQSSFVVERQPCMPTHPQRPLVLKTGVQFTVKLRLLVKLQELNYNLKVKVLFDKDVNERNTVKGFRKFNILGTHTKVMNMEESTNGSLAAEFRHLQLKEQKNAGTRTNEGPLIVTEELHSLSFETQLCQPGLVIDLETTSLPVVVISNVSQLPSGWASILWYNMLVAEPRNLSFFLTPPCARWAQLSEVLSWQFSSVTKRGLNVDQLNMLGEKLLGPNASPDGLIPWTRFCKENINDKNFPFWLWIESILELIKKHLLPLWNDGCIMGFISKERERALLKDQQPGTFLLRFSESSREGAITFTWVERSQNGGEPDFHAVEPYTKKELSAVTFPDIIRNYKVMAAENIPENPLKYLYPNIDKDHAFGKYYSRPKEAPEPMELDGPKGTGYIKTELISVSEV

SEQ ID NO: 867301 - protein, 754 aa, Homo sapiens
MSQWYELQQLDSKFLEQVHQLYDDSFPMEIRQYLAQWLEKQDWEHAANDVSFATIRFHDLLSQLDDQYSRFSLENNFLLQHNIRKSKRNLQDNFQEDPIQMSMIIYSCLKEERKILENAQRFNQAQSGNIQSTVMLDKQKELDSKVRNVKDKVMCIEHEIKSLEDLQDEYDFKCKTLQNREHETNGVAKSDQKQEQLLLKKMYLMLDNKRKEVVHKIIELLNVTELTQNALINDELVEWKRRQQSACIGGPPNACLDQLQNWFTIVAESLQQVRQQLKKLEELEQKYTYEHDPITKNKQVLWDRTFSLFQQLIQSSFVVERQPCMPTHPQRPLVLKTGVQFTVKLRLLVKLQELNYNLKVKVLFDKSDIFNIIEHTCTIEFRKFNILGTHTKVMNMEESTNGSLAAEFRHLQLKEQKNAGTRTNEGPLIVTEELHSLSFETQLCQPGLVIDLETTSLPVVVISNVSQLPSGWASILWYNMLVAEPRNLSFFLTPPCARWAQLSEVLSWQFSSVTKRGLNVDQLNMLGEKLLGPNASPDGLIPWTRFCKENINDKNFPFWLWIESILELIKKHLLPLWNDGCIMGFISKERERALLKDQQPGTFLLRFSESSREGAITFTWVERSQNGGEPDFHAVEPYTKKELSAVTFPDIIRNYKVMAAENIPENPLKYLYPNIDKDHAFGKYYSRPKEAPEPMELDGPKGTGYIKTELISVSEVHPSRLQTTDNLLPMSPEEFDEVSRIVGSVEFDSMMNTV

SEQ ID NO: 867302 - protein, 616 aa, Homo sapiens
MLDKQKELDSKVRNVKDKVMCIEHEIKSLEDLQDEYDFKCKTLQNREHETNGVAKSDQKQEQLLLKKMYLMLDNKRKEVVHKIIELLNVTELTQNALINDELVEWKRRQQSACIGGPPNACLDQLQNWFTIVAESLQQVRQQLKKLEELEQKYTYEHDPITKNKQVLWDRTFSLFQQLIQSSFVVERQPCMPTHPQRPLVLKTGVQFTVKLRLLVKLQELNYNLKVKVLFDKDVNERNTVKGFRKFNILGTHTKVMNMEESTNGSLAAEFRHLQLKEQKNAGTRTNEGPLIVTEELHSLSFETQLCQPGLVIDLETTSLPVVVISNVSQLPSGWASILWYNMLVAEPRNLSFFLTPPCARWAQLSEVLSWQFSSVTKRGLNVDQLNMLGEKLLGPNASPDGLIPWTRFCKENINDKNFPFWLWIESILELIKKHLLPLWNDGCIMGFISKERERALLKDQQPGTFLLRFSESSREGAITFTWVERSQNGGEPDFHAVEPYTKKELSAVTFPDIIRNYKVMAAENIPENPLKYLYPNIDKDHAFGKYYSRPKEAPEPMELDGPKGTGYIKTELISVSEVHPSRLQTTDNLLPMSPEEFDEVSRIVGSVEFDSMMNTV

SEQ ID NO: 867303 - protein, 750 aa, Homo sapiens
MSQWYELQQLDSKFLEQVHQLYDDSFPMEIRQYLAQWLEKQDWEHAANDVSFATIRFHDLLSQLDDQYSRFSLENNFLLQHNIRKSKRNLQDNFQEDPIQMSMIIYSCLKEERKILENAQRFNQAQSGNIQSTVMLDKQKELDSKVRNVKDKVMCIEHEIKSLEDLQDEYDFKCKTLQNREHETNGVAKSDQKQEQLLLKKMYLMLDNKRKEVVHKIIELLNVTELTQNALINDELVEWKRRQQSACIGGPPNACLDQLQNWFTIVAESLQQVRQQLKKLEELEQKYTYEHDPITKNKQVLWDRTFSLFQQLIQSSFVVERQPCMPTHPQRPLVLKTGVQFTVKLRLLVKLQELNYNLKVKVLFDKDVNERNTVKGFRKFNILGTHTKVMNMEESTNGSLAAEFRHLQLKEQKNAGTRTNEGPLIVTEELHSLSFETQLCQPGLVIDLETTSLPVVVISNVSQLPSGWASILWYNMLVAEPRNLSFFLTPPCARWAQLSEVLSWQFSSVTKRGLNVDQLNMLGEKLLGPNASPDGLIPWTRFCKENINDKNFPFWLWIESILELIKKHLLPLWNDGCIMGFISKERERALLKDQQPGTFLLRFSESSREGAITFTWVERSQNGGEPDFHAVEPYTKKELSAVTFPDIIRNYKVMAAENIPENPLKYLYPNIDKDHAFGKYYSRPKEAPEPMELDGPKGTGYIKTELISVSEVHPSRLQTTDNLLPMSPEEFDEVSRIVGSVEFDSMMNTV

SEQ ID NO: 867304 - protein, 643 aa, Homo sapiens
YTHITQPKYKQQRKKDSAQSGNIQSTVMLDKQKELDSKVRNVKDKVMCIEHEIKSLEDLQDEYDFKCKTLQNREHETNGVAKSDQKQEQLLLKKMYLMLDNKRKEVVHKIIELLNVTELTQNALINDELVEWKRRQQSACIGGPPNACLDQLQNWFTIVAESLQQVRQQLKKLEELEQKYTYEHDPITKNKQVLWDRTFSLFQQLIQSSFVVERQPCMPTHPQRPLVLKTGVQFTVKLRLLVKLQELNYNLKVKVLFDKDVNERNTVKGFRKFNILGTHTKVMNMEESTNGSLAAEFRHLQLKEQKNAGTRTNEGPLIVTEELHSLSFETQLCQPGLVIDLETTSLPVVVISNVSQLPSGWASILWYNMLVAEPRNLSFFLTPPCARWAQLSEVLSWQFSSVTKRGLNVDQLNMLGEKLLGPNASPDGLIPWTRFCKENINDKNFPFWLWIESILELIKKHLLPLWNDGCIMGFISKERERALLKDQQPGTFLLRFSESSREGAITFTWVERSQNGGEPDFHAVEPYTKKELSAVTFPDIIRNYKVMAAENIPENPLKYLYPNIDKDHAFGKYYSRPKEAPEPMELDGPKGTGYIKTELISVSEVHPSRLQTTDNLLPMSPEEFDEVSRIVGSVEFDSMMNTV

SEQ ID NO: 867305 - protein, 750 aa, Homo sapiens; identical to SEQ ID NO: 867303

SEQ ID NO: 867306 - protein, 750 aa, Homo sapiens; identical to SEQ ID NO: 867303

SEQ ID NO: 867307 - protein, 732 aa, Homo sapiens
MSQWYELQQLDSKFLEQVHQLYDDSFPMEIRQYLAQWLEKQDWEHAANDVSFATIRFHDLLSQLDDQYSRFSLENNFLLQHNIRKSKRNLQDNFQEDPIQMSMIIYSCLKEERKILENAQRFNQAQSGNIQSTVMLDKQKELDSKVRNVKDKVMCIEHEIKSLEDLQDEYDFKCKTLQNREHETNGVAKSDQKQEQLLLKKMYLMLDNKRKEVVHKIIELLNVTELTQNALINDELVEWKRRQQSACIGGPPNACLDQLQNWFTIVAESLQQVRQQLKKLEELEQKYTYEHDPITKNKQVLWDRTFSLFQQLIQSSFVVERQPCMPTHPQRPLVLKTGVQFTVKLRLLVKLQELNYNLKVKVLFDKDVNERNTVKGFRKFNILGTHTKVMNMEESTNGSLAAEFRHLQLKEQKNAGTRTNEGPLIVTEELHSLSFETQLCQPGLVIDLETTSLPVVVISNVSQLPSGWASILWYNMLVAEPRNLSFFLTPPCARWAQLSEVLSWQFSSVTKRGLNVDQLNMLGEKLLGPNASPDGLIPWTRFCKENINDKNFPFWLWIESILELIKERERALLKDQQPGTFLLRFSESSREGAITFTWVERSQNGGEPDFHAVEPYTKKELSAVTFPDIIRNYKVMAAENIPENPLKYLYPNIDKDHAFGKYYSRPKEAPEPMELDGPKGTGYIKTELISVSEVHPSRLQTTDNLLPMSPEEFDEVSRIVGSVEFDSMMNTV

SEQ ID NO: 867308 - protein, 750 aa, Homo sapiens; identical to SEQ ID NO: 867303

SEQ ID NO: 867309 - protein, 750 aa, Homo sapiens; identical to SEQ ID NO: 867303

SEQ ID NO: 867310 - protein, 750 aa, Homo sapiens; identical to SEQ ID NO: 867303

SEQ ID NO: 867311 - protein, 149 aa, Homo sapiens
MEIMIELKAHPSISSISRCIMGFISKERERALLKDQQPGTFLLRFSESSREGAITFTWVERSQNGGGEWEFEHIVHHSMCVKSLFIAASQLIQIVRLGHEIADLILTPNEPPIGFNKPPQMFVVVVHSLEHIVEMMVLDVSQCNLQPVL

SEQ ID NO: 867312 - protein, 77 aa, Homo sapiens
SAAPGGSRLADPRPSRGDPARSGEAAPPRPRLALPDPARRVSGREVPGAGGGTRRDRVLGPCSWTPGEDGPSVLTRE

SEQ ID NO: 867313 - protein, 750 aa, Homo sapiens; identical to SEQ ID NO: 867303

SEQ ID NO: 867314 - protein, 750 aa, Homo sapiens; identical to SEQ ID NO: 867303

SEQ ID NO: 867315 - protein, 704 aa, Homo sapiens
  misc_feature (31)..(31): Xaa can be any naturally occurring amino acid
  misc_feature (40)..(40): Xaa can be any naturally occurring amino acid
  misc_feature (43)..(44): Xaa can be any naturally occurring amino acid
  misc_feature (47)..(48): Xaa can be any naturally occurring amino acid
  misc_feature (52)..(52): Xaa can be any naturally occurring amino acid
  misc_feature (56)..(57): Xaa can be any naturally occurring amino acid
  misc_feature (59)..(60): Xaa can be any naturally occurring amino acid
  misc_feature (65)..(65): Xaa can be any naturally occurring amino acid
  misc_feature (68)..(68): Xaa can be any naturally occurring amino acid
  misc_feature (70)..(70): Xaa can be any naturally occurring amino acid
  misc_feature (75)..(75): Xaa can be any naturally occurring amino acid
  misc_feature (81)..(81): Xaa can be any naturally occurring amino acid
  misc_feature (83)..(83): Xaa can be any naturally occurring amino acid
  misc_feature (88)..(89): Xaa can be any naturally occurring amino acid
KQRLVRPDSGSFLPPVTAGCPYSRLSLENNXSAPAPPRPXPPXXRLXXGPPXPLAXXPXXRPTAXRPXPXPAPPXPPAPPXPXPPPRXXRPTRQRPPRPVRNVKDKVMCIEHEIKSLEDLQDEYDFKCKTLQNREHETNGVAKSDQKQEQLLLKKMYLMLDNKRKEVVHKIIELLNVTELTQNALINDELVEWKRRQQSACIGGPPNACLDQLQNWFTIVAESLQQVRQQLKKLEELEQKYTYEHDPITKNKQVLWDRTFSLFQQLIQSSFVVERQPCMPTHPQRPLVLKTGVQFTVKLRLLVKLQELNYNLKVKVLFDKDVNERNTVKGFRKFNILGTHTKVMNMEESTNGSLAAEFRHLQLKEQKNAGTRTNEGPLIVTEELHSLSFETQLCQPGLVIDLETTSLPVVVISNVSQLPSGWASILWYNMLVAEPRNLSFFLTPPCARWAQLSEVLSWQFSSVTKRGLNVDQLNMLGEKLLGPNASPDGLIPWTRFCKENINDKNFPFWLWIESILELIKKHLLPLWNDGCIMGFISKERERALLKDQQPGTFLLRFSESSREGAITFTWVERSQNGGEPDFHAVEPYTKKELSAVTFPDIIRNYKVMAAENIPENPLKYLYPNIDKDHAFGKYYSRPKEAPEPMELDGPKGTGYIKTELISVSEVHPSRLQTTDNLLPMSPEEFDEVSRIVGSVEFDSMMNTV

SEQ ID NO: 867316 - protein, 562 aa, Homo sapiens
  misc_feature (1)..(1): Xaa can be any naturally occurring amino acid
XTLERPPPTPRKKMYLMLDNKRKEVVHKIIELLNVTELTQNALINDELVEWKRRQQSACIGGPPNACLDQLQNWFTIVAESLQQVRQQLKKLEELEQKYTYEHDPITKNKQVLWDRTFSLFQQLIQSSFVVERQPCMPTHPQRPLVLKTGVQFTVKLRLLVKLQELNYNLKVKVLFDKDVNERNTVKGFRKFNILGTHTKVMNMEESTNGSLAAEFRHLQLKEQKNAGTRTNEGPLIVTEELHSLSFETQLCQPGLVIDLETTSLPVVVISNVSQLPSGWASILWYNMLVAEPRNLSFFLTPPCARWAQLSEVLSWQFSSVTKRGLNVDQLNMLGEKLLGPNASPDGLIPWTRFCKENINDKNFPFWLWIESILELIKKHLLPLWNDGCIMGFISKERERALLKDQQPGTFLLRFSESSREGAITFTWVERSQNGGEPDFHAVEPYTKKELSAVTFPDIIRNYKVMAAENIPENPLKYLYPNIDKDHAFGKYYSRPKEAPEPMELDGPKGTGYIKTELISVSEVHPSRLQTTDNLLPMSPEEFDEVSRIVGSVEFDSMMNTV

SEQ ID NO: 867317 - protein, 308 aa, Homo sapiens
KVFVILETTSLPVVVISNVSQLPSGWASILWYNMLVAEPRNLSFFLTPPCARWAQLSEVLSWQFSSVTKRGLNVDQLNMLGEKLLGPNASPDGLIPWTRFCKENINDKNFPFWLWIESILELIKKHLLPLWNDGCIMGFISKERERALLKDQQPGTFLLRFSESSREGAITFTWVERSQNGGEPDFHAVEPYTKKELSAVTFPDIIRNYKVMAAENIPENPLKYLYPNIDKDHAFGKYYSRPKEAPEPMELDGPKGTGYIKTELISVSEVHPSRLQTTDNLLPMSPEEFDEVSRIVGSVEFDSMMNTV

SEQ ID NO: 867318 - protein, 750 aa, Homo sapiens; identical to SEQ ID NO: 867303

SEQ ID NO: 867319 - protein, 750 aa, Homo sapiens; identical to SEQ ID NO: 867303

SEQ ID NO: 867320 - protein, 750 aa, Homo sapiens; identical to SEQ ID NO: 867303

SEQ ID NO: 867321 - protein, 657 aa, Homo sapiens
MSQWYELQQLDSKFLEQVHQLYDDSFPMEIRQYLAQWLEKQDWEHAANDVSFATIRFHDLLSQLDDQYSRFSLENNFLLQHNIRKSKRNLQDNFQEDPIQMSMIIYSCLKEERKILENAQRFNQAQSGNIQSTVMLDKQKELDSKVRNVKDKVMCIEHEIKSLEDLQDEYDFKCKTLQNREHETNGVAKSDQKQEQLLLKKMYLMLDNKRKEVVHKIIELLNVTELTQNALINDELVEWKRRQQSACIGGPPNACLDQLQNWFTIVAESLQQVRQQLKKLEELEQKYTYEHDPITKNKQVLWDRTFSLFQQLIQSSFVVERQPCMPTHPQRPLVLKTGVQFTVKLRLLVKLQELNYNLKVKVLFDKDVNERNTVKGFRKFNILGTHTKVMNMEESTNGSLAAEFRHLQLKEQKNAGTRTNEGPLIVTEELHSLSFETQLCQPGLVIDLETTSLPVVVISNVSQLPSGWASILWYNMLVAEPRNLSFFLTPPCARWAQLSEVLSWQFSSVTKRGLNVDQLNMLGEKLLGPNASPDGLIPWTRFCKENINDKNFPFWLWIESILELIKKHLLPLWNDGCIMGFISKERERALLKDQQPGTFLLRFSESSREGAITFTWVERSQNGGGEWEFEHIVPPFHVCEVPLHRRQSAHTDSAFGT

SEQ ID NO: 867322 - protein, 293 aa, Homo sapiens
MSQWYELQQLDSKFLEQVHQLYDDSFPMEIRQYLAQWLEKQDWEHAANDVSFATIRFHDLLSQLDDQYSRFSLENNFLLQHNIRKSKRNLQDNFQEDPIQMSMIIYSCLKEERKILENAQRFNQAQSGNIQSTVMLDKQKELDSKVRNVKDKVMCIEHEIKSLEDLQDEYDFKCKTLQNREHETNGVAKSDQKQEQLLLKKIVFLPFSFLITDTKSRLRDGFDKVLPFYILLSMWLYLVFPLLLPQLYYHANAVFFFGGDKDFLSFVLKLKLKYLYCIKYNMHTVLSVALHTI

SEQ ID NO: 867323 - protein, 109 aa, Homo sapiens [sequence omitted]

SEQ ID NO: 867324 - protein, 131 aa, Homo sapiens
MGASLCLTQLLLLLGKGGLGQASIPLVKTPAGHQAFWTRTHTHTHTHTHTKLHSRPAAVTCHQESPQLRPPPILSYEKPLLWGRRLEKVGCGGQEGPCRAGGWVWLSRCFPEGSAGIRGSCGRERAPASWL

SEQ ID NO: 867325 - protein, 131 aa, Homo sapiens; identical to SEQ ID NO: 867324

SEQ ID NO: 867326 - protein, 449 aa, Homo sapiens
MASGTASRSEDEESLAGQKRASSQALGTIPKRRSSSRFIKRKKFDDELVESSLAKSSTRAKGASGVEPGRCSGSEPSSSEKKKVSKAPSTPVPPSPAPAPGLTKRVKKSKQPLQVTKDLGRWKPADDLLLINAVLQTNDLTSVHLGVKFSCRFTLREVQERWYALLYDPVISKLACQAMRQLHPEAIAAIQSKALFSKAEEQLLSKVGSTSQPTLETFQDLLHRHPDAFYLARTAKALQAHWQLMKQYYLLEDQTVQPLPKGDQVLNFSDAEDLIDDSKLKDMRDEVLEHELMVADRRQKREIRQLEQELHKWQVLVDSITGMSSPDFDNQTLAVLRGRMVRYLMRSREITLGRATKDNQIDVDLSLEGPAWKISRKQGVIKLKNNGDFFIANEGRRPIYIDGRPVLCGSKWRLSNNSVVEIASLRFVFLINQDLIALIRAEAAKITPQ

SEQ ID NO: 867327 - protein, 462 aa, Homo sapiens
MDKDSQGLLDSSLMASGTASRSEDEESLAGQKRASSQALGTIPKRRSSSRFIKRKKFDDELVESSLAKSSTRAKGASGVEPGRCSGSEPSSSEKKKVSKAPSTPVPPSPAPAPGLTKRVKKSKQPLQVTKDLGRWKPADDLLLINAVLQTNDLTSVHLGVKFSCRFTLREVQERWYALLYDPVISKLACQAMRQLHPEAIAAIQSKALFSKAEEQLLSKVGSTSQPTLETFQDLLHRHPDAFYLARTAKALQAHWQLMKQYYLLEDQTVQPLPKGDQVLNFSDAEDLIDDSKLKDMRDEVLEHELMVADRRQKREIRQLEQELHKWQVLVDSITGMSSPDFDNQTLAVLRGRMVRYLMRSREITLGRATKDNQIDVDLSLEGPAWKISRKQGVIKLKNNGDFFIANEGRRPIYIDGRPVLCGSKWRLSNNSVVEIASLRFVFLINQDLIALIRAEAAKITPQ

SEQ ID NO: 867328 - protein, 327 aa, Homo sapiens
MDKDSQGLLDSSLMASGTASRSEDEESLAGQKRASSQALGTIPKRRSSSRFIKRKKFDDELVESSLAKSSTRAKGASGVEPGRCSGSEPSSSEKKKVSKAPSTPVPPSPAPAPGLTKRVKKSKQPLQVTKDLGRWKPADDLLLINAVLQTNDLTSVHLGVKFSCRFTLREVQERWYALLYDPVISKLACQAMRQLHPEAIAAIQSKALFSKAEEQLLSKVGSTSQPTLETFQDLLHRHPDAFYLARTAKALQAHWQLMKQYYLLEDQTVQPLPKGDQVLNFSDAEDLIDDSKLKSPWAEQPRITRLMWTCLWRVRPGRYPGNKVSSS

SEQ ID NO: 867329 - protein, 462 aa, Homo sapiens; identical to SEQ ID NO: 867327

SEQ ID NO: 867330 - protein, 462 aa, Homo sapiens; identical to SEQ ID NO: 867327

SEQ ID NO: 867331 - protein, 462 aa, Homo sapiens; identical to SEQ ID NO: 867327

SEQ ID NO: 867332 - protein, 496 aa, Homo sapiens
LVREPEVDVPHDPRKPALALRLLPSPRRNCWIWQSRNDSQGLLDSSLMASGTASRSEDEESLAGQKRASSQALGTIPKRRSSSRFIKRKKFDDELVESSLAKSSTRAKGASGVEPGRCSGSEPSSSEKKKVSKAPSTPVPPSPAPAPGLTKRVKKSKQPLQVTKDLGRWKPADDLLLINAVLQTNDLTSVHLGVKFSCRFTLREVQERWYALLYDPVISKLACQAMRQLHPEAIAAIQSKALFSKAEEQLLSKVGSTSQPTLETFQDLLHRHPDAFYLARTAKALQAHWQLMKQYYLLEDQTVQPLPKGDQVLNFSDAEDLIDDSKLKDMRDEVLEHELMVADRRQKREIRQLEQELHKWQVLVDSITGMSSPDFDNQTLAVLRGRMVRYLMRSREITLGRATKDNQIDVDLSLEGPAWKISRKQGVIKLKNNGDFFIANEGRRPIYIDGRPVLCGSKWRLSNNSVVEIASLRFVFLINQDLIALIRAEAAKITPQ

SEQ ID NO: 867333 - protein, 358 aa, Homo sapiens
NFQPKGPGCLNTEQDVKNQGPLQVTKDLGRWKPADDLLLINAVLQTNDLTSVHLGVKFSCRFTLREVQERWYALLYDPVISKLACQAMRQLHPEAIAAIQSKALFSKAEEQLLSKVGSTSQPTLETFQDLLHRHPDAFYLARTAKALQAHWQLMKQYYLLEDQTVQPLPKGDQVLNFSDAEDLIDDSKLKDMRDEVLEHELMVADRRQKREIRQLEQELHKWQVLVDSITGMSSPDFDNQTLAVLRGRMVRYLMRSREITLGRATKDNQIDVDLSLEGPAWKISRKQGVIKLKNNGDFFIANEGRRPIYIDGRPVLCGSKWRLSNNSVVEIASLRFVFLINQDLIALIRAEAAKITPQ

SEQ ID NO: 867334 - protein, 97 aa, Homo sapiens
NQIIESLGFNVSGMINSPVAEDWPSFSVIKLKNNGDFFIANEGRRPIYIDGRPVLCGSKWRLSNNSVVEIASLRFVFLINQDLIALIRAEAAKITPQ

SEQ ID NO: 867335 - protein, 225 aa, Homo sapiens
MASGTASRSEDEESLAGQKRASSQALGTIPKRRSSSRFIKRKKFDDELVESSLAGSEPSSSEKKKVRNWETEGMGGSARFHVSPEPLPAAKSPAEQAGERTKLPQPSSQMPPSWEHTSPYSPFLAAAPTPNPAIASCITFRVGGMEHASILGADSLFPALQSVKITPRWHCCGPRHCTSKSDFPVSSPPNFHSGVGDTASKEKTPYGQGLYRSNLVGWGWVLETD

SEQ ID NO: 867336 - protein, 73 aa, Homo sapiens
LVREPEVDVPHDHGSRLWPCGCYRRRGEIVGSGSLGMVRPRGSPLRVLRGVGDEMEFCRVPPGTTTPQVWGPA

SEQ ID NO: 867337 - protein, 405 aa, Homo sapiens
MDKDSQGLLDSSLMASGTASRSEDEESLAGQKRASSQALGTIPKRRSSSRFIKRKKFDDELVESSLAKSSTRAKGASGVEPGRCSGSEPSSSEKKKVSKAPSTPVPPSPAPAPGLTKRVKKSKQPLQVTKDLGRWKPADDLLLINAVLQTNDLTSVHLGVKFSCRFTLREVQERWYALLYDPVISKLACQAMRQLHPEAIAAIQSKALFSKAEEQLLSKVGSTSQPTLETFQDLLHRHPDAFYLARTAKALQAHWQLMKQYYLLEDQTVQPLPKGDQVLNFSDAEDLIDDSKLKDMRDEVLEHELMVADRRQKREIRQLEQELHKWQVLVDSITGMSSPDFDNQTLAVLRGRMVRYLMRSREIPGQSTMYLMVVALSLEGRLEVSRNRVFSLNTRGSSWQWSRPF

SEQ ID NO: 867338 - protein, 449 aa, Homo sapiens; identical to SEQ ID NO: 867326

SEQ ID NO: 867339 - protein, 462 aa, Homo sapiens; identical to SEQ ID NO: 867327

SEQ ID NO: 867340 - protein, 460 aa, Homo sapiens
KDRLVEPGVSAEGLPCFVRAEKLLDLAGQKRASSQALGTIPKRRSSSRFIKRKKFDDELVESSLAKSSTRAKGASGVEPGRCSGSEPSSSEKKKVSKAPSTPVPPSPAPAPGLTKRVKKSKQPLQVTKDLGRWKPADDLLLINAVLQTNDLTSVHLGVKFSCRFTLREVQERWYALLYDPVISKLACQAMRQLHPEAIAAIQSKALFSKAEEQLLSKVGSTSQPTLETFQDLLHRHPDAFYLARTAKALQAHWQLMKQYYLLEDQTVQPLPKGDQVLNFSDAEDLIDDSKLKDMRDEVLEHELMVADRRQKREIRQLEQELHKWQVLVDSITGMSSPDFDNQTLAVLRGRMVRYLMRSREITLGRATKDNQIDVDLSLEGPAWKISRKQGVIKLKNNGDFFIANEGRRPIYIDGRPVLCGSKWRLSNNSVVEIASLRFVFLINQDLIALIRAEAAKITPQ

SEQ ID NO: 867341 - protein, 276 aa, Homo sapiens
MDKDSQGLLDSSLMASGTASRSEDEESLAGQKRASSQALGTIPKRRSSSRFIKRKKFDDELVESSLAKSSTRAKGASGVEPGRCSGSEPSSSEKKKVSKAPSTPVPPSPAPAPGLTKRVKKSKQPLQVTKDLGRWKPADDLLLINAVLQTNDLTSVHLGVKFSCRFTLREVQERWYALLYDPVISKWAVRHEAVGPRGIGGIQKKACLGGGEQVGQVDQTAGTWDFGPVGNRGLRRTEARPGLRVSRARLHGAVLGVFPVVVVRMDRFPRGAAALC

SEQ ID NO: 867342 - protein, 256 aa, Homo sapiens
MDKDSQGLLDSSLMASGTASRSEDEESLAGQKRASSQALGTIPKRRSSSRFIKRKKFDDELVESSLAKSSTRAKGASGVEPGRCSGSEPSSSEKKKVRNWETEGMGGSARFHVSPEPLPAAKSPAEQAGERTKLPQPSSQMPPSWEHTSPYSPFLAAAPTPNPAIASCITFRVGGMEHASILGADSLFPALQSVKITPRWHCCGPRHCTSKSDFPVSSPPNFHSGVGDTASKEKTPYGQGLYRSNLVGWGWVLETD

SEQ ID NO: 867343 - protein, 73 aa, Homo sapiens
  misc_feature (53)..(53): Xaa can be any naturally occurring amino acid
  misc_feature (59)..(59): Xaa can be any naturally occurring amino acid
  misc_feature (62)..(62): Xaa can be any naturally occurring amino acid
  misc_feature (68)..(68): Xaa can be any naturally occurring amino acid
MDKDSQGLLDSSLMASGTASRSEDEESLAGQKRASSQALGTIPKRRSSSSHQXEEFDDXLVXSSWHFXGRSAA

SEQ ID NO: 867344 - protein, 147 aa, Homo sapiens
SVETGYHHVTQAVLKLMSASHPPALISQSAGIVLAGATTPGLNAPLDGWPLSLAMAGSLCSSGTGGEMHSNNSDPIQLVLFRGKTYSWSSQQRQGHLVAAAAANMGRKQGAGEGRRSYFGRGCWADHPIRANGSPSLRMRNVILTSS

SEQ ID NO: 867345 - protein, 1319 aa, Homo sapiens
LPPELPSGPPGLPSPPLPEEALGTRSPGDGHNAPVEGPEGEYVELLEVTLPVRGSPTDAEGSPGLSRVRTVPTRKGAGGKGRHRRHRAWMHQKGLGPRGQDGARPPGEGSSTGASPESPPGAEAVPEAAVLEVSEPPAEAVGEASGSCPLRPGELRGGGGGGQGAEGPPGTPRRTGKGNRRKKRAAGRGALSRGGDSAPLSPGDKEDASHQEALGNLPSPSEHKLPECHLVKEEYEGSGKPESEPKELKTAGEKEPQLSEACGPTEEGAGERELEGPGLLCMAGHTGPEGPLSDTPTPPLETVQEGKGDNIPEEALAVSVSDHPDVAWDLMASGFLILTGGVDQSGRALLTITPPCPPEEPPPSRDTLNTTLHYLHSLLRPDLQTLGLSVLLDLRQAPPLPPALIPALSQLQDSGDPPLVQRLLILIHDDLPTELCGFQGAEVLSENDLKRVAKPEELQWELGGHRDPSPSHWVEIHQEVVRLCRLCQGVLGSVRQAIEELEGAAEPEEEEAVGMPKPLQKVLADPRLTALQRDGGAILMRLRSTPSSKLEGQGPATLYQEVDEAIHQLVRLSNLHVQQQEQRQCLRRLQQVLQWLSGPGEEQLASFAMPGDTLSALQETELRFRAFSAEVQERLAQAREALALEENATSQKVLDIFEQRLEQVESGLHRALRLQRFFQQAHEWVDEGFARLAGAGPGREAVLAALALRRAPEPSAGTFQEMRALALDLGSPAALREWGRCQARCQELERRIQQHVGEEASPRGYRRRRADGASSGGAQWGPRSPSPSLSSLLLPSSPGPRPAPSHCSLAPCGEDYEEEGPELAPEAEGRPPRAVLIRGLEVTSTEVVDRTCSPREHVLLGRARGPDGPWGVGTPRMERKRSISAQQRLVSELIACEQDYVATLSEPVPPPGPELTPELRGTWAAALSARERLRSFHRTHFLRELQGCATHPLRIGACFLRHGDQFSLYAQYVKHRHKLENGLAALSPSSKGSMEAGPYLPRALQQPLEQLTRYGRLLEELLREAGPELSSECRALGAAVQLLREQEARGRDLLAVEAVRGCEIDLKEQGQLLHRDPFTVICGRKKCLRHVFLFEHLLLFSKLKGPEGGSEMFVYKQAFKTADMGLTENIGDSGLCFELWFRRRRAREAYTLQATSPEIKLKWTSSIAQLLWRQAAHNKELRVQQMVSMGIGNKPFLDIKALGERTLSALLTGRAARTRASVAVSSFEHAGPSLPGLSPGACSLPARVEEEAWDLDVKQISLAPETLDSSGDVSPGPRNSPSLQPPHPGSSTPTLASRGILGLSRQSHARALSDPTTPL

SEQ ID NO: 867346 - protein, 1271 aa, Homo sapiens
LPPELPSGPPGLPSPPLPEEALGTRSPGDGHNAPVEGPEGEYVELLEVTLPVRGSPTDAEGSPGLSRVRTVPTRKGAGGKGRHRRHRAWMHQKGLGPRGQDGARPPGEGSSTGASPESPPGAEAVPEAAVLEVSEPPAEAVGEASGSCPLRPGELRGGGGGGQGAEGPPGTPRRTGKGNRRKKRAAGRGALSRGGDSAPLSPGDKEDASHQEALGNLPSPSEHKLPECHLVKEEYEGSGKPESEPKELKTAGEKEPQLSEACGPTEEGAGERELEGPGLLCMAGHTGPEGPLSDTPTPPLETVQEGKGDNIPEEALAVSVSDHPDVAWDLMASGFLILTGGVDQSGRALLTITPPCPPEEPPPSRDTLNTTLHYLHSLLRPDLQTLGLSVLLDLRQAPPLPPALIPALSQLQDSGDPPLVQRLLILIHDDLPTELCGFQGAEVLSENDLKRVAKPEELQWELGGHRDPSPSHWVEIHQEVVRLCRLCQGVLGSVRQAIEELEGAAEPEEEEAVGMPKPLQKVLADPRLTALQRDGGAILMRLRSTPSSKLEGQGPATLYQEVDEAIHQLVRLSNLHVQQQEQRQCLRRLQQVLQWLSGPGEEQLASFAMPGDTLSALQETELRFRAFSAEVQERLAQAREALALEENATSQKVLDIFEQRLEQVESGLHRALRLQRFFQQAHEWVDEGFARLAGAGPGREAVLAALALRRAPEPSAGTFQEMRALALDLGSPAALREWGRCQARCQELERRIQQHVGEEASPRGYRRRRADGASSGGAQWGPRSPSPSLSSLLLPSSPGPRPAPSHCSLAPCGEDYEEEGPELAPEAEGRPPRAVLIRGLEVTSTEVVDRTCSPREHVLLGRARGPDGPWGVGTPRMERKRSISAQQRLVSELIACEQDYVATLSEPVPPPGPELTPELRGTWAAALSARERLRSFHRTHFLRELQGCATHPLRIGACFLRHGDQFSLYAQYVKHRHKLENGLAALSPSSKGSMEAGPYLPRALQQPLEQLTRYGRLLEELLREAGPELSSECRALGAAVQLLREQEARGRDLLAVEAVRGCEIDLKEQGQLLHRDPFTVICGRKKCLRHVFLFEHLLLFSKLKGPEGGSEMFVYKQAFKTADMGLTENIGDSGLCFELWFRRRRAREAYTLQATSPEIKLKWTSSIAQLLWRQAAHNKELRVQQMVSMGIGNKPFLDIKALGERTLSALLTGRAPETLDSSGDVSPGPRNSPSLQPPHPGSSTPTLASRGILGLSRQSHARALSDPTTPL

SEQ ID NO: 867347 - protein, 1301 aa, Homo sapiens
LPPELPSGPPGLPSPPLPEEALGTRSPGDGHNAPVEGPEGEYVELLEVTLPVRGSPTDAEGSPGLSRVRTVPTRKGAGGKGRHRRHRAWMHQKGLGPRGQDGARPPGEGSSTGASPESPPGAEAVPEAAVLEVSEPPAEAVGEASGSCPLRPGELRGGGGGGQGAEGPPGTPRRTGKGNRRKKRAAGRGALSRGGDSAPLSPGDKEDASHQEALGNLPSPSEHKLPECHLVKEEYEGSGKPESEPKELKTAGEKEPQLSEACGPTEEGAGERELEGPGLLCMAGHTGPEGPLSDTPTPPLETVQEGKGDNIPEEALAVSVSDHPDVAWDLMASGFLILTGGVDQSGRALLTITPPCPPEEPPPSRDTLNTTLHYLHSLLRPDLQTLGLSVLLDLRQAPPLPPALIPALSQLQDSGDPPLVQRLLILIHDDLPTELCGFQGAEVLSENDLKRVAKPEELQWELGGHRDPSPSHWVEIHQEVVRLCRLCQGVLGSVRQAIEELEGAAEPEEEEAVGMPKPLQKVLADPRLTALQRDGGAILMRLRSTPSSKLEGQGPATLYQEVDEAIHQLVRLSNLHVQQQEQRQCLRRLQQVLQWLSGPGEEQLASFAMPGDTLSALQETELRFRAFSAEVQERLAQAREALALEENATSQKVLDIFEQRLEQVESGLHRALRLQRFFQQAHEWVDEGFARLAGAGPGREAVLAALALRRAPEPSAGTFQEMRALALDLGSPAALREWGRCQARCQELERRIQQHVGEEASPRGYRRRRADGASSGGAQWGPRSPSPSLSSLLLPSSPGPRPAPSHCSLAPCGEDYEEEGPELAPEAEGRPPRAVLIRGLEVTSTEVVDRTCSPREHVLLGRARGPDGPWGVGTPRMERKRSISAQQRLVSELIACEQDYVATLSEPVPPPGPELTPELRGTWAAALSARERLRSFHRTHFLRELQGCATHPLRIGACFLRHGDQFSLYAQYVKHRHKLENGLAALSPSSKGSMEAGPYLPRALQQPLEQLTRYGRLLEELLREAGPELSSECRALGAAVQLLREQEARGRDLLAVEAVRGCEIDLKEQGQLLHRDPFTVICGRKKCLRHVFLFEHLLLFSKLKGPEGGSEMFVYKQAFKLWFRRRRAREAYTLQATSPEIKLKWTSSIAQLLWRQAAHNKELRVQQMVSMGIGNKPFLDIKALGERTLSALLTGRAARTRASVAVSSFEHAGPSLPGLSPGACSLPARVEEEAWDLDVKQISLAPETLDSSGDVSPGPRNSPSLQPPHPGSSTPTLASRGILGLSRQSHARALSDPTTPL

SEQ ID NO: 867348 - protein, 1271 aa, Homo sapiens; identical to SEQ ID NO: 867346

SEQ ID NO: 867349 - protein, 1241 aa, Homo sapiens
  misc_feature (1217)..(1217): Xaa can be any naturally occurring amino acid
  misc_feature (1235)..(1235): Xaa can be any naturally occurring amino acid
LPPELPSGPPGLPSPPLPEEALGTRSPGDGHNAPVEGPEGEYVELLEVTLPVRGSPTDAEGSPGLSRVRTVPTRKGAGGKGRHRRHRAWMHQKGLGPRGQDGARPPGEGSSTGASPESPPGAEAVPEAAVLEVSEPPAEAVGEASGSCPLRPGELRGGGGGGQGAEGPPGTPRRTGKGNRRKKRAAGRGALSRGGDSAPLSPGDKEDASHQEALGNLPSPSEHKLPECHLVKEEYEGSGKPESEPKELKTAGEKEPQLSEACGPTEEGAGERELEGPGLLCMAGHTGPEGPLSDTPTPPLETVQEGKGDNIPEEALAVSVSDHPDVAWDLMASGFLILTGGVDQSGRALLTITPPCPPEEPPPSRDTLNTTLHYLHSLLRPDLQTLGLSVLLDLRQAPPLPPALIPALSQLQDSGDPPLVQRLLILIHDDLPTELCGFQGAEVLSENDLKRVAKPEELQWELGGHRDPSPSHWVEIHQEVVRLCRLCQGVLGSVRQAIEELEGAAEPEEEEAVGMPKPLQKVLADPRLTALQRDGGAILMRLRSTPSSKLEGQGPATLYQEVDEAIHQLVRLSNLHVQQQEQRQCLRRLQQVLQWLSGPGEEQLASFAMPGDTLSALQETELRFRAFSAEVQERLAQAREALALEENATSQKVLDIFEQRLEQVESGLHRALRLQRFFQQAHEWVDEGFARLAGAGPGREAVLAALALRRAPEPSAGTFQEMRALALDLGSPAALREWGRCQARCQELERRIQQHVGEEASPRGYRRRRADGASSGGAQWGPRSPSPSLSSLLLPSSPGPRPAPSHCSLAPCGEDYEEEGPELAPEAEGRPPRAVLIRGLEVTSTEVVDRTCSPREHVLLGRARGPDGPWGVGTPRMERKRSISAQQRLVSELIACEQDYVATLSEPVPPPGPELTPELRGTWAAALSARERLRSFHRTHFLRELQGCATHPLRIGACFLRHGDQFSLYAQYVKHRHKLENGLAALSPSSKGSMEAGPYLPRALQQPLEQLTRYGRLLEELLREAGPELSSECRALGAAVQLLREQEARGRDLLAVEAVRGCEIDLKEQGQLLHRDPFTVICGRKKCLRHVFLFEHLLLFSKLKGPEGGSEMFVYKQAFKTADMGLTENIGDSGLCFELWFRRRRAREAYTLQATSPEIKLKWTSSIAQLLWRQAAHNKELRVQQMVSMGIGNKPFLDIKALGERTLSALLTGRAGXTWKEAPRNTLDFFLGEWXSPRDPK

SEQ ID NO: 867350 - protein, 1009 aa, Homo sapiens
MDHVEIQNKPSTGGTTLKGRDKAGAAMGEEAALASHVLASSLPPELLPFTHLTGGETEGTKACHCTENQKQKDFLSLLNQFCLDLTFASPVVTSLICHLQHSVYFFKVNLCLKHDFIAPAALHCPNVLGKPHSLWTVLHFLQRGNPLSFLKLNKALAVHPNNTALVPQTHSAPSDNFIKQLLIVWAMKPGYMLKFQFKNIELYYPYEASSPGYWHSLTGTMDSGQVVQNIFPEKQAIHPTGLEHLGHKKGFQSRCTVSKGTQGQECMNCYFLPITGLAAPEGDPVLLFNILTWSTNMLNTASNRQMLEIHFQSWMGLKIIYYNPLILFPLKETKGKKVYGNLLTFTQAISNRAEFGSGIGFLFDSPQMNTKINSIYCIPTIYQILCKGLYIYYFTEILTINFKSGLTILRRGKGGPGRLSNMLKVTQLLNRAMNLNLCLILKPLIFPLHEAALYIYLAELTTILDFTNILYKGALMPLLLTFKKRKFLHYFCHVLQGTLNLIIMGNKKHSDISFLFFLFKFGRRGRGSPTEGEGEDKNQNINPIPPTPLFWEHPNIRRVGYPVIFFKLEQAVEPGLRKEKPQNKHGTCSQSINFTPEFGKKGLYYYVYSNQYGEHKCRYPINFEANSSRLETDLGYLLPDSQGYKHLHSPLREYISGNIWGMRLEGRRYIQFTYPPGFFSPLLTCPTSLVGGKASEDSWLQYQLSLLLWGIEKEISTWQPGIFSCQAKTPDINPFPLIEVMFIYKGIDLPKKEPQNTGSIQCGGCLGSSDTCALDAIDTSIPAKMSANKCSFTNCGGPDSHHGPTDSRFRIYVESILVNTQAPPSNHSHTHTHTHTHTCTHTHACTHTQVHMHKHTHLMIPTSNTPQAHGDAQVPQANHCDTEGVINWGSEQLKPTLVVSRLLFCEIINTKSSNPFEFEFVILTLTAFSGKNNKDQFIDFVATMSLKKRLLKRKTGRKKKKRKWSTYSSDDATLISYNKNKNVQRKGEEKPTSLILSWHCSSKTGISAC

SEQ ID NO: 867351 - protein, 659 aa, Homo sapiens
TYREDALRYTLDFLVPAKHLLAKVQQEACVSGRASLFSQKVLDIFEQRLEQVESGLHRALRLQRFFQQAHEWVDEGFARLAGAGPGREAVLAALALRRAPEPSAGTFQEMRALALDLGSPAALREWGRCQARCQELERRIQQHVGEEASPRGYRRRRADGASSGGAQWGPRSPSPSLSSLLLPSSPGPRPAPSHCSLAPCGEDYEEEGPELAPEAEGRPPRAVLIRGLEVTSTEVVDRTCSPREHVLLGRARGPDGPWGVGTPRMERKRSISAQQRLVSELIACEQDYVATLSEPVPPPGPELTPELRGTWAAALSARERLRSFHRTHFLRELQGCATHPLRIGACFLRHGDQFSLYAQYVKHRHKLENGLAALSPSSKGSMEAGPYLPRALQQPLEQLTRYGRLLEELLREAGPELSSECRALGAAVQLLREQEARGRDLLAVEAVRGCEIDLKEQGQLLHRDPFTVICGRKKCLRHVFLFEHLLLFSKLKGPEGGSEMFVYKQAFKTADMGLTENIGDSGLCFELWFRRRRAREAYTLQATSPEIKLKWTSSIAQLLWRQAAHNKELRVQQMVSMGIGNKPFLDIKALGERTLSALLTGRAPETLDSSGDVSPGPRNSPSLQPPHPGSSTPTLASRGILGLSRQSHARALSDPTTPL

SEQ ID NO: 867352 - protein, 417 aa, Homo sapiens
THASRTRGSTHAVAHASRTRGRMERKRSISAQQRLVSELIACEQDYVATLSEPVPPPGPELTPELRGTWAAALSARERLRSFHRTHFLRELQGCATHPLRIGACFLRHGDQFSLYAQYVKHRHKLENGLAALSPSSKGSMEAGPYLPRALQQPLEQLTRYGRLLEELLREAGPELSSECRALGAAVQLLREQEARGRDLLAVEAVRGCEIDLKEQGQLLHRDPFTVICGRKKCLRHVFLFEHLLLFSKLKGPEGGSEMFVYKQAFKTADMGLTENIGDSGLCFELWFRRRRAREAYTLQATSPEIKLKWTSSIAQLLWRQAAHNKELRVQQMVSMGIGNKPFLDIKALGERTLSALLTGRAPETLDSSGDVSPGPRNSPSLQPPHPGSSTPTLASRGILGLSRQSHARALSDPTTPL

SEQ ID NO: 867353 - protein, 1278 aa, Homo sapiens
LPPELPSGPPGLPSPPLPEEALGTRSPGDGHNAPVEGPEGEYVELLEVTLPVRGSPTDAEGSPGLSRVRTVPTRKGAGGKGRHRRHRAWMHQKGLGPRGQDGARPPGEGSSTGASPESPPGAEAVPEAAVLEVSEPPAEAVGEASGSCPLRPGELRGGGGGGQGAEGPPGTPRRTGKGNRRKKRAAGRGALSRGGDSAPLSPGDKEDASHQEALGNLPSPSEHKLPECHLVKEEYEGSGKPESEPKELKTAGEKEPQLSEACGPTEEGAGERELEGPGLLCMAGHTGPEGPLSDTPTPPLETVQEGKGDNIPEEALAVSVSDHPDVAWDLMASGFLILTGGVDQSGRALLTITPPCPPEEPPPSRDTLNTTLHYLHSLLRPDLQTLGLSVLLDLRQAPPLPPALIPALSQLQDSGDPPLVQRLLILIHDDLPTELCGFQGAEVLSENDLKRVAKPEELQWELGGHRDPSPSHWVEIHQEVVRLCRLCQGVLGSVRQAIEELEGAAEPEEEEAVGMPKPLQKVLADPRLTALQRDGGAILMRLRSTPSSKLEGQGPATLYQEVDEAIHQLVRLSNLHVQQQEQRQCLRRLQQVLQWLSGPGEEQLASFAMPGDTLSALQETELRFRAFSAEVQERLAQAREALALEENATSQKVLDIFEQRLEQVESGLHRALRLQRFFQQAHEWVDEGFARLAGAGPGREAVLAALALRRAPEPSAGTFQEMRALALDLGSPAALREWGRCQARCQELERRIQQHVGEEASPRGYRRRRADGASSGGAQWGPRSPSPSLSSLLLPSSPGPRPAPSHCSLAPCGEDYEEEGPELAPEAEGRPPRAVLIRGLEVTSTEVVDRTCSPREHVLLGRARGPDGPWGVGTPRMERKRSISAQQRLVSELIACEQDYVATLSEPVPPPGPELTPELRGTWAAALSARERLRSFHRTHFLRELQGCATHPLRIGACFLRHGDQFSLYAQYVKHRHKLENGLAALSPSSKGSMEAGPYLPRALQQPLEQLTRYGRLLEELLREAGPELSSECRALGAAVQLLREQEARGRDLLAVEAVRGCEIDLKEQGQLLHRDPFTVICGRKKCLRHVFLFEHLLLFSKLKGPEGGSEMFVYKQAFKTADMGLTENIGDSGLCFELWFRRRRAREAYTLQATSPEIKLKWTSSIAQLLWRQAAHNKELRVQQMVSMGIGNKPFLDIKALGERTLSALLTGRAARTRASVAVSSFEHAGPSLPGLSPGACSLPARVEEEAWDLDVKQISLGEAPLKGWLPTARSWW

SEQ ID NO: 867354 - protein, 1278 aa, Homo sapiens; identical to SEQ ID NO: 867353

SEQ ID NO: 867355 - protein, 1216 aa, Homo sapiens
LPPELPSGPPGLPSPPLPEEALGTRSPGDGHNAPVEGPEGEYVELLEVTLPVRGSPTDAEGSPGLSRVRTVPTRKGAGGKGRHRRHRAWMHQKGLGPRGQDGARPPGEGSSTGASPESPPGAEAVPEAAVLEVSEPPAEAVGEASGSCPLRPGELRGGGGGGQGAEGPPGTPRRTGKGNRRKKRAAGRGALSRGGDSAPLSPGDKEDASHQEALGNLPSPSEHKLPECHLVKEEYEGSGKPESEPKELKTAGEKEPQLSEACGPTEEGAGERELEGPGLLCMAGHTGPEGPLSDTPTPPLETVQEGKGDNIPEEALAVSVSDHPDVAWDLMASGFLILTGGVDQSGRALLTITPPCPPEEPPPSRDTLNTTLHYLHSLLRPDLQTLGLSVLLDLRQAPPLPPALIPALSQLQDSGDPPLVQRLLILIHDDLPTELCGFQGAEVLSENDLKRVAKPEELQWELGGHRDPSPSHWVEIHQEVVRLCRLCQGVLGSVRQAIEELEGAAEPEEEEAVGMPKPLQKVLADPRLTALQRDGGAILMRLRSTPSSKLEGQGPATLYQEVDEAIHQLVRLSNLHVQQQEQRQCLRRLQQVLQWLSGPGEEQLASFAMPGDTLSALQETELRFRAFSAEVQERLAQAREALALEENATSQKVLDIFEQRLEQVESGLHRALRLQRFFQQAHEWVDEGFARLAGAGPGREAVLAALALRRAPEPSAGTFQEMRALALDLGSPAALREWGRCQARCQELERRIQQHVGEEASPRGYRRRRADGASSGGAQWGPRSPSPSLSSLLLPSSPGPRPAPSHCSLAPCGEDYEEEGPELAPEAEGRPPRAVLIRGLEVTSTEVVDRTCSPREHVLLGRARGPDGPWGVGTPRMERKRSISAQQRLVSELIACEQDYVATLSEPVPPPGPELTPELRGTWAAALSARERLRSFHRTHFLRELQGCATHPLRIGACFLRHGDQFSLYAQYVKHRHKLENGLAALSPSSKGSMEAGPYLPRALQQPLEQLTRYGRLLEELLREAGPELSSECRALGAAVQLLREQEARGRDLLAVEAVRGCEIDLKEQGQLLHRDPFTVICGRKKCLRHVFLFEHLLLFSKLKGPEGGSEMFVYKQAFKTADMGLTENIGDSGLCFELWFRRRRAREAYTLQATSPEIKLKWTSSIAQLLWRQAAHNKELRVQQMVSMGIGNKPFLDIKALGERTLSALLTGRER

SEQ ID NO: 867356 - protein, 1253 aa, Homo sapiens
LPPELPSGPPGLPSPPLPEEALGTRSPGDGHNAPVEGPEGEYVELLEVTLPVRGSPTDAEGSPGLSRVRTVPTRKGAGGKGRHRRHRAWMHQKGLGPRGQDGARPPGEGSSTGASPESPPGAEAVPEAAVLEVSEPPAEAVGEASGSCPLRPGELRGGGGGGQGAEGPPGTPRRTGKGNRRKKRAAGRGALSRGGDSAPLSPGDKEDASHQEALGNLPSPSEHKLPECHLVKEEYEGSGKPESEPKELKTAGEKEPQLSEACGPTEEGAGERELEGPGLLCMAGHTGPEGPLSDTPTPPLETVQEGKGDNIPEEALAVSVSDHPDVAWDLMASGFLILTGGVDQSGRALLTITPPCPPEEPPPSRDTLNTTLHYLHSLLRPDLQTLGLSVLLDLRQAPPLPPALIPALSQLQDSGDPPLVQRLLILIHDDLPTELCGFQGAEVLSENDLKRVAKPEELQWELGGHRDPSPSHWVEIHQEVVRLCRLCQGVLGSVRQAIEELEGAAEPEEEEAVGMPKPLQKVLADPRLTALQRDGGAILMRLRSTPSSKLEGQGPATLYQEVDEAIHQLVRLSNLHVQQQEQRQCLRRLQQVLQWLSGPGEEQLASFAMPGDTLSALQETELRFRAFSAEVQERLAQAREALALEENATSQKVLDIFEQRLEQVESGLHRALRLQRFFQQAHEWVDEGFARLAGAGPGREAVLAALALRRAPEPSAGTFQEMRALALDLGSPAALREWGRCQARCQELERRIQQHVGEEASPRGYRRRRADGASSGGAQWGPRSPSPSLSSLLLPSSPGPRPAPSHCSLAPCGEDYEEEGPELAPEAEGRPPRAVLIRGLEVTSTEVVDRTCSPREHVLLGRARGPDGPWGVGTPRMERKRSISAQQRLVSELIACEQDYVATLSEPVPPPGPELTPELRGTWAAALSARERLRSFHRTHFLRELQGCATHPLRIGACFLRHGDQFSLYAQYVKHRHKLENGLAALSPSSKGSMEAGPYLPRALQQPLEQLTRYGRLLEELLREAGPELSSECRALGAAVQLLREQEARGRDLLAVEAVRGCEIDLKEQGQLLHRDPFTVICGRKKCLRHVFLFEHLLLFSKLKGPEGGSEMFVYKQAFKLWFRRRRAREAYTLQATSPEIKLKWTSSIAQLLWRQAAHNKELRVQQMVSMGIGNKPFLDIKALGERTLSALLTGRAPETLDSSGDVSPGPRNSPSLQPPHPGSSTPTLASRGILGLSRQSHARALSDPTTPL

SEQ ID NO: 867357 - protein, 180 aa, Homo sapiens [sequence omitted]

SEQ ID NO: 867358 - protein, 317 aa, Homo sapiens
MKRLSLVTTNRLSPHGNFLPLCTFPLAVDMAALFQEASSCPVCSDYLEKPMSLECGCAVCFKCINSLQKEPHGEDLLCCCCSMVSQKNKIRPSWQLERLASHIKELEPKLKKILQMNPRMRKFQVDMTLDADTANNFLLISDDLRSVRSGCITQNRQDLAERFDVSICILGSPRFTCGRHYWEVDVGTSTEWDLGVCRESVHRKGRIHLTTERGFWTVSLRDGSRLSASTVPLTFLFVDRKLQRVGIFLDMGMQNVSFFDAEGGSHVYTFRSVSAEEPLHLFFAPPSPPNGDKSVLSICPVINPGTTDAPVHPGEAK

SEQ ID NO: 867359 - protein, 1545 aa, Homo sapiens
MLEKFCNSTFWNSSFLDSPEADLPLCFEQTVLVWIPLGFLWLLAPWQLLHVYKSRTKRSSTTKLYLAKQVFVGFLLILAAIELALVLTEDSGQATVPAVRYTNPSLYLGTWLLVLLIQYSRQWCVQKNSWFLSLFWILSILCGTFQFQTLIRTLLQGDNSNLAYSCLFFISYGFQILILIFSAFSENNESSNNPSSIASFLSSITYSWYDSIILKGYKRPLTLEDVWEVDEEMKTKTLVSKFETHMKRELQKARRALQRRQEKSSQQNSGARLPGLNKNQSQSQDALVLEDVEKKKKKSGTKKDVPKSWLMKALFKTFYMVLLKSFLLKLVNDIFTFVSPQLLKLLISFASDRDTYLWIGYLCAILLFTAALIQSFCLQCYFQLCFKLGVKVRTAIMASVYKKALTLSNLARKEYTVGETVNLMSVDAQKLMDVTNFMHMLWSSVLQIVLSIFFLWRELGPSVLAGVGVMVLVIPINAILSTKSKTIQVKNMKNKDKRLKIMNEILSGIKILKYFAWEPSFRDQVQNLRKKELKNLLAFSQLQCVVIFVFQLTPVLVSVVTFSVYVLVDSNNILDAQKAFTSITLFNILRFPLSMLPMMISSMLQASVSTERLEKYLGGDDLDTSAIRHDCNFDKAMQFSEASFTWEHDSEATVRDVNLDIMAGQLVAVIGPVGSGKSSLISAMLGEMENVHGHITIKGTTAYVPQQSWIQNGTIKDNILFGTEFNEKRYQQVLEACALLPDLEMLPGGDLAEIGEKGINLSGGQKQRISLARATYQNLDIYLLDDPLSAVDAHVGKHIFNKVLGPNGLLKGKTRLLVTHSMHFLPQVDEIVVLGNGTIVEKGSYSALLAKKGEFAKNLKTFLRHTGPEEEATVHDGSEEEDDDYGLISSVEEIPEDAASITMRRENSFRRTLSRSSRSNGRHLKSLRNSLKTRNVNSLKEDEELVKGQKLIKKEFIETGKVKFSIYLEYLQAIGLFSIFFIILAFVMNSVAFIGSNLWLSAWTSDSKIFNSTDYPASQRDMRVGVYGALGLAQGIFVFIAHFWSAFGFVHASNILHKQLLNNILRAPMRFFDTTPTGRIVNRFAGDISTVDDTLPQSLRSWITCFLGIISTLVMICMATPVFTIIVIPLGIIYVSVQMFYVSTSRQLRRLDSVTRSPIYSHFSETVSGLPVIRAFEHQQRFLKHNEVRIDTNQKCVFSWITSNRWLAIRLELVGNLTVFFSALMMVIYRDTLSGDTVGFVLSNALNITQTLNWLVRMTSEIETNIVAVERITEYTKVENEAPWVTDKRPPPDWPSKGKIQFNNYQVRYRPELDLVLRGITCDIGSMEKIGVVGRTGAGKSSLTNCLFRILEAAGGQIIIDGVDIASIGLHDLREKLTIIPQDPILFSGSLRMNLDPFNNYSDEEIWKALELAHLKSFVASLQLGLSHEVTEAGGNLSIGQRQLLCLGRALLRKSKILVLDEATAAVDLETDNLIQTTIQNEFAHCTVITIAHRLHTIMDSDKVMVLDNGKIIECGSPEELLQIPGPFYFMAKEAGIENVNSTKF

SEQ ID NO: 867360 - protein, 293 aa, Homo sapiens [sequence omitted]

SEQ ID NO: 867361 - protein, 1545 aa, Homo sapiens; identical to SEQ ID NO: 867359

SEQ ID NO: 867362 - protein, 1545 aa, Homo sapiens; identical to SEQ ID NO: 867359

SEQ ID NO: 867363 - protein, 211 aa, Homo sapiens [sequence omitted]

SEQ ID NO: 867364 - protein, 1527 aa, Homo sapiens
MLEKFCNSTFWNSSFLDSPEADLPLCFEQTVLVWIPLGFLWLLAPWQLLHVYKSRTKRSSTTKLYLAKQVFVGFLLILAAIELALVLTEDSGQATVPAVRYTNPSLYLGTWLLVLLIQYSRQWCVQKNSWFLSLFWILSILCGTFQFQTLIRTLLQGDNSNLAYSCLFFISYGFQILILIFSAFSENNESSNNPSSIASFLSSITYSWYDSIILKGYKRPLTLEDVWEVDEEMKTKTLVSKFETHMKRELQKARRALQRRQEKSSQQNSGARLPGLNKNQSQSQDALVLEDVEKKKKKSGTKKDVPKSWLMKALFKTFYMVLLKSFLLKLVNDIFTFVSPQLLKLLISFASDRDTYLWIGYLCAILLFTAALIQSFCLQCYFQLCFKLGVKVRTAIMASVYKKALTLSNLARKEYTVGETVNLMSVDAQKLMDVTNFMHMLWSSVLQIVLSIFFLWRELGPSVLAGVGVMVLVIPINAILSTKSKTIQVKNMKNKDKRLKIMNEILSGIKILKYFAWEPSFRDQVQNLRKKELKNLLAFSQLQCVVIFVFQLTPVLVSVVTFSVYVLVDSNNILDAQKAFTSITLFNILRFPLSMLPMMISSMLQASVSTERLEKYLGGDDLDTSAIRHDCNFDKAMQFSEASFTWEHDSEATVRDVNLDIMAGQLVAVIGPVGSGKSSLISAMLGEMENVHGHITIKGTTAYVPQQSWIQNGTIKDNILFGTEFNEKRYQQVLEACALLPDLEMLPGGDLAEIGEKGINLSGGQKQRISLARATYQNLDIYLLDDPLSAVDAHVGKHIFNKVLGPNGLLKGKTRLLVTHSMHFLPQVDEIVVLGNGTIVEKGSYSALLAKKGEFAKNLKTFLRHTGPEEEATVHDGSEEEDDDYGLISSVEEIPEDAASITMRRENSFRRTLSRSSRSNGRHLKSLRNSLKTRNVNSLKEDEELVKGQKLIKKEFIETGKVKFSIYLEYLQAIGLFSIFFIILAFVMNSVAFIGSNLWLSAWTSDSKIFNSTDYPASQRDMRVGVYGALGLAQGIFVFIAHFWSAFGFVHASNILHKQLLNNILRAPMRFFDTTPTGRIVNRFAGDISTVDDTLPQSLRSWITCFLGIISTLVMICMATPVFTIIVIPLGIIYVSVQMFYVSTSRQLRRLDSVTRSPIYSHFSETVSGLPVIRAFEHQQRFLKHNEVRIDTNQKCVFSWITSNRWLAIRLELVGNLTVFFSALMMVIYRDTLSGDTVGFVLSNALNITQTLNWLVRMTSEIETNIVAVERITEYTKVENEAPWVTDKRPPPDWPSKGKIQFNNYQVRYRPELDLVLRGITCDIGSMEKIGVVGRTGAGKSSLTNCLFRILEAAGGQIIIDGVDIASIGLHDLREKLTIIPQDPILFSGSLRMNLDPFNNYSDEEIWKALELAHLKSFVASLQLGLSHEVTEAGGNLSIGQRQLLCLGRALLRKSKILVLDEATAAVDLETDNLIQTTIQNEFAQVMVLDNGKIIECGSPEELLQIPGPFYFMAKEAGIENVNSTKF

SEQ ID NO: 867365 - protein, 1385 aa, Homo sapiens
MLEKFCNSTFWNSSFLDSPEADLPLCFEQTVLVWIPLGFLWLLAPWQLLHVYKSRTKRSSTTKLYLAKQVFVGFLLILAAIELALVLTEDSGQATVPAVRYTNPSLYLGTWLLVLLIQYSRQWCVQKNSWFLSLFWILSILCGTFQFQTLIRTLLQGDNSNLAYSCLFFISYGFQILILIFSAFSENNESSNNPSSIASFLSSITYSWYDSIILKGYKRPLTLEDVWEVDEEMKTKTLVSKFETHMKRELQKARRALQRRQEKSSQQNSGARLPGLNKNQSQSQDALVLEDVEKKKKKSGTKKDVPKSWLMKALFKTFYMVLLKSFLLKLVNDIFTFVSPQLLKLLISFASDRDTYLWIGYLCAILLFTAALIQSFCLQCYFQLCFKLGVKVRTAIMASVYKKALTLSNLARKEYTVGETVNLMSVDAQKLMDVTNFMHMLWSSVLQIVLSIFFLWRELGPSVLAGVGVMVLVIPINAILSTKSKTIQVKNMKNKDKRLKIMNEILSGIKILKYFAWEPSFRDQVQNLRKKELKNLLAFSQLQCVVIFVFQLTPVLVSVVTFSVYVLVDSNNILDAQKAFTSITLFNILRFPLSMLPMMISSMLQASVSTERLEKYLGGDDLDTSAIRHDCNFDKAMQFSEASFTWEHDSEATVRDVNLDIMAGQLVAVIGPVGSGKSSLISAMLGEMENVHGHITIKGTTAYVPQQSWIQNGTIKDNILFGTEFNEKRYQQVLEACALLPDLEMLPGGDLAEIGEKGINLSGGQKQRISLARATYQNLDIYLLDDPLSAVDAHVGKHIFNKVLGPNGLLKGKTRLLVTHSMHFLPQVDEIVVLGNGTIVEKGSYSALLAKKGEFAKNLKTFLRHTGPEEEATVHDGSEEEDDDYGLISSVEEIPEDAASITMRRENSFRRTLSRSSRSNGRHLKSLRNSLKTRNVNSLKEDEELVKGQKLIKKEFIETGKVKFSIYLEYLQAIGLFSIFFIILAFVMNSVAFIGSNLWLSAWTSDSKIFNSTDYPASQRDMRVGVYGALGLAQGIFVFIAHFWSAFGFVHASNILHKQLLNNILRAPMRFFDTTPTGRIVNRFAGDISTVDDTLPQSLRSWITCFLGIISTLVMICMATPVFTIIVIPLGIIYVSVQMFYVSTSRQLRRLDSVTRSPIYSHFSETVSGLPVIRAFEHQQRFLKHNEVRIDTNQKCVFSWITSNRWLAIRLELVGNLTVFFSALMMVIYRDTLSGDTVGFVLSNALNITQTLNWLVRMTSEIETNIVAVERITEYTKVENEAPWVTDKRPPPDWPSKGKIQFNNYQVRYRPELDLVLRGITCDIGSMEKVGGVKEGLDGRPCDQTTIGQSGEQLGPKPSSFGWRERVRALPLPWGGVGTQYQREG

SEQ ID NO: 867366 - protein, 105 aa, Homo sapiens
MSALTRLASFARVGGRLFRSGCARTAGDGGVRHAGGGVHIEPRYRQFPQLTRSQVFQSEFFSGLMWFWILWRFWHDSEEVLGHFPYPDPSQWTDEELGIPPDDED

SEQ ID NO: 867367 - protein, 105 aa, Homo sapiens; identical to SEQ ID NO: 867366

SEQ ID NO: 867368 - protein, 200 aa, Homo sapiens
GGRGCSEPRWCHCTPAWVTEQGLVSKRKKKKKKNYTPLSFRRGRTRGEPYRIRGATNKLFQKAWGSSATISYAWALLSGERFPAAEGLTANLGQERLPAPPLLEMSDSVTSREARAERRGSEVGRGEAAGDRGADGSEYVRSDSAGVFRSRWRPPFQKRLRTDCWRWWSPSVSVGLGMGASPACSGQRGSLGRSHLDWGA

SEQ ID NO: 867369 - protein, 105 aa, Homo sapiens; identical to SEQ ID NO: 867366

SEQ ID NO: 867370 - protein, 101 aa, Homo sapiens
MSALTRLASFARVGGRLFRSGCARTAGDGGVRHAGGGVHIEPRYRQFPQLTRSQVFQSEFFSGLMWFWILWRFWHDSEEVLGTFRILILPNGPKWTMDLNG

SEQ ID NO: 867371 - protein, 175 aa, Homo sapiens
GGRGCSEPRWCHCTPAWVTEQGLVSKRKKKKKKNYTPLSFRRGRTRGEPYRIRGATNKLFQKAWGSSATISYAWALLSGERFPAAEGLTANLGQERLPAPPLLEMSDSVTSREARAERRGSEVGRGEAAGDRGADGSEYVRSDSAGVFRSRWRPPFQKRLRTDCWRWWSPSVDPE

SEQ ID NO: 867372 - protein, 105 aa, Homo sapiens; identical to SEQ ID NO: 867366

SEQ ID NO: 867373 - protein, 200 aa, Homo sapiens; identical to SEQ ID NO: 867368

SEQ ID NO: 867374 - protein, 175 aa, Homo sapiens; identical to SEQ ID NO: 867371

SEQ ID NO: 867375 - protein, 105 aa, Homo sapiens; identical to SEQ ID NO: 867366

SEQ ID NO: 867376 - protein, 105 aa, Homo sapiens; identical to SEQ ID NO: 867366

SEQ ID NO: 867377 - protein, 105 aa, Homo sapiens; identical to SEQ ID NO: 867366

SEQ ID NO: 867378 - protein, 250 aa, Homo sapiens
MEPPGDWGPPPWRSTPKTDVLRLVLYLTFLGAPCYAPALPSCKEDEYPVGSECCPKCSPGYRVKEACGELTGTVCEPCPPGTYIAHLNGLSKCLQCQMCDPAMGLRASRNCSRTENAVCGCSPGHFCIVQDGDHCAACRAYATSSPGQRVQKGGTESQDTLCQNCPPGTFSPNGTLEECQHQTKCSWLVTKAGAGTSSSHWVWWFLSGSLVIVIVCSTVGLIICVKRRKPRGECSQGDRSPSSGKDGGRG

SEQ ID NO: 867379 - protein, 283 aa, Homo sapiens
MEPPGDWGPPPWRSTPKTDVLRLVLYLTFLGAPCYAPALPSCKEDEYPVGSECCPKCSPGYRVKEACGELTGTVCEPCPPGTYIAHLNGLSKCLQCQMCDPAMGLRASRNCSRTENAVCGCSPGHFCIVQDGDHCAACRAYATSSPGQRVQKGGTESQDTLCQNCPPGTFSPNGTLEECQHQTKCSWLVTKAGAGTSSSHWVWWFLSGSLVIVIVCSTVGLIICVKRRKPRGDVVKVIVSVQRKRQEAEGEATVIEALQAPPDVTTVAVEETIPSFTGRSPNH

SEQ ID NO: 867380 - protein, 283 aa, Homo sapiens; identical to SEQ ID NO: 867379

SEQ ID NO: 867381 - protein, 283 aa, Homo sapiens; identical to SEQ ID NO: 867379

SEQ ID NO: 867382 - protein, 283 aa, Homo sapiens; identical to SEQ ID NO: 867379

SEQ ID NO: 867383 - protein, 283 aa, Homo sapiens; identical to SEQ ID NO: 867379

SEQ ID NO: 867384 - protein, 347 aa, Homo sapiens
EIQAVGPSLAEPTGQPGHLPMPVLTPLVLYLTFLGAPCYAPALPSCKEDEYPVGSECCPKCSPGYRVKEACGELTGTVCEPCPPGTYIAHLNGLSKCLQCQMCDPAMGLRASRNCSRTENAVCGCSPGHFCIVQDGDHCAACRAYATSSPGQRVQKGGTESQDTLCQNCPPGTFSPNGTLEECQHQTNQSLEKSDRPLRSHPGAATSPASLGPVFTAWGPGSQGGSLRLSEHWALHLALPRPRPHSRRCSWLVTKAGAGTSSSHWVWWFLSGSLVIVIVCSTVGLIICVKRRKPRGDVVKVIVSVQRKRQEAEGEATVIEALQAPPDVTTVAVEETIPSFTGRSPNH

SEQ ID NO: 867385 - protein, 282 aa, Homo sapiens
MEPPGDWGPPPWRSTPKTDVLRLVLYLTFLGAPCYAPALPSCKEDEYPVGSECCPKCSPGYRVKEACGELTGTVCEPCPPGTYIAHLNGLSKCLQCQMCDPAMGLRASRNCSRTENAVCGCSPGHFCIVQDGDHCAACRAYATSSPGQRVQKGGTESQDTLCQNCPPGTFSPNGTLEECQHQTKCSWLVTKAGAGTSSSHWVWWFLSGSLVIVIVCSTVGLIICVKRRKPRGDVVKVIVSVQRKRQEAEGEATVIEALQAPPDATCHSHGPVRAWGLCSAVA

SEQ ID NO: 867386 - protein, 406 aa, Homo sapiens
MEPPGDWGPPPWRSTPKTDVLRLVLYLTFLGAPCYAPALPSCKEDEYPVGSECCPKCSPGYRVKEACGELTGTVCEPCPPGTYIAHLNGLSKCLQCQMCDPDIGSPCDLRGRGHLEAGAHLSPGRQKGEPDPEVAFESLSAEPVHAATALSPWSLMPGSAWPVLPAARQDCTCGTGLTAHLGAGPEPTGRHRAGGLAMNRRGSWSALGVHACRLGFGAHTSTCMPSSMPLPSCESTCLLGLRMWGHRWQVRLPSGGAQAQLVPHLHQYLKKWGSHPTCLCHWNGLVCTDGKPVCGVGVWVGTWGEDLPAGPCPGTDSASSASCPSGQKAGFSHQRSPPRTFLQALVPHAALPSLGVPPGLRSSMLGTSGHLVWLSQGFSLAGRPGSSPWPVDAVLARGWCPGLHVP

SEQ ID NO: 867387 - protein, 178 aa, Homo sapiens
MEPPGDWGPPPWRSTPKTDVLRLVLYLTFLGAPCYAPALPSCKEDEYPVGSECCPKCSPGYRVKEACGELTGTVCEPCPPGTYIAHLNGLSKCLQCQMCDPGKRPAQPAQPPLGQPGCPRTLHPLSMATVPQEGPGCPRPGPNPISMDAPCRGRLEVSLRPPSTSVSPLTLSPPGGPS

SEQ ID NO: 867388 - protein, 283 aa, Homo sapiens; identical to SEQ ID NO: 867379

SEQ ID NO: 867389 - protein, 283 aa, Homo sapiens; identical to SEQ ID NO: 867379

SEQ ID NO: 867390 - protein, 283 aa, Homo sapiens; identical to SEQ ID NO: 867379

SEQ ID NO: 867391 - protein, 283 aa, Homo sapiens; identical to SEQ ID NO: 867379

SEQ ID NO: 867392 - protein, 343 aa, Homo sapiens
MEPPGDWGPPPWRSTPKTDVLRLVLYLTFLGAPCYAPALPSCKEDEYPVGSECCPKCSPGYRVKEACGELTGTVCEPCPPGTYIAHLNGLSKCLQCQMCDPAMGLRASRNCSRTENAVCGCSPGHFCIVQDGDHCAACRAYATSSPGQRVQKGGTESQDTLCQNCPPGTFSPNGTLEECQHQTNRAWKSQTDLLRSHPGAATSPASLGPVFTAWGPGSQGGSLRLSEHWALHLALPRPRPHSRRCSWLVTKAGAGTSSSHWVWWFLSGSLVIVIVCSTVGLIICVKRRKPRGDVVKVIVSVQRKRQEAEGEATVIEALQAPPDVTTVAVEETIPSFTGRSPNH

SEQ ID NO: 867393 - protein, 283 aa, Homo sapiens; identical to SEQ ID NO: 867379

SEQ ID NO: 867394 - protein, 185 aa, Homo sapiens
MEPPGDWGPPPWRSTPKTDVLRLVLYLTFLGAPCYAPALPSCKEDEYPVGSECCPKCSPGYRVKEACGELTGTVCEPCPPGTYIAHLNGLSKCLQCQMCDPDIGSPCDLRGRGHLEAGAHLSPGRQKGEPDPEVAFESLSAEPVHAANGSVPLEPHARLSMASAPCGQAGLHLRDRADGTPGGRA

SEQ ID NO: 867395 - protein, 356 aa, Homo sapiens
VAAETPRPRAALREPELRAASAAAREATRPGRQEPARRPRRGRRGRSRARRRRTGSRAGPGHGESGRRAAGGRPGGPRAATEPRSDMVLLKEYRVILPVSVDEYQVGQLYSVAEASKNETGGGEGVEVLVNEPYEKDGEKGQYTHKIYHLQSKVPTFVRMLAPEGALNIHEKAWNAYPYCRTVITNEYMKEDFLIKIETWHKPDLGTQENVHKLEPEAWKHVEAVYIDIADRSQVLSKDYKAEEDPAKFKSIKTGRGPLGPNWKQELVNQKDCPYMCAYKLVTVKFKWWGLQNKVENFIHKQERRLFTNFHRQLFCWLDKWVDLTMDDIRRMEEETKRQLDEMRQKDPVKGMTADD

SEQ ID NO: 867396 - protein, 318 aa, Homo sapiens
GCRRDAPPPRGAAETGAPGGVGSGARGDEARAAGAGAATAARAAGTEQSTTKTHSRVILPVSVDEYQVGQLYSVAEASKNETGGGEGVEVLVNEPYEKDGEKGQYTHKIYHLQSKVPTFVRMLAPEGALNIHEKAWNAYPYCRTVITNEYMKEDFLIKIETWHKPDLGTQENVHKLEPEAWKHVEAVYIDIADRSQVLSKDYKAEEDPAKFKSIKTGRGPLGPNWKQELVNQKDCPYMCAYKLVTVKFKWWGLQNKVENFIHKQERRLFTNFHRQLFCWLDKWVDLTMDDIRRMEEETKRQLDEMRQKDPVKGMTADD

SEQ ID NO: 867397 - protein, 184 aa, Homo sapiens
VAAETPRPRAALREPELRAASAAAREATRPGRQEPARRPRRGRRGRSRARRRRTGSRAGPGHGESGRRAAGGRPGGPRAATEPRSDMVLLKEYRVILPVSVDEYQVGQLYSVAEASKNETGGGEGVEVLVNEPYEKDGEKGQYTHKIYHLQSKVPTFVRMLAPEGALNIHEKAWNAYPYCRTGA

SEQ ID NO: 867398 - protein, 96 aa, Homo sapiens
CIQTGDLSMFNVVVALSSTHNAVTDTYQYQLICLTVCTRCSRYVAKTSRDDAQLFCWLDKWVDLTMDDIRRMEEETKRQLDEMRQKDPVKGMTADD

SEQ ID NO: 867399 - protein, 356 aa, Homo sapiens; identical to SEQ ID NO: 867395

SEQ ID NO: 867400 - protein, 356 aa, Homo sapiens; identical to SEQ ID NO: 867395

SEQ ID NO: 867401 - protein, 356 aa, Homo sapiens; identical to SEQ ID NO: 867395

SEQ ID NO: 867402 - protein, 356 aa, Homo sapiens; identical to SEQ ID NO: 867395

SEQ ID NO: 867403 - protein, 356 aa, Homo sapiens; identical to SEQ ID NO: 867395

SEQ ID NO: 867404 - protein, 323 aa, Homo sapiens
VAAETPRPRAALREPELRAASAAAREATRPGRQEPARRPRRGRRGRSRARRRRTGSRAGPGHGESGRRAAGGRPGGPRAATEPRSDMVLLKEYRVILPVSVDEYQVGQLYSVAEASKNETGGGEGVEVLVNEPYEKDGEKGQYTHKIYHLQSKVPTFVRMLAPEGALNIHEKAWNAYPYCRTVITNEYMKEDFLIKIETWHKPDLGTQENVHKLEPEAWKHVEAVYIDIADRSQVLSKDYKAEEDPAKFKSIKTGRGPLGPNWKQELVNQKDCPYMCAYKLVTVKFKWWGLQNKVENFIHKQERRHSSTTSALGLGERISKLP

SEQ ID NO: 867405 - protein, 356 aa, Homo sapiens; identical to SEQ ID NO: 867395

SEQ ID NO: 867406 - protein, 356 aa, Homo sapiens; identical to SEQ ID NO: 867395

SEQ ID NO: 867407 - protein, 112 aa, Homo sapiens
TLEDPIDDQYGEDPCAPNWKQELVNQKDCPYMCAYKLVTVKFKWWGLQNKVENFIHKQERRLFTNFHRQLFCWLDKWVDLTMDDIRRMEEETKRQLDEMRQKDPVKGMTADD

SEQ ID NO: 867408 - protein, 390 aa, Homo sapiens
VAAETPRPRAALREPELRAASAAAREATRPGRQEPARRPRRGRRGRSRARRRRTGSRAGPGHGESGRRAAGGRPGGPRAATEPRSDMVLLKEYRVILPVSVDEYQVGQLYSVAEASKNETGGGEGVEVLVNEPYEKDGEKGQYTHKIYHLQSKVPTFVRMLAPEGALNIHEKAWNAYPYCRTVITNEYMKEDFLIKIETWHKPDLGTQENVHKLEPEAWKHVEAVYIDIADRSQVLSKDYKAEEDPAKFKSIKTGRGPLGPNWKQELVNQKDCPYMCAYKLVTVKFKWWGLQNKVENFIHKQERRLFTNFHRQLFCWLDKWVAREGLSETRFDRMKERVAKRERDQMERREISKGRTSRGREAARKWPHILGRAEVNRKTPGAPSCKKTR

SEQ ID NO: 867409 - protein, 1528 aa, Homo sapiens
VRVGGVCARLAHACSLGMAGSVPSFCTGYRLSPFGTSPPPPRPDWGGRRASAHRPSPSVSLNLHLAPGLQGKAPGKPPSHLILQRALPNGNLRKSLKEPNRMSPSRKKTKTRMRRDVELHPENELLDRFLQKNLKEQNQERALKRKKKEMKKKKRDIRSQTKEPTPKQKLKEEPDREARAGVQADEDEDGDEKDEKKHRSQPKDLAAKRRPEEKEPEKVNPQISDEKDEDEKEEKRRKTTPKEPTEKKMARAKTVMNSKTHPPKCIQCGQYLDDPDLKYGQHPPDAVDEPQMLTNEKLSIFDANESGFESYEALPQHKLTCFSVYCKHGHLCPIDTGLIEKNIELFFSGSAKPIYDDDPSLEGGVNGKNLGPINEWWITGFDGGEKALIGFSTSFAEYILMDPSPEYAPIFGLMQEKIYISKIVVEFLQSNSDSTYEDLINKIETTVPPSGLNLNRFTEDSLLRHAQFVVEQVESYDEAGDSDEQPIFLTPCMRDLIKLAGVTLGQRRAQARRQTIRHSTREKDRGPTKATTTKLVYQIFDTFFAEQIEKDDREDKENAFKRRRCGVCEVCQQPECGKCKACKDMVKFGGSGRSKQACQERRCPNMAMKEADDDEEVDDNIPEMPSPKKMHQGKKKKQNKNRISWVGEAVKTDGKKSYYKKVCIDAETLEVGDCVSVIPDDSSKPLYLARVTALWEDSSNGQMFHAHWFCAGTDTVLGATSDPLELFLVDECEDMQLSYIHSKVKVIYKAPSENWAMEGGMDPESLLEGDDGKTYFYQLWYDQDYARFESPPKTQPTEDNKFKFCVSCARLAEMRQKEIPRVLEQLEDLDSRVLYYSATKNGILYRVGDGVYLPPEAFTFNIKLSSPVKRPRKEPVDEDLYPEHYRKYSDYIKGSNLDAPEPYRIGRIKEIFCPKKSNGRPNETDIKIRVNKFYRPENTHKSTPASYHADINLLYWSDEEAVVDFKAVQGRCTVEYGEDLPECVQVYSMGGPNRFYFLEAYNAKSKSFEDPPNHARSPGNKGKGKGKGKGKPKSQACEPSEPEIEIKLPKLRTLDVFSGCGGLSEGFHQAGISDTLWAIEMWDPAAQAFRLNNPGSTVFTEDCNILLKLVMAGETTNSRGQRLPQKGDVEMLCGGPPCQGFSGMNRFNSRTYSKFKNSLVVSFLSYCDYYRPRFFLLENVRNFVSFKRSMVLKLTLRCLVRMGYQCTFGVLQAGQYGVAQTRRRAIILAAAPGEKLPLFPEPLHVFAPRACQLSVVVDDKKFVSNITRLSSGPFRTITVRDTMSDLPEVRNGASALEISYNGEPQSWFQRQLRGAQYQPILRDHICKDMSALVAARMRHIPLAPGSDWRDLPNIEVRLSDGTMARKLRYTHHDRKNGRSSSGALRGVCSCVEAGKACDPAARQFNTLIPWCLPHTGNRHNHWAGLYGRLEWDGFFSTTVTNPEPMGKQGRVLHPEQHRVVSVRECARSQGFPDTYRLFGNILDKHRQVGNAVPPPLAKAIGLEIKLCMLAKARESASAKIKEEEAAKD

SEQ ID NO: 867410 - protein, 67 aa, Homo sapiens
AEIEPEGQSVALKEQAKTHGGDSSLAVGNAVPPPLAKAIGLEIKLCMLAKARESASAKIKEEEAAKD

SEQ ID NO: 867411 - protein, 1617 aa, Homo sapiens
PSPSRGRPGDADAKAPPARAGSRAGLARLKDLERDSLTEKECVKEKLNLLHEFLQTEIKNQLCDLETKLRKEELSEEGYLAKVKSLLNKDLSLENGAHAYNREVNGRLENGNQARSEARRVGMADANSPPKPLSKPRTPRRSKSDGEAKPEPSPSPRITRKSTRQTTITSHFAKGPAKRKPQEESERAKSDESIKEEDKDQDEKRRRVTSRERVARPLPAEEPERAKSGTRTEKEEERDEKEEKRLRSQTKEPTPKQKLKEEPDREARAGVQADEDEDGDEKDEKKHRSQPKDLAAKRRPEEKEPEKVNPQISDEKDEDEKEEKRRKTTPKEPTEKKMARAKTVMNSKTHPPKCIQCGQYLDDPDLKYGQHPPDAVDEPQMLTNEKLSIFDANESGFESYEALPQHKLTCFSVYCKHGHLCPIDTGLIEKNIELFFSGSAKPIYDDDPSLEGGVNGKNLGPINEWWITGFDGGEKALIGFSTSFAEYILMDPSPEYAPIFGLMQEKIYISKIVVEFLQSNSDSTYEDLINKIETTVPPSGLNLNRFTEDSLLRHAQFVVEQVESYDEAGDSDEQPIFLTPCMRDLIKLAGVTLGQRRAQARRQTIRHSTREKDRGPTKATTTKLVYQIFDTFFAEQIEKDDREDKENAFKRRRCGVCEVCQQPECGKCKACKDMVKFGGSGRSKQACQERRCPNMAMKEADDDEEVDDNIPEMPSPKKMHQGKKKKQNKNRISWVGEAVKTDGKKSYYKKVCIDAETLEVGDCVSVIPDDSSKPLYLARVTALWEDSSNGQMFHAHWFCAGTDTVLGATSDPLELFLVDECEDMQLSYIHSKVKVIYKAPSENWAMEGGMDPESLLEGDDGKTYFYQLWYDQDYARFESPPKTQPTEDNKFKFCVSCARLAEMRQKEIPRVLEQLEDLDSRVLYYSATKNGILYRVGDGVYLPPEAFTFNIKLSSPVKRPRKEPVDEDLYPEHYRKYSDYIKGSNLDAPEPYRIGRIKEIFCPKKSNGRPNETDIKIRVNKFYRPENTHKSTPASYHADINLLYWSDEEAVVDFKAVQGRCTVEYGEDLPECVQVYSMGGPNRFYFLEAYNAKSKSFEDPPNHARSPGNKGKGKGKGKGKPKSQACEPSEPEIEIKLPKLRTLDVFSGCGGLSEGFHQAGISDTLWAIEMWDPAAQAFRLNNPGSTVFTEDCNILLKLVMAGETTNSRGQRLPQKGDVEMLCGGPPCQGFSGMNRFNSRTYSKFKNSLVVSFLSYCDYYRPRFFLLENVRNFVSFKRSMVLKLTLRCLVRMGYQCTFGVLQAGQYGVAQTRRRAIILAAAPGEKLPLFPEPLHVFAPRACQLSVVVDDKKFVSNITRLSSGPFRTITVRDTMSDLPEVRNGASALEISYNGEPQSWFQRQLRGAQYQPILRDHICKDMSALVAARMRHIPLAPGSDWRDLPNIEVRLSDGTMARKLRYTHHDRKNGRSSSGALRGVCSCVEAGKACDPAARQFNTLIPWCLPHTGNRHNHWAGLYGRLEWDGFFSTTVTNPEPMGKQGRVLHPEQHRVVSVRECARSQGFPDTYRLFGNILDKHRQVGNAVPPPLAKAIGLEIKLCMLAKARESASAKIKEEEAAKD

SEQ ID NO: 867412 - protein, 1495 aa, Homo sapiens [sequence omitted]

SEQ ID NO: 867413 - protein, 1036 aa, Homo sapiens
MRDLIKLAGVTLGQRRAQARRQTIRHSTREKDRGPTKATTTKLVYQIFDTFFAEQIEKDDREDKENAFKRRRCGVCEVCQQPECGKCKACKDMVKFGGSGRSKQACQERRCPNMAMKEADDDEEVDDNIPEMPSPKKMHQGKKKKQNKNRISWVGEAVKTDGKKSYYKKVCIDAETLEVGDCVSVIPDDSSKPLYLARVTALWEDSSNGQMFHAHWFCAGTDTVLGATSDPLELFLVDECEDMQLSYIHSKVKVIYKAPSENWAMEGGMDPESLLEGDDGKTYFYQLWYDQDYARFESPPKTQPTEDNKFKFCVSCARLAEMRQKEIPRVLEQLEDLDSRVLYYSATKNGILYRVGDGVYLPPEAFTFNIKLSSPVKRPRKEPVDEDLYPEHYRKYSDYIKGSNLDAPEPYRIGRIKEIFCPKKSNGRPNETDIKIRVNKFYRPENTHKSTPASYHADINLLYWSDEEAVVDFKAVQGRCTVEYGEDLPECVQVYSMGGPNRFYFLEAYNAKSKSFEDPPNHARSPGNKGKGKGKGKGKPKSQACEPSEPEIEIKLPKLRTLDVFSGCGGLSEGFHQAGISDTLWAIEMWDPAAQAFRLNNPGSTVFTEDCNILLKLVMAGETTNSRGQRLPQKGDVEMLCGGPPCQGFSGMNRFNSRTYSKFKNSLVVSFLSYCDYYRPRFFLLENVRNFVSFKRSMVLKLTLRCLVRMGYQCTFGVLQAGQYGVAQTRRRAIILAAAPGEKLPLFPEPLHVFAPRACQLSVVVDDKKFVSNITRLSSGPFRTITVRDTMSDLPEVRNGASALEISYNGEPQSWFQRQLRGAQYQPILRDHICKDMSALVAARMRHIPLAPGSDWRDLPNIEVRLSDGTMARKLRYTHHDRKNGRSSSGALRGVCSCVEAGKACDPAARQFNTLIPWCLPHTGNRHNHWAGLYGRLEWDGFFSTTVTNPEPMGKQGRVLHPEQHRVVSVRECARSQGFPDTYRLFGNILDKHRQVGNAVPPPLAKAIGLEIKLCMLAKARESASAKIKEEEAAKD

SEQ ID NO: 867414 - protein, 1434 aa, Homo sapiens
PSPSRGRPGDADAKAPPARAGSRAGLARLKDLERDSLTEKECVKEKLNLLHEFLQTEIKNQLCDLETKLRKEELSEEGYLAKVKSLLNKDLSLENGAHAYNREVNGRLENGNQARSEARRVGMADANSPPKPLSKPRTPRRSKSDGEAKRSRDPPASASQVTGIRAEPSPSPRITRKSTRQTTITSHFAKGPAKRKPQEESERAKSDESIKEEDKDQDEKRRRVTSRERVYCKHGHLCPIDTGLIEKNIELFFSGSAKPIYDDDPSLEGGVNGKNLGPINEWWITGFDGGEKALIGFSTSFAEYILMDPSPEYAPIFGLMQEKIYISKIVVEFLQSNSDSTYEDLINKIETTVPPSGLNLNRFTEDSLLRHAQFVVEQVESYDEAGDSDEQPIFLTPCMRDLIKLAGVTLGQRRAQARRQTIRHSTREKDRGPTKATTTKLVYQIFDTFFAEQIEKDDREDKENAFKRRRCGVCEVCQQPECGKCKACKDMVKFGGSGRSKQACQERRCPNMAMKEADDDEEVDDNIPEMPSPKKMHQGKKKKQNKNRISWVGEAVKTDGKKSYYKKVCIDAETLEVGDCVSVIPDDSSKPLYLARVTALWEDSSNGQMFHAHWFCAGTDTVLGATSDPLELFLVDECEDMQLSYIHSKVKVIYKAPSENWAMEGGMDPESLLEGDDGKTYFYQLWYDQDYARFESPPKTQPTEDNKFKFCVSCARLAEMRQKEIPRVLEQLEDLDSRVLYYSATKNGILYRVGDGVYLPPEAFTFNIKLSSPVKRPRKEPVDEDLYPEHYRKYSDYIKGSNLDAPEPYRIGRIKEIFCPKKSNGRPNETDIKIRVNKFYRPENTHKSTPASYHADINLLYWSDEEAVVDFKAVQGRCTVEYGEDLPECVQVYSMGGPNRFYFLEAYNAKSKSFEDPPNHARSPGNKGKGKGKGKGKPKSQACEPSEPEIEIKLPKLRTLDVFSGCGGLSEGFHQAGISDTLWAIEMWDPAAQAFRLNNPGSTVFTEDCNILLKLVMAGETTNSRGQRLPQKGDVEMLCGGPPCQGFSGMNRFNSRTYSKFKNSLVVSFLSYCDYYRPRFFLLENVRNFVSFKRSMVLKLTLRCLVRMGYQCTFGVLQAGQYGVAQTRRRAIILAAAPGEKLPLFPEPLHVFAPRACQLSVVVDDKKFVSNITRLSSGPFRTITVRDTMSDLPEVRNGASALEISYNGEPQSWFQRQLRGAQYQPILRDHICKDMSALVAARMRHIPLAPGSDWRDLPNIEVRLSDGTMARKLRYTHHDRKNGRSSSGALRGVCSCVEAGKACDPAARQFNTLIPWCLPHTGNRHNHWAGLYGRLEWDGFFSTTVTNPEPMGKQGRVLHPEQHRVVSVRECARSQGFPDTYRLFGNILDKHRQVGNAVPPPLAKAIGLEIKLCMLAKARESASAKIKEEEAAKD

SEQ ID NO: 867415 - protein, 1616 aa, Homo sapiens
MPARTAPARVPTLAVPAISLPDDVRRRLKDLERDSLTEKECVKEKLNLLHEFLQTEIKNQLCDLETKLRKEELSEEGYLAKVKSLLNKDLSLENGAHAYNREVNGRLENGNQARSEARRVGMADANSPPKPLSKPRTPRRSKSDGEAKPEPSPSPRITRKSTRQTTITSHFAKGPAKRKPQEESERAKSDESIKEEDKDQDEKRRRVTSRERVARPLPAEEPERAKSGTRTEKEEERDEKEEKRLRSQTKEPTPKQKLKEEPDREARAGVQADEDEDGDEKDEKKHRSQPKDLAAKRRPEEKEPEKVNPQISDEKDEDEKEEKRRKTTPKEPTEKKMARAKTVMNSKTHPPKCIQCGQYLDDPDLKYGQHPPDAVDEPQMLTNEKLSIFDANESGFESYEALPQHKLTCFSVYCKHGHLCPIDTGLIEKNIELFFSGSAKPIYDDDPSLEGGVNGKNLGPINEWWITGFDGGEKALIGFSTSFAEYILMDPSPEYAPIFGLMQEKIYISKIVVEFLQSNSDSTYEDLINKIETTVPPSGLNLNRFTEDSLLRHAQFVVEQVESYDEAGDSDEQPIFLTPCMRDLIKLAGVTLGQRRAQARRQTIRHSTREKDRGPTKATTTKLVYQIFDTFFAEQIEKDDREDKENAFKRRRCGVCEVCQQPECGKCKACKDMVKFGGSGRSKQACQERRCPNMAMKEADDDEEVDDNIPEMPSPKKMHQGKKKKQNKNRISWVGEAVKTDGKKSYYKKVCIDAETLEVGDCVSVIPDDSSKPLYLARVTALWEDSSNGQMFHAHWFCAGTDTVLGATSDPLELFLVDECEDMQLSYIHSKVKVIYKAPSENWAMEGGMDPESLLEGDDGKTYFYQLWYDQDYARFESPPKTQPTEDNKFKFCVSCARLAEMRQKEIPRVLEQLEDLDSRVLYYSATKNGILYRVGDGVYLPPEAFTFNIKLSSPVKRPRKEPVDEDLYPEHYRKYSDYIKGSNLDAPEPYRIGRIKEIFCPKKSNGRPNETDIKIRVNKFYRPENTHKSTPASYHADINLLYWSDEEAVVDFKAVQGRCTVEYGEDLPECVQVYSMGGPNRFYFLEAYNAKSKSFEDPPNHARSPGNKGKGKGKGKGKPKSQACEPSEPEIEIKLPKLRTLDVFSGCGGLSEGFHQAGISDTLWAIEMWDPAAQAFRLNNPGSTVFTEDCNILLKLVMAGETTNSRGQRLPQKGDVEMLCGGPPCQGFSGMNRFNSRTYSKFKNSLVVSFLSYCDYYRPRFFLLENVRNFVSFKRSMVLKLTLRCLVRMGYQCTFGVLQAGQYGVAQTRRRAIILAAAPGEKLPLFPEPLHVFAPRACQLSVVVDDKKFVSNITRLSSGPFRTITVRDTMSDLPEVRNGASALEISYNGEPQSWFQRQLRGAQYQPILRDHICKDMSALVAARMRHIPLAPGSDWRDLPNIEVRLSDGTMARKLRYTHHDRKNGRSSSGALRGVCSCVEAGKACDPAARQFNTLIPWCLPHTGNRHNHWAGLYGRLEWDGFFSTTVTNPEPMGKQGRVLHPEQHRVVSVRECARSQGFPDTYRLFGNILDKHRQVGNAVPPPLAKAIGLEIKLCMLAKARESASAKIKEEEAAKD

SEQ ID NO: 867416 - protein, 1616 aa, Homo sapiens; identical to SEQ ID NO: 867415

SEQ ID NO: 867417 - protein, 1589 aa, Homo sapiens
MPARTAPARVPTLAVPAISLPDDVRRRLKDLERDSLTEKECVKEKLNLLHEFLQTEIKNQLCDLETKLRKEELSEEGYLAKVKSLLNKDLSLENGAHAYNREVNGRLENGNQARSEARRVGMADANSPPKPLSKPRTPRRSKSDGEAKPEPSPSPRITRKSTRQTTITSHFAKGPAKRKPQEESERAKSDESIKEEDKDQDEKRRRVTSRERVARPLPAEEPERAKSGTRTEKEEERDEKEEKRLRSQTKEPTPKQKLKEEPDREARAGVQADEDEDGDEKDEKKHRSQPKDLAAKRRPEEKEPEKVNPQISDEKDEDEKEEKRRKTTPKEPTEKKMARAKTVMNSKTHPPKCIQCGQYLDDPDLKYGQHPPDAVDEPQMLTNEKLSIFDANESGFESYEALPQHKLTCFSVYCKHGHLCPIDTGLIEKNIELFFSGSAKPIYDDDPSLEGGVNGKNLGPINEWWITGFDGGEKALIGFSTSFAEYILMDPSPEYAPIFGLMQEKIYISKIVVEFLQSNSDSTYEDLINKIETTVPPSGLNLNRFTEDSLLRHAQFVVEQVESYDEAGDSDEQPIFLTPCMRDLIKLAGVTLGQRRAQARRQTIRHSTREKDRGPTKATTTKLVYQIFDTFFAEQIEKDDREDKENAFKRRRCGVCEVCQQPECGKCKACKDMVKFGGSGRSKQACQERRCPNMAMKEADDDEEVDDNIPEMPSPKKMHQGKKKKQNKNRISWVGEAVKTDGKKSYYKKVCIDAETLEVGDCVSVIPDDSSKPLYLARVTALWEDSSNGQMFHAHWFCAGTDTVLGATSDPLELFLVDECEDMQLSYIHSKVKVIYKAPSENWAMEGGMDPESLLEGDDGKTYFYQLWYDQDYARFESPPKTQPTEDNKFKFCVSCARLAEMRQKEIPRVLEQLEDLDSRVLYYSATKNGILYRVGDGVYLPPEAFTFNIKLSSPVKRPRKEPVDEDLYPEHYRKYSDYIKGSNLDAPEPYRIGRIKEIFCPKKSNGRPNETDIKIRVNKFYRPENTHKSTPASYHADINLLYWSDEEAVVDFKAVQGRCTVEYGEDLPECVQVYSMGGPNRFYFLEAYNAKSKSFEDPPNHARSPGNKGKGKGKGKGKPKSQACEPSEPEIEIKLPKLRTLDVFSGCGGLSEGFHQAGISDTLWAIEMWDPAAQAFRLNNPGSTVFTEDCNILLKLVMAGETTNSRGQRLPQKGDVEMLCGGPPCQGFSGMNRFNSRTYSKFKNSLVVSFLSYCDYYRPRFFLLENVRNFVSFKRSMVLKLTLRCLVRMGYQCTFGVLQAGQYGVAQTRRRAIILAAAPGEKLPLFPEPLHVFAPRACQLSVVVDDKKFVSNITRLSSGPFRTITVRDTMSDLPEVRNGASALEISYNGEPQSWFQRQLRGAQYQPILRDHICKDMSALVAARMRHIPLAPGSDWRDLPNIEVRLSDGTMARKLRYTHHDRKNGRSSSGALRGVCSCVEAGKACDPAARQFNTLIPWCLPHTGNRHNHWAGLYGRLEWDGFFSTTVTNPEPMGKQGRVLHPEQHRVVSVRECARSQGFPDTYRLFGNILDKHRQVGNAVPPPLAKAIG

SEQ ID NO: 867418 - protein, 1577 aa, Homo sapiens
MPARTAPARVPTLAVPAISLPDDVRRRLKDLERDSLTEKECVKEKLNLLHEFLQTEIKNQLCDLETKLRKEELSEEGYLAKVKSLLNKDLSLENGAHAYNREVNGRLENGNQARSEARRVGMADANSPPKPLSKPRTPRRSKSDGEAKPEPSPSPRITRKSTRQTTITSHFAKGPAKRKPQEESERAKSDESIKEEDKDQDEKRRRVTSRERVARPLPAEEPERAKSGTRTEKEEERDEKEEKRLRSQTKEPTPKQKLKEEPDREARAGVQADEDEDGDEKDEKKHRSQPKDLAAKRRPEEKEPEKVNPQISDEKDEDEKEEKRRKTTPKEPTEKKMARAKTVMNSKTHPPKCIQCGQYLDDPDLKYGQHPPDAVDEPQMLTNEKLSIFDANESGFESYEALPQHKLTCFSVYCKHGHLCPIDTGLIEKNIELFFSGSAKPIYDDDPSLEGGVNGKNLGPINEWWITGFDGGEKALIGFSTSFAEYILMDPSPEYAPIFGLMQEKIYISKIVVEFLQSNSDSTYEDLINKIETTVPPSGLNLNRFTEDSLLRHAQFVVEQVESYDEAGDSDEQPIFLTPCMRDLIKLAGVTLGQRRAQARRQTIRHSTREKDRGPTKATTTKLVYQIFDTFFAEQIEKDDREDKENAFKRRRCGVCEVCQQPECGKCKACKDMVKFGGSGRSKQACQERRCPNMAMKEADDDEEVDDNIPEMPSPKKMHQGKKKKQNKNRISWVGEAVKTDGKKSYYKKVCIDAETLEVGDCVSVIPDDSSKPLYLARVTALWEDSSNGQMFHAHWFCAGTDTVLGATSDPLELFLVDECEDMQLSYIHSKVKVIYKAPSENWAMEGGMDPESLLEGDDGKTYFYQLWYDQDYARFESPPKTQPTEDNKFKFCVSCARLAEMRQKEIPRVLEQLEDLDSRVLYYSATKNGILYRVGDGVYLPPEAFTFNIKLSSPVKRPRKEPVDEDLYPEHYRKYSDYIKGSNLDAPEPYRIGRIKEIFCPKKSNGRPNETDIKIRVNKFYRPENTHKSTPASYHADINLLYWSDEEAVVDFKAVQGRCTVEYGEDLPECVQVYSMGGPNRFYFLEAYNAKSKSFEDPPNHARSPGNKGKGKGKGKGKPKSQACEPSEPEIEIKLPKLRTLDVFSGCGGLSEGFHQAGISDTLWAIEMWDPAAQAFRLNNPGSTVFTEDCNILLKLVMAGETTNSRGQRLPQKGDVEMLCGGPPCQGFSGMNRFNSRTYSKFKNSLVVSFLSYCDYYRPRFFLLENVRNFVSFKRSMVLKLTLRCLVRMGYQCTFGVLQAGQYGVAQTRRRAIILAAAPGEKLPLFPEPLHVFAPRACQLSVVVDDKKFVSNITRLSSGPFRTITVRDTMSDLPEVRNGASALEISYNGEPQSWFQRQLRGAQYQPILRDHICKDMSALVAARMRHIPLAPGSDWRDLPNIEVRLSDGTMARKLRYTHHDRKNGRSSSGALRGVCSCVEAGKACDPAARQFNTLIPWCLPHTGNRHNHWAGLYGRLEWDGFFSTTVTNPEPMGKQGRVLHPEQHRVVSVRECARSQGFPDTYRLFGNILDKHRQLK

SEQ ID NO: 867419 - protein, 576 aa, Homo sapiens
MIYWSDEEAVVDFKAVQGRCTVEYGEDLPECVQVYSMGGPNRFYFLEAYNAKSKSFEDPPNHARSPGNKGKGKGKGKGKPKSQACEPSEPEIEIKLPKLRTLDVFSGCGGLSEGFHQAGISDTLWAIEMWDPAAQAFRLNNPGSTVFTEDCNILLKLVMAGETTNSRGQRLPQKGDVEMLCGGPPCQGFSGMNRFNSRTYSKFKNSLVVSFLSYCDYYRPRFFLLENVRNFVSFKRSMVLKLTLRCLVRMGYQCTFGVLQAGQYGVAQTRRRAIILAAAPGEKLPLFPEPLHVFAPRACQLSVVVDDKKFVSNITRLSSGPFRTITVRDTMSDLPEVRNGASALEISYNGEPQSWFQRQLRGAQYQPILRDHICKDMSALVAARMRHIPLAPGSDWRDLPNIEVRLSDGTMARKLRYTHHDRKNGRSSSGALRGVCSCVEAGKACDPAARQFNTLIPWCLPHTGNRHNHWAGLYGRLEWDGFFSTTVTNPEPMGKQGRVLHPEQHRVVSVRECARSQGFPDTYRLFGNILDKHRQVGNAVPPPLAKAIGLEIKLCMLAKARESASAKIKEEEAAKD

SEQ ID NO: 867420 - protein, 1037 aa, Homo sapiens
MPARTAPARVPTLAVPAISLPDDVRRRLKDLERDSLTEKECVKEKLNLLHEFLQTEIKNQLCDLETKLRKEELSEEGYLAKVKSLLNKDLSLENGAHAYNREVNGRLENGNQARSEARRVGMADANSPPKPLSKPRTPRRSKSDGEAKPEPSPSPRITRKSTRQTTITSHFAKGPAKRKPQEESERAKSDESIKEEDKDQDEKRRRVTSRERVARPLPAEEPERAKSGTRTEKEEERDEKEEKRLRSQTKEPTPKQKLKEEPDREARAGVQADEDEDGDEKDEKKHRSQPKDLAAKRRPEEKEPEKVNPQISDEKDEDEKEEKRRKTTPKEPTEKKMARAKTVMNSKTHPPKCIQCGQYLDDPDLKYGQHPPDAVDEPQMLTNEKLSIFDANESGFESYEALPQHKLTCFSVYCKHGHLCPIDTGLIEKNIELFFSGSAKPIYDDDPSLEGGVNGKNLGPINEWWITGFDGGEKALIGFSTSFAEYILMDPSPEYAPIFGLMQEKIYISKIVVEFLQSNSDSTYEDLINKIETTVPPSGLNLNRFTEDSLLRHAQFVVEQVESYDEAGDSDEQPIFLTPCMRDLIKLAGVTLGQRRAQARRQTIRHSTREKDRGPTKATTTKLVYQIFDTFFAEQIEKDDREDKENAFKRRRCGVCEVCQQPECGKCKACKDMVKFGGSGRSKQACQERRCPNMAMKEADDDEEVDDNIPEMPSPKKMHQGKKKKQNKNRISWVGEAVKTDGKKSYYKKVCIDAETLEVGDCVSVIPDDSSKPLYLARVTALWEDSSNGQMFHAHWFCAGTDTVLGATSDPLELFLVDECEDMQLSYIHSKVKVIYKAPSENWAMEGGMDPESLLEGDDGKTYFYQLWYDQDYARFESPPKTQPTEDNKFKFCVSCARLAEMRQKEIPRVLEQLEDLDSRVLYYSATKNGILYRVGDGVYLPPEAFTFNIKLSSPVKRPRKEPVDEDLYPEHYRKYSDYIKGSNLDAPEPYRIGRIKEIFCPKKSNGRPNETDIKIRVNKFYRSAEASVLPRGHRLF

SEQ ID NO: 867421 - protein, 949 aa, Homo sapiens
MPARTAPARVPTLAVPAISLPDDVRRRLKDLERDSLTEKECVKEKLNLLHEFLQTEIKNQLCDLETKLRKEELSEEGYLAKVKSLLNKDLSLENGAHAYNREVNGRLENGNQARSEARRVGMADANSPPKPLSKPRTPRRSKSDGEAKPEPSPSPRITRKSTRQTTITSHFAKGPAKRKPQEESERAKSDESIKEEDKDQDEKRRRVTSRERVARPLPAEEPERAKSGTRTEKEEERDEKEEKRLRSQTKEPTPKQKLKEEPDREARAGVQADEDEDGDEKDEKKHRSQPKDLAAKRRPEEKEPEKVNPQISDEKDEDEKEEKRRKTTPKEPTEKKMARAKTVMNSKTHPPKCIQCGQYLDDPDLKYGQHPPDAVDEPQMLTNEKLSIFDANESGFESYEALPQHKLTCFSVYCKHGHLCPIDTGLIEKNIELFFSGSAKPIYDDDPSLEGGVNGKNLGPINEWWITGFDGGEKALIGFSTSFAEYILMDPSPEYAPIFGLMQEKIYISKIVVEFLQSNSDSTYEDLINKIETTVPPSGLNLNRFTEDSLLRHAQFVVEQVESYDEAGDSDEQPIFLTPCMRDLIKLAGVTLGQRRAQARRQTIRHSTREKDRGPTKATTTKLVYQIFDTFFAEQIEKDDREDKENAFKRRRCGVCEVCQQPECGKCKACKDMVKFGGSGRSKQACQERRCPNMAMKEADDDEEVDDNIPEMPSPKKMHQGKKKKQNKNRISWVGEAVKTDGKKSYYKKVCIDAETLEVGDCVSVIPDDSSKPLYLARVTALWEDSSNGQMFHAHWFCAGTDTVLGATSDPLELFLVDECEDMQLSYIHSKVKVIYKAPSENWAMEGGMDPESLLEGDDGKTYFYQLWYDQDYARFESPPKTQPTEDNKFKFCVSCARLAEMRQKEIPRVLEQLEDLDSRVLYYSATKNGILYRVGDGVYLPPEAFTFK

SEQ ID NO: 867422 - protein, 819 aa, Homo sapiens
MPARTAPARVPTLAVPAISLPDDVRRRLKDLERDSLTEKECVKEKLNLLHEFLQTEIKNQLCDLETKLRKEELSEEGYLAKVKSLLNKDLSLENGAHAYNREVNGRLENGNQARSEARRVGMADANSPPKPLSKPRTPRRSKSDGEAKPEPSPSPRITRKSTRQTTITSHFAKGPAKRKPQEESERAKSDESIKEEDKDQDEKRRRVTSRERVARPLPAEEPERAKSGTRTEKEEERDEKEEKRLRSQTKEPTPKQKLKEEPDREARAGVQADEDEDGDEKDEKKHRSQPKDLAAKRRPEEKEPEKVNPQISDEKDEDEKEEKRRKTTPKEPTEKKMARAKTVMNSKTHPPKCIQCGQYLDDPDLKYGQHPPDAVDEPQMLTNEKLSIFDANESGFESYEALPQHKLTCFSVYCKHGHLCPIDTGLIEKNIELFFSGSAKPIYDDDPSLEGGVNGKNLGPINEWWITGFDGGEKALIGFSTSFAEYILMDPSPEYAPIFGLMQEKIYISKIVVEFLQSNSDSTYEDLINKIETTVPPSGLNLNRFTEDSLLRHAQFVVEQVESYDEAGDSDEQPIFLTPCMRDLIKLAGVTLGQRRAQARRQTIRHSTREKDRGPTKATTTKLVYQIFDTFFAEQIEKDDREDKENAFKRRRCGVCEVCQQPECGKCKACKDMVKFGGSGRSKQACQERRCPYVHDRRQMTMTDVAILPEMRGQAKCQGRTSTRHGSHPCVDTPADGWEQRHIHNGAMTAKLDCRRADYRDTKRDSASLVNASLGFNHGYGDKLGRLQRLRRVRNTHVPENRATQHNSATQLRRPSPRP

SEQ ID NO: 867423 - protein, 586 aa, Homo sapiens
MPARTAPARVPTLAVPAISLPDDVRRRLKDLERDSLTEKECVKEKLNLLHEFLQTEIKNQLCDLETKLRKEELSEEGYLAKVKSLLNKDLSLENGAHAYNREVNGRLENGNQARSEARRVGMADANSPPKPLSKPRTPRRSKSDGEAKPEPSPSPRITRKSTRQTTITSHFAKGPAKRKPQEESERAKSDESIKEEDKDQDEKRRRVTSRERVARPLPAEEPERAKSGTRTEKEEERDEKEEKRLRSQTKEPTPKQKLKEEPDREARAGVQADEDEDGDEKDEKKHRSQPKDLAAKRRPEEKEPEKVNPQISDEKDEDEKEEKRRKTTPKEPTEKKMARAKTVMNSKTHPPKCIQCGQYLDDPDLKYGQHPPDAVDEPQMLTNEKLSIFDANESGFESYEALPQHKLTCFSVYCKHGHLCPIDTGLIEKNIELFFSGSAKPIYDDDPSLEGGVNGKNLGPINEWWITGFDGGEKALIGFSTSFAEYILMDPSPEYAPIFGLMQEKIYISKIVVEFLQSNSDSTYEDLINKIETTVPPSGLNLNRFTEDSLLRHAQFVVEQVESYDEAGDSDETRKMRRSTEVNPKI

SEQ ID NO: 867424 - protein, 310 aa, Homo sapiens
PSPSRGRPGDADAKAPPARAGSRAGLARLKDLERDSLTEKECVKEKLNLLHEFLQTEIKNQLCDLETKLRKEELSEEGYLAKVKSLLNKDLSLENGAHAYNREVNGRLENGNQARSEARRVGMADANSPPKPLSKPRTPRRSKSDGEAKRSRDPPASASQVTGIRAEPSPSPRITRKSTRQTTITSHFAKGPAKRKPQEESERAKSDESIKEEDKDQDEKRRRVTSRERVARPLPAEEPERAKSGTRTEKEEERDEKEEKRLRSQTKEPTPKQKLKEEPDREARAGVQADEDEDGDEKCEKHRRRPETTS

SEQ ID NO: 867425 - protein, 102 aa, Homo sapiens
SIRAPTPSSKTLWWFPSSGKRVEAPQCCQTARGCAACQQWSFSPCTEASAPRKLTAQLSPGRDFDNIREGFRTVGRFFPLSVEVTPAVSPAPYSYCDYYRPR

SEQ ID NO: 867426 - protein, 1616 aa, Homo sapiens; identical to SEQ ID NO: 867415

SEQ ID NO: 867427 - protein, 1760 aa, Homo sapiens
TLEVPQFDGDSQADAVDEPQMLTNEKLSIFDANESGYESYEALPQHKLTCFSVYCKHGHLCPIDTGLIEKNIELFFSGSAKPIYDDDPSLEGGVNGKNLGPINEWWITGFDGGEKALIGFSTSFAEYILMDPRPEYAPIFGLMQEKIYISKIVVEFLAVPAISLPDDVRRRLKDLERDSLTEKECVKEKLNLLHEFLQTEIKNQLCDLETKLRKEELSEEGYLAKVKSLLNKDLSLENGAHAYNREVNGRLENGNQARSEARRVGMADANSPPKPLSKPRTPRRSKSDGEAKPEPSPSPRITRKSTRQTTITSHFAKGPAKRKPQEESERAKSDESIKEEDKDQDEKRRRVTSRERVARPLPAEEPERAKSGTRTEKEEERDEKEEKRLRSQTKEPTPKQKLKEEPDREARAGVQADEDEDGDEKDEKKHRSQPKDLAAKRRPEEKEPEKVNPQISDEKDEDEKEEKRRKTTPKEPTEKKMARAKTVMNSKTHPPKCIQCGQYLDDPDLKYGQHPPDAVDEPQMLTNEKLSIFDANESGFESYEALPQHKLTCFSVYCKHGHLCPIDTGLIEKNIELFFSGSAKPIYDDDPSLEGGVNGKNLGPINEWWITGFDGGEKALIGFSTSFAEYILMDPSPEYAPIFGLMQEKIYISKIVVEFLQSNSDSTYEDLINKIETTVPPSGLNLNRFTEDSLLRHAQFVVEQVESYDEAGDSDEQPIFLTPCMRDLIKLAGVTLGQRRAQARRQTIRHSTREKDRGPTKATTTKLVYQIFDTFFAEQIEKDDREDKENAFKRRRCGVCEVCQQPECGKCKACKDMVKFGGSGRSKQACQERRCPNMAMKEADDDEEVDDNIPEMPSPKKMHQGKKKKQNKNRISWVGEAVKTDGKKSYYKKVCIDAETLEVGDCVSVIPDDSSKPLYLARVTALWEDSSNGQMFHAHWFCAGTDTVLGATSDPLELFLVDECEDMQLSYIHSKVKVIYKAPSENWAMEGGMDPESLLEGDDGKTYFYQLWYDQDYARFESPPKTQPTEDNKFKFCVSCARLAEMRQKEIPRVLEQLEDLDSRVLYYSATKNGILYRVGDGVYLPPEAFTFNIKLSSPVKRPRKEPVDEDLYPEHYRKYSDYIKGSNLDAPEPYRIGRIKEIFCPKKSNGRPNETDIKIRVNKFYRPENTHKSTPASYHADINLLYWSDEEAVVDFKAVQGRCTVEYGEDLPECVQVYSMGGPNRFYFLEAYNAKSKSFEDPPNHARSPGNKGKGKGKGKGKPKSQACEPSEPEIEIKLPKLRTLDVFSGCGGLSEGFHQAGISDTLWAIEMWDPAAQAFRLNNPGSTVFTEDCNILLKLVMAGETTNSRGQRLPQKGDVEMLCGGPPCQGFSGMNRFNSRTYSKFKNSLVVSFLSYCDYYRPRFFLLENVRNFVSFKRSMVLKLTLRCLVRMGYQCTFGVLQAGQYGVAQTRRRAIILAAAPGEKLPLFPEPLHVFAPRACQLSVVVDDKKFVSNITRLSSGPFRTITVRDTMSDLPEVRNGASALEISYNGEPQSWFQRQLRGAQYQPILRDHICKDMSALVAARMRHIPLAPGSDWRDLPNIEVRLSDGTMARKLRYTHHDRKNGRSSSGALRGVCSCVEAGKACDPAARQFNTLIPWCLPHTGNRHNHWAGLYGRLEWDGFFSTTVTNPEPMGKQGRVLHPEQHRVVSVRECARSQGFPDTYRLFGNILDKHRQVGNAVPPPLAKAIGLEIKLCMLAKARESASAKIKEEEAAKD

SEQ ID NO: 867428 - protein, 1601 aa, Homo sapiens
MVRTAEGVYDLGLKDLERDSLTEKECVKEKLNLLHEFLQTEIKNQLCDLETKLRKEELSEEGYLAKVKSLLNKDLSLENGAHAYNREVNGRLENGNQARSEARRVGMADANSPPKPLSKPRTPRRSKSDGEAKPEPSPSPRITRKSTRQTTITSHFAKGPAKRKPQEESERAKSDESIKEEDKDQDEKRRRVTSRERVARPLPAEEPERAKSGTRTEKEEERDEKEEKRLRSQTKEPTPKQKLKEEPDREARAGVQADEDEDGDEKDEKKHRSQPKDLAAKRRPEEKEPEKVNPQISDEKDEDEKEEKRRKTTPKEPTEKKMARAKTVMNSKTHPPKCIQCGQYLDDPDLKYGQHPPDAVDEPQMLTNEKLSIFDANESGFESYEALPQHKLTCFSVYCKHGHLCPIDTGLIEKNIELFFSGSAKPIYDDDPSLEGGVNGKNLGPINEWWITGFDGGEKALIGFSTSFAEYILMDPSPEYAPIFGLMQEKIYISKIVVEFLQSNSDSTYEDLINKIETTVPPSGLNLNRFTEDSLLRHAQFVVEQVESYDEAGDSDEQPIFLTPCMRDLIKLAGVTLGQRRAQARRQTIRHSTREKDRGPTKATTTKLVYQIFDTFFAEQIEKDDREDKENAFKRRRCGVCEVCQQPECGKCKACKDMVKFGGSGRSKQACQERRCPNMAMKEADDDEEVDDNIPEMPSPKKMHQGKKKKQNKNRISWVGEAVKTDGKKSYYKKVCIDAETLEVGDCVSVIPDDSSKPLYLARVTALWEDSSNGQMFHAHWFCAGTDTVLGATSDPLELFLVDECEDMQLSYIHSKVKVIYKAPSENWAMEGGMDPESLLEGDDGKTYFYQLWYDQDYARFESPPKTQPTEDNKFKFCVSCARLAEMRQKEIPRVLEQLEDLDSRVLYYSATKNGILYRVGDGVYLPPEAFTFNIKLSSPVKRPRKEPVDEDLYPEHYRKYSDYIKGSNLDAPEPYRIGRIKEIFCPKKSNGRPNETDIKIRVNKFYRPENTHKSTPASYHADINLLYWSDEEAVVDFKAVQGRCTVEYGEDLPECVQVYSMGGPNRFYFLEAYNAKSKSFEDPPNHARSPGNKGKGKGKGKGKPKSQACEPSEPEIEIKLPKLRTLDVFSGCGGLSEGFHQAGISDTLWAIEMWDPAAQAFRLNNPGSTVFTEDCNILLKLVMAGETTNSRGQRLPQKGDVEMLCGGPPCQGFSGMNRFNSRTYSKFKNSLVVSFLSYCDYYRPRFFLLENVRNFVSFKRSMVLKLTLRCLVRMGYQCTFGVLQAGQYGVAQTRRRAIILAAAPGEKLPLFPEPLHVFAPRACQLSVVVDDKKFVSNITRLSSGPFRTITVRDTMSDLPEVRNGASALEISYNGEPQSWFQRQLRGAQYQPILRDHICKDMSALVAARMRHIPLAPGSDWRDLPNIEVRLSDGTMARKLRYTHHDRKNGRSSSGALRGVCSCVEAGKACDPAARQFNTLIPWCLPHTGNRHNHWAGLYGRLEWDGFFSTTVTNPEPMGKQGRVLHPEQHRVVSVRECARSQGFPDTYRLFGNILDKHRQVGNAVPPPLAKAIGLEIKLCMLAKARESASAKIKEEEAAKD

SEQ ID NO: 867429 - protein, 1495 aa, Homo sapiens [sequence omitted]

SEQ ID NO: 867430 - protein, 1633 aa, Homo sapiens
PSPSRGRPGDADAKAPPARAGSRAGLARLKDLERDSLTEKECVKEKLNLLHEFLQTEIKNQLCDLETKLRKEELSEEGYLAKVKSLLNKDLSLENGAHAYNREVNGRLENGNQARSEARRVGMADANSPPKPLSKPRTPRRSKSDGEAKRSRDPPASASQVTGIRAEPSPSPRITRKSTRQTTITSHFAKGPAKRKPQEESERAKSDESIKEEDKDQDEKRRRVTSRERVARPLPAEEPERAKSGTRTEKEEERDEKEEKRLRSQTKEPTPKQKLKEEPDREARAGVQADEDEDGDEKDEKKHRSQPKDLAAKRRPEEKEPEKVNPQISDEKDEDEKEEKRRKTTPKEPTEKKMARAKTVMNSKTHPPKCIQCGQYLDDPDLKYGQHPPDAVDEPQMLTNEKLSIFDANESGFESYEALPQHKLTCFSVYCKHGHLCPIDTGLIEKNIELFFSGSAKPIYDDDPSLEGGVNGKNLGPINEWWITGFDGGEKALIGFSTSFAEYILMDPSPEYAPIFGLMQEKIYISKIVVEFLQSNSDSTYEDLINKIETTVPPSGLNLNRFTEDSLLRHAQFVVEQVESYDEAGDSDEQPIFLTPCMRDLIKLAGVTLGQRRAQARRQTIRHSTREKDRGPTKATTTKLVYQIFDTFFAEQIEKDDREDKENAFKRRRCGVCEVCQQPECGKCKACKDMVKFGGSGRSKQACQERRCPNMAMKEADDDEEVDDNIPEMPSPKKMHQGKKKKQNKNRISWVGEAVKTDGKKSYYKKVCIDAETLEVGDCVSVIPDDSSKPLYLARVTALWEDSSNGQMFHAHWFCAGTDTVLGATSDPLELFLVDECEDMQLSYIHSKVKVIYKAPSENWAMEGGMDPESLLEGDDGKTYFYQLWYDQDYARFESPPKTQPTEDNKFKFCVSCARLAEMRQKEIPRVLEQLEDLDSRVLYYSATKNGILYRVGDGVYLPPEAFTFNIKLSSPVKRPRKEPVDEDLYPEHYRKYSDYIKGSNLDAPEPYRIGRIKEIFCPKKSNGRPNETDIKIRVNKFYRPENTHKSTPASYHADINLLYWSDEEAVVDFKAVQGRCTVEYGEDLPECVQVYSMGGPNRFYFLEAYNAKSKSFEDPPNHARSPGNKGKGKGKGKGKPKSQACEPSEPEIEIKLPKLRTLDVFSGCGGLSEGFHQAGISDTLWAIEMWDPAAQAFRLNNPGSTVFTEDCNILLKLVMAGETTNSRGQRLPQKGDVEMLCGGPPCQGFSGMNRFNSRTYSKFKNSLVVSFLSYCDYYRPRFFLLENVRNFVSFKRSMVLKLTLRCLVRMGYQCTFGVLQAGQYGVAQTRRRAIILAAAPGEKLPLFPEPLHVFAPRACQLSVVVDDKKFVSNITRLSSGPFRTITVRDTMSDLPEVRNGASALEISYNGEPQSWFQRQLRGAQYQPILRDHICKDMSALVAARMRHIPLAPGSDWRDLPNIEVRLSDGTMARKLRYTHHDRKNGRSSSGALRGVCSCVEAGKACDPAARQFNTLIPWCLPHTGNRHNHWAGLYGRLEWDGFFSTTVTNPEPMGKQGRVLHPEQHRVVSVRECARSQGFPDTYRLFGNILDKHRQVGNAVPPPLAKAIGLEIKLCMLAKARESASAKIKEEEAAKD

SEQ ID NO: 867431 - protein, 1898 aa, Homo sapiens
MPARTAPARVPTLAVPAISLPDDVRRRLKDLERDSLTEKECVKEKLNLLHEFLQTEIKNQLCDLETKLRKEELSEEGYLAKVKSLLNKDLSLENGAHAYNREVNGRLENGNQARSEARRVGMADANSPPKPLSKPRTPRRSKSDGEAKPEPSPSPRITRKSTRQTTITSHFAKGPAKRKPQEESERAKSDESIKEEDKDQDEKRRRVTSRERVARPLPAEEPERAKSGTRTEKEEERDEKEEKRLRSQTKEPTPKQKLKEEPDREARAGVQADEDEDGDEKDEKKHRSQPKDLAAKRRPEEKEPEKVNPQISDEKDEDEKEEKRRKTTPKEPTEKKMARAKTVMNSKTHPPKCIQCGQYLDDPDLKYGQHPPDAVDEPQMLTNEKLSIFDANESGFESYEALPQHKLTCFSVYCKHGHLCPIDTGLIEKNIELFFSGSAKPIYDDDPSLEGGVNGKNLGPINEWWITGFDGGEKALIGFSTSFAEYILMDPSPEYAPIFGLMQEKIYISKIVVEFLQSNSDSTYEDLINKIETTVPPSGLNLNRFTEDSLLRHAQFVVEQVESYDEAGDSDEQPIFLTPCMRDLIKLAGVTLGQRRAQARRQTIRHSTREKDRGPTKATTTKLVYQIFDTFFAEQIEKDDREDKENAFKRRRCGVCEVCQQPECGKCKACKDMVKFGGSGRSKQACQERRCPNMAMKEADDDEEVDDNIPEMPSPKKMHQGKKKKQNKNRISWVGEAVKTDGKKSYYKKVCIDAETLEVGDCVSVIPDDSSKPLYLARVTALWEDSSNGQMFHAHWFCAGTDTVLGATSDPLELFLVDECEDMQLSYIHSKVKVIYKAPSENWAMEGGMDPESLLEGDDGKTYFYQLWYDQDYARFESPPKTQPTEDNKFKFCVSCARLAEMRQKEIPRVLEQLEDLDSRVLYYSATKNGILYRVGDGVYLPPEAFTFNIKLSSPVKRPRKEPVDEDLYPEHYRKYSDYIKGSNLDAPEPYRIGRIKEIFCPKKSNGRPNETDIKIRVNKFYRPENTHKSTPASYHADINLLYWSDEEAVVDFKAVQGRCTVEYGEDLPECVQVYSMGGPNRFYFLEVVPLLARGKASGSKLARRSLMSGYTQGGLAAGFQLFVRSGWLADVKLFLQELYGGLSRVLQSTSCMRFKWSRSLTLLVFKKYVIREPNVFSVLVQLNVEDHEAASTSLTGVFSMSWRRCPCSWVPWARRLRPGPAHMPVRVALVMERAHESADQAHDLEIVGAWPFRVVTLKRYIHVLPGMDEVAQLDSRFCIALFPVLEGTLKLLVIGISVSARSNVSINKMDVLSFYCSKVKLLLLVAELVMAPLREKLSDYQIAFLLVCVREGTVRFSPKRLQFSPFQAAYNAKSKSFEDPPNHARSPGNKGKGKGKGKGKPKSQACEPSEPEIEIKLPKLRTLDVFSGCGGLSEGFHQAGISDTLWAIEMWDPAAQAFRLNNPGSTVFTEDCNILLKLVMAGETTNSRGQRLPQKGDVEMLCGGPPCQGFSGMNRFNSRTYSKFKNSLVVSFLSYCDYYRPRFFLLENVRNFVSFKRSMVLKLTLRCLVRMGYQCTFGVLQAGQYGVAQTRRRAIILAAAPGEKLPLFPEPLHVFAPRACQLSVVVDDKKFVSNITRLSSGPFRTITVRDTMSDLPEVRNGASALEISYNGEPQSWFQRQLRGAQYQPILRDHICKDMSALVAARMRHIPLAPGSDWRDLPNIEVRLSDGTMARKLRYTHHDRKNGRSSSGALRGVCSCVEAGKACDPAARQFNTLIPWCLPHTGNRHNHWAGLYGRLEWDGFFSTTVTNPEPMGKQGRVLHPEQHRVVSVRECARSQGFPDTYRLFGNILDKHRQVGNAVPPPLAKAIGLEIKLCMLAKARESASAKIKEEEAAKD

SEQ ID NO: 867432 - protein, 1372 aa, Homo sapiens
MTSWQCAYRAPMGILLSHGEALVCHFPCELAMWLVFLSCYLLCICSPCRAAKRRPEEKEPEKVNPQISDEKDEDEKEEKRRKTTPKEPTEKKMARAKTVMNSKTHPPKCIQCGQYLDDPDLKYGQHPPDAVDEPQMLTNEKLSIFDANESGFESYEALPQHKLTCFSVYCKHGHLCPIDTGLIEKNIELFFSGSAKPIYDDDPSLEGGVNGKNLGPINEWWITGFDGGEKALIGFSTSFAEYILMDPSPEYAPIFGLMQEKIYISKIVVEFLQSNSDSTYEDLINKIETTVPPSGLNLNRFTEDSLLRHAQFVVEQVESYDEAGDSDEQPIFLTPCMRDLIKLAGVTLGQRRAQARRQTIRHSTREKDRGPTKATTTKLVYQIFDTFFAEQIEKDDREDKENAFKRRRCGVCEVCQQPECGKCKACKDMVKFGGSGRSKQACQERRCPNMAMKEADDDEEVDDNIPEMPSPKKMHQGKKKKQNKNRISWVGEAVKTDGKKSYYKKVCIDAETLEVGDCVSVIPDDSSKPLYLARVTALWEDSSNGQMFHAHWFCAGTDTVLGATSDPLELFLVDECEDMQLSYIHSKVKVIYKAPSENWAMEGGMDPESLLEGDDGKTYFYQLWYDQDYARFESPPKTQPTEDNKFKFCVSCARLAEMRQKEIPRVLEQLEDLDSRVLYYSATKNGILYRVGDGVYLPPEAFTFNIKLSSPVKRPRKEPVDEDLYPEHYRKYSDYIKGSNLDAPEPYRIGRIKEIFCPKKSNGRPNETDIKIRVNKFYRPENTHKSTPASYHADINLLYWSDEEAVVDFKAVQGRCTVEYGEDLPECVQVYSMGGPNRFYFLEAYNAKSKSFEDPPNHARSPGNKGKGKGKGKGKPKSQACEPSEPEIEIKLPKLRTLDVFSGCGGLSEGFHQAGISDTLWAIEMWDPAAQAFRLNNPGSTVFTEDCNILLKLVMAGETTNSRGQRLPQKGDVEMLCGGPPCQGFSGMNRFNSRTYSKFKNSLVVSFLSYCDYYRPRFFLLENVRNFVSFKRSMVLKLTLRCLVRMGYQCTFGVLQAGQYGVAQTRRRAIILAAAPGEKLPLFPEPLHVFAPRACQLSVVVDDKKFVSNITRLSSGPFRTITVRDTMSDLPEVRNGASALEISYNGEPQSWFQRQLRGAQYQPILRDHICKDMSALVAARMRHIPLAPGSDWRDLPNIEVRLSDGTMARKLRYTHHDRKNGRSSSGALRGVCSCVEAGKACDPAARQFNTLIPWCLPHTGNRHNHWAGLYGRLEWDGFFSTTVTNPEPMGKQGRVLHPEQHRVVSVRECARSQGFPDTYRLFGNILDKHRQVGNAVPPPLAKAIGLEIKLCMLAKARESASAKIKEEEAAKD

SEQ ID NO: 867433 - protein, 1616 aa, Homo sapiens; identical to SEQ ID NO: 867415

SEQ ID NO: 867434 - protein, 1616 aa, Homo sapiens; identical to SEQ ID NO: 867415

SEQ ID NO: 867435 - protein, 1560 aa, Homo sapiens
  misc_feature (1540)..(1540): Xaa can be any naturally occurring amino acid
  misc_feature (1554)..(1554): Xaa can be any naturally occurring amino acid
  misc_feature (1556)..(1556): Xaa can be any naturally occurring amino acid
MPARTAPARVPTLAVPAISLPDDVRRRLKDLERDSLTEKECVKEKLNLLHEFLQTEIKNQLCDLETKLRKEELSEEGYLAKVKSLLNKDLSLENGAHAYNREVNGRLENGNQARSEARRVGMADANSPPKPLSKPRTPRRSKSDGEAKPEPSPSPRITRKSTRQTTITSHFAKGPAKRKPQEESERAKSDESIKEEDKDQDEKRRRVTSRERVARPLPAEEPERAKSGTRTEKEEERDEKEEKRLRSQTKEPTPKQKLKEEPDREARAGVQADEDEDGDEKDEKKHRSQPKDLAAKRRPEEKEPEKVNPQISDEKDEDEKEEKRRKTTPKEPTEKKMARAKTVMNSKTHPPKCIQCGQYLDDPDLKYGQHPPDAVDEPQMLTNEKLSIFDANESGFESYEALPQHKLTCFSVYCKHGHLCPIDTGLIEKNIELFFSGSAKPIYDDDPSLEGGVNGKNLGPINEWWITGFDGGEKALIGFSTSFAEYILMDPSPEYAPIFGLMQEKIYISKIVVEFLQSNSDSTYEDLINKIETTVPPSGLNLNRFTEDSLLRHAQFVVEQVESYDEAGDSDEQPIFLTPCMRDLIKLAGVTLGQRRAQARRQTIRHSTREKDRGPTKATTTKLVYQIFDTFFAEQIEKDDREDKENAFKRRRCGVCEVCQQPECGKCKACKDMVKFGGSGRSKQACQERRCPNMAMKEADDDEEVDDNIPEMPSPKKMHQGKKKKQNKNRISWVGEAVKTDGKKSYYKKVCIDAETLEVGDCVSVIPDDSSKPLYLARVTALWEDSSNGQMFHAHWFCAGTDTVLGATSDPLELFLVDECEDMQLSYIHSKVKVIYKAPSENWAMEGGMDPESLLEGDDGKTYFYQLWYDQDYARFESPPKTQPTEDNKFKFCVSCARLAEMRQKEIPRVLEQLEDLDSRVLYYSATKNGILYRVGDGVYLPPEAFTFNIKLSSPVKRPRKEPVDEDLYPEHYRKYSDYIKGSNLDAPEPYRIGRIKEIFCPKKSNGRPNETDIKIRVNKFYRPENTHKSTPASYHADINLLYWSDEEAVVDFKAVQGRCTVEYGEDLPECVQVYSMGGPNRFYFLEAYNAKSKSFEDPPNHARSPGNKGKGKGKGKGKPKSQACEPSEPEIEIKLPKLRTLDVFSGCGGLSEGFHQAGISDTLWAIEMWDPAAQAFRLNNPGSTVFTEDCNILLKLVMAGETTNSRGQRLPQKGDVEMLCGGPPCQGFSGMNRFNSRTYSKFKNSLVVSFLSYCDYYRPRFFLLENVRNFVSFKRSMVLKLTLRCLVRMGYQCTFGVLQAGQYGVAQTRRRAIILAAAPGEKLPLFPEPLHVFAPRACQLSVVVDDKKFVSNITRLSSGPFRTITVRDTMSDLPEVRNGASALEISYNGEPQSWFQRQLRGAQYQPILRDHICKDMSALVAARMRHIPLAPGSDWRDLPNIEVRLSDGTMARKLRYTHHDRKNGRSSSGALRGVCSCVEAGKACDPAARQFNTLIPWCLPHTGNRHNHWAGLYGRLEWDGFFSTTVTNPEPMGKQGRCXNPEADRFVKRSGVXPXPGVS

SEQ ID NO: 867436 - protein, 391 aa, Homo sapiens
RVGPKPKARYEAWVVARFKNSLVVSFLSYCDYYRPRFFLLENVRNFVSFKRSMVLKLTLRCLVRMGYQCTFGVLQAGQYGVAQTRRRAIILAAAPGEKLPLFPEPLHVFAPRACQLSVVVDDKKFVSNITRLSSGPFRTITVRDTMSDLPEVRNGASALEISYNGEPQSWFQRQLRGAQYQPILRDHICKDMSALVAARMRHIPLAPGSDWRDLPNIEVRLSDGTMARKLRYTHHDRKNGRSSSGALRGVCSCVEAGKACDPAARQFNTLIPWCLPHTGNRHNHWAGLYGRLEWDGFFSTTVTNPEPMGKQGRVLHPEQHRVVSVRECARSQGFPDTYRLFGNILDKHRQVGNAVPPPLAKAIGLEIKLCMLAKARESASAKIKEEEAAKD

SEQ ID NO: 867437 - protein, 183 aa, Homo sapiens
  misc_feature (7)..(7): Xaa can be any naturally occurring amino acid
MHKVLHXLITKSLVDKRTSHNSFMSAKATNTMYPHASAHASGLLLVEAGKACDPAARQFNTLIPWCLPHTGNRHNHWAGLYGRLEWDGFFSTTVTNPEPMGKQGRVLHPEQHRVVSVRECARSQGFPDTYRLFGNILDKHRQVGNAVPPPLAKAIGLEIKLCMLAKARESASAKIKEEEAAKD

SEQ ID NO: 867438 - protein, 843 aa, Homo sapiens
MPARTAPARVPTLAVPAISLPDDVRRRLKDLERDSLTEKECVKEKLNLLHEFLQTEIKNQLCDLETKLRKEELSEEGYLAKVKSLLNKDLSLENGAHAYNREVNGRLENGNQARSEARRVGMADANSPPKPLSKPRTPRRSKSDGEAKPEPSPSPRITRKSTRQTTITSHFAKGPAKRKPQEESERAKSDESIKEEDKDQDEKRRRVTSRERVARPLPAEEPERAKSGTRTEKEEERDEKEEKRLRSQTKEPTPKQKLKEEPDREARAGVQADEDEDGDEKDEKKHRSQPKDLAAKRRPEEKEPEKVNPQISDEKDEDEKEEKRRKTTPKEPTEKKMARAKTVMNSKTHPPKCIQCGQYLDDPDLKYGQHPPDAVDEPQMLTNEKLSIFDANESGFESYEALPQHKLTCFSVYCKHGHLCPIDTGLIEKNIELFFSGSAKPIYDDDPSLEGGVNGKNLGPINEWWITGFDGGEKALIGFSTSFAEYILMDPSPEYAPIFGLMQEKIYISKIVVEFLQSNSDSTYEDLINKIETTVPPSGLNLNRFTEDSLLRHAQFVVEQVESYDEAGDSDEQPIFLTPCMRDLIKLAGVTLGQRRAQARRQTIRHSTREKDRGPTKATTTKLVYQIFDTFFAEQIEKDDREDKENAFKRRRCGVCEVCQQPECGKCKACKDMVKFGGSGRSKQACQERRCPNMATSLESKLWLNHPLPSRQWRLNILYLPLPTHRARPILRIISLLRNLKHRHYPPACNYSNSLHRLCPPMRPNIILRGHSNYKLTIRHPIHWDRPSSMNLRRLLSRQSHPHTILYLSLHLALHYCSPSNTPPPILARNGIKQPPRNHLPFR

SEQ ID NO: 867439 - protein, 348 aa, Homo sapiens
MPARTAPARVPTLAVPAISLPDDVRRRLKDLERDSLTEKECVKEKLNLLHEFLQTEIKNQLCDLETKLRKEELSEEGYLAKVKSLLNKDLSLENGAHAYNREVNGRLENGNQARSEARRVGMADANSPPKPLSKPRTPRRSKSDGEAKPEPSPSPRITRKSTRQTTITSHFAKGPAKRKPQEESERAKSDESIKEEDKDQDEKRRRVTSRERVARPLPAEEPERAKSGTRTEKEEERDEKEEKRLRSQTKEPTPKQKLKEEPDREARAGVQADEDEDGDEKVKAGYLFLNSPSFFCSCLLGRECAGWGSGFKSSPIHPGSMGPSRLWEGHLFLLLGAGICGWMPVLDA

SEQ ID NO: 867440 - protein, 222 aa, Homo sapiens
PSPSRGRPGDADAKAPPARAGSRAGLARLKDLERDSLTEKECVKEKLNLLHEFLQTEIKNQLCDLETKLRKEELSEEGYLAKVKSLLNKDLSLENGAHAYNREVNGRLENGNQARSEARRVGMADANSPPKPLSKPRTPRRSKSDGEAKPEPSPSPRITRKSTRQTTITSHFAKGPAKRKPQEESERAKSDESIKEEDKDQDEKNVELHPENECCSAGYRLD

SEQ ID NO: 867441 - protein, 473 aa, Homo sapiens
MSEESDMDKAIKETSILEEYSINWTQKLGAGISGPVRVCVKKSTQERFALKILLDRPKARNEVRLHMMCATHPNIVQIIEVFANSVQFPHESSPRARLLIVMEMMEGGELFHRISQHRHFTEKQASQVTKQIALALRHCHLLNIAHRDLKPENLLFKDNSLDAPVKLCDFGFAKIDQGDLMTPQFTPYYVAPQVLEAQRRHQKEKSGIIPTSPTPYTYNKSCDLWSLGVIIYVMLCGYPPFYSKHHSRTIPKDMRRKIMTGSFEFPEEEWSQISEMAKDVVRKLLKVKPEERLTIEGVLDHPWLNSTEALDNVLPSAQLMMDKAVVAGIQQAHAEQLANMRIQDLKVSLKPLHSVNNPILRKRKLLGTKPKDSVYIHDHENGAEDSNVALEKLRDVIAQCILPQAGKGENEDEKLNEVMQEAWKYNRECKLLRDTLQSFSWNGRGFTDKVDRLKLAEIVKQVIEEQTTSHESQ

SEQ ID NO: 867442 - protein, 473 aa, Homo sapiens; identical to SEQ ID NO: 867441

SEQ ID NO: 867443 - protein, 372 aa, Homo sapiens
MEMMEGGELFHRISQHRHFTEKQASQVTKQIALALRHCHLLNIAHRDLKPENLLFKDNSLDAPVKLCDFGFAKIDQGDLMTPQFTPYYVAPQVLEAQRRHQKEKSGIIPTSPTPYTYNKSCDLWSLGVIIYVMLCGYPPFYSKHHSRTIPKDMRRKIMTGSFEFPEEEWSQISEMAKDVVRKLLKVKPEERLTIEGVLDHPWLNSTEALDNVLPSAQLMMDKAVVAGIQQAHAEQLANMRIQDLKVSLKPLHSVNNPILRKRKLLGTKPKDSVYIHDHENGAEDSNVALEKLRDVIAQCILPQAGKGENEDEKLNEVMQEAWKYNRECKLLRDTLQSFSWNGRGFTDKVDRLKLAEIVKQVIEEQTTSHESQ

SEQ ID NO: 867444 - protein, 293 aa, Homo sapiens
MTPQFTPYYVAPQVLEAQRRHQKEKSGIIPTSPTPYTYNKSCDLWSLGVIIYVMLCGYPPFYSKHHSRTIPKDMRRKIMTGSFEFPEEEWSQISEMAKDVVRKLLKVKPEERLTIEGVLDHPWLNSTEALDNVLPSAQLMMDKAVVAGIQQAHAEQLANMRIQDLKVSLKPLHSVNNPILRKRKLLGTKPKDSVYIHDHENGAEDSNVALEKLRDVIAQCILPQAGKGENEDEKLNEVMQEAWKYNRECKLLRDTLQSFSWNGRGFTDKVDRLKLAEIVKQVIEEQTTSHESQ

SEQ ID NO: 867445 - protein, 489 aa, Homo sapiens
  misc_feature (445)..(445): Xaa can be any naturally occurring amino acid
  misc_feature (451)..(451): Xaa can be any naturally occurring amino acid
  misc_feature (455)..(455): Xaa can be any naturally occurring amino acid
  misc_feature (459)..(459): Xaa can be any naturally occurring amino acid
  misc_feature (464)..(465): Xaa can be any naturally occurring amino acid
  misc_feature (467)..(467): Xaa can be any naturally occurring amino acid
  misc_feature (471)..(471): Xaa can be any naturally occurring amino acid
  misc_feature (482)..(482): Xaa can be any naturally occurring amino acid
  misc_feature (485)..(487): Xaa can be any naturally occurring amino acid
MSEESDMDKAIKETSILEEYSINWTQKLGAGISGPVRVCVKKSTQERFALKILLDRPKARNEVRLHMMCATHPNIVQIIEVFANSVQFPHESSPRARLLIVMEMMEGGELFHRISQHRHFTEKQASQVTKQIALALRHCHLLNIAHRDLKPENLLFKDNSLDAPVKLCDFGFAKIDQGDLMTPQFTPYYVAPQVLEAQRRHQKEKSGIIPTSPTPYTYNKSCDLWSLGVIIYVMLCGYPPFYSKHHSRTIPKDMRRKIMTGSFEFPEEEWSQISEMAKDVVRKLLKVKPEERLTIEGVLDHPWLNSTEALDNVLPSAQLMMDKAVVAGIQQAHAEQLANMRIQDLKVSLKPLHSVNNPILRKRKLLGTKPKDSVYIHDHENGAEDSNVALEKLRDVIAQCILPQAGKGENEDEKLNEVMQEAWKYNRECKLLRDTLQSFSWNAKXKKKKKXKKTXKKKXTGKKXXNXPPPXPPMPPPPPPPXTTXXXRL

SEQ ID NO: 867446 - protein, 153 aa, Homo sapiens
MDKAVVAGIQQAHAEQLANMRIQDLKVSLKPLHSVNNPILRKRKLLGTKPKDSVYIHDHENGAEDSNVALEKLRDVIAQCILPQAGKGENEDEKLNEVMQEAWKYNRECKLLRDTLQSFSWNGRGFTDKVDRLKLAEIVKQVIEEQTTSHESQ

SEQ ID NO: 867447 - protein, 332 aa, Homo sapiens
MSEESDMDKAIKETSILEEYSINWTQKLGAGISGPVRVCVKKSTQERFALKILLDRPKARNEVRLHMMCATHPNIVQIIEVFANSVQFPHESSPRARLLIVMEMMEGGELFHRISQHRHFTEKQASQVTKQIALALRHCHLLNIAHRDLKPENLLFKDNSLDAPVKLCDFGFAKIDQGDLMTPQFTPYYVAPQVLEAQRRHQKEKSGIIPTSPTPYTYNKSCDLWSLGVIIYVMLCGYPPFYSKHHSRTIPKDMRRKIMTGSFEFPEEEWSQISEMAKDVVRKLLKVKPEERLTIEGVLDHPWLNSTEALDNVLPSAQLMMDKVLNDVYFVG

SEQ ID NO: 867448 - protein, 118 aa, Homo sapiens [sequence omitted]

SEQ ID NO: 867449 - protein, 473 aa, Homo sapiens; identical to SEQ ID NO: 867441

SEQ ID NO: 867450 - protein, 628 aa, Homo sapiens
GRLQVGCAVRGRLGNPSGRQQGARGAVESRSWAAGGAAWSSRGAQRVREGGRRGCPARVSRRCVALRRRREQRRRALLRLRLRAASAAAAAASLEPPAEAEPAPGSSSPPVPRGGCCPSPRGPGARVPSPLLPRPRGDRAAEQPPPLPAVGAPLSMSEESDMDKAIKETSILEEYSINWTQKLGAGISGPVRVCVKKSTQERFALKILLDRPKARNEVRLHMMCATHPNIVQIIEVFANSVQFPHESSPRARLLIVMEMMEGGELFHRISQHRHFTEKQASQVTKQIALALRHCHLLNIAHRDLKPENLLFKDNSLDAPVKLCDFGFAKIDQGDLMTPQFTPYYVAPQVLEAQRRHQKEKSGIIPTSPTPYTYNKSCDLWSLGVIIYVMLCGYPPFYSKHHSRTIPKDMRRKIMTGSFEFPEEEWSQISEMAKDVVRKLLKVKPEERLTIEGVLDHPWLNSTEALDNVLPSAQLMMDKAVVAGIQQAHAEQLANMRIQDLKVSLKPLHSVNNPILRKRKLLGTKPKDSVYIHDHENGAEDSNVALEKLRDVIAQCILPQAGKGENEDEKLNEVMQEAWKYNRECKLLRDTLQSFSWNGRGFTDKVDRLKLAEIVKQVIEEQTTSHESQ

SEQ ID NO: 867451 - protein, 495 aa, Homo sapiens
MSEESDMDKAIKETSILEEYSINWTQKLGAGISGPVRVCVKKSTQERFALKILLDRPKARNEVRLHMMCATHPNIVQIIEVFANSVQFPHESSPRARLLIVMEMMEGGELFHRISQHRHFTEKQASQVTKQIALALRHCHLLNIAHRDLKPENLLFKDNSLDAPVKLCDFGFAKIDQGDLMTPQFTPYYVAPQVLEAQRRHQKEKSGIIPTSPTPYTYNKFLSMICVKLLWAFMKWPVLYCESCDLWSLGVIIYVMLCGYPPFYSKHHSRTIPKDMRRKIMTGSFEFPEEEWSQISEMAKDVVRKLLKVKPEERLTIEGVLDHPWLNSTEALDNVLPSAQLMMDKAVVAGIQQAHAEQLANMRIQDLKVSLKPLHSVNNPILRKRKLLGTKPKDSVYIHDHENGAEDSNVALEKLRDVIAQCILPQAGKGENEDEKLNEVMQEAWKYNRECKLLRDTLQSFSWNGRGFTDKVDRLKLAEIVKQVIEEQTTSHESQ

SEQ ID NO: 867452 - protein, 293 aa, Homo sapiens; identical to SEQ ID NO: 867444

SEQ ID NO: 867453 - protein, 139 aa, Homo sapiens
LLHYFIQFLIFILSSLGENTLSNPILRKRKLLGTKPKDSVYIHDHENGAEDSNVALEKLRDVIAQCILPQAGKGENEDEKLNEVMQEAWKYNRECKLLRDTLQSFSWNGRGFTDKVDRLKLAEIVKQVIEEQTTSHESQ

SEQ ID NO: 867454 - protein, 143 aa, Homo sapiens
SPTPRSEGRRESSSSLTHRPAPSPATPRLLGTRRVLLGVSEGTGCADAMELVLVFLCSLLAPMVLASAAEKEKEMDPFHYDYQTLRIGGLVFAVVLFSVGILLILSRRCKCSFNQKPRAPGDEEAQVENLITANATEPQKAEN

SEQ ID NO: 867455 - protein, 133 aa, Homo sapiens
SVPLAPFVPPRRLVRSGLLLGTRRVLLGVSEGTGCADAMELVLVFLCSLLAPMVLASAAEKEKEMDPFHYDYQTLRIGGLVFAVVLFSVGILLILSRRCKCSFNQKPRAPGDEEAQVENLITANATEPQKAEN

SEQ ID NO: 867456 - protein, 143 aa, Homo sapiens; identical to SEQ ID NO: 867454

SEQ ID NO: 867457 - protein, 91 aa, Homo sapiens
SVPLAPFVPPRRLVRSGLLLGTRRVLLGVSEGTGCAGLGLDVAVDAVVLTPGGREVKCSGGCLLKAGGRRHGVGAGLPLQPAGPHGPGQCS

SEQ ID NO: 867458 - protein, 111 aa, Homo sapiens
MKPSSCYRFIKCRKDAMELVLVFLCSLLAPMVLASAAEKEKEMDPFHYDYQTLRIGGLVFAVVLFSVGILLILSRRCKCSFNQKPRAPGDEEAQVENLITANATEPQKAEN

SEQ ID NO: 867459 - protein, 116 aa, Homo sapiens
RCLSPRLSPPAGWSGPACSSGLGGSSWESRRGPAVQRTSAKASETGSRKRRDSLEKKNAAVCLGLDVAVDAVVLTPGGREVKCSGGCLLKAGGRRHGVGAGLPLQPAGPHGPGQCS

SEQ ID NO: 867460 - protein, 118 aa, Homo sapiens
TRCKEAVLYGLGEHAGGNGCADAMELVLVFLCSLLAPMVLASAAEKEKEMDPFHYDYQTLRIGGLVFAVVLFSVGILLILSRRCKCSFNQKPRAPGDEEAQVENLITANATEPQKAEN

SEQ ID NO: 867461 - protein, 128 aa, Homo sapiens
SVPLAPFVPPRRLVRSGLLLGTRRVLLGVSEGTGCADAMELVLVFLCSLLAPMVLASAAEKEKEMDPFHYDYQTLRIGGLVFAVVLFSVGILLILSRRCKCSFNQKPRNRAPESRELKCSHQVEASGT

SEQ ID NO: 867462 - protein, 143 aa, Homo sapiens; identical to SEQ ID NO: 867454

SEQ ID NO: 867463 - protein, 143 aa, Homo sapiens; identical to SEQ ID NO: 867454

SEQ ID NO: 867464 - protein, 143 aa, Homo sapiens; identical to SEQ ID NO: 867454

SEQ ID NO: 867465 - protein, 143 aa, Homo sapiens; identical to SEQ ID NO: 867454

SEQ ID NO: 867466 - protein, 143 aa, Homo sapiens; identical to SEQ ID NO: 867454

SEQ ID NO: 867467 - protein, 143 aa, Homo sapiens; identical to SEQ ID NO: 867454

SEQ ID NO: 867468 - protein, 125 aa, Homo sapiens
FLPISTCAREAARKSGRCMAPAELVTVPDAMELVLVFLCSLLAPMVLASAAEKEKEMDPFHYDYQTLRIGGLVFAVVLFSVGILLILSRRCKCSFNQKPRAPGDEEAQVENLITANATEPQKAEN

SEQ ID NO: 867469 - protein, 105 aa, Homo sapiens
MRGAKVISDAMELVLVFLCSLLAPMVLASAAEKEKEMDPFHYDYQTLRIGGLVFAVVLFSVGILLILSRRCKCSFNQKPRAPGDEEAQVENLITANATEPQKAEN

SEQ ID NO: 867470 - protein, 114 aa, Homo sapiens
QARYEAGGYIGRGTGCADAMELVLVFLCSLLAPMVLASAAEKEKEMDPFHYDYQTLRIGGLVFAVVLFSVGILLILSRRCKCSFNQKPRAPGDEEAQVENLITANATEPQKAEN

SEQ ID NO: 867471 - protein, 129 aa, Homo sapiens
MTSVPLPDGFAILISCPSTRTLQSGKAQRRQPGNEMSFHFFFPKLVLSQKPFILRLRTVSNHWGGPGFNNFLSMSARLQPTWERLLLRFTPPLCLCLLSLRLRRGCHTGNFSGQVLKEGREADKDTRGS

SEQ ID NO: 867472 - protein, 143 aa, Homo sapiens; identical to SEQ ID NO: 867454

SEQ ID NO: 867473 - protein, 143 aa, Homo sapiens; identical to SEQ ID NO: 867454

SEQ ID NO: 867474 - protein, 143 aa, Homo sapiens
MELVLVFLCSLLAPMVLASAAEKEKEMDPFHYDYQTLRIGGLVFAVVLFSVGILLILSRRCKCSFNQKPRAPGDEEAQVENLITANGELSVTTCPGGKEGTERPLCGSGRDCCQVHGQPDMLPQCQESGSPGPLQHCPLTPPN

SEQ ID NO: 867475 - protein, 474 aa, Homo sapiens
SKLAIRIKKPIKTKFRLPVFNWTALKPNQISGTVFSELDDEKILEDLDLDKFEELFKTKAQGPALDLICSKNKTAQKAASKVTLLEANRAKNLAITLRKAGRSAEEICRAIHTFDLQTLPVDFVECLMRFLPTEAEVKLLRQYERERQPLEELAAEDRFMLLFSKVERLTQRMAGMAFLGNFQDNLQMLTPQLNAIIAASASVKSSQKLKQMLEIILALGNYMNSSKRGAVYGFKLQSLDLLLDTKSTDRKMTLLHFIALTVKEKYPDLANFWHELHFVEKAAAVSLENVLLDVKELGRGMELIRRECSIHDNSVLRNFLSTNEGKLDKLQRDAKTAEEAYNAVVRYFGESPKTTPPSVFFPVFVRFIRSYKEAEQENEARKKQEEVMREKQLAQEAKKLDAKTPSQRNKWQQQELIAELRRRQAKEHRPVYEGKDGTIEDIITVLKSVPFTARTAKRGSRFFCDAAHHDESNC

SEQ ID NO: 867476 - protein, 474 aa, Homo sapiens; identical to SEQ ID NO: 867475

SEQ ID NO: 867477 - protein, 106 aa, Homo sapiens [sequence omitted]

SEQ ID NO: 867478 - protein, 133 aa, Homo sapiens [sequence omitted]

SEQ ID NO: 867479 - protein, 133 aa, Homo sapiens [sequence omitted]

SEQ ID NO: 867480 - protein, 303 aa, Homo sapiens
MESALPSIFTLVIIAEFIIGNLSNGFIVLINCIDWVSKRELSSVDKLLIILAISRIGLIWEILVSWFLALHYLAIFVSGTGLRIMIFSWIVSNHFNLWLATIFSIFYLLKIASFSSPAFLYLKWRVNKVILMILLGTLVFLFLNLIQINMHIKDWLDRYERNTTWNFSMSDFETFSVSVKFTMTMFSLTPFTVAFISFLLLIFSLQKHLQKMQLNYKGHRDPRTKVHTNALKIVISFLLFYASFFLCVLISWISELYQNTVIYMLCETIGVFSPSSHSFLLILGNAKLRQAFLLVAAKVWAKR

SEQ ID NO: 867481 - protein, 158 aa, Homo sapiens
VISGRGRRGSSFTSAGRLEKPRNSSFFLPPPSLRVSVLRRALGANRGARRGDRPPSLGGARGLAATAGASAPARWVIFSRVARAGLRVSLRRYTRAEYESEAEGVMAGQAFRKFLPLFDRVLVERSAAETVTKGGIMLPEKSPRKSIASNSSRCWIGF

SEQ ID NO: 867482 - protein, 158 aa, Homo sapiens; identical to SEQ ID NO: 867481

SEQ ID NO: 867483 - protein, 158 aa, Homo sapiens; identical to SEQ ID NO: 867481

SEQ ID NO: 867484 - protein, 158 aa, Homo sapiens; identical to SEQ ID NO: 867481

SEQ ID NO: 867485 - protein, 158 aa, Homo sapiens; identical to SEQ ID NO: 867481

SEQ ID NO: 867486 - protein, 153 aa, Homo sapiens
VISGRGRRGSSFTSAGRLEKPRNSSFFLPPPSLRVSVLRRALGANRGARRGDRPPSLGGARGLAATAGASAPARWVIFSRVARAGLRVSLRRYTRAEYESEAEGVMKGGEIQPVSVKVGDKVLLPEYGGTKVVLDDKDYFLFRDGDILGKYVD

SEQ ID NO: 867487 - protein, 150 aa, Homo sapiens
VISGRGRRGSSFTSAGRLEKPRNSSFFLPPPSLRVSVLRRALGANRGARRGDRPPSLGGARGLAATAGASAPARWVIFSRVARAGLRVSLRRYTRAEYESEAEGVMAGQAFRKFLPLFDRVLVERSAAETVTKGGIMLPEKSQGWRDSTS

SEQ ID NO: 867488 - protein, 150 aa, Homo sapiens
RFSSCLMAITACCLSPFMLRMCLEKLPAHSLNVASSIVSLANVPVVGSLPLLLPPLLLPLLFKGGLSSFLSPSSFASELVRISARARAEYESEAEGVMAGQAFRKFLPLFDRVLVERSAAETVTKGGIMLPEKSPRKSIASNSSRCWIGF

SEQ ID NO: 867489 - protein, 158 aa, Homo sapiens; identical to SEQ ID NO: 867481

SEQ ID NO: 867490 - protein, 158 aa, Homo sapiens; identical to SEQ ID NO: 867481

SEQ ID NO: 867491 - protein, 158 aa, Homo sapiens; identical to SEQ ID NO: 867481

SEQ ID NO: 867492 - protein, 158 aa, Homo sapiens; identical to SEQ ID NO: 867481

SEQ ID NO: 867493 - protein, 158 aa, Homo sapiens; identical to SEQ ID NO: 867481

SEQ ID NO: 867494 - protein, 158 aa, Homo sapiens; identical to SEQ ID NO: 867481

SEQ ID NO: 867495 - protein, 158 aa, Homo sapiens; identical to SEQ ID NO: 867481

SEQ ID NO: 867496 - protein, 158 aa, Homo sapiens; identical to SEQ ID NO: 867481

SEQ ID NO: 867497 - protein, 153 aa, Homo sapiens; identical to SEQ ID NO: 867486

SEQ ID NO: 867498 - protein, 57 aa, Homo sapiens
MYSTVALPVDNVITFSFCFKTFLFLQAGQAFRKFLPLFDRVLVERSAAETVTKGGIM

SEQ ID NO: 867499 - protein, 113 aa, Homo sapiens
LGAEIRVIWWQSLLLVFRGEEEILELLLGGMWENLSFMIRCMSTQSPHSCSLSQLLLYADKHKRDTCPAHTANEVSEISVTTVSPPEKKNVMFLVLNSFSGVIVVIELYLHEL

SEQ ID NO: 867500 - protein, 535 aa, Homo sapiens
MVIKEILEGPSPEWETKAQACTPVEDMSKLTKEETHTIKLEDSYDYDDRLERRGKGGFWKIHTDERGFSLKSVLSQEYDPTEECLSKYDIYRNNFEKHSNLIVQFDTQLDNKTSVYNEGRATFNHVSYGIVHRKILPGEKPYKCNVCGKKFRKYPSLLKHQSTHAKEKSYECEECGKEFRHISSLIAHQRMHTGEKPYECHQCGKAFSQRAHLTIHQRIHTGEKPYKCDDCGKDFSQRAHLTIHQRTHTGEKPYKCLECGKTFSHSSSLINHQRVHTGEKPYICNECGKTFSQSTHLLQHQKIHTGKKPYKCNECWKVFSQSTYLIRHQRIHSGEKCYKCNECGKAFAHSSTLIQHQTTHTGEKSYICNICGKAFSQSANLTQHHRTHTGEKPYKCSVCGKAFSQSVHLTQHQRIHNGEKPFKCNICGKAYRQGANLTQHQRIHTGEKPYKCNECGKAFIYSSSLNQHQRTHTGERPYKCNECDKDFSQRTCLIQHQRIHTGEKPYACRICGKTFTQSTNLIQHQRVHTGAKHRN

SEQ ID NO: 867501 - protein, 761 aa, Homo sapiens
MLASSKRMNSSSRSQILLRWKSDKAQSGPYNVEKEILTSRFLRDTETCRQNFRNFPYPDLAGPRKALSQLRELCLKWLRPEIHSKEQILELLVLEQFLTILPGEVRTWVKSQYPESSEEAVTLVEDLTQILEEEAPQNSTLSQDTPEEDPRGKHAFQTGWLNDLVTKESMTFKDVAVDITQEDWELMRPVQKELYKTVTLQNYWNMVSLGLTVYRPTVIPILEEPWMVIKEILEGPSPEWETKAQACTPVEDMSKLTKEETHTIKLEDSYDYDDRLERRGKGGFWKIHTDERGFSLKSVLSQEYDPTEECLSKYDIYRNNFEKHSNLIVQFDTQLDNKTSVYNEGRATFNHVSYGIVHRKILPGEKPYKCNVCGKKFRKYPSLLKHQSTHAKEKSYECEECGKEFRHISSLIAHQRMHTGEKPYECHQCGKAFSQRAHLTIHQRIHTGEKPYKCDDCGKDFSQRAHLTIHQRTHTGEKPYKCLECGKTFSHSSSLINHQRVHTGEKPYICNECGKTFSQSTHLLQHQKIHTGKKPYKCNECWKVFSQSTYLIRHQRIHSGEKCYKCNECGKAFAHSSTLIQHQTTHTGEKSYICNICGKAFSQSANLTQHHRTHTGEKPYKCSVCGKAFSQSVHLTQHQRIHNGEKPFKCNICGKAYRQGANLTQHQRIHTGEKPYKCNECGKAFIYSSSLNQHQRTHTGERPYKCNECDKDFSQRTCLIQHQRIHTGEKPYACRICGKTFTQSTNLIQHQRVHTGAKHRN

SEQ ID NO: 867502 - protein, 761 aa, Homo sapiens; identical to SEQ ID NO: 867501

SEQ ID NO: 867503 - protein, 1028 aa, Homo sapiens
MRLLWKLVILLPLINSSAGDGLLSRPIFTQEPHDVIFPLDLSKSEVILNCAANGYPSPHYRWKQNGTDIDFTMSYHYRLDGGSLAINSPHTDQDIGMYQCLATNLLGTILSRKAKLQFAYIEDFETKTRSTVSVREGQGVVLLCGPPPHFGDLSYAWTFNDNPLYVQEDNRRFVSQETGNLYIAKVEPSDVGNYTCFITNKEAQRSVQGPPTPLVQRTDGVMGEYEPKIEVRFPETIQAAKDSSVKLECFALGNPVPDISWRRLDGSPLPGKVKYSKSQAILEIPNFQQEDEGFYECIASNLRGRNLAKGQLIFYAPPEWEQKIQNTHLSIYDNLLWECKASGKPNPWYTWLKNGERLNPEERIQIENGTLIITMLNVSDSGVYQCAAENKYQIIYANAELRVLASAPDFSKSPVKKKSFVQVGGDIVIGCKPNAFPRAAISWKRGTETLRQSKRIFLLEDGSLKIYNITRSDAGSYTCIATNQFGTAKNTGSLIVKERTVITVPPSKMDVTVGESIVLPCQVSHDPSIEVVFVWFFNGDVIDLKKGVAHFERIGGESVGDLMIRNIQLHHSGKYLCTVQTTLESLSAVADIIVRGPPGPPEDVQVEDISSTTSQLSWRAGPDNNSPIQIFTIQTRTPFSVGWQAVATVPEILNGKTYNATVVGLSPWVEYEFRVVAGNSIGIGEPSEPSELLRTKASVPVVAPVNIHGGGGSRSELVITWESIPEELQNGEGFGYIIMFRPVGSTTWSKEKVSSVESSRFVYRNESIIPLSPFEVKVGVYNNEGEGSLSTVTIVYSGEDEPQLAPRGTSLQSFSASEMEVSWNAIAWNRNTGRVLGYEVLYWTDDSKESMIGKIRVSGNVTTKNITGLKANTIYFASVRAYNTAGTGPSSPPVNVTTKKSPPSQPPANIAWKLTNSKLCLNWEHVKTMENESEVLGYKILYRQNRQSKTHILETNNTSAELLVPFEEDYLIEIRTVSDGGDGSSSEEIRIPKMSSLSSRGIQFLEPSTHFLSIVIVIFHCFAIQPLI

SEQ ID NO: 867504 - protein, 217 aa, Homo sapiens
MSKGRAEAAAGAAGILLRYLQEQNRPYSSQDVFGNLQREHGLGKAVVVKTLEQLAQQGKIKEKMYGKQKIYFADQDQFDMVSDADLQVLDGKIVALTAKVQSLQQSCRYMEAELKELSSALTTPEMQKEIQELKKECAGYRERLKNIKAATNHVTPEEKEQVYRERQKYCKEWRKRKRMATELSDAILEGYPKSKKQFFEEVGIETDEDYNVTLPDP

SEQ ID NO: 867505 - protein, 254 aa, Homo sapiens
MESGRGRFAPPEGFPFSQSPFEARPRRRKEPSPRATTTSGFLSWVAGKAMSKGRAEAAAGAAGILLRYLQEQNRPYSSQDVFGNLQREHGLGKAVVVKTLEQLAQQGKIKEKMYGKQKIYFADQDQFDMVSDADLQVLDGKIVALTAKVQSLQQSCRYMEAEMQKEIQELKKECAGYRERLKNIKAATNHVTPEEKEQVYRERQKYCKEWRKRKRMATELSDAILEGYPKSKKQFFEEVGIETDEDYNVTLPDP

SEQ ID NO: 867506 - protein, 154 aa, Homo sapiens
MYGKQKIYFADQDQFDMVSDADLQVLDGKIVALTAKVQSLQQSCRYMEAELKELSSALTTPEMQKEIQELKKECAGYRERLKNIKAATNHVTPEEKEQVYRERQKYCKEWRKRKRMATELSDAILEGYPKSKKQFFEEVGIETDEDYNVTLPDP

SEQ ID NO: 867507 - protein, 168 aa, Homo sapiens [sequence omitted]

SEQ ID NO: 867508 - protein, 101 aa, Homo sapiens
MTEDSVLLLPRSISAPKLLFLIIYISNTLCQMMFLLPPSDSLNTHIKFIFSSPDSSWNLSGINIRVKIATVECLIFPPPRTGFFLTFSSPNGITLHPNQKL

SEQ ID NO: 867509 - protein, 108 aa, Homo sapiens
VPGVYRCHPTTTSGFLSWVAGKAMSKGRAEAAAGAAGILLRYLQEQNRPYSSQDVFGNLQREHGLGKAVVVKTLEQLAQQGKIKEKMYGKQKIYFADQVRRTCADCHP

SEQ ID NO: 867510 - protein, 240 aa, Homo sapiens
VPGVYRCHPTTTSGFLSWVAGKAMSKGRAEAAAGAAGILLRYLQEQNRPYSSQDVFGNLQREHGLGKAVVVKTLEQLAQQGKIKEKMYGKQKIYFADQDQFDMVSDADLQVLDGKIVALTAKVQSLQQSCRYMEAELKELSSALTTPEMQKEIQELKKECAGYRERLKNIKAATNHVTPEEKEQVYRERQKYCKEWRKRKRMATELSDAILEGYPKSKKQFFEEVGIETDEDYNVTLPDP

SEQ ID NO: 867511 - protein, 246 aa, Homo sapiens
VPGVYRCHPTTTSGFLSWVAGKAMSKGRAEAAAGAAGILLRYLQEQNRPYSSQDVFGNLQREHGLGKAVVVKTLEQLAQQGKIKEKMYGKQKIYFADQSLFVWQDQFDMVSDADLQVLDGKIVALTAKVQSLQQSCRYMEAELKELSSALTTPEMQKEIQELKKECAGYRERLKNIKAATNHVTPEEKEQVYRERQKYCKEWRKRKRMATELSDAILEGYPKSKKQFFEEVGIETDEDYNVTLPDP

SEQ ID NO: 867512 - protein, 168 aa, Homo sapiens [sequence omitted]

SEQ ID NO: 867513 - protein, 865 aa, Homo sapiens
CFWQLGFGGTLKKAFGVSFIGGRGRWSRLGQPPVEAGERGAGACDPAPPTMMKTEPRGPGGPLRSASPHRSAYEAGIQALKPPDAPGPDEAPKGAHHKKYGSNVHRIKSMFLQMGTTAGPSGEAGGGAGLAEAPRASERGVRLSLPRASSLNENVDHSALLKLGTSVSERVSRFDSKPAPSAQPAPPPHPPSRLQETRKLFERSAPAAGGDKEAARRLLRQERAGLQDRKLDVVVRFNGSTEALDKLDADAVSPTVSQLSAVFEKADSRTGLHRGPGLPRAAGVPQVNSKLVSKRSRVFQPPPPPPPAPSGDAPAEKERCPAGQQPPQHRVAPARPPPKPREVRKIKPVEVEESGESEAESAPGEVIQAEVTVHAALENGSTVATAASPAPEEPKAQAAPEKEAAAVAPPERGVGNGRAPDVAPEEVDESKKEDFSEADLVDVSAYSGLGEDSAGSALEEDDEDDEEDGEPPYEPESGCVEIPGLSEEEDPAPSRKIHFSTAPIQVFSTYSNEDYDRRNEDVDPMAASAEYELEKRVERLELFPVELEKDSEGLGISIIGMGAGADMGLEKLGIFVKTVTEGGAAHRDGRIQVNDLLVEVDGTSLVGVTQSFAASVLRNTKGRVRFMIGRERPGEQSEVAQLIQQTLEQERWQREMMEQRYAQYGEDDEETGEYATDEDEELSPTFPGGEMAIEVFELAENEDALSPVDMEPEKLVHKFKELQIKHAVTEAEIQQLKRKLQSLEQEKGRWRVEKAQLEQSVEENKERMEKLEGYWGEAQSLCQAVDEHLRETQAQYQALERKYSKAKRLIKDYQQKEIEFLKKETAQRRVLEESELARKEEMDKLLDKISELEGNLQTLRNSNST

SEQ ID NO: 867514 - protein, 364 aa, Homo sapiens
CFWQLGFGGTLKKAFGVSFIGGRGRWSRLGQPPVEAGERGAGACDPAPPTMMKTEPRGPGGPLRSASPHRSAYEAGIQALKPPDAPGPDEAPKGAHHKKYGSNVHRIKSMFLQMGTTAGPSGEAGGGAGLAEAPRASERGVRLSLPRASSLNENVDHSALLKLGTSVSERVSRFDSKPAPSAQPAPPPHPPSRLQETRKLFERSAPAAGGDKEAARRLLRQERAGLQDRKLDVVVRFNGSTEALDKLDADAVSPTVSQLSAVFEKADSRTGLHRGPGLPRAAGVPQVNSKLVSKRSRVFQPPPPPPPAPSGDAPAEKERCPAGQQPPQHRVAPSSLGTGAPTPPTPPPHLPQLQGPEGSYHRPP

SEQ ID NO: 867515 - protein, 182 aa, Homo sapiens
SPAVIIYVREKPGSTSINGSSMHQCYCWSIDVLDDPVKTRVNETLQHVTCNTWTNGGSWLVMRRSAVALDASLCCIDVHQSDAAMEKLEGYWGEAQSLCQAVDEHLRETQAQYQALERKYSKAKRLIKDYQQKEIEFLKKETAQRRVLEESELARKEEMDKLLDKISELEGNLQTLRNSNST

SEQ ID NO: 867516 - protein, 822 aa, Homo sapiens
CFWQLGFGGTLKKAFGVSFIGGRGRWSRLGQPPVEAGERGAGACDPAPPTMMKTEPRGPGGPLRSASPHRSAYEAGIQALKPPDAPGPDEAPKGAHHKKYGSNVHRIKSMFLQMGTTAGPSGEAGGGAGLAEAPRASERGVRLSLPRASSLNENVDHSALLKLGTSVSERVSRFDSKPAPSAQPAPPPHPPSRLQETRKLFERSAPAAGGDKEAARRLLRQERAGLQDRKLDVVVRFNGSTEALDKLDADAVSPTVSQLSAVFEKADSRTGLHRGPGLPRAAGVPQVNSKLVSKRSRVFQPPPPPPPAPSGDAPAEKERCPAGQQPPQHRVAPARPPPKPREVRKIKPVEVEESGESEAESAPGEVIQAEVTVHAALENGSTVATAASPAPEEPKAQAAPEKEAAAVAPPERGVGNGRAPDVAPEEVDESKKEDFSEADLVDVSAYSGLGEDSAGSALEEDDEDDEEDGEPPYEPESGCVEIPGLSEEEDPAPSRKIHFSTAPIQVFSTYSNEDYDRRNEDVDPMAASAEYELEKRVERLELFPVELEKDSEGLGISIIGMGAGADMGLEKLGIFVKTVTEGGAAHRDGRIQVNDLLVEVDGTSLVGVTQSFAASVLRNTKGRVRFMIGRERPGEQSEVAQLIQQTLEQERWQREMMEQRYAQYGEDDEETGEYATDEDEELSPTFPGGEMAIEVFELAENEDALSPVDMEPEKLVHKFKELQIKHAVTEAEIQQLKRKLQSLEQEKGRWRVEKAQLEQSVEENKERMEKLEGYWGEAQSLCQAVDEHLRETQAQYQALERFGSRNGKTSKKITIADCGQLE

SEQ ID NO: 867517 - protein, 909 aa, Homo sapiens
CFWQLGFGGTLKKAFGVSFIGGRGRWSRLGQPPVEAGERGAGACDPAPPTMMKTEPRGPGGPLRSASPHRSAYEAGIQALKPPDAPGPDEAPKGAHHKKYGSNVHRIKSMFLQMGTTAGPSGEAGGGAGLAEAPRASERGVRLSLPRASSLNENVDHSALLKLGTSVSERVSRFDSKPAPSAQPAPPPHPPSRLQETRKLFERSAPAAGGDKEAARRLLRQERAGLQDRKLDVVVRFNGSTEALDKLDADAVSPTVSQLSAVFEKADSRTGLHRGPGLPRAAGVPQVNSKLVSKRSRVFQPPPPPPPAPSGDAPAEKERCPAGQQPPQHRVAPARPPPKPREVRKIKPVEVEESGESEAESAPGEVIQAEVTVHAALENGSTVATAASPAPEEPKAQAAPEKEAAAVAPPERGVGNGRAPDVAPEEVDESKKEDFSEADLVDVSAYSGLGEDSAGSALEEDDEDDEEDGEPPYEPESGCVEIPGLSEEEDPAPSRKIHFSTAPIQVFSTYSNEDYDRRNEDVDPMAASAEYELEKRVERLELFPVELEKDSEGLGISIIGMGAGADMGLEKLGIFVKTVTEGGAAHRDGRIQVNDLLVEVDGTSLVGVTQSFAASVLRNTKGRVRLRTQPSHLSSPEEGLSLERGASAGRMMHYLAEDRGSGWCRCPCRFMIGRERPGEQSEVAQLIQQTLEQERWQREMMEQRYAQYGEDDEETGEYATDEDEELSPTFPGGEMAIEVFELAENEDALSPVDMEPEKLVHKFKELQIKHAVTEAEIQQLKRKLQSLEQEKGRWRVEKAQLEQSVEENKERMEKLEGYWGEAQSLCQAVDEHLRETQAQYQALERKYSKAKRLIKDYQQKEIEFLKKETAQRRVLEESELARKEEMDKLLDKISELEGNLQTLRNSNST

SEQ ID NO: 867518 - protein, 219 aa, Homo sapiens
GCLISHEGEWVSEIRPGGGVMTEETGEYATDEDEELSPTFPGGEMAIEVFELAENEDALSPVDMEPEKLVHKFKELQIKHAVTEAEIQQLKRKLQSLEQEKGRWRVEKAQLEQSVEENKERMEKLEGYWGEAQSLCQAVDEHLRETQAQYQALERKYSKAKRLIKDYQQKEIEFLKKETAQRRVLEESELARKEEMDKLLDKISELEGNLQTLRNSNST

SEQ ID NO: 867519 - protein, 865 aa, Homo sapiens; identical to SEQ ID NO: 867513

SEQ ID NO: 867520 - protein, 128 aa, Homo sapiens
LARLGWHLFFLRQPFLVTVKINQFNGHHWLGVDCTFFVSIDHPLVAVPSSIHHCTFSRNPPLGCRSIPFQLCPGSKPKMTSGALRCHPTATGFVLWLCESVLYKPCWQTHNSAKDLFVVSIYRSKVGA

SEQ ID NO: 867521 - protein, 99 aa, Homo sapiens
SFLSDLAYKASTRKLQSSTLFWIDKLWLGSGDLAFQPSNQSFMPTTPSIPSSPHVSVHTVKRPDQPWYQGTGRVQGNADTCPRAFSVAQRDETSTSPWM

SEQ ID NO: 867522 - protein, 365 aa, Homo sapiens
MPGGKKVAGGGSSGATPTSAAATAPSGVRRLETSEGTSAQRDEEPEEEGEEDLRDGGVPFFVNRGGLPVDEATWERMWKHVAKIHPDGEKVAQRIRGATDLPKIPIPSVPTFQPSTPVPERLEAVQRYIRELQYNHTGTQFFEIKKSRPLTGLMDLAKEMTKEALPIKCLEAVILGIYLTNSMPTLERFPISFKTYFSGNYFRHIVLGVNFAGRYGALGMSRREDLMYKPPAFRTLSELVLDFEAAYGRCWHVLKKVKLGQSVSHDPHSVEQIEWKHSVLDVERLGRDDFRKELERHARDMRLKIGKGTGPPSPTKDRKKDVSSPQRAQSSPHRRNSRSERRPSGDKKTSEPKAMPDLNGYQIRV

SEQ ID NO: 867523 - protein, 195 aa, Homo sapiens
MPGGKKVAGGGSSGATPTSAAATAPSGVRRLETSEGTSAQRDEEPEEEGEEDLRDGGVPFFVNRGGLPVDEATWERMWKHVAKIHPDGEKVAQRIRGATDLPKIPIPSVPTFQPSTPVPERLEAVQRYIRELQYNHTGTQFFEIKKSRPLTGLMDLAKEMTKEALPIKCLEAVILGMFSSHTPASNPKGRSGACS

SEQ ID NO: 867524 - protein, 365 aa, Homo sapiens; identical to SEQ ID NO: 867522

SEQ ID NO: 867525 - protein, 365 aa, Homo sapiens; identical to SEQ ID NO: 867522

SEQ ID NO: 867526 - protein, 174 aa, Homo sapiens
MPGGKKVAGGGSSGATPTSAAATAPSGVRRLETSEGTSAQRDEEPEEEGEEDLRDGGVPFFVNRGGLPVDEATWERMWKHVAKIHPDGEKVAQRIRGATDLPKIPIPSVPTFQPSTPVPERLEAVQRYIRELQYPLWSRVMATFWPVWWALFPGRAGEVSAEPPHSTTPGPPFT

SEQ ID NO: 867527 - protein, 204 aa, Homo sapiens
MPGGKKVAGGGSSGATPTSAAATAPSGVRRLETSEGTSAQRDEEPEEEGEEDLRDGGVPFFVNRGGLPVDEATWERMWKHVAKIHPDGEKVAQRIRGATDLPKIPIPSVPTFQPSTPVPERLEAVQRYIRELQYNHTGTQFFEIKKSRPLTGLMDLAKEMTKEALPIKCLEAVILGMYPSSPEGEGSGLLWASASCSESEGGVG

SEQ ID NO: 867528 - protein, 365 aa, Homo sapiens; identical to SEQ ID NO: 867522

SEQ ID NO: 867529 - protein, 204 aa, Homo sapiens; identical to SEQ ID NO: 867527

SEQ ID NO: 867530 - protein, 584 aa, Homo sapiens
CARPSLYSGRGGLAFRTRAQPGGSRAGVSSLSVTMSAAWIPALGLGVCLLLLPGPAGSEGAAPIAITCFTRGLDIRKEKADVLCPGGCPLEEFSVYGNIVYASVSSICGAAVHRGVISNSGGPVRVYSLPGRENYSSVDANGIQSQMLSRWSASFTVTKGKSSTQEATGQAVSTAHPPTGKRLKKTPEKKTGNKDCKADIAFLIDGSFNIGQRRFNLQKNFVGKVALMLGIGTEGPHVGLVQASEHPKIEFYLKNFTSAKDVLFAIKEVGFRGGNSNTGKALKHTAQKFFTVDAGVRKGIPKVVVVFIDGWPSDDIEEAGIVAREFGVNVFIVSVAKPIPEELGMVQDVTFVDKAVCRNNGFFSYHMPNWFGTTKYVKPLVQKLCTHEQMMCSKTCYNSVNIAFLIDGSSSVGDSNFRLMLEFVSNIAKTFEISDIGAKIAAVQFTYDQRTEFSFTDYSTKENVLAVIRNIRYMSGGTATGDAISFTVRNVFGPIRESPNKNFLVIVTDGQSYDDVQGPAAAAHDAGITIFSVGVAWAPLDDLKDMASKPKESHAFFTREFTGLEPIVSDVIRGICRDFLESQQ

SEQ ID NO: 867531 - protein, 65 aa, Homo sapiens
MSAAWIPALGLGVCLLLLPGPAGSEGAGEWGSWGASRRSQGLSTSGYKRDSDPAPWASALPPEEE

SEQ ID NO: 867532 - protein, 432 aa, Homo sapiens
MSAAWIPALGLGVCLLLLPGPAGSEGAGKRLKKTPEKKTGNKDCKADIAFLIDGSFNIGQRRFNLQKNFVGKVALMLGIGTEGPHVGLVQASEHPKIEFYLKNFTSAKDVLFAIKEVGFRGGNSNTGKALKHTAQKFFTVDAGVRKGIPKVVVVFIDGWPSDDIEEAGIVAREFGVNVFIVSVAKPIPEELGMVQDVTFVDKAVCRNNGFFSYHMPNWFGTTKYVKPLVQKLCTHEQMMCSKTCYNSVNIAFLIDGSSSVGDSNFRLMLEFVSNIAKTFEISDIGAKIAAVQFTYDQRTEFSFTDYSTKENVLAVIRNIRYMSGGTATGDAISFTVRNVFGPIRESPNKNFLVIVTDGQSYDDVQGPAAAAHDAGITIFSVGVAWAPLDDLKDMASKPKESHAFFTREFTGLEPIVSDVIRGICRDFLESQQ

SEQ ID NO: 867533 - protein, 534 aa, Homo sapiens
MSAAWIPALGLAPIAITCFTRGLDIRKEKADVLCPGGCPLEEFSVYGNIVYASVSSICGAAVHRGVISNSGGPVRVYSLPGRENYSSVDANGIQSQMLSRWSASFTVTKGKSSTQEATGQAVSTAHPPTGKRLKKTPEKKTGNKDCKADIAFLIDGSFNIGQRRFNLQKNFVGKVALMLGIGTEGPHVGLVQASEHPKIEFYLKNFTSAKDVLFAIKEVGFRGGNSNTGKALKHTAQKFFTVDAGVRKGIPKVVVVFIDGWPSDDIEEAGIVAREFGVNVFIVSVAKPIPEELGMVQDVTFVDKAVCRNNGFFSYHMPNWFGTTKYVKPLVQKLCTHEQMMCSKTCYNSVNIAFLIDGSSSVGDSNFRLMLEFVSNIAKTFEISDIGAKIAAVQFTYDQRTEFSFTDYSTKENVLAVIRNIRYMSGGTATGDAISFTVRNVFGPIRESPNKNFLVIVTDGQSYDDVQGPAAAAHDAGITIFSVGVAWAPLDDLKDMASKPKESHAFFTREFTGLEPIVSDVIRGICRDFLESQQ

SEQ ID NO: 867534 - protein, 218 aa, Homo sapiens [sequence omitted]

SEQ ID NO: 867535 - protein, 493 aa, Homo sapiens
MSAAWIPALGLGVCLLLLPGPAGSEGAAPIAITCFTRGLDIRKEKADVLCPGGCPLEEFSVYGNIVYASVSSICGAAVHRGVISNSGGPVRVYSLPGRENYSSVDANGIQSQMLSRWSASFTVTKGKSSTQEATGQAVSTAHPPTGKRLKKTPEKKTGNKDCKADIAFLIDGSFNIGQRRFNLQKNFVGKVALMLGIGTEGPHVGLVQASEHPKIEFYLKNFTSAKDVLFAIKEVGFRGGNSNTGKALKHTAQKFFTVDAGVRKGIPKVVVVFIDGWPSDDIEEAGIVAREFGVNVFIVSVAKPIPEELGMVQDVTFVDKAVCRNNGFFSYHMPNWFGTTKYVKPLVQKLCTHEQMMCSKTCYNSVNIAFLIDGSSSVGDSNFRLMLEFVSNIAKTFEISDIGAKIAAVQFTYDQRTEFSSLILPQKCANVTNIEIMGTTGSHTTLLATGPQTQSPVPTNNATAQRTSGEAVEGSEDTAKPSSCTSRVCSRGG

SEQ ID NO: 867536 - protein, 151 aa, Homo sapiens
NSVNIAFLIDGSSSVGDSNFRLMLEFVSNIAKTFEISDIGAKIAAVQFTYDQRTEFSFTDYSTKENVLAVIRNIRYMSGGTATGDAISFTVRNVFGPIRESPNKNFLVIVTDGQSYDDVQGPAAAAHDAGKVLVLYRRREQKKRFSEFRSK

SEQ ID NO: 867537 - protein, 584 aa, Homo sapiens; identical to SEQ ID NO: 867530

SEQ ID NO: 867538 - protein, 494 aa, Homo sapiens
MSAAWIPALGLGVCLLLLPGPAGSEGAAPIAITCFTRGLDIRKEKADVLCPGGCPLEEFSVYGNIVYASVSSICGAAVHRGVISNSGGPVRVYSLPGRENYSSVDANGIQSQMLSRWSASFTVTKGKSSTQEATGQAVSTAHPPTGKRLKKTPEKKTGNKDCKADIAFLIDGSFNIGQRRFNLQKNFVGKVALMLGIGTEGPHVGLVQASEHPKIEFYLKNFTSAKDVLFAIKEVGFRGGNSNTGKALKHTAQKFFTVDAGVRKGIPKVVVVFIDGWPSDDIEEAGIVAREFGVNVFIVSVAKPIPEELGMVQDVTFVDKAVCRNNGFFSYHMPNWFGTTKYVKPLVQKLCTHEQMMCSKTCYNSVNIAFLIDGSSSVGDSNFRLMLEFVSNIAKTFEISDIGAKIAAVQFTYDQRTEFSFTDYSTKENVLAVIRNIRYMSGGTATGDAISFTVRNVFGPIRESPNKNFLVIVTDGQSYDDVQGPAAAAHDAAK

SEQ ID NO: 867539 - protein, 550 aa, Homo sapiens
MSAAWIPALGLGVCLLLLPGPAGSEGAAPIAITCFTRGLDIRKEKADVLCPGGCPLEEFSVYGNIVYASVSSICGAAVHRGVISNSGGPVRVYSLPGRENYSSVDANGIQSQMLSRWSASFTVTKGKSSTQEATGQAVSTAHPPTGKRLKKTPEKKTGNKDCKADIAFLIDGSFNIGQRRFNLQKNFVGKVALMLGIGTEGPHVGLVQASEHPKIEFYLKNFTSAKDVLFAIKEVGFRGGNSNTGKALKHTAQKFFTVDAGVRKGIPKVVVVFIDGWPSDDIEEAGIVAREFGVNVFIVSVAKPIPEELGMVQDVTFVDKAVCRNNGFFSYHMPNWFGTTKYVKPLVQKLCTHEQMMCSKTCYNSVNIAFLIDGSSSVGDSNFRLMLEFVSNIAKTFEISDIGAKIAAVQFTYDQRTEFSFTDYSTKENVLAVIRNIRYMSGGTATGDAISFTVRNVFGPIRESPNKNFLVIVTDGQSYDDVQGPAAAAHDAGITIFSVGVAWAPLDDLKDMASKPKESHAFFTREFTGLEPIVSDVIRGICRDFLESQQ

SEQ ID NO: 867540 - protein, 532 aa, Homo sapiens
MSAAWIPALGLGVCLLLLPGPAGSEGAAPIAITCFTRGLDIRKEKADVLCPGGCPLEEFSVYGNIVYASVSSICGAAVHRGVISNSGGPVRVYSLPGRENYSSVDANGIQSQMLSRWSASFTVTKGKSSTQEATGQAVSTAHPPTGKRLKKTPEKKTGNKDCKADIAFLIDGSFNIGQRRFNLQKNFVGKVALMLGIGTEGPHVGLVQASEHPKIEFYLKNFTSAKDVLFAIKEVGFRGGNSNTGKALKHTAQKFFTVDAGVRKGIPKVVVVFIDGWPSDDIEEAGIVAREFGVNVFIVSVAKPIPEELGMVQDVTFVDKAVCRNNGFFSYHMPNWFGTTSKTCYNSVNIAFLIDGSSSVGDSNFRLMLEFVSNIAKTFEISDIGAKIAAVQFTYDQRTEFSFTDYSTKENVLAVIRNIRYMSGGTATGDAISFTVRNVFGPIRESPNKNFLVIVTDGQSYDDVQGPAAAAHDAGITIFSVGVAWAPLDDLKDMASKPKESHAFFTREFTGLEPIVSDVIRGICRDFLESQQ

SEQ ID NO: 867541 - protein, 550 aa, Homo sapiens; identical to SEQ ID NO: 867539

SEQ ID NO: 867542 - protein, 92 aa, Homo sapiens
SGKGYLFASFSNLGKALKHTAQKFFTVDAGVRKGIPKVVVVFIDGWPSDDIEEAGIVAREFGVNVFIVSVAKPIPEELGMVQDVTFVDKVKW

SEQ ID NO: 867543 - protein, 283 aa, Homo sapiens
MDLWPGAWMLLLLLFLLLLFLLPTLWFCSPSAKYFFKMAFYNGWILFLAVLAIPVCAVRGRNVENMKILRLMLLHIKYLYGIRVEVRGAHHFPPSQPYVVVSNHQSSLDLLGMMEVLPGRCVPIAKRELLWAGSAGLACWLAGVIFIDRKRTGDAISVMSEVAQTLLTQDVRVWVFPEGTRNHNGSMLPFKRGAFHLAVQAQVPIVPIVMSSYQDFYCKKERRFTSGQCQVRVLPPVPTEGLTPDDVPALADRVRHSMLTVFREISTDGRGGGDYLKKPGGGG

SEQ ID NO: 867544 - protein, 283 aa, Homo sapiens; identical to SEQ ID NO: 867543

SEQ ID NO: 867545 - protein, 283 aa, Homo sapiens; identical to SEQ ID NO: 867543

SEQ ID NO: 867546 - protein, 283 aa, Homo sapiens; identical to SEQ ID NO: 867543

SEQ ID NO: 867547 - protein, 283 aa, Homo sapiens; identical to SEQ ID NO: 867543

SEQ ID NO: 867548 - protein, 283 aa, Homo sapiens; identical to SEQ ID NO: 867543

SEQ ID NO: 867549 - protein, 270 aa, Homo sapiens
MDLWPGAWMLLLLLFLLLLFLLPTLWFCSPSAKYFFKMAFYNGWILFLAVLAIPVCAVRGRNVENMKILRLMLLHIKYLYGIRVEVRGAHHFPPSQPYVVVSNHQSSLDLLGMMEVLPGRCVPIAKRELLWAGSAGLACWLAGVIFIDRKRTGDAISVMSEVAQTLLTQDVRVWVFPEGTRNHNGSMLPFKRGAFHLAVQAQVPIVPIFLPTPTHPVGPEAGPNPLPCLPSPHLFSSLESSTSEVNVDTAPLLPPLGPIHGLLPRCSLHS

SEQ ID NO: 867550 - protein, 270 aa, Homo sapiens; identical to SEQ ID NO: 867549

SEQ ID NO: 867551 - protein, 283 aa, Homo sapiens; identical to SEQ ID NO: 867543

SEQ ID NO: 867552 - protein, 313 aa, Homo sapiens
MDLWPGAWMLLLLLFLLLLFLLPTLWFCSPSAKYFFKMAFYNGWILFLAVLAIPVCAVRGRNVENMKILRLMLLHIKYLYGIRVEVRGAHHFPPSQPYVVVSNHQSSLDLLGMMEVLPGRCVPIAKRELLWAGSAGLACWLAGVIFIDRKRTGDAISVMSEVAQTLLTQDVRVWVFPEGTRNHNGSMLPFKRGAFHLAVQAQVPIVPIVMSSYQDFYCKKERRFTSGQCQVRVLPPVPTEGLTPDDVPALADRVRHSMLTVFREISTDGRGGGDYLKKQTSGAALTSAPWGVGERNEPWLEGIGGLLIYFFFC

SEQ ID NO: 867553 - protein, 283 aa, Homo sapiens; identical to SEQ ID NO: 867543

SEQ ID NO: 867554 - protein, 283 aa, Homo sapiens; identical to SEQ ID NO: 867543

SEQ ID NO: 867555 - protein, 283 aa, Homo sapiens; identical to SEQ ID NO: 867543

SEQ ID NO: 867556 - protein, 283 aa, Homo sapiens; identical to SEQ ID NO: 867543

SEQ ID NO: 867557 - protein, 283 aa, Homo sapiens; identical to SEQ ID NO: 867543

SEQ ID NO: 867558 - protein, 283 aa, Homo sapiens; identical to SEQ ID NO: 867543

SEQ ID NO: 867559 - protein, 283 aa, Homo sapiens; identical to SEQ ID NO: 867543

SEQ ID NO: 867560 - protein, 132 aa, Homo sapiens
MWIQRHSCPLLAPSMDSCLGAVSTLDPHLLLSCLWDSCLPLISSDSAYTREGNIPSPVESLPMWSSLPLYPTLASGLIHSLEQIPPTPKSMDSMDSSICEEDFSPSGWKLIPEALPGSSWELSSAPSPSLPV

SEQ ID NO: 867561 - protein, 283 aa, Homo sapiens; identical to SEQ ID NO: 867543

SEQ ID NO: 867562 - protein, 117 aa, Homo sapiens
MWSLRVAFLPTLVQYRVLSCPCHPLGKGLGAGVREDAVVVLRPGPHMCDARGDRQKLILSLSRETPCVGTCLFYDLFPCASQLAFWDLCTPQPLDDANSLVAVGHWLPACGGHLGFW

SEQ ID NO: 867563 - protein, 828 aa, Homo sapiens
MMEGLKKRTRKAFGIRKKEKDTDSTGSPDRDGIQPSPHEPPYNSKAECAREGGKKVSKKSNGAPNGFYAEIDWERYNSPELDEEGYSIRPEEPGSTKGKHFYSSSESEEEEESHKKFNIKIKPLQSKDILKNAATVDELKASIGNIALSPSPVRKSPRRSPGAIKRNLSSEEVARPRRSTPTPELISKKPPDDTTALAPLFGPPLESAFDEQKTEVLLDQPEIWGSGQPINPSMESPKLTRPFPTGTPPPLPPKNVPATPPRTGSPLTIGPGNDQSATEVKIEKLPSINDLDSIFGPVLSPKSVAVNAEEKWVHFSDTSPEHVTPELTPREKVVSPPATPDNPADSPAPGPLGPPGPTGPPGPPGPPRNVLSPLNLEEVQKKVAEQTFIKDDYLETISSPKDFGLGQRATPPPPPPPTYRTVVSSPGPGSGPGPGTTSGASSPARPATPLVPCRSTTPPPPPPRPPSRPKLPPGKPGVGDVSRPFSPPIHSSSPPPIAPLARAESTSSISSTNSLSAATTPTVENEQPSLVWFDRGKFYLTFEGSSRGPSPLTMGAQDTLPVAAAFTETVNAYFKGADPSKCIVKITGEMVLSFPAGITRHFANNPSPAALTFRVINFSRLEHVLPNPQLLCCDNTQNDANTKEFWVNMPNLMTHLKKVSEQKPQATYYNVDMLKYQVSAQGIQSTPLNLAVNWRCEPSSTDLRIDYKYNTDAMTTAVALNNVQFLVPIDGGVTKLQAVLPPAVWNAEQQRILWKIPDISQKSENGGVGSLLARFQLSEGPSKPSPLVVQFTSEGSTLSGCDIELVGAGYRFSLIKKRFAAGKYLADN

SEQ ID NO: 867564 - protein, 687 aa, Homo sapiens
MMEGLKKRTRKAFGIRKKEKDTDSTGSPDRDGIQGKKKTQKTQLLLTSFFWLRALSLTLSQKKSNGAPNGFYAEIDWERYNSPELDEEGYSIRPEEPGSTKGKHFYSSSESEEEEESHKKFNIKIKPLQSKDILKNAATVDELKASIGNIALSPSPVRKSPRRSPGAIKRNLSSEEVARPRRSTPTPELISKKPPDDTTALAPLFGPPLESAFDEQKTEVLLDQPEIWGSGQPINPSMESPKLTRPFPTGTPPPLPPKNVPATPPRTGSPLTIGPGASSPARPATPLVPCRSTTPPPPPPRPPSRPKLPPGKPGVGDVSRPFSPPIHSSSPPPIAPLARAESTSSISSTNSLSAATTPTVVSEDDVFYDKLPSFERRCETPAENEQPSLVWFDRGKFYLTFEGSSRGPSPLTMGAQDTLPVAAAFTETVNAYFKGADPSKCIVKITGEMVLSFPAGITRHFANNPSPAALTFRVINFSRLEHVLPNPQLLCCDNTQNDANTKEFWVNMPNLMTHLKKVSEQKPQATYYNVDMLKYQVSAQGIQSTPLNLAVNWRCEPSSTDLRIDYKYNTDAMTTAVALNNVQFLVPIDGGVTKLQAVLPPAVWNAEQQRILWKIPDISQKSENGGVGSLLARFQLSEGPSKPSPLVVQFTSEGSTLSGCDIELVGAGYRFSLIKKRFAAGKYLADN

SEQ ID NO: 867565 - protein, 333 aa, Homo sapiens
MTCSVTHIVSFSLPFLNPSHPASTPGHTENEQPSLVWFDRGKFYLTFEGSSRGPSPLTMGAQDTLPVAAAFTETVNAYFKGADPSKCIVKITGEMVLSFPAGITRHFANNPSPAALTFRVINFSRLEHVLPNPQLLCCDNTQNDANTKEFWVNMPNLMTHLKKVSEQKPQATYYNVDMLKYQVSAQGIQSTPLNLAVNWRCEPSSTDLRIDYKYNTDAMTTAVALNNVQFLVPIDGGVTKLQAVLPPAVWNAEQQRILWKIPDISQKSENGGVGSLLARFQLSEGPSKPSPLVVQFTSEGSTLSGCDIELVGAGYRFSLIKKRFAAGKYLADN

SEQ ID NO: 867566 - protein, 388 aa, Homo sapiens
MMEGLKKRTRKAFGIRKKEKDTDSTGSPDRDGIQGKKKTQKTQLLLTSFFWLRALSLTLSQKKSNGAPNGFYAEIDWERYNSPELDEEGYSIRPEEPGSTKGKHFYSSSESEEEEESHKKFNIKIKPLQSKDILKNAATVDELKASIGNIALSPSPVRKSPRRSPGAIKRNLSSEEVARPRRSTPTPELISKKPPDDTTALAPLFGPPLESAFDEQKTEVLLDQPEIWGSGQPINPSMESPKLTRPFPTGTPPPLPPKNVPATPPRTGSPLTIGPGASSPARPATPLVPCRSTTPPPPPPRPPSRPKLPPGKPGVGDVSRPFSPPIHSSSPPPIAPLARAESTSSISSTNSLSAATTPTVVSEDDVFYDKLPSFERRCETPAGMVLAK

SEQ ID NO: 867567 - protein, 161 aa, Homo sapiens
MMEGLKKRTRKAFGIRKKEKDTDSTGSPDRDGIQPSPHEPPYNSKAECAREGGKKVSKKSNGAPNGFYAEIDWERYNSPELDEEGYSIRPEEPGSTKGKHFYSSSESEEEEESHKKFNIKIKPLQSKDILKNAATVDELKASIGNIALSPSPVVSVCVCVC

SEQ ID NO: 867568 - protein, 675 aa, Homo sapiens
MMEGLKKRTRKAFGIRKKEKDTDSTGSPDRDGIQPSPHEPPYNSKAECAREGGKKVSKKSNGAPNGFYAEIDWERYNSPELDEEGYSIRPEEPGSTKGKHFYSSSESEEEEESHKKFNIKIKPLQSKDILKNAATVDELKASIGNIALSPSPVGAIKRNLSSEEVARPRRSTPTPELISKKPPDDTTALAPLFGPPLESAFDEQKTEVLLDQPEIWGSGQPINPSMESPKLTRPFPTGTPPPLPPKNVPATPPRTGSPLTIGPGASSPARPATPLVPCRSTTPPPPPPRPPSRPKLPPGKPGVGDVSRPFSPPIHSSSPPPIAPLARAESTSSISSTNSLSAATTPTVVSEDDVFYDKLPSFERRCETPAENEQPSLVWFDRGKFYLTFEGSSRGPSPLTMGAQDTLPVAAAFTETVNAYFKGADPSKCIVKITGEMVLSFPAGITRHFANNPSPAALTFRVINFSRLEHVLPNPQLLCCDNTQNDANTKEFWVNMPNLMTHLKKVSEQKPQATYYNVDMLKYQVSAQGIQSTPLNLAVNWRCEPSSTDLRIDYKYNTDAMTTAVALNNVQFLVPIDGGVTKLQAVLPPAVWNAEQQRILWKIPDISQKSENGGVGSLLARFQLSEGPSKPSPLVVQFTSEGSTLSGCDIELVGAGYRFSLIKKRFAAGKYLADN

SEQ ID NO: 867569 - protein, 379 aa, Homo sapiens
MMEGLKKRTRKAFGIRKKEKDTDSTGSPDRDGIQGKKKTQKTQLLLTSFFWLRALSLTLSQKKSNGAPNGFYAEIDWERYNSPELDEEGYSIRPEEPGSTKGKHFYSSSESEEEEESHKKFNIKIKPLQSKDILKNAATVDELKASIGNIALSPSPVRKSPRRSPGAIKRNLSSEEVARPRRSTPTPELISKKPPDDTTALAPLFGPPLESAFDEQKTEVLLDQPEIWGSGQPINPSMESPKLTRPFPTGTPPPLPPKNVPATPPRTGSPLTIGPGASSPARPATPLVPCRSTTPPPPPPRPPSRPKLPPGKPGVGDVSRPFSPPIHSSSPPPIAPLARAESTSSISSTNSLSAATTPTVGKNSLLSFNPFVVLTGYFL

SEQ ID NO: 867570 - protein, 132 aa, Homo sapiens
PRACTVGAHRHQREGSSSLAADGAAGLASRSPACERGARSTRRPGSEDVTPRPCARQSPGAVRPAQARRSSPAAAQAARLAPSLSFPIGKALTVVADGFCGQSLGLRRLRGYRQHPHPEGRAGPGSRDRCPR

SEQ ID NO: 867571 - protein, 413 aa, Homo sapiens
QAPPPAHEEVAAAPARSPEPVRRVDCPESAAGARERSQAAMAYHSFLVEPISCHAWNKDRTQIAICPNNHEVHIYEKSGAKWTKVHELKEHNGQVTGIDWAPESNRIVTCGTDRNAYVWTLKGRTWKPTLVILRINRAARCVRWAPNENKFAVGSGSRVISICYFEQENDWWVCKHIKKPIRSTVLSLDWHPNNVLLAAGSCDFKCRIFSAYIKEVEERPAPTPWGSKMPFGELMFESSSSCGWVHWRLFLSQREPRWPGVSHDSTVCLADADKKMAVATLASETLPLLALTFITDNSLVAAGHDCFPVLFTYDAAAGMLSFGGRLDVPKQSSQRGLTARERFQNLDKKASSEGGTAAGAGLDSLHKNSVSQISVLSGGKAKCSQFCTTGMDGGMSIWDVKSLESALKDLKIK

SEQ ID NO: 867572 - protein, 412 aa, Homo sapiens
YSDYPDAYTKGMSLQMIGCFRRVDCPESAAGARERSQAAMAYHSFLVEPISCHAWNKDRTQIAICPNNHEVHIYEKSGAKWTKVHELKEHNGQVTGIDWAPESNRIVTCGTDRNAYVWTLKGRTWKPTLVILRINRAARCVRWAPNENKFAVGSGSRVISICYFEQENDWWVCKHIKKPIRSTVLSLDWHPNNVLLAAGSCDFKCRIFSAYIKEVEERPAPTPWGSKMPFGELMFESSSSCGWVHWRLFLSQREPRWPGVSHDSTVCLADADKKMAVATLASETLPLLALTFITDNSLVAAGHDCFPVLFTYDAAAGMLSFGGRLDVPKQSSQRGLTARERFQNLDKKASSEGGTAAGAGLDSLHKNSVSQISVLSGGKAKCSQFCTTGMDGGMSIWDVKSLESALKDLKIK

SEQ ID NO: 867573 - protein, 373 aa, Homo sapiens
MAYHSFLVEPISCHAWNKDRTQIAICPNNHEVHIYEKSGAKWTKVHELKEHNGQVTGIDWAPESNRIVTCGTDRNAYVWTLKGRTWKPTLVILRINRAARCVRWAPNENKFAVGSGSRVISICYFEQENDWWVCKHIKKPIRSTVLSLDWHPNNVLLAAGSCDFKCRIFSAYIKEVEERPAPTPWGSKMPFGELMFESSSSCGWVHWRLFLSQREPRWPGVSHDSTVCLADADKKMAVATLASETLPLLALTFITDNSLVAAGHDCFPVLFTYDAAAGMLSFGGRLDVPKQSSQRGLTARERFQNLDKKASSEGGTAAGAGLDSLHKNSVSQISVLSGGKAKCSQFCTTGMDGGMSIWDVKSLESALKDLKIK

SEQ ID NO: 867574 - protein, 373 aa, Homo sapiens; identical to SEQ ID NO: 867573

SEQ ID NO: 867575 - protein, 373 aa, Homo sapiens; identical to SEQ ID NO: 867573

SEQ ID NO: 867576 - protein, 373 aa, Homo sapiens; identical to SEQ ID NO: 867573

SEQ ID NO: 867577 - protein, 276 aa, Homo sapiens
MKALLERVGRPTRRTVGSGSRVISICYFEQENDWWVCKHIKKPIRSTVLSLDWHPNNVLLAAGSCDFKCRIFSAYIKEVEERPAPTPWGSKMPFGELMFESSSSCGWVHWRLFLSQREPRWPGVSHDSTVCLADADKKMAVATLASETLPLLALTFITDNSLVAAGHDCFPVLFTYDAAAGMLSFGGRLDVPKQSSQRGLTARERFQNLDKKASSEGGTAAGAGLDSLHKNSVSQISVLSGGKAKCSQFCTTGMDGGMSIWDVKSLESALKDLKIK

SEQ ID NO: 867578 - protein, 476 aa, Homo sapiens
QAPPPAHEEVAAAPARSPEPVRRVDCPESAAGARERSQAAMAYHSFLVEPISCHAWNKDRTQIAICPNNHEVHIYEKSGAKWTKVHELKEHNGQVTGIDWAPESNRIVTCGTDRNAYVWTLKGRTWKPTLVILRINRAARCVRWAPNENKFAVGSGSRVISICYFEQENDWMESHSVTQAGVQWHDLGSRQPLPAGFEQFSASASQVAGITGTCYHARIIFIFLVEMGFTILARWVCKHIKKPIRSTVLSLDWHPNNVLLAAGSCDFKCRIFSAYIKEVEERPAPTPWGSKMPFGELMFESSSSCGWVHWRLFLSQREPRWPGVSHDSTVCLADADKKMAVATLASETLPLLALTFITDNSLVAAGHDCFPVLFTYDAAAGMLSFGGRLDVPKQSSQRGLTARERFQNLDKKASSEGGTAAGAGLDSLHKNSVSQISVLSGGKAKCSQFCTTGMDGGMSIWDVKSLESALKDLKIK

SEQ ID NO: 867579 - protein, 185 aa, Homo sapiens
MPFGELMFESSSSCGWVHWRLFLSQREPRWPGVSHDSTVCLADADKKMAVATLASETLPLLALTFITDNSLVAAGHDCFPVLFTYDAAAGMLSFGGRLDVPKQSSQRGLTARERFQNLDKKASSEGGTAAGAGLDSLHKNSVSQISVLSGGKAKCSQFCTTGMDGGMSIWDVKSLESALKDLKIK

SEQ ID NO: 867580 - protein, 368 aa, Homo sapiens
QAPPPAHEEVAAAPARSPEPVRRVDCPESAAGARERSQAAMAYHSFLVEPISCHAWNKDRTQIAICPNNHEVHIYEKSGAKWTKVHELKEHNGQVTGIDWAPESNRIVTCGTDRNAYVWTLKGRTWKPTLVILRINRAARCVRWAPNENKFAVGSGSRVISICYFEQENDWWVCKHIKKPIRSTVLSLDWHPNNVLLAAGSCDFKCRQREPRWPGVSHDSTVCLADADKKMAVATLASETLPLLALTFITDNSLVAAGHDCFPVLFTYDAAAGMLSFGGRLDVPKQSSQRGLTARERFQNLDKKASSEGGTAAGAGLDSLHKNSVSQISVLSGGKAKCSQFCTTGMDGGMSIWDVKSLESALKDLKIK

SEQ ID NO: 867581 - protein, 325 aa, Homo sapiens
QAPPPAHEEVAAAPARSPEPVRRVDCPESAAGARERSQAAMAYHSFLVEPISCHAWNKDRTQIAICPNNHEVHIYEKSGAKWTKVHELKEHNGQVTGIDWAPESNRIVTCGTDRNAYVWTLKGRTWKPTLVILRINRAARCVRWAPNENKFAVGSGSRVISICYFEQENDWWVCKHIKKPIRSTVLSLDWHPNNVLLAAGSCDFKCRIFSAYIKEVEERPAPTPWGSKMPFGELMFESSSSCGWVHWRLFLSQREPRWPGVSHDSTVCLADADKKMAVATLALLKHYHCWPRPKAQLCLGTAARVKKKYWEDCQLPKVGLVAQVN

SEQ ID NO: 867582 - protein, 118 aa, Homo sapiens
MAPALRQGHDCFPVLFTYDAAAGMLSFGGRLDVPKQSSQRGLTARERFQNLDKKASSEGGTAAGAGLDSLHKNSVSQISVLSGGKAKCSQFCTTGMDGGMSIWDVKSLESALKDLKIK

SEQ ID NO: 867583 - protein, 301 aa, Homo sapiens
MAYHSFLVEPISCHAWNKDRTQIAICPNNHEVHIYEKSGAKWTKVHELKEHNGQVTGIDWAPESNRIVTCGTDRNAYVWTLKGRTWKPTLVILRINRAARCVRWAPNENKFAVGSGSRVISICYFEQENDWWVCKHIKKPIRSTVLSLDWHPNNVLLAAGSCDFKCRIFSAYIKEVEERPAPTPWGSKMPFGELMFESSSSCGWVHWRLFLSQREPRWPGVSHDSTVCLADADKKMAVATLASETLPLLALTFITDNSLVAAAPMLPGAVTYEARGDVKFGGRGEVLTELEVVEGREASEL

SEQ ID NO: 867584 - protein, 327 aa, Homo sapiens
MAYHSFLVEPISCHAWNKDRTQIAICPNNHEVHIYEKSGAKWTKVHELKEHNGQVTGIDWAPESNRIVTCGTDRNAYVWTLKGRTWKPTLVILRINRAARCVRWAPNENKFAVGSGSRVISICYFEQENDWWVCKHIKKPIRSTVLSLDWHPNNVLLAAGSCDFKCRIFSAYIKEVEERPAPTPWGSKMPFGELMFESSSSCGWVHWRLFLSQREPRWPGVSHDSTVCLADADKKMAVATLASETLPLLALTFITDNSLVAAGPTGPVVSYYARGMELRGGDVLGLQWLPGFHWKGPVARGGALKSIGRGASRVGLGAPHSRGGLWF

SEQ ID NO: 867585 - protein, 75 aa, Homo sapiens
VNQAVVRSSELAFLSRFWKRSRAETRCTRTVSAQISVLSGGKAKCSQFCTTGMDGGMSIWDVKSLESALKDLKIK

SEQ ID NO: 867586 - protein, 185 aa, Homo sapiens; identical to SEQ ID NO: 867579

SEQ ID NO: 867587 - protein, 413 aa, Homo sapiens; identical to SEQ ID NO: 867571

SEQ ID NO: 867588 - protein, 426 aa, Homo sapiens
QAPPPAHEEVAAAPARSPEPVRRVDCPESAAGARERSQAAMAYHSFLVEPISCHAWNKDRTQIAICPNNHEVHIYEKSGAKWTKVHELKEHNGQVTGIDWAPESNRIVTCGTDRNAYVWTLKGRTWKPTLVILRINRAARCVRWAPNENKFAVGSGSRVISICYFEQENDWWVCKHIKKPIRSTVLSLDWHPNNVLLAAGSCDFKCRIFSAYIKEVEERPAPTPWGSKMPFGELMFESSSSCGWVHWRLFLSQREPRWPGVSHDSTVCLADADKKMAVATLASETLPLLALTFITDNSLVAAGHDCFPVLFTYDAAAGMLSFGGRLDVPKQSSQRGLTARERFQNLDKKASSEGGTAAGAGLDSLHKNSVSQISVLSGGKAKCSQFCTTGMDGGMSIWDVKVRLAPPGFPPCLPGQPFPPIPTPWR

SEQ ID NO: 867589 - protein, 373 aa, Homo sapiens; identical to SEQ ID NO: 867573

SEQ ID NO: 867590 - protein, 373 aa, Homo sapiens; identical to SEQ ID NO: 867573

SEQ ID NO: 867591 - protein, 373 aa, Homo sapiens; identical to SEQ ID NO: 867573

SEQ ID NO: 867592 - protein, 268 aa, Homo sapiens
QAPPPAHEEVAAAPARSPEPVRRVDCPESAAGARERSQAAMAYHSFLVEPISCHAWNKDRTQIAICPNNHEVHIYEKSGAKWTKVHELKEHNGQVTGIDWAPESNRIVTCGTDRNAYVWTLKGRTWKPTLVILRINRAARCVRWAPNENKFAVGSGSRVISICYFEQENDWWVCKHIKKPIRSTVLSLDWHPNNVLLAAGSCDFKCRIFSAYIKEVEERPAPTPWGSKMPFGELMFESSSSCGWVHWRLFLSQREPRWPGVSRRDSGL

SEQ ID NO: 867593 - protein, 367 aa, Homo sapiens
QAPPPAHEEVAAAPARSPEPVRRVDCPESAAGARERSQAAMAYHSFLVEPISCHAWNKDRTQIAICPNNHEVHIYEKSGAKWTKVHELKEHNGQVTGIDWAPESNRIVTCGTDRNAYVWTLKGRTWKPTLVILRINRAARCVRWAPNENKFAVGSGSRVISICYFEQENDWWVCKHIKKPIRSTVLSLDWHPNNVLLAAGSCDFKCRIFSAYIKEVEERPAPTPWGSKMPFGELMFESSSSCGWVHWRLFLSQREPRWPGVSHDSTVCLADADKKMAVATLASETLPLLALTFITDNSLVAAGPTGPVVSYYARGMELRGGDVLGLQWLPGFHWKGPVARGGALKSIGRGASRVGLGAPHSRGGLWF

SEQ ID NO: 867594 - protein, 194 aa, Homo sapiens
LGFEHQFPKGHLGELMFESSSSCGWVHWRLFLSQREPRWPGVSHDSTVCLADADKKMAVATLASETLPLLALTFITDNSLVAAGHDCFPVLFTYDAAAGMLSFGGRLDVPKQSSQRGLTARERFQNLDKKASSEGGTAAGAGLDSLHKNSVSQISVLSGGKAKCSQFCTTGMDGGMSIWDVKSLESALKDLKIK

SEQ ID NO: 867595 - protein, 288 aa, Homo sapiens
QAPPPAHEEVAAAPARSPEPVRRVDCPESAAGARERSQAAMAYHSFLVEPISCHAWNKDRTQIAICPNNHEVHIYEKSGAKWTKVHELKEHNGQVTGIDWAPESNRIVTCGTDRNAYVWTLKGRTWKPTLVILRINRAARCVRWAPNENKFAVGSGSRVISICYFEQENDWWVCKHIKKPIRSTVLSLDWHPNNVLLAAGSCDFKCRIFSAYIKEVEERPAPTPWGSKMPFGELMFESSSSCGWVHWRLFLSQREPRWPGVSHDSTVCLADADKKMATHLPDEETQPP

SEQ ID NO: 867596 - protein, 119 aa, Homo sapiens
FHSSNKLLEQRPRLLAWLSIKPPGDNIFFGRLDVPKQSSQRGLTARERFQNLDKKASSEGGTAAGAGLDSLHKNSVSQISVLSGGKAKCSQFCTTGMDGGMSIWDVKSLESALKDLKIK

SEQ ID NO: 867597 - protein, 258 aa, Homo sapiens
MAYHSFLVEPISCHAWNKDRTQIAICPNNHEVHIYEKSGAKWTKVHELKEHNGQVTGIDWAPESNRIVTCGTDRNAYVWTLKGRTWKPTLVILRINRAARCVRWAPNENKFAVGSGSRVISICYFEQENDWWVCKHIKKPIRSTVLSLDWHPNNVLLAAGSCDFKCRIFSAYIKEVEERPAPTPWGSKMPFGELMFESSSSCGWVHWRLFLSQREPRWPGVSHDSTVCLADADKKMAQIWPETTTVATSPKTPGPAPL

SEQ ID NO: 867598 - protein, 248 aa, Homo sapiens
QAPPPAHEEVAAAPARSPEPVRRVDCPESAAGARERSQAAMAYHSFLVEPISCHAWNKDRTQIAICPNNHEVHIYEKSGAKWTKVHELKEHNGQVTGIDWAPESNRIVTCGTDRNAYVWTLKGRTWKPTLVILRINRAARCVRWAPNENKFAVGSGSRVISICYFEQENDWWVCKHIKKPIRSTVLSLDWHPNNVLLAAGSCDFKCRSFQPTSREVEERPVTHPRWGAPQRMPPFVGGKNFGIGFPGN

SEQ ID NO: 867599 - protein, 163 aa, Homo sapiens
RVSARRNSSTFMPVKLCGDMEPKSSCRGIYPHPSQPQTAPNTGWRPHCFPSQLCPGSCQGSCDGMRSARAGWDRSGAKCSTCGHPPSPASTLGGTVPFYFILLLFFFFFETEYRSVPQAGVQWCDLGSLQPLPPGFKRFCYLSLQSSWDYRLEYSGTISAHCN

SEQ ID NO: 867600 - protein, 283 aa, Homo sapiens
PEFASGPGAAFFHSGRLQRSLTKDSAGCFSQCRSRAMLVLRSGLTKALASRTLAPQVCSSFATGPRQYDGTFYEFRTYYLKPSNMNAFMENLKKNIHLRTSYSELVGFWSVEFGGRTNKVFHIWKYDNFAHRAEVRKALANCKEWQEQSIIPNLARIDKQETEITYLIPWSKLEKPPKEGVYELAVFQMKPGGPALWGDAFERAINAHVNLGYTKVVGVFHTEYGELNRVHVLWWNESADSRAAGRHKSHEDPRVVAAVRESVNYLVSQQNMLLIPASFSPLK

SEQ ID NO: 867601 - protein, 283 aa, Homo sapiens; identical to SEQ ID NO: 867600

SEQ ID NO: 867602 - protein, 171 aa, Homo sapiens
AGVRQWSRSRFFPLGKTSEKSHKGLGWLLFSVPKPRHARSQKRPDQGACLTDARASDNFAHRAEVRKALANCKEWQEQSIIPNLARIDKQETEITYLIPWSKLEKPPKEGVYELAVFQMKPGGPALWGDAFERAINAHVNLGYTKVVGVFHTEYGELNRGSRGTCEDLLLR

SEQ ID NO: 867603 - protein, 157 aa, Homo sapiens
MNAFMENLKKNIHLRTSYSELVGFWSVEFGGRTNKVFHIWKYDNFAHRAEVRKALANCKEWQEQSIIPNLARIDKQETEITYLIPWSKLEKPPKEGVYELAVFQMKPGGPALWGDAFERAINAHVNLGYTKVVGVFHTEYGELNRGSRGTCEDLLLR

SEQ ID NO: 867604 - protein, 283 aa, Homo sapiens; identical to SEQ ID NO: 867600

SEQ ID NO: 867605 - protein, 223 aa, Homo sapiens
PEFASGPGAAFFHSGRLQRSLTKDSAGCFSQCRSRAMLVLRSGLTKALASRTLAPQVCSSFATGPRQYDGTFYEFRTYYLKPSNMNAFMENLKKFGGRTNKVFHIWKYDNFAHRAEVRKALANCKEWQEQSIIPNLARIDKQETEITYLIPWSKLEKPPKEGVYELAVFQMKPGGPALWGDAFERAINAHVNLGYTKVVGVFHTEYGELNRGSRGTCEDLLLR

SEQ ID NO: 867606 - protein, 268 aa, Homo sapiens
PEFASGPGAAFFHSGRLQRSLTKDSAGCFSQCRSRAMLVLRSGLTKALASRTLAPQVCSSFATGPRQYDGTFYEFRTYYLKPSNMNAFMENLKKNIHLRTSYSELVGFWSVEFGGRTNKVFHIWKYDNFAHRAEVRKALANCKEWQEQSIIPNLARIDKQETEITYLIPWSKLEKPPKEALWGDAFERAINAHVNLGYTKVVGVFHTEYGELNRVHVLWWNESADSRAAGRHKSHEDPRVVAAVRESVNYLVSQQNMLLIPASFSPLK

SEQ ID NO: 867607 - protein, 141 aa, Homo sapiens
MACTYVSNLGKKQRSVSFLASGLMRVSTGPELRLHHSFVLTGDVGRRICRLLVGLFTKGDTSSKRVHPFSPGPCFLLCDLARVGSSPKINVSPFYQNQTSTQRSCTVFVWQRCSLVGPFQVTVFTMYFHHSLRSISRFSSG

SEQ ID NO: 867608 - protein, 141 aa, Homo sapiens; identical to SEQ ID NO: 867607

SEQ ID NO: 867609 - protein, 141 aa, Homo sapiens; identical to SEQ ID NO: 867607

SEQ ID NO: 867610 - protein, 451 aa, Homo sapiens
MAAPEPLSPAGGAGEEAPEEDEDEAEAEDPERPNAGAGGGRSGGGGSSVSGGGGGGGAGAGGCGGPGGALTRRAVTLRVLLKDALLEPGAGVLSIYYLGKKFLGDLQPDGRIMWQETGQTFNSPSAWATHCKKLVNPAKKSGCGWASVKYKGQKLDKYKATWLRLHQLHTPATAADESPASEGEEEELLMEEEEEDVLAGVSAEDKSRRPLGKSPSEPAHPEATTPGKRVDSKIRVPVRYCMLGSRDLARNPHTLVEVTSFAAINKFQPFNVAVSSNVLFLLIYQSLFLRGLSLVGWYHSHPHSPALPSLQDIDAQMDYQLRLQGSSNGFQPCLALLCSPYYSGNPGPESKISPFWVMPPPEQRPSDYGIPMDVEMAYVQDSFLTNDILHEMMLLVEFYKGSPDLVRLQEPWSQEHTYLDKLKISLASRTPKDQSLCHVLEQVCGVLKQGS

SEQ ID NO: 867611 - protein, 501 aa, Homo sapiens
MAAPEPLSPAGGAGEEAPEEDEDEAEAEDPERPNAGAGGGRSGGGGSSVSGGGGGGGAGAGGCGGPGGALTRRAVTLRVLLKDALLEPGAGVLSIYYLGKKFLGDLQPDGRIMWQETGQTFNSPSAWATHCKKLVNPAKKSGCGWASVKYKGQKLDKYKATWLRLHQLHTPATAADESPASEGEEEELLMEEEEEDVLAGVSAEDKSRRPLGKSPSEPAHPEATTPGKRVDSKIRVPVRYCMLGSRDLARNPHTLVEVTSFAAINKFQPFNVAVSSNVLFLLDFHSHLTRSEVVGYLGGRWDVNSQMLTVLRAFPCRSRLGDAETAAAIEEEIYQSLFLRGLSLVGWYHSHPHSPALPSLQDIDAQMDYQLRLQGSSNGFQPCLALLCSPYYSGNPGPESKISPFWVMPPPEQRPSDYGIPMDVEMAYVQDSFLTNDILHEMMLLVEFYKGSPDLVRLQEPWSQEHTYLDKLKISLASRTPKDQSLCHVLEQVCGVLKQGS

SEQ ID NO: 867612 - protein, 501 aa, Homo sapiens
GKPESRAPGAGRRGHGRYGGPSGAEARGAGLQGRGAAEPWGERPPCSLSLSAAPEPLSPAGGAGEEAPEEDEDEAEAEDPERPNAGAGGGRSGGGGSSVSGGGGGGGAGAGGCGGPGGALTRRAVTLRVLLKDALLEPGAGVLSIYYLGKKFLGDLQPDGRIMWQETGQTFNSPSAWATHCKKLVNPAKKSGCGWASVKYKGQKLDKYKATWLRLHQLHTPATAADESPASEGEEEELLMEEEEEDVLAGVSAEDKSRRPLGKSPSEPAHPEATTPGKRVDSKIRVPVRYCMLGSRDLARNPHTLVEVTSFAAINKFQPFNVAVSSNVLFLLIYQSLFLRGLSLVGWYHSHPHSPALPSLQDIDAQMDYQLRLQGSSNGFQPCLALLCSPYYSGNPGPESKISPFWVMPPPEQRPSDYGIPMDVEMAYVQDSFLTNDILHEMMLLVEFYKGSPDLVRLQEPWSQEHTYLDKLKISLASRTPKDQSLCHVLEQVCGVLKQGS

SEQ ID NO: 867613 - protein, 406 aa, Homo sapiens
PGSRSLELRARGGAAMAAPEPLSPAGGAGEEAPEEDEDEAEAEDPERPNAGAGGGRSGGGGSSVSGGGGGGGAGAGGCGGPGGALTRRAVTLRVLLKDALLEPGAGVLSIYYLGKKFLGDLQPDGRIMWQETGQTFNSPSAWATHCKKLVNPAKKSGCGWASVKYKGQKLDKYKATWLRLHQLHTPATAADESPASEGEEEELLMEEEEEDVLAGVSAEDKSRRPLGKSPSEPAHPEATTPGKRVDSKIRVPVRYCMLGSRDLARNPHTLVEVTSFAAINKFQPFNVAVSSNVLFLLDFHSHLTRSEVVGYLGGRWDVNSQMLTVLRAFPCRSRLGDAETAAAIEEEMLLVEFYKGSPDLVRLQEPWSQEHTYLDKLKISLASRTPKDQSLCHVLEQVCGVLKQGS

SEQ ID NO: 867614 - protein, 379 aa, Homo sapiens
GKPESRAPGAGRRGHGRYGGPSGAEARGAGLQGRGAAEPWGERPPCSLSLSAAPEPLSPAGGAGEEAPEEDEDEAEAEDPERPNAGAGGGRSGGGGSSVSGGGGGGGAGAGGCGGPGGALTRRAVTLRVLLKDALLEPGAGVLSIYYLGKKFLGDLQPDGRIMWQETGQTFNSPSAWATHCKKLVNPAKKSGCGWASVKYKGQKLDKYKATWLRLHQLHTPATAADESPASEGEEEELLMEEEEEDVLAGVSAEDKSRRPLGKSPSEPAHPEATTPGKRVDSKIRVPVRYCMLGSRDLARNPHTLVEVTSFAAINKFQPFNVAVSSNVLFLLVCGPPCLGARGSGAQSVGSGRGSPAYQLHESWGLVCFVCYWYTVGAQ

SEQ ID NO: 867615 - protein, 142 aa, Homo sapiens
MRAQAGSSVGAGPQPEPVFCCSSLPQDFHSHLTRSEVVGYLGGRWDVNSQSGYPGPGGRGRWRTGVTGSQLPLPTVLTVLRAFPCRSRLGDAETAAAIEEEVRGYLGGGILGRVGKGHSCPGDCPVAGSVLHPSTMGSHGEG

SEQ ID NO: 867616 - protein, 176 aa, Homo sapiens
  misc_feature (128)..(128): Xaa can be any naturally occurring amino acid
  misc_feature (142)..(142): Xaa can be any naturally occurring amino acid
  misc_feature (155)..(155): Xaa can be any naturally occurring amino acid
PGSRSLELRARGGAAMAAPEPLSPAGGAGEEAPEEDEDEAEAEDPERPNAGAGGGRSGGGGSSVSGGGGGGGAGAGGCGGPGGALTRRAVTLRVLLKDALLEPGAGVLSIYYLGKKYWATAADEGSCXRDGQTSLTTLVTTXTVTADGVCFHTAXDISTARSHANSSCSQPHRRAD

SEQ ID NO: 867617 - protein, 551 aa, Homo sapiens
GKPESRAPGAGRRGHGRYGGPSGAEARGAGLQGRGAAEPWGERPPCSLSLSAAPEPLSPAGGAGEEAPEEDEDEAEAEDPERPNAGAGGGRSGGGGSSVSGGGGGGGAGAGGCGGPGGALTRRAVTLRVLLKDALLEPGAGVLSIYYLGKKFLGDLQPDGRIMWQETGQTFNSPSAWATHCKKLVNPAKKSGCGWASVKYKGQKLDKYKATWLRLHQLHTPATAADESPASEGEEEELLMEEEEEDVLAGVSAEDKSRRPLGKSPSEPAHPEATTPGKRVDSKIRVPVRYCMLGSRDLARNPHTLVEVTSFAAINKFQPFNVAVSSNVLFLLDFHSHLTRSEVVGYLGGRWDVNSQMLTVLRAFPCRSRLGDAETAAAIEEEIYQSLFLRGLSLVGWYHSHPHSPALPSLQDIDAQMDYQLRLQGSSNGFQPCLALLCSPYYSGNPGPESKISPFWVMPPPEQRPSDYGIPMDVEMAYVQDSFLTNDILHEMMLLVEFYKGSPDLVRLQEPWSQEHTYLDKLKISLASRTPKDQSLCHVLEQVCGVLKQGS

SEQ ID NO: 867618 - protein, 471 aa, Homo sapiens
MAAPEPLSPAGGAGEEAPEEDEDEAEAEDPERPNAGAGGGRSGGGGSSVSGGGGGGGAGAGGCGGPGGALTRRAVTLRVLLKDALLEPGAGVLSIYYLGKKFLGDLQPDGRIMWQETGQTFNSPSAWATHCKKLVNPAKKSGCGWASVKYKGQKLDKYKATWLRLHQLHTPATAADESPASEGEEEELLMEEEEEDVLAGVSAEDKSRRPLGKSPSEPAHPEATTPGKRVDSKIRVPVRYCMLGSRDLARNPHTLVEVTSFAAINKFQPFNVAVSSNVLFLLDFHSHLTRSEVVGYLGGRWDVNSQMLTVLRAFPCRSRLGDAETAAAIEEEIYQSLFLRGLSLVGWYHSHPHSPALPSLQDIDAQMDYQLRLQGSSNGFQPCLALLCSPYYSGNPGPESKISPFWVMPPPEMLLVEFYKGSPDLVRLQEPWSQEHTYLDKLKISLASRTPKDQSLCHVLEQVCGVLKQGS

SEQ ID NO: 867619 - protein, 373 aa, Homo sapiens
MAAPEPLSPAGGAGEEAPEEDEDEAEAEDPERPNAGAGGGRSGGGGSSVSGGGGGGGAGAGGCGGPGGALTRRAVTLRVLLKDALLEPGAGVLSIYYLGKKFLGDLQPDGRIMWQETGQTFNSPSAWATHCKKLVNPAKKSGCGWASVKYKGQKLDKYKATWLRLHQLHTPATAADESPASEGEEEELLMEEEEEDVLAGVSAEDKSRRPLGKSPSEPAHPEATTPGKRVDSKIRVPVRYCMLGSRDLARNPHTLVEVTSFAAINKFQPFNVAVSSNVLFLLDFHSHLTRSEVVGYLGGRWDVNSQMLTVLRAFPCRSRLGDAETAAAIEEEVRGYLGGGILGRVGKGHSCPGDCPVAGSVLHPSTMGSHGEG

SEQ ID NO: 867620 - protein, 766 aa, Homo sapiens
ESLEDCPLDEDEDAFQGLGEEDEEIDQFNDDTFGSGAVDDDWQEAHERLAELEEKLPVAVNEQTGNGERDEMDLLGDHEENLAERLSKMVIENELEDPAIMRAVQTRPVLQPQPGSLNSSIWDGSEVLRRIRGPLLAQEMPTVSVLEYALPQRPPQGPEDDRDLSERALPRRSTSPIIGSPPVRAVPIGTPPKQMAVPSFTQQILCPKPVHVRPPMPPRYPAPYGERMSPNQLCSVPNSSLLGHPFPPSVPPVLSPLQRAQLLGGAQLQPGRMSPSQFARVPGFVGSPLAAMNPKLLQGRVGQMLPPAPGFRAFFSAPPSATPPPQQHPPGPGPHLQNLRSQAPMFRPDTTHLHPQHRRLLHQRQQQNRSQHRNLNGAGDRGSHRSSHQDHLRKDPYANLMLQREKDWVSKIQMMQLQSTDPYLDDFYYQNYFEKLEKLSAAEEIQGDGPKKERTKLITPQVAKLEHAYKPVQFEGSLGKLTVSSVNNPRKMIDAVVTSRSEDDETKEKQVRDKRRKTLVIIEKTYSLLLDVEDYERRYLLSLEEERPALMDDRKHKICSMYDNLRGKLPGQERPSDDHFVQIMCIRKGKRMVARILPFLSTEQAADILMTTARNLPFLIKKDAQDEVLPCLLSPFSLLLYHLPSVSITSLLRQLMNLPQSAATPALSNPHLTAVLQNKFGLSLLLILLSRGEDLQSSDPATESTQNNQWTEVMFMATRELLRIPQAALAKPISIPTNLVSLFSRYVDRQKLNLLETKLQLVQGIR

SEQ ID NO: 867621 - protein, 297 aa, Homo sapiens
GRAQGGCDRPRLSRVTKAAGPRKMMMLCDISEEDDETKEKQVRDKRRKTLVIIEKTYSLLLDVEDYERRYLLSLEEERPALMDDRKHKICSMYDNLRGKLPGQERPSDDHFVQIMCIRKGKRMVARILPFLSTEQAADILMTTARNLPFLIKKDAQDEVLPCLLSPFSLLLYHLPSVSITSLLRQLMNLPQSAATPALSNPHLTAVLQNKFGLSLLLILLSRGEDLQSSDPATESTQNNQWTEVMFMATRELLRIPQAALAKPISIPTNLVSLFSRYVDRQKLNLLETKLQLVQGIR

SEQ ID NO: 867622 - protein, 766 aa, Homo sapiens; identical to SEQ ID NO: 867620

SEQ ID NO: 867623 - protein, 709 aa, Homo sapiens
ESLEDCPLDEDEDAFQGLGEEDEEIDQFNDDTFGSGAVDDDWQEAHERLAELEEKLPVAVNEQTGNGERDEMDLLGDHEENLAERLSKMVIENELEDPAIMRAVQTRPVLQPQPGSLNSSIWDGSEVLRRIRGPLLAQEMPTVSVLEYALPQRPPQGPEDDRDLSERALPRRSTSPIIGSPPVRAVPIGTPPKQMAVPSFTQQILCPKPVHVRPPMPPRYPAPYGERMSPNQLCSVPNSSLLGHPFPPSVPPVLSPLQRAQLLGGAQLQPGRMSPSQFARVPGFVGSPLAAMNPKLLQGRVGQMLPPAPGFRAFFSAPPSATPPPQQHPPGPGPHLQNLRSQAPMFRPDTTHLHPQHRRLLHQRQQQNRSQHRNLNGAGDRGSHRSSHQDHLRKDPYANLMLQREKDWVSKIQMMQLQSTDPYLDDFYYQNYFEKLEKLSAAEEIQGDGPKKERTKLITPQVAKLEHAYKPVQFEGSLGKLTVSSVNNPRKMIDAVVTSRSEDDETKEKQVRDKRRKTLVIIEKTYSLLLDVEDYERRYLLSLEEERPALMDDRKHKICSMYDNLRGKLPGQERPSDDHFVQIMCIRKGKRMVARILPFLSTEQAADILMTTARNLPFLIKKDAQDEVLPCLLSPFSLLLYHLPSVSITSLLRQLMNLPQSAATPALSNPHLTAVLQNKFGLSLLLILLSRGEDLQSSDPATESTQNNQ

SEQ ID NO: 867624 - protein, 518 aa, Homo sapiens
ESLEDCPLDEDEDAFQGLGEEDEEIDQFNDDTFGSGAVDDDWQEAHERLAELEEKLPVAVNEQTGNGERDEMDLLGDHEENLAERLSKMVIENELEDPAIMRAVQTRPVLQPQPGSLNSSIWDGSEVLRRIRGPLLAQEMPTVSVLEYALPQRPPQGPEDDRDLSERALPRRSTSPIIGSPPVRAVPIGTPPKQMAVPSFTQQILCPKPVHVRPPMPPRYPAPYGERMSPNQLCSVPNSSLLGHPFPPSVPPVLSPLQRAQLLGGAQLQPGRMSPSQFARVPGFVGSPLAAMNPKLLQGRVGQMLPPAPGFRAFFSAPPSATPPPQQHPPGPGPHLQNLRSQAPMFRPDTTHLHPQHRRLLHQRQQQNRSQHRNLNGAGDRGSHRSSHQDHLRKDPYANLMLQREKDWVSKIQMMQLQSTDPYLDDFYYQNYFEKLEKLSAAEEIQGDGPKKERTKLITPQVAKLEHAYKPVQFEGSLGKLTVSSVNNPRKMIDAVVTSRSEDDVSVNTIVCLRTSDL

SEQ ID NO: 867625 - protein, 766 aa, Homo sapiens; identical to SEQ ID NO: 867620

SEQ ID NO: 867626 - protein, 71 aa, Homo sapiens
DRFILPARLGSPACRLPIFCPQPASCSPPSSSDTIFDPLVLLPFPDATPPTPYISHQISPSQSDQKRKLLI

SEQ ID NO: 867627 - protein, 627 aa, Homo sapiens
ESLEDCPLDEDEDAFQGLGEEDEEIDQFNDDTFGSGAVDDDWQEAHERLAELEEKLPVAVNEQTGNGERDEMDLLGDHEENLAERLSKMVIENELEDPAIMRAVQTRPVLQPQPGSLNSSIWDGSEVLRRIRGPLLAQEMPTVSVLEYALPQRPPQGPEDDRDLSERALPRRSTSPIIGSPPVRAVPIGTPPKQMAVPSFTQQILCPKPVHVRPPMPPRYPAPYGERMSPNQLCSVPNSSLLGHPFPPSVPPVLSPLQRAQLLGGAQLQPGRMSPSQFARVPGFVGSPLAAMNPKLLQGRVGQMLPPAPGFRAFFSAPPSATPPPQQHPPGPGPHLQNLRSQAPMFRPDTTHLHPQHRRLLHQRQQQNRSQHRNLNGAGDRGSHRSSHQDHLRKDPYANLMLQREKDWVSKIQMMQLQSTDPYLDDFYYQNYFEKLEKLSAAEEIQGDGPKKERTKLITPQVAKLEHAYKPVQFEGSLGKLTVSSVNNPRKMIDAVVTSRSEDDETKEKQVRDKRRKTLVIIEKTYSLLLDVEDYERRYLLSLEEERPALMDDRKHKICSMYDNLRGKLPGQERPSDDHFVQIMCIRKGKRMVARILPFLSTEQAADILMTTARNLPFLIKKDAQDE

SEQ ID NO: 867628 - protein, 1581 aa, Homo sapiens
MKAQGETEESEKLSKMSSLLERLHAKFNQNRPWSETIKLVRQVMEKRVVMSSGGHQHLVSCLETLQKALKVTSLPAMTDRLESIARQNGLGSHLSASGTECYITSDMFYVEVQLDPAGQLCDVKVAHHGENPVSCPELVQQLREKNFDEFSKHLKGLVNLYNLPGDNKLKTKMYLALQSLEQDLSKMAIMYWKATNAGPLDKILHGSVGYLTPRSGGHLMNLKYYVSPSDLLDDKTASPIILHENNVSRSLGMNASVTIEGTSAVYKLPIAPLIMGSHPVDNKWTPSFSSITSANSVDLPACFFLKFPQPIPVSRAFVQKLQNCTGIPLFETQPTYAPLYELITQFELSKDPDPIPLNHNMRFYAALPGQQHCYFLNKDAPLPDGRSLQGTLVSKITFQHPGRVPLILNLIRHQVAYNTLIGSCVKRTILKEDSPGLLQFEVCPLSESRFSVSFQHPVNDSLVCVVMDVQDSTHVSCKLYKGLSDALICTDDFIAKVVQRCMSIPVTMRAIRRKAETIQADTPALSLIAETVEDMVKKNLPPASSPGYGMTTGNNPMSGTTTSTNTFPGGPIATLFNMSMSIKDRHESVGHGEDFSKVSQNPILTSLLQITGNGGSTIGSSPTPPHHTPPPVSSMAGNTKNHPMLMNLLKDNPAQDFSTLYGSSPLERQNSSSGSPRMEICSGSNKTKKKKSSRLPPEKPKHQTEDDFQRELFSMDVDSQNPIFDVNMTADTLDTPHITPAPSQCSTPPTTYPQPVPHPQPSIQRMVRLSSSDSIGPDVTDILSDIAEEASKLPSTSDDCPAIGTPLRDSSSSGHSQSTLFDSDVFQTNNNENPYTDPADLIADAAGSPSSDSPTNHFFHDGVDFNPDLLNSQSQSGFGEEYFDESSQSGDNDDFKGFASQALNTLGVPMLGGDNGETKFKGNNQADTVDFSIISVAGKALAPADLMEHHSGSQGPLLTTGDLGKEKTQKRVKEGNGTSNSTLSGPGLDSKPGKRSRTPSNDGKSKDKPPKRKKADTEGKSPSHSSSNRPFTPPTSTGGSKSPGSAGRSQTPPGVATPPIPKITIQIPKGTVMVGKPSSHSQYTSSGSVSSSGSKSHHSHSSSSSSSASTSGKMKSSKSEGSSSSKLSSSMYSSQGSSGSSQSKNSSQSGGKPGSSPITKHGLSSGSSSTKMKPQGKPSSLMNPSLSKPNISPSHSRPPGGSDKLASPMKPVPGTPPSSKAKSPISSGSGGSHMSGTSSSSGMKSSSGLGSSGSLSQKTPPSSNSCTASSSSFSSSGSSMSSSQNQHGSSKGKSPSRNKKPSLTAVIDKLKHGVVTSGPGGEDPLDGQMGVSTNSSSHPMSSKHNMSGGEFQGKREKSDKDKSKVSTSGSSVDSSKKTSESKNVGSTGVAKIIISKHDGGSPSIKAKVTLQKPGESSGEGLRPQMASSKNYGSPLISGSTPKHERGSPSHSKSPAYTPQNLDSESESGSSIAEKSYQNSPSSDDGIRPLPEYSTEKHKKHKKEKKKVKDKDRDRDRDKDRDKKKSHSIKPESWSKSPISSDQSLSMTSNTILSADRPSRLSPDFMIGEEDDDLMDVALIGN

SEQ ID NO: 867629 - protein, 1478 aa, Homo sapiens
MKAQGETEESEKLSKMSSLLERLHAKFNQNRPWSETIKLVEKNFDEFSKHLKGLVNLYNLPGDNKLKTKMYLALQSLEQDLSKMAIMYWKATNAGPLDKILHGSVGYLTPRSGGHLMNLKYYVSPSDLLDDKTASPIILHENNVSRSLGMNASVTIEGTSAVYKLPIAPLIMGSHPVDNKWTPSFSSITSANSVDLPACFFLKFPQPIPVSRAFVQKLQNCTGIPLFETQPTYAPLYELITQFELSKDPDPIPLNHNMRFYAALPGQQHCYFLNKDAPLPDGRSLQGTLVSKITFQHPGRVPLILNLIRHQVAYNTLIGSCVKRTILKEDSPGLLQFEVCPLSESRFSVSFQHPVNDSLVCVVMDVQDSTHVSCKLYKGLSDALICTDDFIAKVVQRCMSIPVTMRAIRRKAETIQADTPALSLIAETVEDMVKKNLPPASSPGYGMTTGNNPMSGTTTSTNTFPGGPIATLFNMSMSIKDRHESVGHGEDFSKVSQNPILTSLLQITGNGGSTIGSSPTPPHHTPPPVSSMAGNTKNHPMLMNLLKDNPAQDFSTLYGSSPLERQNSSSGSPRMEICSGSNKTKKKKSSRLPPEKPKHQTEDDFQRELFSMDVDSQNPIFDVNMTADTLDTPHITPAPSQCSTPPTTYPQPVPHPQPSIQRMVRLSSSDSIGPDVTDILSDIAEEASKLPSTSDDCPAIGTPLRDSSSSGHSQSTLFDSDVFQTNNNENPYTDPADLIADAAGSPSSDSPTNHFFHDGVDFNPDLLNSQSQSGFGEEYFDESSQSGDNDDFKGFASQALNTLGVPMLGGDNGETKFKGNNQADTVDFSIISVAGKALAPADLMEHHSGSQGPLLTTGDLGKEKTQKRVKEGNGTSNSTLSGPGLDSKPGKRSRTPSNDGKSKDKPPKRKKADTEGKSPSHSSSNRPFTPPTSTGGSKSPGSAGRSQTPPGVATPPIPKITIQIPKGTVMVGKPSSHSQYTSSGSVSSSGSKSHHSHSSSSSSSASTSGKMKSSKSEGSSSSKLSSSMYSSQGSSGSSQSKNSSQSGGKPGSSPITKHGLSSGSSSTKMKPQGKPSSLMNPSLSKPNISPSHSRPPGGSDKLASPMKPVPGTPPSSKAKSPISSGSGGSHMSGTSSSSGMKSSSGLGSSGSLSQKTPPSSNSCTASSSSFSSSGSSMSSSQNQHGSSKGKSPSRNKKPSLTAVIDKLKHGVVTSGPGGEDPLDGQMGVSTNSSSHPMSSKHNMSGGEFQGKREKSDKDKSKVSTSGSSVDSSKKTSESKNVGSTGVAKIIISKHDGGSPSIKAKVTLQKPGESSGEGLRPQMASSKNYGSPLISGSTPKHERGSPSHSKSPAYTPQNLDSESESGSSIAEKSYQNSPSSDDGIRPLPEYSTEKHKKHKKEKKKVKDKDRDRDRDKDRDKKKSHSIKPESWSKSPISSDQSLSMTSNTILSADRPSRLSPDFMIGEEDDDLMDVALIGN

SEQ ID NO: 867630 - protein, 559 aa, Homo sapiens
MKAQGETEESEKLSKMSSLLERLHAKFNQNRPWSETIKLVRQVMEKRVVMSSGGHQHLVSCLETLQKALKVTSLPAMTDRLESIARQNGLGSHLSASGTECYITSDMFYVEVQLDPAGQLCDVKVAHHGENPVSCPELVQQLREKNFDEFSKHLKGLVNLYNLPGDNKLKTKMYLALQSLEQDLSKMAIMYWKATNAGPLDKILHGSVGYLTPRSGGHLMNLKYYVSPSDLLDDKTASPIILHENNVSRSLGMNASVTIEGTSAVYKLPIAPLIMGSHPVDNKWTPSFSSITSANSVDLPACFFLKFPQPIPVSRAFVQKLQNCTGIPLFETQPTYAPLYELITQFELSKDPDPIPLNHNMRFYAALPGQQHCYFLNKDAPLPDGRSLQGTLVSKITFQHPGRVPLILNLIRHQVAYNTLIGSCVKRTILKEDSPGLLQFEVCPLSESRFSVSFQHPVNDSLVCVVMDVQDSTHVSCKLYKGLSDALICTDDFIAKVVQRCMSIPVTMRAIRRKAETIQADTPALSLIAETVEDMVKKNLPPASSPGYAIPQGAGTELD

SEQ ID NO: 867631 - protein, 72 aa, Homo sapiens
PRVADAWVAHASATRPRVLSKILRPYFDIDTCTVPFLIIPFRICISGMGHGPQHNSSGLKKKSQVIPLCVMS

SEQ ID NO: 867632 - protein, 1563 aa, Homo sapiens
MKAQGETEESEKLSKMSSLLERLHAKFNQNRPWSETIKLVRQVMEKRVVMSSGGHQHLVSCLETLQKALKVTSLPAMTDRLESIARQNGLGSHLSASGTECYITSDMFYVEVQLDPAGQLCDVKVAHHGENPVSCPELVQQLREKNFDEFSKHLKGLVNLYNLPGDNKLKTKMYLALQSLEQDLSKMAIMYWKATNAGPLDKILHGSVGYLTPRSGGHLMNLKYYVSPSDLLDDKTASPIILHENNVSRSLGMNASVTIEGTSAVYKLPIAPLIMGSHPVDNKWTPSFSSITSANSVDLPACFFLKFPQPIPVSRAFVQKLQNCTGIPLFETQPTYAPLYELITQFELSKDPDPIPLNHNMRFYAALPGQQHCYFLNKDAPLPDGRSLQGTLVSKITFQHPGRVPLILNLIRHQVAYNTLIGSCVKRTILKEDSPGLLQFEVCPLSESRFSVSFQHPVNDSLVCVVMDVQDSTHVSCKLYKGLSDALICTDDFIAKVVQRCMSIPVTMRAIRRKAETIQADTPALSLIAETVEDMVKKNLPPASSPGYGMTTGNNPMSGTTTSTNTFPGGPIATLFNMSMSIKDRHESVGHGEDFSKVSQNPILTSLLQITGNGGSTIGSSPTPPHHTPPPVSSMAGNTKNHPMLMNLLKDNPAQDFSTLYGSSPLERQNSSSGSPRMEICSGSNKTKKKKSSRLPPEKPKHQTEDDFQRELFSMDVDSQNPIFDVNMTADTLDTPHITPAPSQCSTPPTTYPQPVPHPQPSIQRMVRLSSSDSIGPDVTDILSDIAEEASKLPSTSDDCPAIGTPLRDSSSSGHSQSTLFDSDVFQTNNNENPYTDPADLIADAAGSPSSDSPTNHFFHDGVDFNPDLLNSQSQSGFGEEYFDESSQSGDNDDFKGFASQALNTLGVPMLGGDNGETKFKGNNQADTVDFSIISVAGKALAPADLMEHHSGSQGPLLTTGDLGKEKTQKRVKEGNGTSNSTLSGPGLDSKPGKRSRTPSNDGKSKDKPPKRKKADTEGKSPSHSSSNRPFTPPTSTGGSKSPGSAGRSQTPPGVATPPIPKITIQIPKGTVMVGKPSSHSQYTSSGSVSSSGSKSHHSHSSSSSSSASTSGKMKSSKSEGSSSSKLSSSMYSSQGSSGSSQSKNSSQSGGKPGSSPITKHGLSSGSSSTKMKPQGKPSSLMNPSLSKPNISPSHSRPPGGSDKLASPMKPVPGTPPSSKAKSPISSGSGGSHMSGTSSSSGMKSSSGLGSSGSLSQKTPPSSNSCTASSSSFSSSGSSMSSSQNQHGSSKGKSPSRNKKPSLTAVIDKLKHGVVTSGPGGEDPLDGQMGVSTNSSSHPMSSKHNMSGGEFQGKREKSDKDKSKVSTSGSSVDSSKKTSESKNVGSTGVAKIIISKHDGGSPSIKAKVTLQKPGESSGEGLRPQMASSKNYGSPLISGSTPKHERGSPSHSKSPAYTPQNLDSESESGSSIAEKSYQNSPSSDDGIRPLPEYSTEKHKKHKKEKKKVKDKDRDRDRDKDRDKNQSLSMTSNTILSADRPSRLSPDFMIGEEDDDLMDVALIGN

SEQ ID NO: 867633 - protein, 1181 aa, Homo sapiens
DRSSRYHLNLIRHQVAYNTLIGSCVKRTILKEDSPGLLQFEVCPLSESRFSVSFQHPVNDSLVCVVMDVQDSTHVSCKLYKGLSDALICTDDFIAKVVQRCMSIPVTMRAIRRKAETIQADTPALSLIAETVEDMVKKNLPPASSPGYGMTTGNNPMSGTTTSTNTFPGGPIATLFNMSMSIKDRHESVGHGEDFSKVSQNPILTSLLQITGNGGSTIGSSPTPPHHTPPPVSSMAGNTKNHPMLMNLLKDNPAQDFSTLYGSSPLERQNSSSGSPRMEICSGSNKTKKKKSSRLPPEKPKHQTEDDFQRELFSMDVDSQNPIFDVNMTADTLDTPHITPAPSQCSTPPTTYPQPVPHPQPSIQRMVRLSSSDSIGPDVTDILSDIAEEASKLPSTSDDCPAIGTPLRDSSSSGHSQSTLFDSDVFQTNNNENPYTDPADLIADAAGSPSSDSPTNHFFHDGVDFNPDLLNSQSQSGFGEEYFDESSQSGDNDDFKGFASQALNTLGVPMLGGDNGETKFKGNNQADTVDFSIISVAGKALAPADLMEHHSGSQGPLLTTGDLGKEKTQKRVKEGNGTSNSTLSGPGLDSKPGKRSRTPSNDGKSKDKPPKRKKADTEGKSPSHSSSNRPFTPPTSTGGSKSPGSAGRSQTPPGVATPPIPKITIQIPKGTVMVGKPSSHSQYTSSGSVSSSGSKSHHSHSSSSSSSASTSGKMKSSKSEGSSSSKLSSSMYSSQGSSGSSQSKNSSQSGGKPGSSPITKHGLSSGSSSTKMKPQGKPSSLMNPSLSKPNISPSHSRPPGGSDKLASPMKPVPGTPPSSKAKSPISSGSGGSHMSGTSSSSGMKSSSGLGSSGSLSQKTPPSSNSCTASSSSFSSSGSSMSSSQNQHGSSKGKSPSRNKKPSLTAVIDKLKHGVVTSGPGGEDPLDGQMGVSTNSSSHPMSSKHNMSGGEFQGKREKSDKDKSKVSTSGSSVDSSKKTSESKNVGSTGVAKIIISKHDGGSPSIKAKVTLQKPGESSGEGLRPQMASSKNYGSPLISGSTPKHERGSPSHSKSPAYTPQNLDSESESGSSIAEKSYQNSPSSDDGIRPLPEYSTEKHKKHKKEKKKVKDKDRDRDRDKDRDKKKSHSIKPESWSKSPISSDQSLSMTSNTILSADRPSRLSPDFMIGEEDDDLMDVALIGN

SEQ ID NO: 867634 - protein, 110 aa, Homo sapiens
VAVPACLKQNKQEELSWPDSPQDIGEAAGIVFLGRFCFLGQNGSLITSVGLHAAPDTRTHAHTRVHMGHSHKPALLQGPFNLAVQGPCPSCPWGFHLAENVQGLLNLKAH

SEQ ID NO: 867635 - protein, 103 aa, Homo sapiens [sequence omitted]

SEQ ID NO: 867636 - protein, 119 aa, Homo sapiens
MKEEEGFPEDEATESEKNFKFVSLIAFTTMALLTIMEFSVYQDTWMKYEYEVDKDFSSKLRINIDITVAMKCQYVGADVLDLAETMVASADGLVYEPTVFDLSPQQEWQKMLELIQSRL

SEQ ID NO: 867637 - protein, 377 aa, Homo sapiens
MRRLNRKKTLSLVKELDAFPKVPESYVETSASGGTVSLIAFTTMALLTIMEFSVYQDTWMKYEYEVDKDFSSKLRINIDITVAMKCQYVGADVLDLAETMVASADGLVYEPTVFDLSPQQKEWQRMLQLIQSRLQEEHSLQDVIFKSAFKSTSTALPPREDDSSQSPNACRIHGHLYVNKVAGNFHITVGKAIPHPRGHAHLAALVNHESYNFSHRIDHLSFGELVPAIINPLDGTEKIAIDHNQMFQYFITVVPTKLHTYKISADTHQFSVTERERIINHAAGSHGVSGIFMKYDLSSLMVTVTEEHMPFWQFFVRLCGIVGGIFSTTGMLHGIGKFIVEIICCRFRLGSYKPVNSVPFEDGHTDNHLPLLENNTH

SEQ ID NO: 867638 - protein, 352 aa, Homo sapiens
MRRLNRKKTLSLVKELDAFPKVPESYVETSASGGTVSLIAFTTMALLTIMEFSVYQDTWMKYEYEVDKDFSSKLRINIDITVAMKCQYVGADVLDLAETMVASADGLVYEPTVFDLSPQQKEWQRMLQLIQSRLQEEHSLQDVIFKSAFKSTSTALPPREDDSSQSPNACRIHGHLYVNKVAGNFHITVGKIDHLSFGELVPAIINPLDGTEKIAIDHNQMFQYFITVVPTKLHTYKISADTHQFSVTERERIINHAAGSHGVSGIFMKYDLSSLMVTVTEEHMPFWQFFVRLCGIVGGIFSTTGMLHGIGKFIVEIICCRFRLGSYKPVNSVPFEDGHTDNHLPLLENNTH

SEQ ID NO: 867639 - protein, 342 aa, Homo sapiens
MRRLNRKKTLSLVKELDAFPKVPESYVETSASGGTVSLIAFTTMALLTIMEFSVYQDTWMKYEYEVDKDFSSKLRINIDITVAMKCQYVGADVLDLAETMVASADGLVYEPTVFDLSPQQKEWQRMLQLIQSRLQEEHSLQDVIFKSAFKSTSTALPPREDDSSQSPNACRIHGHLYVNKVAGNFHITVGKAIPHPRGHAHLAALVNHESYNFSHRIDHLSFGELVPAIINPLDGTEKIAIDHNQMFQYFITVVPTKLHTYKISADTHQFSVTERERIINHAAGSHGVSGIFMKYDLSSLMVTVTEEHMPFWQFFVRLCGIVGGIFSTTGMSPWNWSHYSCK

SEQ ID NO: 867640 - protein, 377 aa, Homo sapiens; identical to SEQ ID NO: 867637

SEQ ID NO: 867641 - protein, 377 aa, Homo sapiens; identical to SEQ ID NO: 867637

SEQ ID NO: 867642 - protein, 294 aa, Homo sapiens
MKCHYVGADVLDLAETMVASADGLVYEPTVFDLSPQQKEWQRMLQLIQSRLQEEHSLQDVIFKSAFKSTSTALPPREDDSSQSPNACRIHGHLYVNKVAGNFHITVGKAIPHPRGHAHLAALVNHESYNFSHRIDHLSFGELVPAIINPLDGTEKIAIDHNQMFQYFITVVPTKLHTYKISADTHQFSVTERERIINHAAGSHGVSGIFMKYDLSSLMVTVTEEHMPFWQFFVRLCGIVGGIFSTTGMLHGIGKFIVEIICCRFRLGSYKPVNSVPFEDGHTDNHLPLLENNTH

SEQ ID NO: 867643 - protein, 345 aa, Homo sapiens
MRRLNRKKTLSLVKELDAFPKVPESYVETSASGGTVSLIAFTTMALLTIMEFSVYQDTWMKYEYEVDKDFSSKLRINIDITVAMKCQYVGADVLDLAETMVASADGLVYEPTVFDLSPQQKEWQRMLQLIQSRLQEEHSLQDVIFKSAFKSTSTALPPRAIPHPRGHAHLAALVNHESYNFSHRIDHLSFGELVPAIINPLDGTEKIAIDHNQMFQYFITVVPTKLHTYKISADTHQFSVTERERIINHAAGSHGVSGIFMKYDLSSLMVTVTEEHMPFWQFFVRLCGIVGGIFSTTGMLHGIGKFIVEIICCRFRLGSYKPVNSVPFEDGHTDNHLPLLENNTH

SEQ ID NO: 867644 - protein, 115 aa, Homo sapiens
EPAEFETMLLFCPGCGNGLIVEEGQRCHRFSCNTCPYVHNITRKVTNRKYPKLKEVDDVLGGAAAWENVDSTAESCPKCEHPRAYFMQLQTRSADEPMTTFYKCCNAQCGHRWRD

SEQ ID NO: 867645 - protein, 82 aa, Homo sapiens
EPAEFETMLLFCPGCGNGLIVEEGQRCHRFSCNTCPYVHNITRKVTNRKYPKLKEVDDVLGGAAAWENVDSTAGKRENCFCC

SEQ ID NO: 867646 - protein, 637 aa, Homo sapiens
MNVRDAKEKCPQLVLVNGEDLTRYREMSYKVTELLEEFSPVVERLGFDENFVDLTEMVEKRLQQLQSDELSAVTVSGHVYNNQSINLLDVLHIRLLVGSQIAAEMREAMYNQLGLTGCAGVASNKLLAKLVSGVFKPNQQTVLLPESCQHLIHSLNHIKEIPGIGYKTAKCLEALGINSVRDLQTFSPKILEKELGISVAQRIQKLSFGEDNSPVILSGPPQSFSEEDSFKKCSSEVEAKNKIEELLASLLNRVCQDGRKPHTVRLIIRRYSSEKHYGRESRQCPIPSHVIQKLGTGNYDVMTPMVDILMKLFRNMVNVKMPFHLTLLSVCFCNLKALNTAKKGLIDYYLMPSLSTTSRSGKHSFKMKDTHMEDFPKDKETNRDFLPSGRIESTRTRESPLDTTNFSKEKDINEFPLCSLPEGVDQEVFKQLPVDIQEEILSGKSREKFQGKGSVSCPLHASRGVLSFFSKKQMQDIPINPRDHLSSSKQVSSVSPCEPGTSGFNSSSSSYMSSQKDYSYYLDNRLKDERISQGPKEPQGFHFTNSNPAVSAFHSFPNLQSEQLFSRNHTTDSHKQTVATDSHEGLTENREPDSVDEKITFPSDIDPQVFYELPEAVQKELLAEWKRTGSDFHIGHK

SEQ ID NO: 867647 - protein, 336 aa, Homo sapiens
MTPMVDILMKLFRNMVNVKMPFHLTLLSVCFCNLKALNTAKKGLIDYYLMPSLSTTSRSGKHSFKMKDTHMEDFPKDKETNRDFLPSGRIESTRTRESPLDTTNFSKEKDINEFPLCSLPEGVDQEVFKQLPVDIQEEILSGKSREKFQGKGSVSCPLHASRGVLSFFSKKQMQDIPINPRDHLSSSKQVSSVSPCEPGTSGFNSSSSSYMSSQKDYSYYLDNRLKDERISQGPKEPQGFHFTNSNPAVSAFHSFPNLQSEQLFSRNHTTDSHKQTVATDSHEGLTENREPDSVDEKITFPSDIDPQVFYELPEAVQKELLAEWKRTGSDFHIGHK

SEQ ID NO: 867648 - protein, 748 aa, Homo sapiens
SSAAVGSGGMEKLGVEPEEEGGGDDEEDAEAWAMELADVGAAASSQGVHDQVLPTPNASSRVIVHVDLDCFYAQVEMISNPELKDKPLGVQQKYLVVTCNYEARKLGVKKLMNVRDAKEKCPQLVLVNGEDLTRYREMSYKVTELLEEFSPVVERLGFDENFVDLTEMVEKRLQQLQSDELSAVTVSGHVYNNQSINLLDVLHIRLLVGSQIAAEMREAMYNQLGLTGCAGVASNKLLAKLVSGVFKPNQQTVLLPESCQHLIHSLNHIKEIPGIGYKTAKCLEALGINSVRDLQTFSPKILEKELGISVAQRIQKLSFGEDNSPVILSGPPQSFSEEDSFKKCSSEVEAKNKIEELLASLLNRVCQDGRKPHTVRLIIRRYSSEKHYGRESRQCPIPSHVIQKLGTGNYDVMTPMVDILMKLFRNMVNVKMPFHLTLLSVCFCNLKALNTAKKGLIDYYLMPSLSTTSRSGKHSFKMKDTHMEDFPKDKETNRDFLPSGRIESTRTRESPLDTTNFSKEKDINEFPLCSLPEGVDQEVFKQLPVDIQEEILSGKSREKFQGKGSVSCPLHASRGVLSFFSKKQMQDIPINPRDHLSSSKQVSSVSPCEPGTSGFNSSSSSYMSSQKDYSYYLDNRLKDERISQGPKEPQGFHFTNSNPAVSAFHSFPNLQSEQLFSRNHTTDSHKQTVATDSHEGLTENREPDSVDEKITFPSDIDPQVFYELPEAVQKELLAEWKRTGSDFHIGHK

SEQ ID NO: 867649 - protein, 247 aa, Homo sapiens
SSAAVGSGGMEKLGVEPEEEGGGDDEEDAEAWAMELADVGAAASSQGVHDQVLPTPNASSRVIVHVDLDCFYAQVEMISNPELKDKPLGVQQKYLVVTCNYEARKLGVKKLMNVRDAKEKCPQLVLVNGEDLTRYREMSYKVTELLEEFSPVVERLGFDENFVDLTEMVEKRLQQLQSDELSAVTVSGHVYNNQSINLLDVLHIRLLVGSQIAAEMREAMIMWKRFEMMTDKVIRFHCKLCRVAVDD

SEQ ID NO: 867650 - protein, 705 aa, Homo sapiens
MEKPRSIEETPSSEPMEEEEDDDLELFGGYDSFRSYNSSVGSESSSYLEESSEAENEDREAGELPTSPLHLLSPGTPRSLDGSGSEPAVCEMCGIVGTREAFFSKTKRFCSVSCSRSYSSNSKKASILARLQGKPPTKKAKVLHKAAWSAKIGAFLHSQGTGQLADGTPTGQDALVLGFDWGKFLKDHSYKAAPVSCFKHVPLYDQWEDVMKGMKVEVLNSDAVLPSRVYWIASVIQTAGYRVLLRYEGFENDASHDFWCNLGTVDVHPIGWCAINSKILVPPRTIHAKFTDWKGYLMKRLVGSRTLPVDFHIKMVESMKYPFRQGMRLEVVDKSQVSRTRMAVVDTVIGGRLRLLYEDGDSDDDFWCHMWSPLIHPVGWSRRVGHGIKMSERRSDMAHHPTFRKIYCDAVPYLFKKVRAVYTEGGWFEEGMKLEAIDPLNLGNICVATVCKVLLDGYLMICVDGGPSTDGLDWFCYHASSHAIFPATFCQKNDIELTPPKGYEAQTFNWENYLEKTKSKAAPSRLFNMDCPNHGFKVGMKLEAVDLMEPRLICVATVKRVVHRLLSIHFDGWDSEYDQWVDCESPDIYPVGWCELTGYQLQPPVAAEPATPLKAKEATKKKKKQFGKKRKRIPPTKTRPLRQGSKKPLLEDDPQGARKISSEPVPGEIIAVRVKEEHLDVASPDKASSPELPVSVENIKQETDD

SEQ ID NO: 867651 - protein, 614 aa, Homo sapiens
MEKPRSIEETPSSEPMEEEEDDDLELFGGYDSFRSYNSSVGSESSSYLEESSEAENEDREAGELPTSPLHLLSPGTPRSLDGSGSEPAVCEMCGIVGTREAFFSKTKRFCSVSCSRSYSSNSKKASILARLQGKPPTKKAKVLHKAAWSAKIGAFLHSQGTGQLADGTPTGQDALVLGFDWGKFLKDHSYKAAPVSCFKHVPLYDQWEDVMKGMKVEVLNSDAVLPSRVYWIASVIQTAGYRVLLRYEGFENDASHDFWCNLGTVDVHPIGWCAINSKILVPPRTIHAKFTDWKGYLMKRLVGSRTLPVDFHIKMVESMKYPFRQGMRLEVVDKSQVSRTRMAVVDTVIGGRLRLLYEDGDSDDDFWCHMWSPLIHPVGWSRRVGHGIKMSERRSDMAHHPTFRKIYCDAVPYLFKKVRAVYTEGGWFEEGMKLEAIDPLNLGNICVATVCKVLLDGYLMICVDGGPSTDGLDWFCYHASSHAIFPATFCQKNDIELTPPKGYEAQTFNWENYLEKTKSKAAPSRLFNMDCPNHGFKVGMKLEAVDLMEPRLICVATVKRVVHRLLSIHFDGWDSEYDQWVDCESPDIYPVGWCELTGYQLQPPVAAGKLPRSL

SEQ ID NO: 867652 - protein, 666 aa, Homo sapiens
MEKPRSIEETPSSEPMEEEEDDDLELFGGYDSFRSYNSSVGSESSSYLEESSEAENEDREAGELPTSPLHLLSPGTPRSLDGSGSEPAVCEMCGIVGTREAFFSKTKRFCSVSCSRSYSSNSKKASILARLQGKPPTKKAKVLHKAAWSAKIGAFLHSQGTGQLADGTPTGQDALVLGFDWGKFLKDHSYKAAPVSCFKHVPLYDQWEDVMKGMKVEVLNSDAVLPSRVYWIASVIQTAGYRVLLRYEGFENDASHDFWCNLGTVDVHPIGWCAINSKILVPPRTIHAKFTDWKGYLMKRLVGSRTLPVDFHIKMVESMKYPFRQGMRLEVVDKSQVSRTRMAVVDTVIGGRLRLLYEDGDSDDDFWCHMWSPLIHPVGWSRRVGHGIKMSERRSDMAHHPTFRKIYCDAVPYLFKKVRAVYTEGGWFEEGMKLEAIDPLNLGNICVATVCKVLLDGYLMICVDGGPSTDGLDWFCYHASSHAIFPATFCQKNDIELTPPKGYEAQTFNWENYLEKTKSKAAPSRLFNMDCPNHGFKVGMKLEAVDLMEPRLICVATVKRVVHRLLSIHFDGWDSEYDQWVDCESPDIYPVGWCELTGYQLQPPVAAEPATPLKAKEATKKKKKQFGKKIIAVRVKEEHLDVASPDKASSPELPVSVENIKQETDD

SEQ ID NO: 867653 - protein, 703 aa, Homo sapiens [sequence omitted]

SEQ ID NO: 867654 - protein, 666 aa, Homo sapiens
MEKPRSIEETPSSEPMEEEEDDDLELFGGYDSFRSYNSSVGSESSSYLEESSEAENEDREAGELPTSPLHLLSPGTPRSLDGSGSEPAVCEMCGIVGTREAFFSKTKRFCSVSCSRSYSSNSKKASILARLQGKPPTKKAKVLHKAAWSAKIGAFLHSQGTGQLADGTPTGQDALVLGFDWGKFLKDHSYKAAPVSCFKHGIGCCFGMKALKMTPAMTSGATWEQWMSTPLAGVAINSKILVPPRTIHAKFTDWKGYLMKRLVGSRTLPVDFHIKMVESMKYPFRQGMRLEVVDKSQVSRTRMAVVDTVIGGRLRLLYEDGDSDDDFWCHMWSPLIHPVGWSRRVGHGIKMSERRSDMAHHPTFRKIYCDAVPYLFKKVRAVYTEGGWFEEGMKLEAIDPLNLGNICVATVCKVLLDGYLMICVDGGPSTDGLDWFCYHASSHAIFPATFCQKNDIELTPPKGYEAQTFNWENYLEKTKSKAAPSRLFNMDCPNHGFKVGMKLEAVDLMEPRLICVATVKRVVHRLLSIHFDGWDSEYDQWVDCESPDIYPVGWCELTGYQLQPPVAAEPATPLKAKEATKKKKKQFGKKRKRIPPTKTRPLRQGSKKPLLEDDPQGARKISSEPVPGEIIAVRVKEEHLDVASPDKASSPELPVSVENIKQETDD

SEQ ID NO: 867655 - protein, 705 aa, Homo sapiens; identical to SEQ ID NO: 867650

SEQ ID NO: 867656 - protein, 705 aa, Homo sapiens; identical to SEQ ID NO: 867650

SEQ ID NO: 867657 - protein, 124 aa, Homo sapiens
GNKVLLCCPGWSQILALKQSSLLGLPNCRDYRQELPCLVSSHFPLTNFSTLTCSPSRPHGFPLAPLLTSVAKGGQAAALHSGRFRIYTPVPPIPPLIPLAFVGAGAHLVNAVPQVLKGPSLCLL

SEQ ID NO: 867658 - protein, 617 aa, Homo sapiens
MEKPRSIEETPSSEPMEEEEDDDLELFGGYDSFRSYNSSVGSESSSYLEESSEAENEDREAGELPTSPLHLLSPGTPRSLDGSGSEPAVCEMCGIVGTREAFFSKTKRFCSVSCSRSYSSNSKKASILARLQGKPPTKKAKVLHKAAWSAKIGAFLHSQGTGQLADGTPTGQDALVLGFDWGKFLKDHSYKAAPVSCFKHVPLYDQWEDVMKGMKVEVLNSDAVLPSRVYWIASVIQTAGYRVLLRYEGFENDASHDFWCNLGTVDVHPIGWCAINSKILVPPRTIHAKFTDWKGYLMKRLVGSRTLPVDFHIKMVESMKYPFRQGMRLEVVDKSQVSRTRMAVVDTVIGGRLRLLYEDGDSDDDFWCHMWSPLIHPVGWSRRVGHGIKMSERRSDMAHHPTFRKIYCDAVPYLFKKVRAVYTEGGWFEEGMKLEAIDPLNLGNICVATVCKVLLDGYLMICVDGGPSTDGLDWFCYHASSHAIFPATFCQKNDIELTPPKGYEAQTFNWENYLEKTKSKAAPSRLFNMDCPNHGFKVGMKLEAVDLMEPRLICVATVKRVVHRLLSIHFDGWDSEYDQWVDCESPDIYPVGWCELTGYQLQPPVAAGVGSRGPKRL

SEQ ID NO: 867659 - protein, 637 aa, Homo sapiens
MEKPRSIEETPSSEPMEEEEDDDLELFGGYDSFRSYNSSVGSESSSYLEESSEAENEDREAGELPTSPLHLLSPGTPRSLDGSGSEPAVCEMCGIVGTREAFFSKTKRFCSVSCSRSYSSNSKKASILARLQGKPPTKKAKVLHKAAWSAKIGAFLHSQGTGQLADGTPTGQDALVLGFDWGKFLKDHSYKAAPVSCFKHVPLYDQWEDVMKGMKVEVLNSDAVLPSRVYWIASVIQTAGYRVLLRYEGFENDASHDFWCNLGTVDVHPIGWCAINSKILVPPRTIHAKFTDWKGYLMKRLVGSRTLPVDFHIKMVESMKYPFRQGMRLEVVDKSQVSRTRMAVVDTVIGGRLRLLYEDGDSDDDFWCHMWSPLIHPVGWSRRVGHGIKMSERRSDMAHHPTFRKIYCDAVPYLFKKVRAVYTEGGWFEEGMKLEAIDPLNLGNICVATVCKVLLDGYLMICVDGGPSTDGLDWFCYHASSHAIFPATFCQKNDIELTPPKGYEAQTFNWENYLEKTKSKAAPSRLFNMDCPNHGFKVGMKLEAVDLMEPRLICVATVKRVVHRLLSIHFDGWDSEYDQWVDCESPDIYPVGWCELTGYQLQPPVAAELLPSSCPLCHMFVPLCTQVNYPGPSEQPW

SEQ ID NO: 867660 - protein, 690 aa, Homo sapiens [sequence omitted]

SEQ ID NO: 867661 - protein, 614 aa, Homo sapiens
MCGIVGTREAFFSKTKRFCSVSCSRSYSSNSKKASILARLQGKPPTKKAKVLHKAAWSAKIGAFLHSQGTGQLADGTPTGQDALVLGFDWGKFLKDHSYKAAPVSCFKHVPLYDQWEDVMKGMKVEVLNSDAVLPSRVYWIASVIQTAGYRVLLRYEGFENDASHDFWCNLGTVDVHPIGWCAINSKILVPPRTIHAKFTDWKGYLMKRLVGSRTLPVDFHIKMVESMKYPFRQGMRLEVVDKSQVSRTRMAVVDTVIGGRLRLLYEDGDSDDDFWCHMWSPLIHPVGWSRRVGHGIKMSERRSDMAHHPTFRKIYCDAVPYLFKKVRAVYTEGGWFEEGMKLEAIDPLNLGNICVATVCKVLLDGYLMICVDGGPSTDGLDWFCYHASSHAIFPATFCQKNDIELTPPKGYEAQTFNWENYLEKTKSKAAPSRLFNMDCPNHGFKVGMKLEAVDLMEPRLICVATVKRVVHRLLSIHFDGWDSEYDQWVDCESPDIYPVGWCELTGYQLQPPVAAEPATPLKAKEATKKKKKQFGKKRKRIPPTKTRPLRQGSKKPLLEDDPQGARKISSEPVPGEIIAVRVKEEHLDVASPDKASSPELPVSVENIKQETDD

SEQ ID NO: 867662 - protein, 705 aa, Homo sapiens; identical to SEQ ID NO: 867650

SEQ ID NO: 867663 - protein, 42 aa, Homo sapiens
PTKTRPLRQGSKKPLLEDDPQGARKISSEPVPGESKSHRAGS

SEQ ID NO: 867664 - protein, 650 aa, Homo sapiens
AGAGPGRRERLEQRAPRQLRATRSMDMGTQGSGRKRLPNRERLTAEDDALNQIAREAEARLAAKRAARAEAREIRMKELERQQKEIYQVQKKYYGLDTKWGDIEQWMEDSERYSRRSRRNTSASDEDERMSVGSRGSLRSQPDLEYGGPYAWTNGYDGELYGSQSLNRRSGRPSCLYSAARPSGSYRASVLDEGSFGGTRRGSTSGSRAPSEYSGHLNSSSRASSRASSARASPVVEERPEKDFTEKGSRNMPGLSAATLASLGGTSSRRGSGDTSISIDTEASIREIKELNELKDQIQDVEGKYMQGLKEMKDSLAEVEEKYKKAMVSNAQLDNEKTNFMYQVDTLKDMLLELEEQLAESRRQYEEKNKEFEREKHAHSILQFQFAEVKEALKQREEMLEEIRQLQQKQASSIREISDLQETIEWKDKKIGALERQKEFFDSVRSERDDLREEVVMLKEELKKHGIILNSEIATNGETSDTLNNVGYQGPTKMTKEELNALKSTGDGTLDIRLKKLVDERECLLEQIKKLKGQLEERQKIGKLDNLRSEDDVLENGTDMHVMDLQRDANRQISDLKFKLAKSEQEITALEQNVIRLESQVSRYKSAAENAEKIEDELKAEKRKLQRELRSALDKTEELEVSNGHLVKRL

SEQ ID NO: 867665 - protein, 165 aa, Homo sapiens
MCCQKIMQRAIKAELHLLNVHYQMCRRHCCDIYKLVMENRNLSSNSAKKELGSALLSLLGDLKVRYVTLKEKIHKGIPLEELPPLSLESKLLSTFSTFASRLMKKETHVFSEADAEQDNQRAHDVDVSSNLKKTLSQMSLSSDNSHATQNISPKKDDFKNGDINA

SEQ ID NO: 867666 - protein, 752 aa, Homo sapiens
MTSPAAAQSREIDCLSPEAQKLAEARLAAKRAARAEAREIRMKELERQQKEVEERPEKDFTEKGSRNMPGLSAATLASLGGTSSRRGSGDTSISIDTEASIREIKDSLAEVEEKYKKAMVSNAQLDNEKTNFMYQVDTLKDMLLELEEQLAESRRQYEEKNKEFEREKHAHSILQFQFAEVKEALKQREEMLEKHGIILNSEIATNGETSDTLNNVGYQGPTKMTKEELNALKSTGDGTLGRASEVEVKNEIVANVGKREILHNTEKEQHTEDTVKDCVDIEVFPAGENTEDQKSSEDTAPFLGTLAGATYEEQVQSQILESSSLPENTVQVESNEVMGAPDDRTRTPLEPSNCWSDLDGGNHTENVGEAAVTQVEEQAGTVASCPLGHSDDTVYHDDKCMVEVPQELETSTGHSLEKEFTNQEAAEPKEVPAHSTEVGRDHNEEEGEETGLRDEKPIKTEVPGSPAGTEGNCQEATGPSTVDTQNEPLDMKEPDEEKSDQQGEALDSSQKKTKNKKKKNKKKKSPVPVETLKDVKKELTYQNTDLSEIKEEEQVKSTDRKSAVEAQNEVTENPKQKIAAESSENVDCPENPKIKLDGKLDQEGDDVQTAAEEVLADGDTLDFEDDTVQSSGPRAGGEELDEGVAKDNAKIDGATQSSPAEPKSEDADRCTLPEHESPSQDISDACEAESTERCEMSEHPSQTVRKALDSNSLENDDLSAPGREPGHFNPESREDTRGGNEKGKSKEDCTMS

SEQ ID NO: 867667 - protein, 629 aa, Homo sapiens
MTSPAAAQSREIDCLSPEAQKLAEARLAAKRAARAEAREIRMKELERQQKEVEERPEKDFTEKGSRNMPGLSAATLASLGGTSSRRGSGDTSISIDTEASIREIKDSLAEVEEKYKKAMVSNAQLDNEKTNFMYQVDTLKDMLLELEEQLAESRRQYEEKNKEFEREKHAHSILQFQFAEVKEALKQREEMLEKHGIILNSEIATNGETSDTLNNVGYQGPTKMTKEELNALKSTGDGTLGRASEVEVKNEIVANVGKREILHNTEKEQHTEDTVKDCVDIEVFPAGENTEDQKSSEDTAPFLGTLAGATYEEQVQSQILESSSLPENTVQVESNEVMGAPDDRTRTPLEPSNCWSDLDGGNHTENVGEAAVTQVEEQAGTVASCPLGHSDDTVYHDDKCMVEVPQELETSTGHSLEKEFTNQEAAEPKEVPAHSTEVGRDHNEEEGEETGLRDEKPIKTEVPGSPAGTEGNCQEATGPSTVDTQNEPLDMKEPDEEKSDQQGEALDSSQKKTKNKKKKNKKKKSPVPVETLKDVKKELTYQNTDLSEIKEEEQVKSTDRKSAVEAQNEVTENPKQKIAAESSENVDCPENPKIKLDGKLDQEGDDVQTAAEEVLADGDMKVLQKIMLK

SEQ ID NO: 867668 - protein, 752 aa, Homo sapiens; identical to SEQ ID NO: 867666

SEQ ID NO: 867669 - protein, 786 aa, Homo sapiens
AGAGPGRRERLEQRAPRQLRATRSMDMGTQGSGRKRLPNRERLTAEDDALNQIAREAEARLAAKRAARAEAREIRMKELERQQKEVEERPEKDFTEKGSRNMPGLSAATLASLGGTSSRRGSGDTSISIDTEASIREIKDSLAEVEEKYKKAMVSNAQLDNEKTNFMYQVDTLKDMLLELEEQLAESRRQYEEKNKEFEREKHAHSILQFQFAEVKEALKQREEMLEKHGIILNSEIATNGETSDTLNNVGYQGPTKMTKEELNALKSTGDGTLGRASEVEVKNEIVANVGKREILHNTEKEQHTEDTVKDCVDIEVFPAGENTEDQKSSEDTAPFLGTLAGATYEEQVQSQILESSSLPENTVQVESNEVMGAPDDRTRTPLEPSNCWSDLDGGNHTENVGEAAVTQVEEQAGTVASCPLGHSDDTVYHDDKCMVEVPQELETSTGHSLEKEFTNQEAAEPKEVPAHSTEVGRDHNEEEGEETGLRDEKPIKTEVPGSPAGTEGNCQEATGPSTVDTQNEPLDMKEPDEEKSDQQGEALDSSQKKTKNKKKKNKKKKSPVPVETLKDVKKELTYQNTDLSEIKEEEQVKSTDRKSAVEAQNEVTENPKQKIAAESSENVDCPENPKIKLDGKLDQEGDDVQTAAEEVLADGDTLDFEDDTVQSSGPRAGGEELDEGVAKDNAKIDGATQSSPAEPKSEDADRCTLPEHESPSQDISDACEAESTERCEMSEHPSQTVRKALDSNSLENDDLSAPGREPGHFNPESREDTRGGNEKGKSKEDCTMS

SEQ ID NO: 867670 - protein, 814 aa, Homo sapiens
MTSPAAAQSREIDCLSPEAQKLAEARLAAKRAARAEAREIRMKELERQQKEVEERPEKDFTEKGSRNMPGLSAATLASLGGTSSRRGSGDTSISIDTEASIREIKDSLAEVEEKYKKAMVSNAQLDNEKTNFMYQVDTLKDMLLELEEQLAESRRQYEEKNKEFEREKHAHSILQFQFAEVKEALKQREEMLEEIRQLQQKQASSIREISDLQETIEWKDKKIGALERQKEFFDSVRSERDDLREEVVMLKEELKKHGIILNSEIATNGETSDTLNNVGYQGPTKMTKEELNALKSTGDGTLGRASEVEVKNEIVANVGKREILHNTEKEQHTEDTVKDCVDIEVFPAGENTEDQKSSEDTAPFLGTLAGATYEEQVQSQILESSSLPENTVQVESNEVMGAPDDRTRTPLEPSNCWSDLDGGNHTENVGEAAVTQVEEQAGTVASCPLGHSDDTVYHDDKCMVEVPQELETSTGHSLEKEFTNQEAAEPKEVPAHSTEVGRDHNEEEGEETGLRDEKPIKTEVPGSPAGTEGNCQEATGPSTVDTQNEPLDMKEPDEEKSDQQGEALDSSQKKTKNKKKKNKKKKSPVPVETLKDVKKELTYQNTDLSEIKEEEQVKSTDRKSAVEAQNEVTENPKQKIAAESSENVDCPENPKIKLDGKLDQEGDDVQTAAEEVLADGDTLDFEDDTVQSSGPRAGGEELDEGVAKDNAKIDGATQSSPAEPKSEDADRCTLPEHESPSQDISDACEAESTERCEMSEHPSQTVRKALDSNSLENDDLSAPGREPGHFNPESREDTRGGNEKGKSKEDCTMS

SEQ ID NO: 867671 - protein, 757 aa, Homo sapiens
AGAGPGRRERLEQRAPRQLRATRSMDMGTQGSGRKRLPNRERLTAEDDALNQIAREVEERPEKDFTEKGSRNMPGLSAATLASLGGTSSRRGSGDTSISIDTEASIREIKDSLAEVEEKYKKAMVSNAQLDNEKTNFMYQVDTLKDMLLELEEQLAESRRQYEEKNKEFEREKHAHSILQFQFAEVKEALKQREEMLEKHGIILNSEIATNGETSDTLNNVGYQGPTKMTKEELNALKSTGDGTLGRASEVEVKNEIVANVGKREILHNTEKEQHTEDTVKDCVDIEVFPAGENTEDQKSSEDTAPFLGTLAGATYEEQVQSQILESSSLPENTVQVESNEVMGAPDDRTRTPLEPSNCWSDLDGGNHTENVGEAAVTQVEEQAGTVASCPLGHSDDTVYHDDKCMVEVPQELETSTGHSLEKEFTNQEAAEPKEVPAHSTEVGRDHNEEEGEETGLRDEKPIKTEVPGSPAGTEGNCQEATGPSTVDTQNEPLDMKEPDEEKSDQQGEALDSSQKKTKNKKKKNKKKKSPVPVETLKDVKKELTYQNTDLSEIKEEEQVKSTDRKSAVEAQNEVTENPKQKIAAESSENVDCPENPKIKLDGKLDQEGDDVQTAAEEVLADGDTLDFEDDTVQSSGPRAGGEELDEGVAKDNAKIDGATQSSPAEPKSEDADRCTLPEHESPSQDISDACEAESTERCEMSEHPSQTVRKALDSNSLENDDLSAPGREPGHFNPESREDTRGGNEKGKSKEDCTMS

SEQ ID NO: 867672 - protein, 828 aa, Homo sapiens
MTSPAAAQSREIDCLSPEAQKLAEARLAAKRAARAEAREIRMKELERQQKEEDSERYSRRSRRNTSASDEDERMSVGSRGSLRTNGYDGELYGSQSLNRRSGRVEERPEKDFTEKGSRNMPGLSAATLASLGGTSSRRGSGDTSISIDTEASIREIKELNELKDQIQDVEGKYMQGLKEMKDSLAEVEEKYKKAMVSNAQLDNEKTNFMYQVDTLKDMLLELEEQLAESRRQYEEKNKEFEREKHAHSILQFQFAEVKEALKQREEMLEKHGIILNSEIATNGETSDTLNNVGYQGPTKMTKEELNALKSTGDGTLGRASEVEVKNEIVANVGKREILHNTEKEQHTEDTVKDCVDIEVFPAGENTEDQKSSEDTAPFLGTLAGATYEEQVQSQILESSSLPENTVQVESNEVMGAPDDRTRTPLEPSNCWSDLDGGNHTENVGEAAVTQVEEQAGTVASCPLGHSDDTVYHDDKCMVEVPQELETSTGHSLEKEFTNQEAAEPKEVPAHSTEVGRDHNEEEGEETGLRDEKPIKTEVPGSPAGTEGNCQEATGPSTVDTQNEPLDMKEPDEEKSDQQGEALDSSQKKTKNKKKKNKKKKSPVPVETLKDVKKELTYQNTDLSEIKEEEQVKSTDRKSAVEAQNEVTENPKQKIAAESSENVDCPENPKIKLDGKLDQEGDDVQTAAEEVLADGDTLDFEDDTVQSSGPRAGGEELDEGVAKDNAKIDGATQSSPAEPKSEDADRCTLPEHESPSQDISDACEAESTERCEMSEHPSQTVRKALDSNSLENDDLSAPGREPGHFNPESREDTRGGNEKGKSKEDCTMS

SEQ ID NO: 867673 - protein, 653 aa, Homo sapiens
MTCFPQDSLAEVEEKYKKAMVSNAQLDNEKTNFMYQVDTLKDMLLELEEQLAESRRQYEEKNKEFEREKHAHSILQFQFAEVKEALKQREEMLEKHGIILNSEIATNGETSDTLNNVGYQGPTKMTKEELNALKSTGDGTLGRASEVEVKNEIVANVGKREILHNTEKEQHTEDTVKDCVDIEVFPAGENTEDQKSSEDTAPFLGTLAGATYEEQVQSQILESSSLPENTVQVESNEVMGAPDDRTRTPLEPSNCWSDLDGGNHTENVGEAAVTQVEEQAGTVASCPLGHSDDTVYHDDKCMVEVPQELETSTGHSLEKEFTNQEAAEPKEVPAHSTEVGRDHNEEEGEETGLRDEKPIKTEVPGSPAGTEGNCQEATGPSTVDTQNEPLDMKEPDEEKSDQQGEALDSSQKKTKNKKKKNKKKKSPVPVETLKDVKKELTYQNTDLSEIKEEEQVKSTDRKSAVEAQNEVTENPKQKIAAESSENVDCPENPKIKLDGKLDQEGDDVQTAAEEVLADGDTLDFEDDTVQSSGPRAGGEELDEGVAKDNAKIDGATQSSPAEPKSEDADRCTLPEHESPSQDISDACEAESTERCEMSEHPSQTVRKALDSNSLENDDLSAPGREPGHFNPESREDTRGGNEKGKSKEDCTMS

SEQ ID NO: 867674 - protein, 752 aa, Homo sapiens; identical to SEQ ID NO: 867666

SEQ ID NO: 867675 - protein, 752 aa, Homo sapiens; identical to SEQ ID NO: 867666

SEQ ID NO: 867676 - protein, 730 aa, Homo sapiens
MTSPAAAQSREIDCLSPEAQKLAEARLAAKRAARAEAREIRMKELERQQKEVEERPEKDFTEKGSRNMPGLSAATLASLGGTSSRRGSGDTSISIDTEASIREIKDSLAEVEEKYKKAMVSNAQLDNEKTNFMYQVDTLKDMLLELEEQLAESRRQYEEKNKEFEREKHAHSILQFQFAEVKEALKQREEMLEKHGIILNSEIATNGETSDTLNNVGYQGPTKMTKEELNALKSTGDGTLGRASEVEVKNEIVANVGKREILHNTEKEQHTEDTVKDCVDIEVFPAGENTEDQKSSEDTAPFLGTLAGATYEEQVQSQILESSSLPENTVQVESNEVMGAPDDRTRTPLEPSNCWSDLDGGNHTENVGEAAVTQVEEQAGTVASCPLGHSDDTVYHDDKCMVEVPQELETSTGHSLEKEFTNQEAAEPKEVPAHSTEVGRDHNEEEGEETGLRDEKPIKTEVPGSPAGTEGNCQEATGPSTVDTQNEPLDMKEPDEEKSDQQGEALDSSQKKTKNKKKKNKKKKSPVPVETLKDVKKELTYQNTDLSEIKEEEQVKSTDRKSAVEAQNEVTENPKQKIAAESSENVDCPENPKIKLDGKLDQEGDDVQTAAEEVLADGDTLDFEDDTVQSSGPRAGGEELDEGVAKDNAKIDGATQSSPAEPKSEDADRCTLPEHESPSQDISDACEAESTERCEMSEHPSQTVRKALDSNSLENDDLSAPGREPGHFNP

SEQ ID NO: 867677 - protein, 566 aa, Homo sapiens
MLKEELKKHGIILNSEIATNGETSDTLNNVGYQGPTKMTKEELNALKSTGDGTLGRASEVEVKNEIVANVGKREILHNTEKEQHTEDTVKDCVDIEVFPAGENTEDQKSSEDTAPFLGTLAGATYEEQVQSQILESSSLPENTVQVESNEVMGAPDDRTRTPLEPSNCWSDLDGGNHTENVGEAAVTQVEEQAGTVASCPLGHSDDTVYHDDKCMVEVPQELETSTGHSLEKEFTNQEAAEPKEVPAHSTEVGRDHNEEEGEETGLRDEKPIKTEVPGSPAGTEGNCQEATGPSTVDTQNEPLDMKEPDEEKSDQQGEALDSSQKKTKNKKKKNKKKKSPVPVETLKDVKKELTYQNTDLSEIKEEEQVKSTDRKSAVEAQNEVTENPKQKIAAESSENVDCPENPKIKLDGKLDQEGDDVQTAAEEVLADGDTLDFEDDTVQSSGPRAGGEELDEGVAKDNAKIDGATQSSPAEPKSEDADRCTLPEHESPSQDISDACEAESTERCEMSEHPSQTVRKALDSNSLENDDLSAPGREPGHFNPESREDTRGGNEKGKSKEDCTMS

SEQ ID NO: 867678 - protein, 567 aa, Homo sapiens
MSLFLFPEKHGIILNSEIATNGETSDTLNNVGYQGPTKMTKEELNALKSTGDGTLGRASEVEVKNEIVANVGKREILHNTEKEQHTEDTVKDCVDIEVFPAGENTEDQKSSEDTAPFLGTLAGATYEEQVQSQILESSSLPENTVQVESNEVMGAPDDRTRTPLEPSNCWSDLDGGNHTENVGEAAVTQVEEQAGTVASCPLGHSDDTVYHDDKCMVEVPQELETSTGHSLEKEFTNQEAAEPKEVPAHSTEVGRDHNEEEGEETGLRDEKPIKTEVPGSPAGTEGNCQEATGPSTVDTQNEPLDMKEPDEEKSDQQGEALDSSQKKTKNKKKKNKKKKSPVPVETLKDVKKELTYQNTDLSEIKEEEQVKSTDRKSAVEAQNEVTENPKQKIAAESSENVDCPENPKIKLDGKLDQEGDDVQTAAEEVLADGDTLDFEDDTVQSSGPRAGGEELDEGVAKDNAKIDGATQSSPAEPKSEDADRCTLPEHESPSQDISDACEAESTERCEMSEHPSQTVRKALDSNSLENDDLSAPGREPGHFNPESREDTRGGNEKGKSKEDCTMS

SEQ ID NO: 867679 - protein, 424 aa, Homo sapiens
MTSPAAAQSREIDCLSPEAQKLAEARLAAKRAARAEAREIRMKELERQQKEVEERPEKDFTEKGSRNMPGLSAATLASLGGTSSRRGSGDTSISIDTEASIREIKDSLAEVEEKYKKAMVSNAQLDNEKTNFMYQVDTLKDMLLELEEQLAESRRQYEEKNKEFEREKHAHSILQFQFAEVKEALKQREEMLEEIRQLQQKQASSIREISDLQETIEWKDKKIGALERQKEFFDSVRSERDDLREEVVMLKEELKKHGIILNSEIATNGETSDTLNNVGYQGPTKMTKEELNALKSTGDGTLDIRLKKLVDERECLLEQIKKLKGQLEERQKIGKLDNLRSEDDVLENGTDMHVMDLQRDANRQISDLKFKLAKSEQEITALEQNVIRLESQVSRYKSAAENAEKIEDELKAEKRKLQREIIYL

SEQ ID NO: 867680 - protein, 150 aa, Homo sapiens
MTSPAAAQSREIDCLSPEAQKLAEARLAAKRAARAEAREIRMKELERQQKEIYQVQKKYYGLDTKWGDIEQWMEDSERYSRRSRRNTSASDEDERMSVGSRGSLRPSCLYSAARPSGSYRASVLDEGSFGGTRRGSTSGSRAHANHTNRW

SEQ ID NO: 867681 - protein, 177 aa, Homo sapiens
MSLFLFPEKHGIILNSEIATNGETSDTLNNVGYQGPTKMTKEELNALKSTGDGTLDIRLKKLVDERECLLEQIKKLKGQLEERQKIGKLDNLRSEDDVLENGTDMHVMDLQRDANRQISDLKFKLAKSEQEITALEQNVIRLESQVSRYKSAAENAEKIEDELKAEKRKLQREIIYL

SEQ ID NO: 867682 - protein, 209 aa, Homo sapiens
PWDGRRRPSPASPAPFHPEPDSARGHLRPAPVGRARAQRREPLPGGLAPGPGSASVHLAASGSVSADRARAPWPGPRGAPGAVPEHFPPGGAGRARQDDQPRGRSKPGDRLFEPGSAEAGKRKALPKLSFVTAAGFQGLPARSEVNGRRRCPGGVGWALAGPQRGGSGRSGRGSVSGPASGVPHALGSTLYCGTPPPRTKRHMVSPRPR

SEQ ID NO: 867683 - protein, 94 aa, Homo sapiens
DMRILEAHGHSTGPQRLLYLHHFLALSACSQLRESLLLVPASEVTCSSVQIFFFLLALLHTQALERQKEFFDSVRSERDDLREEVVMLKEELKV

SEQ ID NO: 867684 - protein, 784 aa, Homo sapiens
MTSPAAAQSREIDCLSPEAQKLAEARLAAKRAARAEAREIRMKELERQQKEEDSERYSRRSRRNTSASDEDERMSVGSRGSLRVEERPEKDFTEKGSRNMPGLSAATLASLGGTSSRRGSGDTSISIDTEASIREIKDSLAEVEEKYKKAMVSNAQLDNEKTNFMYQVDTLKDMLLELEEQLAESRRQYEEKNKEFEREKHAHSILQFQFAEVKEALKQREEMLEKHGIILNSEIATNGETSDTLNNVGYQGPTKMTKEELNALKSTGDGTLGRASEVEVKNEIVANVGKREILHNTEKEQHTEDTVKDCVDIEVFPAGENTEDQKSSEDTAPFLGTLAGATYEEQVQSQILESSSLPENTVQVESNEVMGAPDDRTRTPLEPSNCWSDLDGGNHTENVGEAAVTQVEEQAGTVASCPLGHSDDTVYHDDKCMVEVPQELETSTGHSLEKEFTNQEAAEPKEVPAHSTEVGRDHNEEEGEETGLRDEKPIKTEVPGSPAGTEGNCQEATGPSTVDTQNEPLDMKEPDEEKSDQQGEALDSSQKKTKNKKKKNKKKKSPVPVETLKDVKKELTYQNTDLSEIKEEEQVKSTDRKSAVEAQNEVTENPKQKIAAESSENVDCPENPKIKLDGKLDQEGDDVQTAAEEVLADGDTLDFEDDTVQSSGPRAGGEELDEGVAKDNAKIDGATQSSPAEPKSEDADRCTLPEHESPSQDISDACEAESTERCEMSEHPSQTVRKALDSNSLENDDLSAPGREPGHFNPESREDTRGGNEKGKSKEDCTMS

SEQ ID NO: 867685 - protein, 735 aa, Homo sapiens
MTSPAAAQSREIDCLSPEAQKLAEARLAAKRAARAEAREIRMKELERQQKEVEERPEKDFTEKGSRNMPGLSAATLASLGGTSSRRGSGDTSISIDTEASIREIKDSLAEVEEKYKKAMVSNAQLDNEKTNFMYQVDTLKDMLLELEEQLAESRRQYEEKNKEFEREKHAHSILQFQFAEVKEALKQREEMLEKHGIILNSEIATNGETSDTLNNVGYQGPTKMTKEELNALKSTGDGTLGRASEVEVKNEIVANVGKREILHNTEKEQHTEDTVKDCVDIEVFPAGENTEDQKSSEDTAPFLGTLAGATYEEQVQSQILESSSLPENTVQVESNEVMGAPDDRTRTPLEPSNCWSDLDGGNHTENVGEAAVTQVEEQAGTVASCPLGHSDDTVYHDDKCMVEVPQELETSTGHSLEKEFTNQEAAEPKEVPAHSTEVGRDHNEEEGEETGLRDEKPIKTEVPGSPAGTEGNCQEATGPSTVDTQNEPLDMKEPDEEKSDQQGEALDSSQKKTKNKKKKNKKKKSPVPVETLKDVKKELTYQNTDLSEIKEEEQVKSTDRKSAVEAQNEVTENPKQKIAAESSENVDCPENPKIKLDGKLDQEGDDVQTAAEEVLADGDTLDFEDDTVQSSGPRAGGEELDEGVAKDNAKIDGATQSSPAEPKSEDADRCTLPEHESPSQDISDACEAESTERCEMSEHPSQTVRKALDSNSLESREDTRGGNEKGKSKEDCTMS

SEQ ID NO: 867686 - protein, 789 aa, Homo sapiens
MTSPAAAQSREIDCLSPEAQKLAEARLAAKRAARAEAREIRMKELERQQKEIYQVQKKYYGLDTKWGDIEQWMEDSERYSRRSRRNTSVEERPEKDFTEKGSRNMPGLSAATLASLGGTSSRRGSGDTSISIDTEASIREIKDSLAEVEEKYKKAMVSNAQLDNEKTNFMYQVDTLKDMLLELEEQLAESRRQYEEKNKEFEREKHAHSILQFQFAEVKEALKQREEMLEKHGIILNSEIATNGETSDTLNNVGYQGPTKMTKEELNALKSTGDGTLGRASEVEVKNEIVANVGKREILHNTEKEQHTEDTVKDCVDIEVFPAGENTEDQKSSEDTAPFLGTLAGATYEEQVQSQILESSSLPENTVQVESNEVMGAPDDRTRTPLEPSNCWSDLDGGNHTENVGEAAVTQVEEQAGTVASCPLGHSDDTVYHDDKCMVEVPQELETSTGHSLEKEFTNQEAAEPKEVPAHSTEVGRDHNEEEGEETGLRDEKPIKTEVPGSPAGTEGNCQEATGPSTVDTQNEPLDMKEPDEEKSDQQGEALDSSQKKTKNKKKKNKKKKSPVPVETLKDVKKELTYQNTDLSEIKEEEQVKSTDRKSAVEAQNEVTENPKQKIAAESSENVDCPENPKIKLDGKLDQEGDDVQTAAEEVLADGDTLDFEDDTVQSSGPRAGGEELDEGVAKDNAKIDGATQSSPAEPKSEDADRCTLPEHESPSQDISDACEAESTERCEMSEHPSQTVRKALDSNSLENDDLSAPGREPGHFNPESREDTRGGNEKGKSKEDCTMS

SEQ ID NO: 867687 - protein, 886 aa, Homo sapiens
AGAGPGRRERLEQRAPRQLRATRSMDMGTQGSGRKRLPNRERLTAEDDALNQIAREAEARLAAKRAARAEAREIRMKELERQQKEIYQVQKKYYGLDTKWGDIEQWMEDSERYSRRSRRNTSASDEDERMSVGSRGSLRTNGYDGELYGSQSLNRRSGRPSEYSGHLNSSSRASSRASSARASPVVEERPEKDFTEKGSRNMPGLSAATLASLGGTSSRRGSGDTSISIDTEASIREIKDSLAEVEEKYKKAMVSNAQLDNEKTNFMYQVDTLKDMLLELEEQLAESRRQYEEKNKEFEREKHAHSILQFQFAEVKEALKQREEMLEKHGIILNSEIATNGETSDTLNNVGYQGPTKMTKEELNALKSTGDGTLGRASEVEVKNEIVANVGKREILHNTEKEQHTEDTVKDCVDIEVFPAGENTEDQKSSEDTAPFLGTLAGATYEEQVQSQILESSSLPENTVQVESNEVMGAPDDRTRTPLEPSNCWSDLDGGNHTENVGEAAVTQVEEQAGTVASCPLGHSDDTVYHDDKCMVEVPQELETSTGHSLEKEFTNQEAAEPKEVPAHSTEVGRDHNEEEGEETGLRDEKPIKTEVPGSPAGTEGNCQEATGPSTVDTQNEPLDMKEPDEEKSDQQGEALDSSQKKTKNKKKKNKKKKSPVPVETLKDVKKELTYQNTDLSEIKEEEQVKSTDRKSAVEAQNEVTENPKQKIAAESSENVDCPENPKIKLDGKLDQEGDDVQTAAEEVLADGDTLDFEDDTVQSSGPRAGGEELDEGVAKDNAKIDGATQSSPAEPKSEDADRCTLPEHESPSQDISDACEAESTERCEMSEHPSQTVRKALDSNSLENDDLSAPGREPGHFNPESREDTRGGNEKGKSKEDCTMS

SEQ ID NO: 867688 - protein, 776 aa, Homo sapiens
MTSPAAAQSREIDCLSPEAQKLAEARLAAKRAARAEAREIRMKELERQQKEVEERPEKDFTEKGSRNMPGLSAATLASLGGTSSRRGSGDTSISIDTEASIREIKELNELKDQIQDVEGKYMQGLKEMKDSLAEVEEKYKKAMVSNAQLDNEKTNFMYQVDTLKDMLLELEEQLAESRRQYEEKNKEFEREKHAHSILQFQFAEVKEALKQREEMLEKHGIILNSEIATNGETSDTLNNVGYQGPTKMTKEELNALKSTGDGTLGRASEVEVKNEIVANVGKREILHNTEKEQHTEDTVKDCVDIEVFPAGENTEDQKSSEDTAPFLGTLAGATYEEQVQSQILESSSLPENTVQVESNEVMGAPDDRTRTPLEPSNCWSDLDGGNHTENVGEAAVTQVEEQAGTVASCPLGHSDDTVYHDDKCMVEVPQELETSTGHSLEKEFTNQEAAEPKEVPAHSTEVGRDHNEEEGEETGLRDEKPIKTEVPGSPAGTEGNCQEATGPSTVDTQNEPLDMKEPDEEKSDQQGEALDSSQKKTKNKKKKNKKKKSPVPVETLKDVKKELTYQNTDLSEIKEEEQVKSTDRKSAVEAQNEVTENPKQKIAAESSENVDCPENPKIKLDGKLDQEGDDVQTAAEEVLADGDTLDFEDDTVQSSGPRAGGEELDEGVAKDNAKIDGATQSSPAEPKSEDADRCTLPEHESPSQDISDACEAESTERCEMSEHPSQTVRKALDSNSLENDDLSAPGREPGHFNPESREDTRGGNEKGKSKEDCTMS

SEQ ID NO: 867689 - protein, 653 aa, Homo sapiens; identical to SEQ ID NO: 867673

SEQ ID NO: 867690 - protein, 634 aa, Homo sapiens
MVSNAQLDNEKTNFMYQVDTLKDMLLELEEQLAESRRQYEEKNKEFEREKHAHSILQFQFAEVKEALKQREEMLEKHGIILNSEIATNGETSDTLNNVGYQGPTKMTKEELNALKSTGDGTLGRASEVEVKNEIVANVGKREILHNTEKEQHTEDTVKDCVDIEVFPAGENTEDQKSSEDTAPFLGTLAGATYEEQVQSQILESSSLPENTVQVESNEVMGAPDDRTRTPLEPSNCWSDLDGGNHTENVGEAAVTQVEEQAGTVASCPLGHSDDTVYHDDKCMVEVPQELETSTGHSLEKEFTNQEAAEPKEVPAHSTEVGRDHNEEEGEETGLRDEKPIKTEVPGSPAGTEGNCQEATGPSTVDTQNEPLDMKEPDEEKSDQQGEALDSSQKKTKNKKKKNKKKKSPVPVETLKDVKKELTYQNTDLSEIKEEEQVKSTDRKSAVEAQNEVTENPKQKIAAESSENVDCPENPKIKLDGKLDQEGDDVQTAAEEVLADGDTLDFEDDTVQSSGPRAGGEELDEGVAKDNAKIDGATQSSPAEPKSEDADRCTLPEHESPSQDISDACEAESTERCEMSEHPSQTVRKALDSNSLENDDLSAPGREPGHFNPESREDTRGGNEKGKSKEDCTMS

SEQ ID NO: 867691 - protein, 838 aa, Homo sapiens
MTSPAAAQSREIDCLSPEAQKLAEARLAAKRAARAEAREIRMKELERQQKEVEERPEKDFTEKGSRNMPGLSAATLASLGGTSSRRGSGDTSISIDTEASIREIKELNELKDQIQDVEGKYMQGLKEMKDSLAEVEEKYKKAMVSNAQLDNEKTNFMYQVDTLKDMLLELEEQLAESRRQYEEKNKEFEREKHAHSILQFQFAEVKEALKQREEMLEEIRQLQQKQASSIREISDLQETIEWKDKKIGALERQKEFFDSVRSERDDLREEVVMLKEELKKHGIILNSEIATNGETSDTLNNVGYQGPTKMTKEELNALKSTGDGTLGRASEVEVKNEIVANVGKREILHNTEKEQHTEDTVKDCVDIEVFPAGENTEDQKSSEDTAPFLGTLAGATYEEQVQSQILESSSLPENTVQVESNEVMGAPDDRTRTPLEPSNCWSDLDGGNHTENVGEAAVTQVEEQAGTVASCPLGHSDDTVYHDDKCMVEVPQELETSTGHSLEKEFTNQEAAEPKEVPAHSTEVGRDHNEEEGEETGLRDEKPIKTEVPGSPAGTEGNCQEATGPSTVDTQNEPLDMKEPDEEKSDQQGEALDSSQKKTKNKKKKNKKKKSPVPVETLKDVKKELTYQNTDLSEIKEEEQVKSTDRKSAVEAQNEVTENPKQKIAAESSENVDCPENPKIKLDGKLDQEGDDVQTAAEEVLADGDTLDFEDDTVQSSGPRAGGEELDEGVAKDNAKIDGATQSSPAEPKSEDADRCTLPEHESPSQDISDACEAESTERCEMSEHPSQTVRKALDSNSLENDDLSAPGREPGHFNPESREDTRGGNEKGKSKEDCTMS

SEQ ID NO: 867692 - protein, 592 aa, Homo sapiens
LLQGLLDFSKLKLQYTVGVFFPFKFFVFLFVLPKHGIILNSEIATNGETSDTLNNVGYQGPTKMTKEELNALKSTGDGTLGRASEVEVKNEIVANVGKREILHNTEKEQHTEDTVKDCVDIEVFPAGENTEDQKSSEDTAPFLGTLAGATYEEQVQSQILESSSLPENTVQVESNEVMGAPDDRTRTPLEPSNCWSDLDGGNHTENVGEAAVTQVEEQAGTVASCPLGHSDDTVYHDDKCMVEVPQELETSTGHSLEKEFTNQEAAEPKEVPAHSTEVGRDHNEEEGEETGLRDEKPIKTEVPGSPAGTEGNCQEATGPSTVDTQNEPLDMKEPDEEKSDQQGEALDSSQKKTKNKKKKNKKKKSPVPVETLKDVKKELTYQNTDLSEIKEEEQVKSTDRKSAVEAQNEVTENPKQKIAAESSENVDCPENPKIKLDGKLDQEGDDVQTAAEEVLADGDTLDFEDDTVQSSGPRAGGEELDEGVAKDNAKIDGATQSSPAEPKSEDADRCTLPEHESPSQDISDACEAESTERCEMSEHPSQTVRKALDSNSLENDDLSAPGREPGHFNPESREDTRGGNEKGKSKEDCTMS

SEQ ID NO: 867693 - protein, 362 aa, Homo sapiens
MTSPAAAQSREIDCLSPEAQKLAEARLAAKRAARAEAREIRMKELERQQKEVEERPEKDFTEKGSRNMPGLSAATLASLGGTSSRRGSGDTSISIDTEASIREIKDSLAEVEEKYKKAMVSNAQLDNEKTNFMYQVDTLKDMLLELEEQLAESRRQYEEKNKEFEREKHAHSILQFQFAEVKEALKQREEMLEKHGIILNSEIATNGETSDTLNNVGYQGPTKMTKEELNALKSTGDGTLDIRLKKLVDERECLLEQIKKLKGQLEERQKIGKLDNLRSEDDVLENGTDMHVMDLQRDANRQISDLKFKLAKSEQEITALEQNVIRLESQVSRYKSAAENAEKIEDELKAEKRKLQREIIYL

SEQ ID NO: 867694 - protein, 396 aa, Homo sapiens
AGAGPGRRERLEQRAPRQLRATRSMDMGTQGSGRKRLPNRERLTAEDDALNQIAREAEARLAAKRAARAEAREIRMKELERQQKEVEERPEKDFTEKGSRNMPGLSAATLASLGGTSSRRGSGDTSISIDTEASIREIKDSLAEVEEKYKKAMVSNAQLDNEKTNFMYQVDTLKDMLLELEEQLAESRRQYEEKNKEFEREKHAHSILQFQFAEVKEALKQREEMLEKHGIILNSEIATNGETSDTLNNVGYQGPTKMTKEELNALKSTGDGTLDIRLKKLVDERECLLEQIKKLKGQLEERQKIGKLDNLRSEDDVLENGTDMHVMDLQRDANRQISDLKFKLAKSEQEITALEQNVIRLESQVSRYKSAAENAEKIEDELKAEKRKLQREIIYL

SEQ ID NO: 867695 - protein, 107 aa, Homo sapiens
MTSPAAAQSREIDCLSPEAQKLAEARLAAKRAARAEAREIRMKELERQQKEEDSERYSRRSRRNTSASDEDERMSVGSRGSLRTNGYDGELYGSQSLNRRSGRHMME

SEQ ID NO: 867696 - protein, 102 aa, Homo sapiens
YLNITKRTIPESTDRGSYPNSEGHGRPPEEVIFSRRSRMIWRQSGKIEKFALFVFESQMPSRAPVSFRSGCCLYLFLLLALPCGLLFLSLFCVCREAAGCPG

SEQ ID NO: 867697 - protein, 451 aa, Homo sapiens
MVGSALRRGAHAYVYLVSKASHISRGHQHQAWGSRPPAAECATQRAPGSVVELLGKSYPQDDHSNLTRKVLTRVGRNLHNQQHHPLWLIKERVKEHFYKQYVGRFGTPLFSVYDNLSPVVTTWQNFDSLLIPADHPSRKKGDNYYLNRTHMLRAHTSAHQWDLLHAGLDAFLVVGDVYRRDQIDSQHYPIFHQLEAVRLFSKHELFAGIKDGESLQLFEQSSRSAHKQETHTMEAVKLVEFDLKQTLTRLMAHLFGDELEIRWVDCYFPFTHPSFEMEINFHGEWLEVLGCGVMEQQLVNSAGAQDRIGWAFGLGLERLAMILYDIPDIRLFWCEDERFLKQFCVSNINQKVKFQPLSKYPAVINDISFWLPSENYAENDFYDLVRTIGGDLVEKVDLIDKFVHPKTHKTSHCYRITYRHMERTLSQREVRHIHQALQEAAVQLLGVEGRF

SEQ ID NO: 867698 - protein, 412 aa, Homo sapiens
MVGSALRRGAHAYVYLVSKASHISRGHQHQAWGSRPPAAECATQRAPGSVVELLGKSYPQDDHSNLTRKVLTRVGRNLHNQQHHPLWLIKERVKEHFYKQYVGRFGTPLFSVYDNLSPVVTTWQNFDSLLIPADHPSRKKGDNYYLNRTHMLRAHTSAHQWDLLHAGLDAFLVVGDVYRRDQIDSQHYPIFHQLEAVRLFSKHELFAGIKDGESLQLFEQSSRSAHKQETHTMEAVKLVEFDLKQTLTRLMAHLFGDELEIRWVDCYFPFTHPSFEMEINFHGEWLEVLGCGVMEQQLVNSAGAQDRIGWAFGLGLERLAMILYDIPDIRLFWCEDERFLKQFCVSNINQKVKFQPLSKYPAVINDISFWLPSENYAENDFYDLVRTIGGDLVEKVDLIDKFVHPKGKKLLK

SEQ ID NO: 867699 - protein, 305 aa, Homo sapiens
MVGSALRRGAHAYVYLVSKASHISRGHQHQAWGSRPPAAECATQRAPGSVVELLGKSYPQDDHSNLTRKVLTRVGRNLHNQQHHPLWLIKERVKEHFYKQYVGRFGTPLFSVYDNLSPVVTTWQNFDSLLIPADHPSRKKGDNYYLNRTHMLRAHTSAHQWDLLHAGLDAFLVVGDVYRRDQIDSQHYPIFHQLEAVRLFSKHELFAGIKDGESLQLFEQSSRSAHKQETHTMEAVKLVEFDLKQTLTRLMAHLFGDELEIRWVDCYFPFTHPSFEMEINFHGEWLEVLGCGVMEQQLVNSGGAT

SEQ ID NO: 867700 - protein, 83 aa, Homo sapiens
PPPSTSGSSHKSPPIFKARGHSLRLSKGGLSKPHWKIMTHKTSHCYRITYRHMERTLSQREVRHIHQALQEAAVQLLGVEGRF

SEQ ID NO: 867701 - protein, 451 aa, Homo sapiens; identical to SEQ ID NO: 867697

SEQ ID NO: 867702 - protein, 451 aa, Homo sapiens; identical to SEQ ID NO: 867697

SEQ ID NO: 867703 - protein, 131 aa, Homo sapiens
MILYDIPDIRLFWCEDERFLKQFCVSNINQKVKFQPLSKYPAVINDISFWLPSENYAENDFYDLVRTIGGDLVEKVDLIDKFVHPKTHKTSHCYRITYRHMERTLSQREVRHIHQALQEAAVQLLGVEGRF

SEQ ID NO: 867704 - protein, 70 aa, Homo sapiens
LHAGLDAFLVVGDVYRRDQIDSQHYPIFHQLEAVRLFSKHEVSLEMFLIAEGCHRHFMLRSLTFSSMRPA

SEQ ID NO: 867705 - protein, 214 aa, Homo sapiens
FTEWKFYLSGVGLFPQPLDTERITTRIGLQSTIVIPFKNPTMEDVLIDIILTSVEHPRNLVMDHCWDSFIYESSAFRFSSPSEIQGIALPPKGNIDISLLFIPQIMKLHKTMVIIEMTKANGKYWPIDNFDELDIKFKSIVGIDSEEIQAIHWIYPIVGLPQAPPPKSPPVVIQCQSRKRAEEKVEIILNAGFFGFSLTPDLTEVLVIPKKKFT

SEQ ID NO: 867706 - protein, 146 aa, Homo sapiens
QAGAGSREHGGAVEGVTGFRRLASGSAVCSLAAGLRVGRLRRLLPLQFSRCGHESGCTAVIHPHLLKMHPDLSPHLHTEECNVLINLLKECHKNHNILKFFGYCNDVDRELRKCLKNEYVENRTKSREHGIAMRKKLFNPPEESEK

SEQ ID NO: 867707 - protein, 141 aa, Homo sapiens
QAGAGSREHGGAVEGVTGFRRLASGSAVCSLAAGLRVGRLRRLLPLQFSRCGHESGCTAVIHPHLLKMHPDLSPHLHTEECNVLINLLKECHKNHNILKFFGYCNDVDRELRKCLKNEVLALSPKLECSRVIVTHGSLKLK

SEQ ID NO: 867708 - protein, 76 aa, Homo sapiens
QAGAGSREHGGAVEGVTGFRRLASGSAVCSLAAGLRVGRLRRLLPLQFSRCGHESAVAILMDMGWFLFSIWNFKKN

SEQ ID NO: 867709 - protein, 160 aa, Homo sapiens
QAGAGSREHGGAVEGVTGFRRLASGSAVCSLAAGLRVGRLRRLLPLQFSRCGHESGCTAVIHPHLLKMHPDLSPHLHTEECNVLINLLKECHKNETCIISATYSVQKKSSGVYHNILKFFGYCNDVDRELRKCLKNEVLALSPKLECSRVIVTHGSLKLK

SEQ ID NO: 867710 - protein, 112 aa, Homo sapiens
QAGAGSREHGGAVEGVTGFRRLASGSAVCSLAAGLRVGRLRRLLPLQFSRCGHESGTAIPVSTVAIPVYMPAHSAQEFQFLHILFSVCYFLFFFSSSHPNGYGLVPVFYLEL

SEQ ID NO: 867711 - protein, 127 aa, Homo sapiens
QAGAGSREHGGAVEGVTGFRRLASGSAVCSLAAGLRVGRLRRLLPLQFSRCGHESGCTAVIHPHLLKMHPDLSPHLHTEECNVLINLLKECHKNHNILKFFGYCNDVDRELRKCLKNEAVFPFLDSL

SEQ ID NO: 867712 - protein, 161 aa, Homo sapiens
QAGAGSREHGGAVEGVTGFRRLASGSAVCSLAAGLRVGRLRRLLPLQFSRCGHESGCTAVIHPHLLKMHPDLSPHLHTEECNVLINLLKECHKNHNILKFFGYCNDVDRELRKCLKNEYVENRTKSREHGIAMRKKLFNPPEESDGLIPERILSYLVSIIL

SEQ ID NO: 867713 - protein, 122 aa, Homo sapiens
QAGAGSREHGGAVEGVTGFRRLASGSAVCSLAAGLRVGRLRRLLPLQFSRCGHESGCTAVIHPHLLKMHPDLSPHLHTEECNVLINLLKECHKNYVENRTKSREHGIAMRKKLFNPPEESEK

SEQ ID NO: 867714 - protein, 118 aa, Homo sapiens
QAGAGSREHGGAVEGVTGFRRLASGSAVCSLAAGLRVGRLRRLLPLQFSRCGHESGCTAVIHPHLLKMHPDLSPHLHTEECNVLINLLKECHKNGTRTVIFSADTSDYNGIILKVSAL

SEQ ID NO: 867715 - protein, 141 aa, Homo sapiens; identical to SEQ ID NO: 867707

SEQ ID NO: 867716 - protein, 141 aa, Homo sapiens; identical to SEQ ID NO: 867707

SEQ ID NO: 867717 - protein, 75 aa, Homo sapiens
QAGAGSREHGGAVEGVTGFRRLASGSAVCSLAAGLRVGRLRRLLPLQFSRCGHESVRRKQDQEQGAWHCNAKETF

SEQ ID NO: 867718 - protein, 238 aa, Homo sapiens
MEGAPPGSLALRLLLFVALPASGWLTTGAPEPPPLSGAPQDGIRINVTTLKDDGDISKQQVVLNITYESGQVYVNDLPVNSGVTRISCQTLIVKNENLENLEEKEYFGIVSVRILVHEWPMTSGSSLQLIVIQEEVVEIDGKQVQQKDVTEIDILVKNRGVLRHSNYTLPLEESMLYSISRDSDILFTLPNLSKKESVSSLQTTSQYLIRNVETTVDEDVLPGKLPETPLRAEPPSSY

SEQ ID NO: 867719 - protein, 164 aa, Homo sapiens
HIEPVPAGWAQIRCQTLIVKNENLENLEEKEYFGIVSVRILVHEWPMTSGSSLQLIVIQEEVVEIDGKQVQQKDVTEIDILVKNRGVLRHSNYTLPLEESMLYSISRDSDILFTLPNLSKKESVSSLQTTSQYLIRNVETTVDEDVLPGKLPETPLRAEPPSSY

SEQ ID NO: 867720 - protein, 166 aa, Homo sapiens
VLWRQTASEPLENGRVLVQGSTFTYQDILAGLVGYVPSVPGMVVDEFQFSLTDGLHVDTGRMKIYTELPASDTPHLAINQGLQLSAGSVARITEQHLKVTDIDSDDHQVMYIMKEDPGAGRLQMMKHGNLEQISIKGPIRSFTQADISQGQPVLFCLPGFRGLHLH

SEQ ID NO: 867721 - protein, 144 aa, Homo sapiens
YRCKRTVDCKSAQTNYNNEDTDIKEKAEPPQAMNALMRLNQLKPGLQYKLVSQTGPVHAPIFTMSVEVDGNSFEASGPSKKTAKLHVAVKVLQDMGLPTGAEGRDSSKGEDSAEETEAKPAVVAPAPVVEAVSTPSAARTTTFG

SEQ ID NO: 867722 - protein, 589 aa, Homo sapiens
MRIFVNDDRHVMAKHSSVYPTQEELEAVQNMVSHTERALKAVSDWIDEQEKGSSEQAESDNMDVPPEDDSKEGAGEQKTEHMTRTLRGVMRVGLVAKGLLLKGDLDLELVLLCKEKPTTALLDKVADNLAIQLAAVTEDKYEILQSVDDAAIVIKNTKEPPLSLTIHLTSPVVREEMEKVLAGETLSVNDPPDVLDRQKCLAALASLRHAKWFQARANGLKSCVIVIRVLRDLCTRVPTWGPLRGWPLELLCEKSIGTANRPMGAGEALRRVLECLASGIVMPDGSGIYDPCEKEATDAIGHLDRQQREDITQSAQHALRLAAFGQLHKVLGMDPLPSKMPKKPKNENPVDYTVQIPPSTTYAITPMKRPMEEDGEEKSPSKKKKKIQKKEEKAEPPQAMNALMRLNQLKPGLQYKLVSQTGPVHAPIFTMSVEVDGNSFEASGPSKKTAKLHVAVKVLQDMGLPTGAEGRDSSKGEDSAEETEAKPAVVAPAPVVEAVSTPSAAFPSDATAENAAGADPDKARQEPSHGAEREEAWAQVRAHLRDRGQPRQALRHGGRSGWTEVPRCWFQQKGGEGLRCSCCPRKAFP

SEQ ID NO: 867723 - protein, 589 aa, Homo sapiens; identical to SEQ ID NO: 867722

SEQ ID NO: 867724 - protein, 589 aa, Homo sapiens; identical to SEQ ID NO: 867722

SEQ ID NO: 867725 - protein, 589 aa, Homo sapiens; identical to SEQ ID NO: 867722

SEQ ID NO: 867726 - protein, 589 aa, Homo sapiens; identical to SEQ ID NO: 867722

SEQ ID NO: 867727 - protein, 589 aa, Homo sapiens; identical to SEQ ID NO: 867722

SEQ ID NO: 867728 - protein, 438 aa, Homo sapiens
MRIFVNDDRHVMAKHSSVYPTQEELEAVQNMVSHTERALKAVSDWIDEQEKGSSEQAESDNMDVPPEDDSKEGAGEQKTEHMTRTLRGVMRVGLVAKGLLLKGDLDLELVLLCKEKPTTALLDKVADNLAIQLAAVTEDKYEILQSVDDAAIVIKNTKEPPLSLTIHLTSPVVREEMEKVLAGETLSVNDPPDVLDRQKCLAALASLRHAKWFQARANGLKSCVIVIRVLRDLCTRVPTWGPLRGWPLELLCEKSIGTANRPMGAGEALRRVLECLASGIVMPDGSGIYDPCEKEATDAIGHLDRQQREDITQSAQHALRLAAFGQLHKVLGMDPLPSKMPKKPKNENPVDYTVQIPPSTTYAITPMKRPMEEDGEEKSPSKKKKKIQKKGTGRARWLTPVIPALWEAEAGESLELRSFETISLGNMAKPRLYKKYKN

SEQ ID NO: 867729 - protein, 589 aa, Homo sapiens; identical to SEQ ID NO: 867722

SEQ ID NO: 867730 - protein, 221 aa, Homo sapiens [sequence omitted]

SEQ ID NO: 867731 - protein, 589 aa, Homo sapiens; identical to SEQ ID NO: 867722

SEQ ID NO: 867732 - protein, 589 aa, Homo sapiens; identical to SEQ ID NO: 867722

SEQ ID NO: 867733 - protein, 589 aa, Homo sapiens; identical to SEQ ID NO: 867722

SEQ ID NO: 867734 - protein, 589 aa, Homo sapiens; identical to SEQ ID NO: 867722

SEQ ID NO: 867735 - protein, 589 aa, Homo sapiens; identical to SEQ ID NO: 867722

SEQ ID NO: 867736 - protein, 393 aa, Homo sapiens
  misc_feature (5)..(5): Xaa can be any naturally occurring amino acid
  misc_feature (7)..(7): Xaa can be any naturally occurring amino acid
  misc_feature (17)..(17): Xaa can be any naturally occurring amino acid
MGLFXWXPSDNAKWFQXKARANGLKSCVIVIRVLRDLCTRVPTWGPLRGWPLELLCEKSIGTANRPMGAGEALRRVLECLASGIVMPDGSGIYDPCEKEATDAIGHLDRQQREDITQSAQHALRLAAFGQLHKVLGMDPLPSKMPKKPKNENPVDYTVQIPPSTTYAITPMKRPMEEDGEEKSPSKKKKKIQKKEEKAEPPQAMNALMRLNQLKPGLQYKLVSQTGPVHAPIFTMSVEVDGNSFEASGPSKKTAKLHVAVKVLQDMGLPTGAEGRDSSKGEDSAEETEAKPAVVAPAPVVEAVSTPSAAFPSDATAENAAGADPDKARQEPSHGAEREEAWAQVRAHLRDRGQPRQALRHGGRSGWTEVPRCWFQQKGGEGLRCSCCPRKAFP

SEQ ID NO: 867737 - protein, 386 aa, Homo sapiens
THTHTHSCTHTLLPTHSRRHTCTHTLLTYPRIHAYTQTHTHAHTHSYAHSVTHTFLNRPMGAGEALRRVLECLASGIVMPDGSGIYDPCEKEATDAIGHLDRQQREDITQSAQHALRLAAFGQLHKVLGMDPLPSKMPKKPKNENPVDYTVQIPPSTTYAITPMKRPMEEDGEEKSPSKKKKKIQKKEEKAEPPQAMNALMRLNQLKPGLQYKLVSQTGPVHAPIFTMSVEVDGNSFEASGPSKKTAKLHVAVKVLQDMGLPTGAEGRDSSKGEDSAEETEAKPAVVAPAPVVEAVSTPSAAFPSDATAENAAGADPDKARQEPSHGAEREEAWAQVRAHLRDRGQPRQALRHGGRSGWTEVPRCWFQQKGGEGLRCSCCPRKAFP

SEQ ID NO: 867738 - protein, 315 aa, Homo sapiens
LQRVHRRPADGSGIYDPCEKEATDAIGHLDRQQREDITQSAQHALRLAAFGQLHKVLGMDPLPSKMPKKPKNENPVDYTVQIPPSTTYAITPMKRPMEEDGEEKSPSKKKKKIQKKEEKAEPPQAMNALMRLNQLKPGLQYKLVSQTGPVHAPIFTMSVEVDGNSFEASGPSKKTAKLHVAVKVLQDMGLPTGAEGRDSSKGEDSAEETEAKPAVVAPAPVVEAVSTPSAAFPSDATAENAAGADPDKARQEPSHGAEREEAWAQVRAHLRDRGQPRQALRHGGRSGWTEVPRCWFQQKGGEGLRCSCCPRKAFP

SEQ ID NO: 867739 - protein, 260 aa, Homo sapiens
MSRMVVLQLEATGEVQAGLSLCGCPTHCVTPQRQPWGLGLAELSWRPAIVLIQSHLAILSVEEKAEPPQAMNALMRLNQLKPGLQYKLVSQTGPVHAPIFTMSVEVDGNSFEASGPSKKTAKLHVAVKVLQDMGLPTGAEGRDSSKGEDSAEETEAKPAVVAPAPVVEAVSTPSAAFPSDATAENAAGADPDKARQEPSHGAEREEAWAQVRAHLRDRGQPRQALRHGGRSGWTEVPRCWFQQKGGEGLRCSCCPRKAFP

SEQ ID NO: 867740 - protein, 193 aa, Homo sapiens
MPLPRTQQGPILTKHGKNPVMELNEKRRGLKYELISETGGSHDKRFVMEVEVDGQKFQGAGSNKKVAKAYAALAALEKLFPDTPLALDANKKKRAPVPVRGGPKFAAKPHNPGFGMGGPMHNEVPPPPNLRGRGRGGSIRGRGRGRGFGGANHGGYMNAGAGYGSYGYGGNSATAGYSDFFTDCYGYHDFGSS

SEQ ID NO: 867741 - protein, 333 aa, Homo sapiens
MRIFVNDDRHVMAKHSSVYPTQEELEAVQNMVSHTERALKAVSDWIDEQEKGSSEQAESDNMDVPPEDDSKEGAGEQKTEHMTRTLRGVMRVGLVAKGLLLKGDLDLELVLLCKEKPTTALLDKVADNLAIQLAAVTEDKYEILQSVDDAAIVIKNTKEPPLSLTIHLTSPVVREEMEKVLAGETLSVNDPPDVLDRQKCLAALASLRHAKWFQARANGLKSCVIVIRVLRDLCTRVPTWGPLRGWPLELLCEKSIGTANRPMGAGEALRRVLECLASGIVMPDGSGIYDPCEKEATDAIGHLDRQQREDITQSAQHALRLSAFGYTSDPTMH

SEQ ID NO: 867742 - protein, 221 aa, Homo sapiens [sequence omitted]

SEQ ID NO: 867743 - protein, 224 aa, Homo sapiens
YDLEDPYYYESKSTTVVVEAEAAGTATAQAGHPTTQVTGGYGGGSGGGSSYQGKQGGYSQSNYNSPGSGQNYRGPPSSYQSHQGQQQSYNQSPYSNYGPPQGKQKGYNHGQGSYSYSNSYNSPGGGGGSDYNYESKFNYSGSGGRSGGNSYGSGGASYNPGSHGGYGGGSGGGSSYQGKQGGYSQSNYNSPGSGQNYSGPPSSYQSSQGGYGRNADHSMNYQYR

SEQ ID NO: 867744 - protein, 78 aa, Homo sapiens
HGQGSYSYSNSYNSPGGGGGSDYNYESKFSELASRAPRPGQGPGPSSAAHGVAEARHCPDLWLRALGGGQVVLAAGGC

SEQ ID NO: 867745 - protein, 103 aa, Homo sapiens
RHAGRTLKMWCSLTIQMCYSVLDCFGIRCRLTTFTLRSHLPLALSTWEFDKTVALKVSSTFHRGLHHFPLSSSLNVLKHECGSCFSMEPFSGCGEVSLVIPWF

SEQ ID NO: 867746 - protein, 589 aa, Homo sapiens; identical to SEQ ID NO: 867722

SEQ ID NO: 867747 - protein, 589 aa, Homo sapiens; identical to SEQ ID NO: 867722

SEQ ID NO: 867748 - protein, 589 aa, Homo sapiens; identical to SEQ ID NO: 867722

SEQ ID NO: 867749 - protein, 589 aa, Homo sapiens; identical to SEQ ID NO: 867722

SEQ ID NO: 867750 - protein, 589 aa, Homo sapiens; identical to SEQ ID NO: 867722

SEQ ID NO: 867751 - protein, 295 aa, Homo sapiens [sequence omitted]

SEQ ID NO: 867752 - protein, 221 aa, Homo sapiens [sequence omitted]

SEQ ID NO: 867753 - protein, 589 aa, Homo sapiens; identical to SEQ ID NO: 867722

SEQ ID NO: 867754 - protein, 339 aa, Homo sapiens
MRIFVNDDRHVMAKHSSVYPTQEELEAVQNMVSHTERALKAVSDWIDEQEKGSSEQAESDNMDVPPEDDSKEGAGEQKTEHMTRTLRGVMRVGLVAKGLLLKGDLDLELVLLCKEKPTTALLDKVADNLAIQLALAILSVEEKAEPPQAMNALMRLNQLKPGLQYKLVSQTGPVHAPIFTMSVEVDGNSFEASGPSKKTAKLHVAVKVLQDMGLPTGAEGRDSSKGEDSAEETEAKPAVVAPAPVVEAVSTPSAAFPSDATAENAAGADPDKARQEPSHGAEREEAWAQVRAHLRDRGQPRQALRHGGRSGWTEVPRCWFQQKGGEGLRCSCCPRKAFP

SEQ ID NO: 867755 - protein, 589 aa, Homo sapiens; identical to SEQ ID NO: 867722

SEQ ID NO: 867756 - protein, 438 aa, Homo sapiens; identical to SEQ ID NO: 867728

SEQ ID NO: 867757 - protein, 408 aa, Homo sapiens
MRIFVNDDRHVMAKHSSVYPTQEELEAVQNMVSHTERALKAVSDWIDEQEKGSSEQAESDNMDVPPEDDSKEGAGEQKTEHMTRTLRGVMRVGLVAKGLLLKGDLDLELVLLCKEKPTTALLDKVADNLAIQLAAVTEDKYEILQSVDDAAIVIKNTKEPPLSLTIHLTSPVVREEMEKVLAGETLSVNDPPDVLDRQKCLAALASLRHAKWFQARANGLKSCVIVIRVLRDLCTRVPTWGPLRGWPLELLCEKSIGTANRPMGAGEALRRVLECLASGIVMPDGSGIYDPCEKEATDAIGHLDRQQREDITQSAQHALRLAAFGQLHKVLGMDPLPSKMPKKPKNENPVDYTVQIPPSTTYAITPMKRPMEEDGEEKSPSKKKKKIQKKEEEEERRKEEERRKEKEE

SEQ ID NO: 867758 - protein, 257 aa, Homo sapiens
SWNWAHAMPKKPKNENPVDYTVQIPPSTTYAITPMKRPMEEDGEEKSPSKKKKKIQKKEEKAEPPQAMNALMRLNQLKPGLQYKLVSQTGPVHAPIFTMSVEVDGNSFEASGPSKKTAKLHVAVKVLQDMGLPTGAEGRDSSKGEDSAEETEAKPAVVAPAPVVEAVSTPSAAFPSDATAENAAGADPDKARQEPSHGAEREEAWAQVRAHLRDRGQPRQALRHGGRSGWTEVPRCWFQQKGGEGLRCSCCPRKAFP

SEQ ID NO: 867759 - protein, 436 aa, Homo sapiens
MRIFVNDDRHVMAKHSSVYPTQEELEAVQNMVSHTERALKAVSDWIDEQEKGSSEQAESDNMDVPPEDDSKEGAGEQKTEHMTRTLRGVMRVGLVAKGLLLKGDLDLELVLLCKEKPTTALLDKVADNLAIQLAAVTEDKYEILQSVDDAAIVIKNTKEPPLSLTIHLTSPVVREEMEKVLAGETLSVNDPPDVLDRQKCLAALASLRHAKWFQARANGLKSCVIVIRVLRDLCTRVPTWGPLRGWPLELLCEKSIGTANRPMGAGEALRRVLECLASGIVMPDGSGIYDPCEKEATDAIGHLDRQQREDITQSAQHALRLAAFGQLHKVLGMDPLPSKMPKKPKNENPVDYTVQIPPSTTYAITPMKRPMEEDGEEKEEDHQKRVSSWKAEGPRTTVERLTMPVSSLQRRAIYNCTRKGPTLCELRGYLFLGRRT

SEQ ID NO: 867760 - protein, 96 aa, Homo sapiens
VTERGRKNVAEPHNPGFGMGGPMHNEVPPPPNLRGRGRGGSIRGRGRGRGFGGANHGGYMNAGAGYGSYGYGGNSATAGYSDFFTDCYGYHDFGSS

SEQ ID NO: 867761 - protein, 374 aa, Homo sapiens
VNRGWGGSLKRRKKGVERLKYELISETGGSHDKRFVMEVEVDGQKFQGAGSNKKVAKAYAALAALEKLFPDTPLALDANKKKRAPVPVRGGPKFAAKPHNPGFGMGGPMHNEVPPPPNLRGRGRGGSIRGRGRGRGFGGANHGGYMNAGAGYGSYGYGGNSATAGYSQFYSNGGHSGNASGGGGGGGGGSSGYGSYYQGDNYNSPVPPKHAGKKQPHGGQQKPSYGSGYQSHQGQQQSYNQSPYSNYGPPQGKQKGYNHGQGSYSYSNSYNSPGGGGGSDYNYESKFNYSGSGGRSGGNSYGSGGASYNPGSHGGYGGGSGGGSSYQGKQGGYSQSNYNSPGSGQNYSGPPSSYQSSQGGYGRNADHSMNYQYR

SEQ ID NO: 867762 - protein, 493 aa, Homo sapiens
MILNSLSLCYHNKLILAPMVRVGTLPMRLLALDYGADIVYCEELIDLKMIQCKRVVNEVLSTVDFVAPDDRVVFRTCEREQNRVVFQMGTSDAERALAVARLVENDVAGIDVNMGCPKQYSTKGGMGAALLSDPDKIEKILSTLVKGTRRPVTCKIRILPSLEDTLSLVKRIERTGIAAIAVHGRKREERPQHPVSCEVIKAIADTLSIPVIANGGSHDHIQQYSDIEDFRQATAASSVMVARAAMWNPSIFLKEGLRPLEEVMQKYIRYAVQYDNHYTNTKYCLCQMLREQLESPQGRLLHAAQSSREICEAFGLGAFYEETTQELDAQQARLSAKTSEQTGEPAEDTSGVIKMAVKFDRRAYPAQITPKMCLLEWCRREKLAQPVYETVQRPLDRLFSSIVTVAEQKYQSTLWDKSKKLAEQAAAIVCLRSQGLPEGRLGEESPSLHKRKREAPDQDPGGPRAQELAQPGDLCKKPFVALGSGEESPLEGW

SEQ ID NO: 867763 - protein, 475 aa, Homo sapiens
MVRVGTLPMRLLALDYGADIVYCEELIDLKMIQCKRVVNEVLSTVDFVAPDDRVVFRTCEREQNRVVFQMGTSDAERALAVARLVENDVAGIDVNMGCPKQYSTKGGMGAALLSDPDKIEKILSTLVKGTRRPVTCKIRILPSLEDTLSLVKRIERTGIAAIAVHGRKREERPQHPVSCEVIKAIADTLSIPVIANGGSHDHIQQYSDIEDFRQATAASSVMVARAAMWNPSIFLKEGLRPLEEVMQKYIRYAVQYDNHYTNTKYCLCQMLREQLESPQGRLLHAAQSSREICEAFGLGAFYEETTQELDAQQARLSAKTSEQTGEPAEDTSGVIKMAVKFDRRAYPAQITPKMCLLEWCRREKLAQPVYETVQRPLDRLFSSIVTVAEQKYQSTLWDKSKKLAEQAAAIVCLRSQGLPEGRLGEESPSLHKRKREAPDQDPGGPRAQELAQPGDLCKKPFVALGSGEESPLEGW

SEQ ID NO: 867764 - protein, 475 aa, Homo sapiens; identical to SEQ ID NO: 867763

SEQ ID NO: 867765 - protein, 475 aa, Homo sapiens; identical to SEQ ID NO: 867763

SEQ ID NO: 867766 - protein, 190 aa, Homo sapiens
MVRVGTLPMRLLALDYGADIVYCEELIDLKMIQCKRVVNEVLSTVDFVAPDDRVVFRTCEREQNRVVFQMGTSDAERALAVARLVENDVAGIDVNMGCPKQYSTKGGMGAALLSDPDKIEKILSTLVKGTRRPVTCKIRILPSLEDTLSLVKRIERTGIAAIAVHGRSGRRTKNPDRWEVSKHGEHTILN

SEQ ID NO: 867767 - protein, 475 aa, Homo sapiens; identical to SEQ ID NO: 867763

SEQ ID NO: 867768 - protein, 406 aa, Homo sapiens
MGTSDAERALAVARLVENDVAGIDVNMGCPKQYSTKGGMGAALLSDPDKIEKILSTLVKGTRRPVTCKIRILPSLEDTLSLVKRIERTGIAAIAVHGRKREERPQHPVSCEVIKAIADTLSIPVIANGGSHDHIQQYSDIEDFRQATAASSVMVARAAMWNPSIFLKEGLRPLEEVMQKYIRYAVQYDNHYTNTKYCLCQMLREQLESPQGRLLHAAQSSREICEAFGLGAFYEETTQELDAQQARLSAKTSEQTGEPAEDTSGVIKMAVKFDRRAYPAQITPKMCLLEWCRREKLAQPVYETVQRPLDRLFSSIVTVAEQKYQSTLWDKSKKLAEQAAAIVCLRSQGLPEGRLGEESPSLHKRKREAPDQDPGGPRAQELAQPGDLCKKPFVALGSGEESPLEGW

SEQ ID NO: 867769 - protein, 355 aa, Homo sapiens
MVARPGLCGASRSLGRQRAGARLEPAPGTASGAWTARPGSRPAMEPGSVENLSIVYRSRDFLVVNKHWDVRIDSKAWRETLTLQKQLRYRFPELADPDTCYGFRFCHQLDFSTSGALCVALNKAAAGSAYRCFKERRVTKAYLALLRGHIQESRVTISHAIGRNSTEGRAHTMCIEGSQGCENPKPSLTDLVVLEHGLYAGDPVSKVLLKPLTGRTHQLRVHCSALGHPVVGDLTYGEVSGREDRPFRMMLHAFYLRIPTDTECVEVCTPDPFLPSLDACWSPHTLLQSLDQLVQALRATPDPDPEDRGPRPGSPSALLPGPGRPPPPPTKPPETEAQRGPCLQWLSEWTLEPDS

SEQ ID NO: 867770 - protein, 362 aa, Homo sapiens
RAAVQGGSAARRPERGASRSLGRQRAGARLEPAPGTASGAWTARPGSRPAMEPGSVENLSIVYRSRDFLVVNKHWDVRIDSKAWRETLTLQKQLRYRFPELADPDTCYGFRFCHQLDFSTSGALCVALNKAAAGSAYRCFKERRVTKAYLALLRGHIQESRVTISHAIGRNSTEGRAHTMCIEGSQGCENPKPSLTDLVVLEHGLYAGDPVSKVLLKPLTGRTHQLRVHCSALGHPVVGDLTYGEVSGREDRPFRMMLHAFYLRIPTDTECVEVCTPDPFLPSLDACWSPHTLLQSLDQLVQALRATPDPDPEDRGPRPGSPSALLPGPGRPPPPPTKPPETEAQRGPCLQWLSEWTLEPDS

SEQ ID NO: 867771 - protein, 355 aa, Homo sapiens; identical to SEQ ID NO: 867769

SEQ ID NO: 867772 - protein, 299 aa, Homo sapiens
RAAVQGGSAARRPERGASRSLGRQRAGARLEPAPGTASGAWTARPGSRFCHQLDFSTSGALCVALNKAAAGSAYRCFKERRVTKAYLALLRGHIQESRVTISHAIGRNSTEGRAHTMCIEGSQGCENPKPSLTDLVVLEHGLYAGDPVSKVLLKPLTGRTHQLRVHCSALGHPVVGDLTYGEVSGREDRPFRMMLHAFYLRIPTDTECVEVCTPDPFLPSLDACWSPHTLLQSLDQLVQALRATPDPDPEDRGPRPGSPSALLPGPGRPPPPPTKPPETEAQRGPCLQWLSEWTLEPDS

SEQ ID NO: 867773 - protein, 180 aa, Homo sapiens
RSGAGRKRCQASGAGASRSLGRQRAGARLEPAPGTASGAWTARPGSRPAMEPGSVENLSIVYRSRDFLVVNKHWDVRIDSKAWRETLTLQKQLRYRFPELADPDTCYGFRFCHQLDFSTSGALCVALNKAAAGSAYRCFKERRVTKAYLALVVRTQSQASQISWFWNTGCTQAILSPKCC

SEQ ID NO: 867774 - protein, 504 aa, Homo sapiens
MVARPGLCGASRSLGRQRAGARLEPAPGTASGAWTARPGSRPAMEPGSVENLSIVYRSRDFLVVNKHWDVRIDSKAWRETLTLQKQLRYRFPELADPDTCYGFRFCHQLDFSTSGALCVALNKAAAGSAYRCFKERRVTKAYLALLRGHIQESRVTISHAIGRNSTEGRAHTMCIEGSQGCENPKPSLTDLVVLEHGLYAGDPVSKVLLKPLTGVSGVGGVLVVTEGKLRHRATKLMLGHPEHQGRAGNKHSCVLNSTPCSLSASHLTQGPCWLLTDSLGVWLARFSRTEHHPGPVLTSGDLNTIFCPKYCHPHSWQGTGRVPPQEAASRLQRGHDGRWVLVREIGVDRPRSQLIRHRPHPAGRTHQLRVHCSALGHPVVGDLTYGEVSGREDRPFRMMLHAFYLRIPTDTECVEVCTPDPFLPSLDACWSPHTLLQSLDQLVQALRATPDPDPEDRGPRPGSPSALLPGPGRPPPPPTKPPETEAQRGPCLQWLSEWTLEPDS

SEQ ID NO: 867775 - protein, 194 aa, Homo sapiens
RAAGRVGRPRVRCIEGSQGCENPKPSLTDLVVLEHGLYAGDPVSKVLLKPLTGRTHQLRVHCSALGHPVVGDLTYGEVSGREDRPFRMMLHAFYLRIPTDTECVEVCTPDPFLPSLDACWSPHTLLQSLDQLVQALRATPDPDPEDRGPRPGSPSALLPGPGRPPPPPTKPPETEAQRGPCLQWLSEWTLEPDS

SEQ ID NO: 867776 - protein, 355 aa, Homo sapiens; identical to SEQ ID NO: 867769

SEQ ID NO: 867777 - protein, 322 aa, Homo sapiens
MVARPGLCGASRSLGRQRAGARLEPAPGTASGAWTARPGSSKAWRETLTLQKQLRYRFPELADPDTCYGFRFCHQLDFSTSGALCVALNKAAAGSAYRCFKERRVTKAYLALLRGHIQESRVTISHAIGRNSTEGRAHTMCIEGSQGCENPKPSLTDLVVLEHGLYAGDPVSKVLLKPLTGRTHQLRVHCSALGHPVVGDLTYGEVSGREDRPFRMMLHAFYLRIPTDTECVEVCTPDPFLPSLDACWSPHTLLQSLDQLVQALRATPDPDPEDRGPRPGSPSALLPGPGRPPPPPTKPPETEAQRGPCLQWLSEWTLEPDS

SEQ ID NO: 867778 - protein, 381 aa, Homo sapiens
MVARPGLCGASRSLGRQRAGARLEPAPGTASGAWTARPGSRPAMEPGSVENLSIVYRSRDFLVVNKHWDVRIDSKAWRETLTLQKQLRYRFPELADPDTCYGFRKGGRPEPHGGVCGGKWLRLWTLSHSRFCHQLDFSTSGALCVALNKAAAGSAYRCFKERRVTKAYLALLRGHIQESRVTISHAIGRNSTEGRAHTMCIEGSQGCENPKPSLTDLVVLEHGLYAGDPVSKVLLKPLTGRTHQLRVHCSALGHPVVGDLTYGEVSGREDRPFRMMLHAFYLRIPTDTECVEVCTPDPFLPSLDACWSPHTLLQSLDQLVQALRATPDPDPEDRGPRPGSPSALLPGPGRPPPPPTKPPETEAQRGPCLQWLSEWTLEPDS

SEQ ID NO: 867779 - protein, 324 aa, Homo sapiens
GQYYAVYGSEAWVVGASRSLGRQRAGARLEPAPGTASGAWTARPGSRPAMEPGSVENLSIVYRSRDFLVVNKHWDVRIDSKAWRETLTLQKQLRYRFPELADPDTCYGFRFCHQLDFSTSGALCVALNKAAAGSAYRCFKERRVTKAYLALLRGHIQESRVTISHAIGRNSTEGRAHTMCIEGSQGCENPKPSLTDLVVLEHGLYAGDPVSKVLLKPLTGRTHQLRVHCSALGHPVVGDLTYGEVSGREDRPFRMMLHAFYLRIQAAPPHSCLGPAGLLHPQPSPLRLRHSGAPACSGCRSGRWNRTAESRGAGAGGVSCTAGL

SEQ ID NO: 867780 - protein, 253 aa, Homo sapiens
TDPRRDDPAAAMALLRGVFVVAAKRTPFGAYGGLLKDFTATDLSEFAAKAALSAGKVSPETVDSVIMGNVLQSSSDAIYLARHVGLRVGIPKETPALTINRLCGSGFQSIVNGCQEICVKEAEVVLCGGTESMSQAPYCVRNVRFGTKLGSDIKLEDSLWVSLTDQHVQLPMAMTAENLAVKHKISREECDKYALQSQQRWKAANDAGYFNDEMAPIEVKTKKGKQTMQVDEHARPQTTLEQLQKLPPVFKKD

SEQ ID NO: 867781 - protein, 255 aa, Homo sapiens
WKRRKSKNEDVRKESALKGVFVVAAKRTPFGAYGGLLKDFTATDLSEFAAKAALSAGKVSPETVDSVIMGNVLQSSSDAIYLARHVGLRVGIPKETPALTINRLCGSGFQSIVNGCQEICVKEAEVVLCGGTESMSQAPYCVRNVRFGTKLGSDIKLEDSLWVSLTDQHVQLPMAMTAENLAVKHKISREECDKYALQSQQRWKAANDAGYFNDEMAPIEVKTKKGKQTMQVDEHARPQTTLEQLQKLPPVFKKD

SEQ ID NO: 867782 - protein, 365 aa, Homo sapiens
RVAARGASQPARAPASLPPRVPRCPPRAGAMRLGPRTAALGLLLLCAAAAGAGKAEELHYPLGERRSDYDREALLGVQEDVDEYVKLGHEEQQKRLQAIIKKIDLDSDGFLTESELSSWIQMSFKHYAMQEAKQQFVEYDKNSDDTVTWDEYNIQMYDRVIDFDENTALDDAEEESFRKEFAICKKQSFCFGFFDLNLHLKDKKRFEKANQDSGPGLSLEEFIAFEHPEEVDYMTEFVIQEALEEHDKNGDGFVSLEEFLGDYRWDPTANEDPEWILVEKDRFVNDYDKDNDGRLDPQELLPWVVPNNQGIAQEEALHLIDEMDLNGDKKLSEEEILENPDLFLTSEATDYGRQLHDDYFYHDEL

SEQ ID NO: 867783 - protein, 117 aa, Homo sapiens
PTQFSDPSPNKLGGVLALLLSILILAIIAGHRYLVTGDYDKDNDGRLDPQELLPWVVPNNQGIAQEEALHLIDEMDLNGDKKLSEEEILENPDLFLTSEATDYGRQLHDDYFYHDEL

SEQ ID NO: 867784 - protein, 110 aa, Homo sapiens
MVTKSSLKKRFWKTRTCFSPVKPQIMADSSMMTISIMMSFNLRACLSRVLAPFIICYQLYFCDKILMLYFTLLSLNHSQNYLNVDYNFGLLGKKNKNLIFISKRIEATKY

SEQ ID NO: 867785 - protein, 110 aa, Homo sapiens; identical to SEQ ID NO: 867784

SEQ ID NO: 867786 - protein, 347 aa, Homo sapiens
RVAARGASQPARAPASLPPRVPRCPPRAGAMRLGPRTAALGLLLLCAAAAGAGKAEELHYPLGERRSDYDREALLGVQEDVDEYVKLGHEEQQKRLQAIIKKIDLDSDGFLTESELSSWIQMSFKHYAMQEAKQQFVEYDKNSDDTVTWDEYNIQMYDRVIDFDENTALDDAEEESFRKLHLKDKKRFEKANQDSGPGLSLEEFIAFEHPEEVDYMTEFVIQEALEEHDKNGDGFVSLEEFLGDYRWDPTANEDPEWILVEKDRFVNDYDKDNDGRLDPQELLPWVVPNNQGIAQEEALHLIDEMDLNGDKKLSEEEILENPDLFLTSEATDYGRQLHDDYFYHDEL

SEQ ID NO: 867787 - protein, 352 aa, Homo sapiens
  misc_feature (121)..(121): Xaa can be any naturally occurring amino acid
  misc_feature (128)..(128): Xaa can be any naturally occurring amino acid
  misc_feature (143)..(143): Xaa can be any naturally occurring amino acid
  misc_feature (149)..(149): Xaa can be any naturally occurring amino acid
  misc_feature (151)..(151): Xaa can be any naturally occurring amino acid
  misc_feature (154)..(154): Xaa can be any naturally occurring amino acid
  misc_feature (168)..(169): Xaa can be any naturally occurring amino acid
  misc_feature (176)..(176): Xaa can be any naturally occurring amino acid
  misc_feature (182)..(182): Xaa can be any naturally occurring amino acid
RVAARGASQPARAPASLPPRVPRCPPRAGAMRLGPRTAALGLLLLCAAAAGAGKAEELHYPLGERRSDYDREALLGVQEDVDEYVKLGHEEQQKRLQAIIKKIDLDSDGFLTESELSSWKXKTLKQKXKQKTKKKFIKKRKKXRRKCEXRXKKXNKRKNKKKKKKKKXXQEKTKKXTIKKQXKKLHLKDKKRFEKANQDSGPGLSLEEFIAFEHPEEVDYMTEFVIQEALEEHDKNGDGFVSLEEFLGDYRWDPTANEDPEWILVEKDRFVNDYDKDNDGRLDPQELLPWVVPNNQGIAQEEALHLIDEMDLNGDKKLSEEEILENPDLFLTSEATDYGRQLHDDYFYHDEL

SEQ ID NO: 867788 - protein, 347 aa, Homo sapiens; identical to SEQ ID NO: 867786

SEQ ID NO: 867789 - protein, 110 aa, Homo sapiens; identical to SEQ ID NO: 867784

SEQ ID NO: 867790 - protein, 128 aa, Homo sapiens [sequence omitted]

SEQ ID NO: 867791 - protein, 85 aa, Homo sapiens
EVLKCQQGVSSLAFALAFLQRMDMKPLVVLGLPAPTAPSGCLSFWEAKAQLAKSCKVLVDALRHNAAAAVPFFGGGSVLRAAEPA

SEQ ID NO: 867792 - protein, 108 aa, Homo sapiens
SLQTPVATASWRPCQQTWPRNTEDQQRGDYFGILKEARVTVFPFNILDNPMYWGSTANYLGWAIMHASPTGLLLTVLVALTYIMALLYEEPFTAEIYRQKASGSHKRS

SEQ ID NO: 867793 - protein, 199 aa, Homo sapiens [sequence omitted]

SEQ ID NO: 867794 - protein, 185 aa, Homo sapiens
CAPAHIGIAWSLPGLPLGLLRGEAPVCSGVAGTARLRSCILASECGCRSGIFLNLDFTQAMLSQPRMESLDTPAAYSLGLALLGLGVVLVLSSFFALGFAGTFLGDYFGILKEARVTVFPFNILDNPMYWGSTANYLGWAIMHASPTGLLLTVLVALTYIMALLYEEPFTAEIYRQKASGSHKRS

SEQ ID NO: 867795 - protein, 138 aa, Homo sapiens
THASADAWAFTQAMLSQPRMESLDTPAAYSLGLALLGLGVVLVLSSFFALGFAGTFLGDYFGILKEARVTVFPFNILDNPMYWGSTANYLGWAIMHASPTGLLLTVLVALTYIMALLYEEPFTAEIYRQKASGSHKRS

SEQ ID NO: 867796 - protein, 117 aa, Homo sapiens
MLVRAWCGIGRGALLGLGVVLVLSSFFALGFAGTFLGDYFGILKEARVTVFPFNILDNPMYWGSTANYLGWAIMHASPTGLLLTVLVALTYIMALLYEEPFTAEIYRQKASGSHKRS

SEQ ID NO: 867797 - protein, 236 aa, Homo sapiens [sequence omitted]

SEQ ID NO: 867798 - protein, 236 aa, Homo sapiens [sequence omitted]

SEQ ID NO: 867799 - protein, 200 aa, Homo sapiens
MLKGNTVTLAPLDPSFVAAVITITFNPLYWNVVARWEHKTRKLSRAFGSPYLACYSLSITILLLNFLRSHCFTQAMLSQPRMESLDTPAAYSLGLALLGLGVVLVLSSFFALGFAGTFLGDYFGILKEARVTVFPFNILDNPMYWGSTANYLGWAIMHASPTGLLLTVLVALTYIMALLYEEPFTAEIYRQKASGSHKRS

SEQ ID NO: 867800 - protein, 186 aa, Homo sapiens
MIECEKSATGGRDPRTVECAQMGRFYRKLSRAFGSPYLACYSLSITILLLNFLRSHCFTQAMLSQPRMESLDTPAAYSLGLALLGLGVVLVLSSFFALGFAGTFLGDYFGILKEARVTVFPFNILDNPMYWGSTANYLGWAIMHASPTGLLLTVLVALTYIMALLYEEPFTAEIYRQKASGSHKRS

SEQ ID NO: 867801 - protein, 131 aa, Homo sapiens
MCFTQAMLSQPRMESLDTPAAYSLGLALLGLGVVLVLSSFFALGFAGTFLGDYFGILKEARVTVFPFNILDNPMYWGSTANYLGWAIMHASPTGLLLTVLVALTYIMALLYEEPFTAEIYRQKASGSHKRS

SEQ ID NO: 867802 - protein, 196 aa, Homo sapiens
MTRLLGYVDPLDPSFVAAVITITFNPLYWNVVARWEHKTRKLSRAFGSPYLACYSLSITILLLNFLRSHCFTQAMLSQPRMESLDTPAAYSLGLALLGLGVVLVLSSFFALGFAGTFLGDYFGILKEARVTVFPFNILDNPMYWGSTANYLGWAIISPAPAGAVGSEARQPHGPAPDGAGGPHLHNGSPIRRALHR

SEQ ID NO: 867803 - protein, 97 aa, Homo sapiens
DKWIRTENMGTLVLAQKPDSGRGSAAWARSAQVAQRRPEGQGHGRKGQPGQVGRGPERPWLQPGLTCLCPFRHASPTGLLLTVLVALTYIMALLYEE

SEQ ID NO: 867804 - protein, 199 aa, Homo sapiens [sequence omitted]

SEQ ID NO: 867805 - protein, 125 aa, Homo sapiens
MLSQPRMESLDTPAAYSLGLALLGLGVVLVLSSFFALGFAGTFLGDYFGILKEARVTVFPFNILDNPMYWGSTANYLGWAIMHASPTGLLLTVLVALTYIMALLYEEPFTAEIYRQKASGSHKRS

SEQ ID NO: 867806 - protein, 67 aa, Homo sapiens
VWRGQELVTSKEPLAMLHPALGLLHASPTGLLLTVLVALTYIMALLYEEPFTAEIYRQKASGSHKRS

SEQ ID NO: 867807 - protein, 161 aa, Homo sapiens
PVITPRRVRVPPRPLLVARWEHKTRKLSRAFGSPYLACYSLSITILLLNFLRSHCFTQAMLSQPRMESLDTPAAYSLGLALLGLGVVLVLSSFFALGFAGTFLGDYFGILKEARVTVFPFNILDNPMYWGSTANYLGWAIITPAPRGLLLTVDLSGEGVFG

SEQ ID NO: 867808 - protein, 199 aa, Homo sapiens [sequence omitted]

SEQ ID NO: 867809 - protein, 233 aa, Homo sapiens
MKRSGNPGAEVTNSSVAGPDCCGGLGNIDFRQADFCVMTRLLGYVDPLDPSFVAAVITITFNPLYWNVVARWEHKTRKLSRAFGSPYLACYSLSITILLLNFLRSHCFTQAMLSQPRMESLDTPAAYSLGLALLGLGVVLVLSSFFALGFAGTFLGDYFGILKEARVTVFPFNILDNPMYWGSTANYLGWAIISPAPAGAVGSEARQPHGPAPDGAGGPHLHNGSPIRRALHR

SEQ ID NO: 867810 - protein, 1027 aa, Homo sapiens
MVSSDRPVSLEDEVSHSMKEMIGGCCVCSDERGWAENPLVYCDGHGCSVAVHQACYGIVQVPTGPWFCRKCESQERAARVRCELCPHKDGALKRTDNGGWAHVVCALYIPEVQFANVSTMEPIVLQSVPHDRYNKTCYICDEQGRESKAATGACMTCNKHGCRQAFHVTCAQFAGLLCEEEGNGADNVQYCGYCKYHFSKLKKSKRGSNRSYDQSLSDSSSHSQDKHHEKEKKKYKEKDKHKQKHKKQPEPSPALVPSLTVTTEKTYTSTSNNSISGSLKRLEDTTARFTNANFQEVSAHTSSGKDVSETRGSEGKGKKSSAHSSGQRGRKPGGGRNPGTTVSAASPFPQGSFSGTPGSVKSSSGSSVQSPQDFLSFTDSDLRNDSYSHSQQSSATKDVHKGESGSQEGGVNSFSTLIGLPSTSAVTSQPKSFENSPGDLGNSSLPTAGYKRAQTSGIEEETVKEKKRKGNKQSKHGPGRPKGNKNQENVSHLSVSSASPTSSVASAAGSITSSSLQKSPTLLRNGSLQSLSVGSSPVGSEISMQYRHDGACPTTTFSELLNAIHNDRGDSSTLTKQELKFIGIYNSNDVAVSFPNVVSGSGSSTPVSSSHLPQQSSGHLQQVGALSPSAVSSAAPAVATTQANTLSGSSLSQAPSHMYGNRSNSSMAALIAQSENNQTDQDLGDNSRNLVGRGSSPRGSLSPRSPVSSLQIRYDQPGNSSLENLPPVAASIEQLLERQWSEGQQFLLEQGTPSDILGMLKSLHQLQVENRRLEEQIKNLTAKKERLQLLNAQLSVPFPTITANPSPSHQIHTFSAQTAPTTDSLNSSKSPHIGNSFLPDNSLPVLNQDLTSSGQSTSSSSALSTPPPAGQSPAQQGSGVSGVQQVNGVTVGALASGMQPVTSTIPAVSAVGGIIGALPGNQLAINGIVGALNGVMQTPVTMSQNPTPLTHTTVPPNATHPMPATLTNSASGLGLLSDQQRQILIHQQQFQQLLNSQQLTPVHRHPHFTQLPPTHFSPSMEIMQVRK

SEQ ID NO: 867811 - protein, 949 aa, Homo sapiens
MEPIVLQSVPHDRYNKTCYICDEQGRESKAATGACMTCNKHGCRQAFHVTCAQFAGLLCEEEGNGADNVQYCGYCKYHFSKLKKSKRGSNRSYDQSLSDSSSHSQDKHHEKEKKKYKEKDKHKQKHKKQPEPSPALVPSLTVTTEKTYTSTSNNSISGSLKRLEDTTARFTNANFQEVSAHTSSGKDVSETRGSEGKGKKSSAHSSGQRGRKPGGGRNPGTTVSAASPFPQGSFSGTPGSVKSSSGSSVQSPQDFLSFTDSDLRNDSYSHSQQSSATKDVHKGESGSQEGGVNSFSTLIGLPSTSAVTSQPKSFENSPGDLGNSSLPTAGYKRAQTSGIEEETVKEKKRKGNKQSKHGPGRPKGNKNQENVSHLSVSSASPTSSVASAAGSITSSSLQKSPTLLRNGSLQSLSVGSSPVGSEISMQYRHDGACPTTTFSELLNAIHNGIYNSNDVAVSFPNVVSGSGSSTPVSSSHLPQQSSGHLQQVGALSPSAVSSAAPAVATTQANTLSGSSLSQAPSHMYGNRSNSSMAALIAQSENNQTDQDLGDNSRNLVGRGSSPRGSLSPRSPVSSLQIRYDQPGNSSLENLPPVAASIEQLLERQWSEGQQFLLEQGTPSDILGMLKSLHQLQVENRRLEEQIKNLTAKKERLQLLNAQLSVPFPTITANPSPSHQIHTFSAQTAPTTDSLNSSKSPHIGNSFLPDNSLPVLNQDLTSSGQSTSSSSALSTPPPAGQSPAQQGSGVSGVQQVNGVTVGALASGMQPVTSTIPAVSAVGGIIGALPGNQLAINGIVGALNGVMQTPVTMSQNPTPLTHTTVPPNATHPMPATLTNSASGLGLLSDQQRQILIHQQQFQQLLNSQQLTPEQHQAFLYQLMQHHHQQHHQPELQQLQIPGPTQIPINNLLAGTQAPPLHTATTNPFLTIHGDNASQKVARLSDKTGPVAQEKS

SEQ ID NO: 867812 - protein, 990 aa, Homo sapiens
MKRCELCPHKDGALKRTDNGGWAHVVCALYIPEVQFANVSTMEPIVLQSVPHDRYNKTCYICDEQGRESKAATGACMTCNKHGCRQAFHVTCAQFAGLLCEEEGNGADNVQYCGYCKYHFSKLKKSKRGSNRSYDQSLSDSSSHSQDKHHEKEKKKYKEKDKHKQKHKKQPEPSPALVPSLTVTTEKTYTSTSNNSISGSLKRLEDTTARFTNANFQEVSAHTSSGKDVSETRGSEGKGKKSSAHSSGQRGRKPGGGRNPGTTVSAASPFPQGSFSGTPGSVKSSSGSSVQSPQDFLSFTDSDLRNDSYSHSQQSSATKDVHKGESGSQEGGVNSFSTLIGLPSTSAVTSQPKSFENSPGDLGNSSLPTAGYKRAQTSGIEEETVKEKKRKGNKQSKHGPGRPKGNKNQENVSHLSVSSASPTSSVASAAGSITSSSLQKSPTLLRNGSLQSLSVGSSPVGSEISMQYRHDGACPTTTFSELLNAIHNGIYNSNDVAVSFPNVVSGSGSSTPVSSSHLPQQSSGHLQQVGALSPSAVSSAAPAVATTQANTLSGSSLSQAPSHMYGNRSNSSMAALIAQSENNQTDQDLGDNSRNLVGRGSSPRGSLSPRSPVSSLQIRYDQPGNSSLENLPPVAASIEQLLERQWSEGQQFLLEQGTPSDILGMLKSLHQLQVENRRLEEQIKNLTAKKERLQLLNAQLSVPFPTITANPSPSHQIHTFSAQTAPTTDSLNSSKSPHIGNSFLPDNSLPVLNQDLTSSGQSTSSSSALSTPPPAGQSPAQQGSGVSGVQQVNGVTVGALASGMQPVTSTIPAVSAVGGIIGALPGNQLAINGIVGALNGVMQTPVTMSQNPTPLTHTTVPPNATHPMPATLTNSASGLGLLSDQQRQILIHQQQFQQLLNSQQLTPEQHQAFLYQLMQHHHQQHHQPELQQLQIPGPTQIPINNLLAGTQAPPLHTATTNPFLTIHGDNASQKVARLSDKTGPVAQEKS

SEQ ID NO: 867813 - protein, 949 aa, Homo sapiens; identical to SEQ ID NO: 867811

SEQ ID NO: 867814 - protein, 949 aa, Homo sapiens; identical to SEQ ID NO: 867811

SEQ ID NO: 867815 - protein, 949 aa, Homo sapiens; identical to SEQ ID NO: 867811

SEQ ID NO: 867816 - protein, 790 aa, Homo sapiens
MVSSDRPVSLEDEVSHSMKEMIGGCCVCSDERGWAENPLVYCDGHGCSVAVHQACYGIVQVPTGPWFCRKCESQERAARVRCELCPHKDGALKRTDNGGWAHVVCALYIPEVQFANVSTMEPIVLQSVPHDRYNKTCYICDEQGRESKAATGACMTCNKHGCRQAFHVTCAQFAGLLCEEEGNGADNVQYCGYCKYHFSKLKKSKRGSNRSYDQSLSDSSSHSQDKHHEKEKKKYKEKDKHKQKHKKQPEPSPALVPSLTVTTEKTYTSTSNNSISGSLKRLEDTTARFTNANFQEVSAHTSSGKDVSETRGSEGKGKKSSAHSSGQRGRKPGGGRNPGTTVSAASPFPQGSFSGTPGSVKSSSGSSVQSPQDFLSFTDSDLRNDSYSHSQQSSATKDVHKGESGSQEGGVNSFSTLIGLPSTSAVTSQPKSFENSPGDLGNSSLPTAGYKRAQTSGIEEETVKEKKRKGNKQSKHGPGRPKGNKNQENVSHLSVSSASPTSSVASAAGSITSSSLQKSPTLLRNGSLQSLSVGSSPVGSEISMQYRHDGACPTTTFSELLNAIHNGIYNSNDVAVSFPNVVSGSGSSTPVSSSHLPQQSSGHLQQVGALSPSAVSSAAPAVATTQANTLSGSSLSQAPSHMYGNRSNSSMAALIAQSENNQTDQDLGDNSRNLVGRGSSPRGSLSPRSPVSSLQIRYDQPGNSSLENLPPVAASIEQLLERQWSEGQQFLLEQGTPSDILGMLKSLHQLQVENRRLEEQIKNLTAKKERLQLLNAQLSVPFPTITAKSP

SEQ ID NO: 867817 - protein, 569 aa, Homo sapiens
MVSSDRPVSLEDEVSHSMKEMIGGCCVCSDERGWAENPLVYCDGHGCSVAVHQACYGIVQVPTGPWFCRKCESQERAARVRCELCPHKDGALKRTDNGGWAHVVCALYIPEVQFANVSTMEPIVLQSVPHDRYNKTCYICDEQGRESKAATGACMTCNKHGCRQAFHVTCAQFAGLLCEEEGNGADNVQYCGYCKYHFSKLKKSKRGSNRSYDQSLSDSSSHSQDKHHEKEKKKYKEKDKHKQKHKKQPEPSPALVPSLTVTTEKTYTSTSNNSISGSLKRLEDTTARFTNANFQEVSAHTSSGKDVSETRGSEGKGKKSSAHSSGQRGRKPGGGRNPGTTVSAASPFPQGSFSGTPGSVKSSSGSSVQSPQDFLSFTDSDLRNDSYSHSQQSSATKDVHKGESGSQEGGVNSFSTLIGLPSTSAVTSQPKSFENSPGDLGNSSLPTAGYKRAQTSGIEEETVKEKKRKGNKQSKHGPGRPKGNKNQENVSHLSVSSASPTSSVASAAGSITSSSLQKSPTLLRNGSLQSLSVGSSPVGSGRGLPIIIFLLHSHHLPSSVPKRFQLLLR

SEQ ID NO: 867818 - protein, 179 aa, Homo sapiens
MVSSDRPVSLEDEVSHSMKEMIGGCCVCSDERGWAENPLVYCDGHGCSVAVHQACYGIVQVPTGPWFCRKCESQERAARVMVCNSCWLASSENVTPGYIEHHCACASPHPRCLVSNVPPVSGALMHCFWACLTTAAFFGPQSFTTCHMSFLVSRDILFYIYGFMPFISVVIWRFKKERW

SEQ ID NO: 867819 - protein, 61 aa, Homo sapiens
MKPPQMGSVPVMTQPTLIYSQPVMRPPNPFALYQEHRYSLCNLMEENGITPKRQVLKQQNP

SEQ ID NO: 867820 - protein, 616 aa, Homo sapiens
VVIPPQPPTTGPPRKEVPKTTPSEPKKKQPPPPESGPEQSKQKKVAPRPSIPVKQKPKEKEKPPPVNKQENAGTLNILSTLSNGNSSKQKIPADGVHRIRVDFKEDCEAENVWEMGGLGILTSVPITPRVVCFLCASSGHVETYTSTSNNSISGSLKRLEDTTARFTNANFQEVSAHTSSGKDVSETRGSEGKGKKSSAHSSGQRGRKPGGGRNPGTTVSAASPFPQGSFSGTPGSVKSSSGSSVQSPQDFLSFTDSDLRNDSYSHSQQSSATKDVHKGESGSQEGGVNSFSTLIGLPSTSAVTSQPKSFENSPGDLGNSSLPTAGYKRAQTSGIEEETVKEKKRKGNKQSKHGPGRPKGNKNQENVSHLSVSSASPTSSVASAAGSITSSSLQKSPTLLRNGSLQSLSVGSSPVGSEISMQYRHDGACPTTTFSELLNAIHNGIYNSNDVAVSFPNVVSGSGSSTPVSSSHLPQQSSGHLQQVGALSPSAVSSAAPAVATTQANTLSGSSLSQAPSHMYGNRSNSSMAALIAQSENNQTDQDLGDNSRNLVGRGSSPRGSLSPRSPVSSLQIRYDQPGNSSLENLPPVAASIEAGVVACLDSGPGAETFPSSLFS

SEQ ID NO: 867821 - protein, 126 aa, Homo sapiens
MRWGGFQIDLPSMEKVHISKTYTSTSNNSISGSLKRLEDTTARFTNANFQEVSAHTSSGKDVSETRGSEGKGKKSSAHSSGQRGRKPGGGRNPGTTVSAASPFPQGISDVLVKILVFKMVNNSYAL

SEQ ID NO: 867822 - protein, 1068 aa, Homo sapiens
MVSSDRPVSLEDEVSHSMKEMIGGCCVCSDERGWAENPLVYCDGHGCSVAVHQACYGIVQVPTGPWFCRKCESQERAARVRCELCPHKDGALKRTDNGGWAHVVCALYIPEVQFANVSTMEPIVLQSVPHDRYNKTCYICDEQGRESKAATGACMTCNKHGCRQAFHVTCAQFAGLLCEEEGNGADNVQYCGYCKYHFSKLKKSKRGSNRSYDQSLSDSSSHSQDKHHEKEKKKYKEKDKHKQKHKKQPEPSPALVPSLTVTTEKTYTSTSNNSISGSLKRLEDTTARFTNANFQEVSAHTSSGKDVSETRGSEGKGKKSSAHSSGQRGRKPGGGRNPGTTVSAASPFPQGSFSGTPGSVKSSSGSSVQSPQDFLSFTDSDLRNDSYSHSQQSSATKDVHKGESGSQEGGVNSFSTLIGLPSTSAVTSQPKSFENSPGDLGNSSLPTAGYKRAQTSGIEEETVKEKKRKGNKQSKHGPGRPKGNKNQENVSHLSVSSASPTSSVASAAGSITSSSLQKSPTLLRNGSLQSLSVGSSPVGSEISMQYRHDGACPTTTFSELLNAIHNGIYNSNDVAVSFPNVVSGSGSSTPVSSSHLPQQSSGHLQQVGALSPSAVSSAAPAVATTQANTLSGSSLSQAPSHMYGNRSNSSMAALIAQSENNQTDQDLGDNSRNLVGRGSSPRGSLSPRSPVSSLQIRYDQPGNSSLENLPPVAASIEQLLERQWSEGQQFLLEQGTPSDILGMLKSLHQLQVENRRLEEQIKNLTAKKERLQLLNAQLSVPFPTITANPSPSHQIHTFSAQTAPTTDSLNSSKSPHIGNSFLPDNSLPVLNQDLTSSGQSTSSSSALSTPPPAGQSPAQQGSGVSGVQQVNGVTVGALASGMQPVTSTIPAVSAVGGIIGALPGNQLAINGIVGALNGVMQTPVTMSQNPTPLTHTTVPPNATHPMPATLTNSASGLGLLSDQQRQILIHQQQFQQLLNSQQLTPEQHQAFLYQLMQHHHQQHHQPELQQLQIPGPTQIPINNLLAGTQAPPLHTATTNPFLTIHGDNASQKVARLSDKTGPVAQEKS

SEQ ID NO: 867823 - protein, 1057 aa, Homo sapiens
MVSSDRPVSLEDEVSHSMKEMIGGCCVCSDERGWAENPLVYCDGHGCSVAVHQACYGIVQVPTGPWFCRKCESQERAARVRCELCPHKDGALKRTDNGGWAHVVCALYIPEVQFANVSTMEPIVLQSVPHDRYNKTCYICDEQGRESKAATGACMTCNKHGCRQAFHVTCAQFAGLLCEEEGNGADNVQYCGYCKYHFSKLKKSKRGSNRSYDQSLSDSSSHSQDKHHEKEKKKYKEKDKHKQKHKKQPEPSPALVPSLTVTTEKTYTSTSNNSISGSLKRLEDTTARFTNANFQEVSAHTSSGKDVSETRGSEGKGKKSSAHSSGQRGRKPGGGRNPGTTVSAASPFPQGSFSGTPGSVKSSSGSSVQSPQDFLSFTDSDLRNDSYSHSQQSSATKDVHKGESGSQEGGVNSFSTLIGLPSTSAVTSQPKSFENSPGDLGNSSLPTAGYKRAQTSGIEEETVKEKKRKGNKQSKHGPGRPKGNKNQENVSHLSVSSASPTSSVASAAGSITSSSLQKSPTLLRNGSLQSLSVGSSPVGSEISMQYRHDGACPTTSIYNSNDVAVSFPNVVSGSGSSTPVSSSHLPQQSSGHLQQVGALSPSAVSSAAPAVATTQANTLSGSSLSQAPSHMYGNRSNSSMAALIAQSENNQTDQDLGDNSRNLVGRGSSPRGSLSPRSPVSSLQIRYDQPGNSSLENLPPVAASIEQLLERQWSEGQQFLLEQGTPSDILGMLKSLHQLQVENRRLEEQIKNLTAKKERLQLLNAQLSVPFPTITANPSPSHQIHTFSAQTAPTTDSLNSSKSPHIGNSFLPDNSLPVLNQDLTSSGQSTSSSSALSTPPPAGQSPAQQGSGVSGVQQVNGVTVGALASGMQPVTSTIPAVSAVGGIIGALPGNQLAINGIVGALNGVMQTPVTMSQNPTPLTHTTVPPNATHPMPATLTNSASGLGLLSDQQRQILIHQQQFQQLLNSQQLTPEQHQAFLYQLMQHHHQQHHQPELQQLQIPGPTQIPINNLLAGTQAPPLHTATTNPFLTIHGDNASQKVARLSDKTGPVAQEKS

SEQ ID NO: 867824 - protein, 949 aa, Homo sapiens; identical to SEQ ID NO: 867811

SEQ ID NO: 867825 - protein, 1007 aa, Homo sapiens
GSNCEPKVAPTTAWNAATMRCELCPHKDGALKRTDNGGWAHVVCALYIPEVQFANVSTMEPIVLQSVPHDRYNKTCYICDEQGRESKAATGACMTCNKHGCRQAFHVTCAQFAGLLCEEEGNGADNVQYCGYCKYHFSKLKKSKRGSNRSYDQSLSDSSSHSQDKHHEKEKKKYKEKDKHKQKHKKQPEPSPALVPSLTVTTEKTYTSTSNNSISGSLKRLEDTTARFTNANFQEVSAHTSSGKDVSETRGSEGKGKKSSAHSSGQRGRKPGGGRNPGTTVSAASPFPQGSFSGTPGSVKSSSGSSVQSPQDFLSFTDSDLRNDSYSHSQQSSATKDVHKGESGSQEGGVNSFSTLIGLPSTSAVTSQPKSFENSPGDLGNSSLPTAGYKRAQTSGIEEETVKEKKRKGNKQSKHGPGRPKGNKNQENVSHLSVSSASPTSSVASAAGSITSSSLQKSPTLLRNGSLQSLSVGSSPVGSEISMQYRHDGACPTTTFSELLNAIHNGIYNSNDVAVSFPNVVSGSGSSTPVSSSHLPQQSSGHLQQVGALSPSAVSSAAPAVATTQANTLSGSSLSQAPSHMYGNRSNSSMAALIAQSENNQTDQDLGDNSRNLVGRGSSPRGSLSPRSPVSSLQIRYDQPGNSSLENLPPVAASIEQLLERQWSEGQQFLLEQGTPSDILGMLKSLHQLQVENRRLEEQIKNLTAKKERLQLLNAQLSVPFPTITANPSPSHQIHTFSAQTAPTTDSLNSSKSPHIGNSFLPDNSLPVLNQDLTSSGQSTSSSSALSTPPPAGQSPAQQGSGVSGVQQVNGVTVGALASGMQPVTSTIPAVSAVGGIIGALPGNQLAINGIVGALNGVMQTPVTMSQNPTPLTHTTVPPNATHPMPATLTNSASGLGLLSDQQRQILIHQQQFQQLLNSQQLTPEQHQAFLYQLMQHHHQQHHQPELQQLQIPGPTQIPINNLLAGTQAPPLHTATTNPFLTIHGDNASQKVARLSDKTGPVAQEKS

SEQ ID NO: 867826 - protein, 949 aa, Homo sapiens; identical to SEQ ID NO: 867811

SEQ ID NO: 867827 - protein, 945 aa, Homo sapiens
VVIPPQPPTTGPPRKEVPKTTPSEPKKKQPPPPESGPEQSKQKKVAPRPSIPVKQKPKEKEKPPPVNKQENAGTLNILSTLSNGNSSKQKIPADGVHRIRVDFKEDCEAENVWEMGGLGILTSVPITPRVVCFLCASSGHVETYTSTSNNSISGSLKRLEDTTARFTNANFQEVSAHTSSGKDVSETRGSEGKGKKSSAHSSGQRGRKPGGGRNPGTTVSAASPFPQGSFSGTPGSVKSSSGSSVQSPQDFLSFTDSDLRNDSYSHSQQSSATKDVHKGESGSQEGGVNSFSTLIGLPSTSAVTSQPKSFENSPGDLGNSSLPTAGYKRAQTSGIEEETVKEKKRKGNKQSKHGPGRPKGNKNQENVSHLSVSSASPTSSVASAAGSITSSSLQKSPTLLRNGSLQSLSVGSSPVGSEISMQYRHDGACPTTTFSELLNAIHNGIYNSNDVAVSFPNVVSGSGSSTPVSSSHLPQQSSGHLQQVGALSPSAVSSAAPAVATTQANTLSGSSLSQAPSHMYGNRSNSSMAALIAQSENNQTDQDLGDNSRNLVGRGSSPRGSLSPRSPVSSLQIRYDQPGNSSLENLPPVAASIEQLLERQWSEGQQFLLEQGTPSDILGMLKSLHQLQVENRRLEEQIKNLTAKKERLQLLNAQLSVPFPTITANPSPSHQIHTFSAQTAPTTDSLNSSKSPHIGNSFLPDNSLPVLNQDLTSSGQSTSSSSALSTPPPAGQSPAQQGSGVSGVQQVNGVTVGALASGMQPVTSTIPAVSAVGGIIGALPGNQLAINGIVGALNGVMQTPVTMSQNPTPLTHTTVPPNATHPMPATLTNSASGLGLLSDQQRQILIHQQQFQQLLNSQQLTPEQHQAFLYQLMQHHHQQHHQPELQQLQIPGPTQIPINNLLAGTQAPPLHTATTNPFLTIHGDNASQKVARLSDKTGPVAQEKS

SEQ ID NO: 867828 - protein, 371 aa, Homo sapiens
MVSSDRPVSLEDEVSHSMKEMIGGCCVCSDERGWAENPLVYCDGHGCSVAVHQACYGIVQVPTGPWFCRKCESQERAARVRCELCPHKDGALKRTDNGGWAHVVCALYIPEVQFANVSTMEPIVLQSVPHDRYNKTCYICDEQGRESKAATGACMTCNKHGCRQAFHVTCAQFAGLLCEEEGNGADNVQYCGYCKYHFSKLKKSKRGSNRSYDQSLSDSSSHSQDKHHEKEKKKYKEKDKHKQKHKKQPEPSPALVPSLTVTTEKTYTSTSNNSISGSLKRLEDTTARFTNANFQEVSAHTSSGKDVSETRGSEGKGKKSSAHSSGQRGRKPGGGRNPGTTVSAASPFPQGISDVLVKILVFKMVNNSYAL

SEQ ID NO: 867829 - protein, 1420 aa, Homo sapiens
MSGLGENLDPLASDSRKRKLPCDTPGQGLTCSGEKRRREQESKYIEELAELISANLSDIDNFNVKPDKCAILKETVRQIRQIKEQGKTISNDDDVQKADVSSTGQGVIDKDSLGPLLLQALDGFLFVVNRDGNIVFVSENVTQYLQYKQEDLVNTSVYNILHEEDRKDFLKNLPKSTVNGVSWTNETQRQKSHTFNCRMLMKTPHDILEDINASPEMRQRYETMQCFALSQPRAMMEEGEDLQSCMICVARRITTGERTFPSNPESFITRHDLSGKVVNIDTNSLRSSMRPGFEDIIRRCIQRFFSLNDGQSWSQKRHYQEAYLNGHAETPVYRFSLADGTIVTAQTKSKLFRNPVTNDRHGFVSTHFLQREQNGYRPNPNPVGQGIRPPMAGCNSSVGGMSMSPNQGLQMPSSRAYGLADPSTTGQMSGARYGGSSNIASLTPGPGMQSPSSYQNNNYGLNMSSPPHGSPGLAPNQQNIMISPRNRGSPKIASHQFSPVAGVHSPMASSGNTGNHSFSSSSLSALQAISEGVGTSLLSTLSSPGPKLDNSPNMNITQPSKVSNQDSKSPLGFYCDQNPVESSMCQSNSRDHLSDKESKESSVEGAENQRGPLESKGHKKLLQLLTCSSDDRGHSSLTNSPLDSSCKESSVSVTSPSGVSSSTSGGVSSTSNMHGSLLQEKHRILHKLLQNGNSPAEVAKITAEATGKDTSSITSCGDGNVVKQEQLSPKKKENNALLRYLLDRDDPSDALSKELQPQVEGVDNKMSQCTSSTIPSSSQEKDPKIKTETSEEGSGDLDNLDAILGDLTSSDFYNNSISSNGSHLGTKQQVFQGTNSLGLKSSQSVQSIRPPYNRAVSLDSPVSVGSSPPVKNISAFPMLPKQPMLGGNPRMMDSQENYGSSMGGPNRNVTVTQTPSSGDWGLPNSKAGRMEPMNSNSMGRPGGDYNTSLPRPALGGSIPTLPLRSNSIPGARPVLQQQQQMLQMRPGEIPMGMGANPYGQAAASNQLGSWPDGMLSMEQVSHGTQNRPLLRNSLDDLVGPPSNLEGQSDERALLDQLHTLLSNTDATGLEEIDRALGIPELVNQGQALEPKQDAFQGQEAAVMMDQKAGLYGQTYPAQGPPMQGGFHLQGQSPSFNSMMNQMNQQGNFPLQGMHPRANIMRPRTNTPKQLRMQLQQRLQGQQFLNQSRQALELKMENPTAGGAAVMRPMMQPQQGFLNAQMVAQRSRELLSHHFRQQRVAMMMQQQQQQQQQQQQQQQQQQQQQQQQQQQQQTQAFSPPPNVTASPSMDGLLAGPTMPQAPPQQFPYQPNYGMGQQPDPAFGRVSSPPNAMMSSRMGPSQNPMMQHPQAASIYQSSEMKGWPSGNLARNSSFSQQQFAHQGNPAVYSMVHMNGSSGHMGQMNMNPMPMSGMPMGPDQKYC

SEQ ID NO: 867830 - protein, 1420 aa, Homo sapiens; identical to SEQ ID NO: 867829

SEQ ID NO: 867831 - protein, 1420 aa, Homo sapiens; identical to SEQ ID NO: 867829

SEQ ID NO: 867832 - protein, 1420 aa, Homo sapiens; identical to SEQ ID NO: 867829

SEQ ID NO: 867833 - protein, 317 aa, Homo sapiens
MDQKAGLYGQTYPAQGPPMQGGFHLQGQSPSFNSMMNQMNQQGNFPLQGMHPRANIMRPRTNTPKQLRMQLQQRLQGQQFLNQSRQALELKMENPTAGGAAVMRPMMQPQQGFLNAQMVAQRSRELLSHHFRQQRVAMMMQQQQQQQQQQQQQQQQQQQQQQQQQQQQQTQAFSPPPNVTASPSMDGLLAGPTMPQAPPQQFPYQPNYGMGQQPDPAFGRVSSPPNAMMSSRMGPSQNPMMQHPQAASIYQSSEMKGWPSGNLARNSSFSQQQFAHQGNPAVYSMVHMNGSSGHMGQMNMNPMPMSGMPMGPDQKYC

SEQ ID NO: 867834 - protein, 317 aa, Homo sapiens; identical to SEQ ID NO: 867833

SEQ ID NO: 867835 - protein, 1310 aa, Homo sapiens
MSGLGENLDPLASDSRKRKLPCDTPGQGLTCSGEKRRREQESKYIEELAELISANLSDIDNFNVKPDKCAILKETVRQIRQIKEQGKTISNDDDVQKADVSSTGQGVIDKDSLGPLLLQALDGFLFVVNRDGNIVFVSENVTQYLQYKQEDLVNTSVYNILHEEDRKDFLKNLPKSTVNGVSWTNETQRQKSHTFNCRMLMKTPHDILEDINASPEMRQRYETMQCFALSQPRAMMEEGEDLQSCMICVARRITTGERTFPSNPESFITRHDLSGKVVNIDTNSLRSSMRPGFEDIIRRCIQRFFSLNDGQSWSQKRHYQEAYLNGHAETPVYRFSLADGTIVTAQTKSKLFRNPVTNDRHGFVSTHFLQREQNGYRPNPNPVGQGIRPPMAGCNSSVGGMSMSPNQGLQMPSSRAYGLADPSTTGQMSGARYGGSSNIASLTPGPGMQSPSSYQNNNYGLNMSSPPHGSPGLAPNQQNIMISPRNRGSPKIASHQFSPVAGVHSPMASSGNTGNHSFSSSSLSALQAISEGVGTSLLSTLSSPGPKLDNSPNMNITQPSKVSNQDSKSPLGFYCDQNPVESSMCQSNSRDHLSDKESKESSVEGAENQRGPLESKGHKKLLQLLTCSSDDRGHSSLTNSPLDSSCKESSVSVTSPSGVSSSTSGGVSSTSNMHGSLLQEKHRILHKLLQNGNSPAEVAKITAEATGKDTSSITSCGDGNVVKQEQLSPKKKENNALLRYLLDRDDPSDALSKELQPQVEGVDNKMSQCTSSTIPSSSQEKDPKIKTETSEEGSGDLDNLDAILGDLTSSDFYNNSISSNGSHLGTKQQVFQGTNSLGLKSSQSVQSIRPPYNRAVSLDSPVSVGSSPPVKNISAFPMLPKQPMLGGNPRMMDSQENYGSSMGGPNRNVTVTQTPSSGDWGLPNSKAGRMEPMNSNSMGRPGGDYNTSLPRPALGGSIPTLPLRSNSIPGARPVLQQQQQMLQMRPGEIPMGMGANPYGQAAASNQLGSWPDGMLSMEQVSHGTQNRPLLRNSLDDLVGPPSNLEGQSDERALLDQLHTLLSNTDATGLEEIDRALGIPELVNQGQALEPKQDAFQGQEAAVMMDQKAGLYGQTYPAQGPPMQGGFHLQGQSPSFNSMMNQMNQQGNFPLQGMHPRANIMRPRTNTPKQLRMQLQQRLQGQQFLNQSRQALELKMENPTAGGAAVMRPMMQPQQGFLNAQMVAQRSRELLSHHFRQQRVAMMMLPKVPAKKITAASKKGSSPKRLPAQKSHRPEKQRLLQKLRKGSKGSSPESTCSKGIWQESISGNHKK

SEQ ID NO: 867836 - protein, 322 aa, Homo sapiens
MSGLGENLDPLASDSRKRKLPCDTPGQGLTCSGEKRRREQESKYIEELAELISANLSDIDNFNVKPDKCAILKETVRQIRQIKEQGKTISNDDDVQKADVSSTGQGVIDKDSLGPLLLQALDGFLFVVNRDGNIVFVSENVTQYLQYKQEDLVNTSVYNILHEEDRKDFLKNLPKSTVNGVSWTNETQRQKSHTFNCRMLMKTPHDILEDINASPEMRQRYETMQCFALSQPRAMMEEGEDLQSCMICVARRITTGERTFPSNPESFITRHDLSDGVLLCCPGWSAMVRSRLTATSTSWVQVIFLPWPPKQFGLQARATMPG

SEQ ID NO: 867837 - protein, 1420 aa, Homo sapiens; identical to SEQ ID NO: 867829

SEQ ID NO: 867838 - protein, 1420 aa, Homo sapiens; identical to SEQ ID NO: 867829

SEQ ID NO: 867839 - protein, 1415 aa, Homo sapiens
MSGLGENLDPLASDSRKRKLPCDTPGQGLTCSGEKRRREQESKYIEELAELISANLSDIDNFNVKPDKCAILKETVRQIRQIKEQGKTISNDDDVQKADVSSTGQGVIDKDSLGPLLLQALDGFLFVVNRDGNIVFVSENVTQYLQYKQEDLVNTSVYNILHEEDRKDFLKNLPKSTVNGVSWTNETQRQKSHTFNCRMLMKTPHDILEDINASPEMRQRYETMQCFALSQPRAMMEEGEDLQSCMICVARRITTGERTFPSNPESFITRHDLSGKVVNIDTNSLRSSMRPGFEDIIRRCIQRFFSLNDGQSWSQKRHYQEVTSDGIFSPTAYLNGHAETPVYRFSLADGTIVTAQTKSKLFRNPVTNDRHGFVSTHFLQREQNGYRPNPNPVGQGIRPPMAGCNSSVGGMSMSPNQGLQMPSSRAYGLADPSTTGQMSGARYGGSSNIASLTPGPGMQSPSSYQNNNYGLNMSSPPHGSPGLAPNQQNIMISPRNRGSPKIASHQFSPVAGVHSPMASSGNTGNHSFSSSSLSALQAISEGVGTSLLSTLSSPGPKLDNSPNMNITQPSKVSNQDSKSPLGFYCDQNPVESSMCQSNSRDHLSDKESKESSVEGAENQRGPLESKGHKKLLQLLTCSSDDRGHSSLTNSPLDSSCKESSVSVTSPSGVSSSTSGGVSSTSNMHGSLLQEKHRILHKLLQNGNSPAEVAKITAEATGKDTSSITSCGDGNVVKQEQLSPKKKENNALLRYLLDRDDPSDALSKELQPQVEGVDNKMSQCTSSTIPSSSQEKDPKIKTETSEEGSGDLDNLDAILGDLTSSDFYNNSISSNGSHLGTKQQVFQGTNSLGLKSSQSVQSIRPPYNRAVSLDSPVSVGSSPPVKNISAFPMLPKQPMLGGNPRMMDSQENYGSSMGDWGLPNSKAGRMEPMNSNSMGRPGGDYNTSLPRPALGGSIPTLPLRSNSIPGARPVLQQQQQMLQMRPGEIPMGMGANPYGQAAASNQLGSWPDGMLSMEQVSHGTQNRPLLRNSLDDLVGPPSNLEGQSDERALLDQLHTLLSNTDATGLEEIDRALGIPELVNQGQALEPKQDAFQGQEAAVMMDQKAGLYGQTYPAQGPPMQGGFHLQGQSPSFNSMMNQMNQQGNFPLQGMHPRANIMRPRTNTPKQLRMQLQQRLQGQQFLNQSRQALELKMENPTAGGAAVMRPMMQPQQGFLNAQMVAQRSRELLSHHFRQQRVAMMMQQQQQQQQQQQQQQQQQQQQQQQQQQQQQTQAFSPPPNVTASPSMDGLLAGPTMPQAPPQQFPYQPNYGMGQQPDPAFGRVSSPPNAMMSSRMGPSQNPMMQHPQAASIYQSSEMKGWPSGNLARNSSFSQQQFAHQGNPAVYSMVHMNGSSGHMGQMNMNPMPMSGMPMGPDQKYC

SEQ ID NO: 867840 - protein, 317 aa, Homo sapiens; identical to SEQ ID NO: 867833

SEQ ID NO: 867841 - protein, 317 aa, Homo sapiens; identical to SEQ ID NO: 867833

SEQ ID NO: 867842 - protein, 974 aa, Homo sapiens
MSGLGENLDPLASDSRKRKLPCDTPGQGLTCSGEKRRREQESKYIEELAELISANLSDIDNFNVKPDKCAILKETVRQIRQIKEQGKTISNDDDVQKADVSSTGQGVIDKDSLGPLLLQALDGFLFVVNRDGNIVFVSENVTQYLQYKQEDLVNTSVYNILHEEDRKDFLKNLPKSTVNGVSWTNETQRQKSHTFNCRMLMKTPHDILEDINASPEMRQRYETMQCFALSQPRAMMEEGEDLQSCMICVARRITTGERTFPSNPESFITRHDLSGKVVNIDTNSLRSSMRPGFEDIIRRCIQRFFSLNDGQSWSQKRHYQEAYLNGHAETPVYRFSLADGTIVTAQTKSKLFRNPVTNDRHGFVSTHFLQREQNGYRPNPNPVGQGIRPPMAGCNSSVGGMSMSPNQGLQMPSSRAYGLADPSTTGQMSGARYGGSSNIASLTPGPGMQSPSSYQNNNYGLNMSSPPHGSPGLAPNQQNIMISPRNRGSPKIASHQFSPVAGVHSPMASSGNTGNHSFSSSSLSALQAISEGVGTSLLSTLSSPGPKLDNSPNMNITQPSKVSNQDSKSPLGFYCDQNPVESSMCQSNSRDHLSDKESKESSVEGAENQRGPLESKGHKKLLQLLTCSSDDRGHSSLTNSPLDSSCKESSVSVTSPSGVSSSTSGGVSSTSNMHGSLLQEKHRILHKLLQNGNSPAEVAKITAEATGKDTSSITSCGDGNVVKQEQLSPKKKENNALLRYLLDRDDPSDALSKELQPQVEGVDNKMSQCTSSTIPSSSQEKDPKIKTETSEEGSGDLDNLDAILGDLTSSDFYNNSISSNGSHLGTKQQVFQGTNSLGLKSSQSVQSIRPPYNRAVSLDSPVSVGSSPPVKNISAFPMLPKQPMLGGNPRMMDSQENYGSSMGGPNRNVTVTQTPSSGDWGLPNSKAGRMEPMNSNSMGRPGGDYNTSLPRPALGGSIPTLPLRSNSIPGARPV

SEQ ID NO: 867843 - protein, 117 aa, Homo sapiens
MWVSWAPGLWLLGLWATFGHGANTGAQCPPSQQEGLKLEHSSSLPANVTGFNLIHRLSLMKKSAIKKIRNPKGPLILRLGAAPVTQPTALWEAKVGRSLEVRSSRPAWPAWRNPVST

SEQ ID NO: 867844 - protein, 116 aa, Homo sapiens
MRGSPGPPGPIVSISGALVCLRSSQRGHYTQTPSRGLVPKRLGKAGGGNFHCPPHPSAEHLQGLCSPTTGCPGTALLCLLPAVLLRGGPQRHLFASLSPPSAALSTVAPGRPRQGA

SEQ ID NO: 867845 - protein, 1589 aa, Homo sapiens
MWVSWAPGLWLLGLWATFGHGANTGAQCPPSQQEGLKLEHSSSLPANVTGFNLIHRLSLMKKSAIKKIRNPKGPLILRLGAAPVTQPTRRVFPRGLPEEFALVLTLLLKKHTHQKTWYLFQVTDANGYPQISLEVNSQERSLELRAQGQDGDFVSCIFPVPQLFDLRWHKLMLSVAGRVASVHVDCSSASSQPLGPRRPMRPVGHVFLGLDAEQGKPVSFDLQQVHIYCDPELVLEEGCCEILPAGCPPETSKARRDTQSNELIEINPQSEGKVYTRCFCLEEPQNSEVDAQLTGRISQKAERGAKVHQETAADECPPCVHGARDSNVTLAPSGPKGGKGERGLPGPPGSKGEKGARGNDCVRISPDAPLQCAEGPKGEKGESGALGPSGLPGSTGEKGQKGEKGDGGIKGVPGKPGRDGRPGEICVIGPKGQKGDPGFVGPEGLAGEPGPPGLPGPPGIGLPGTPGDPGGPPGPKGDKGSSGIPGKEGPGGKPGKPGVKGEKGDPCEVCPTLPEGFQNFVGLPGKPGPKGEPGDPVPARGDPGIQGIKGEKGEPCLSCSSVVGAQHLVSSTGASGDVGSPGFGLPGLPGRAGVPGLKGEKGNFGEAGPAGSPGPPGPVGPAGIKGAKGEPCEPCPALSNLQDGDVRVVALPGPSGEKGEPGPPGFGLPGKQGKAGERGLKGQKGDAGNPGDPGTPGTTGRPGLSGEPGVQGPAGPKGEKGDGCTACPSLQGTVTDMAGRPGQPGPKGEQGPEGVGRPGKPGQPGLPGVQGPPGLKGVQGEPGPPGRGVQGPQGEPGAPGLPGIQGLPGPRGPPGPTGEKGAQGSPGVKGATGPVGPPGASVSGPPGRDGQQGQTGLRGTPVSTVPWGSRKGEPGECSCPSQGDLIFSGMPGPPGIPGPPGPPGVPGLQGVPGNNGLPGQPGLTAELGSLPIEQHLLKSICGDCVQGQRAHPGYLVEKGEKGDQGIPGVPGLDNCAQCFLSLERPRAEEARGDNSEGDPGCVGSPGLPGPPGLPGQRGEEGPPGMRGSPGPPGPIGPPGFPGAVGSPGLPGLQGERGLTGLTGDKGEPGPPGQPGYPGATGPPGLPGIKGERGYTGSAGEKGEPGPPGSEGLPGPPGPAGPRGERGPQGNSGEKGDQGFQGQPGFPGPPGPPGFPGKVGSPGPPGPQAEKGSEGIRGPSGLPGSPGPPGPPGIQGPAGLDGLDGKDGKPGLRGDPGPAGPPGLMGPPGFKGKTGHPGLPGPKGDCGKPGPPGSTGRPGAEGEPGAMGPQGRPGPPGHVGPPGPPGQPGPAGISAVGLKGDRGATGERGLAGLPGQPGPPGHPGPPGEPGTDGAAGKEGPPGKQGFYGPPGPKGDPGAAGQKGQAGEKGRAGMPGGPGKSGSMGPVGPPGPAGERGHPGAPGPSGSPGLPGVPGSMGDMVNYDEIKRFIRQEIIKMFDERMAYYTSRMQFPMEMAAAPGRPGPPGKDGAPGRPGAPGSPGLPGQIGREGRQGLPGVRGLPGTKGEKGDIGIGIAGENGLPGPPGPQGPPGYGKMGATGPMGQQGIPGIPGPPGPMGQPGKAGHCNPSDCFGAMPMEQQYPPMKTMKGPFG

SEQ ID NO: 867846 - protein, 1690 aa, Homo sapiens
MWVSWAPGLWLLGLWATFGHGANTGAQCPPSQQEGLKLEHSSSLPANVTGFNLIHRLSLMKKSAIKKIRNPKGPLILRLGAAPVTQPTRRVFPRGLPEEFALVLTLLLKKHTHQKTWYLFQVTDANGYPQISLEVNSQERSLELRAQGQDGDFVSCIFPVPQLFDLRWHKLMLSVAGRVASVHVDCSSASSQPLGPRRPMRPVGHVFLGLDAEQGKPVSFDLQQVHIYCDPELVLEEGCCEILPAGCPPETSKARRDTQSNELIEINPQSEGKVYTRCFCLEEPQNSEVDAQLTGRISQKAERGAKVHQETAADECPPCVHGARDSNVTLAPSGPKGGKGERGLPGPPGSKGEKGARGNDCVRISPDAPLQCAEGPKGEKGESGALGPSGLPGSTGEKGQKGEKGDGGIKGVPGKPGRDGRPGEICVIGPKGQKGDPGFVGPEGLAGEPGPPGLPGPPGIGLPGTPGDPGGPPGPKGDKGSSGIPGKEGPGGKPGKPGVKGEKGDPCEVCPTLPEGFQNFVGLPGKPGPKGEPGDPVPARGDPGIQGIKGEKGEPCLSCSSVVGAQHLVSSTGASGDVGSPGFGLPGLPGRAGVPGLKGEKGNFGEAGPAGSPGPPGPVGPAGIKGAKGEPCEPCPALSNLQDGDVRVVALPGPSGEKGEPGPPGFGLPGKQGKAGERGLKGQKGDAGNPGDPGTPGTTGRPGLSGEPGVQGPAGPKGEKGDGCTACPSLQGTVTDMAGRPGQPGPKGEQGPEGVGRPGKPGQPGLPGVQGPPGLKGVQGEPGPPGRGVQGPQGEPGAPGLPGIQGLPGPRGPPGPTGEKGAQGSPGVKGATGPVGPPGASVSGPPGRDGQQGQTGLRGTPVSTVPWGSRKGEPGECSCPSQGDLIFSGMPGPPGIPGPPGPPGVPGLQGVPGNNGLPGQPGLTAELGSLPIEQHLLKSICGDCVQGQRAHPGYLVEKGEKGDQGIPGVPGLDNCAQCFLSLERPRAEEARGDNSEGDPGCVGSPGLPGPPGLPGQRGEEGPPGMRGSPGPPGPIGPPGFPGAVGSPGLPGLQGERGLTGLTGDKGEPGPPGQPGYPGATGPPGLPGIKGERGYTGSAGEKGEPGPPGSEGLPGPPGPAGPRGERGPQGNSGEKGDQGFQGQPGFPGPPGPPGFPGKVGSPGPPGPQAEKGSEGIRGPSGLPGSPGPPGPPGIQGPAGLDGLDGKDGKPGLRGDPGPAGPPGLMGPPGFKGKTGHPGLPGPKGDCGKPGPPGSTGRPGAEGEPGAMGPQGRPGPPGHVGPPGPPGQPGPAGISAVGLKGDRGATGERGLAGLPGQPGPPGHPGPPGEPGTDGAAGKEGPPGKQGFYGPPGPKVSGHWLGLRGEAHEWMKPSCKLRLQPQRGDTGRPVGRGQKCRTWSRIVSENFSHGVISCGWGEGNLQFIYSLIDLIDSFIVSISRALPCSCSHSRPLSWPQGDPGAAGQKGQAGEKGRAGMPGGPGKSGSMGPVGPPGPAGERGHPGAPGPSGSPGLPGVPGSMGDMVNYDEIKRFIRQEIIKMFDERMAYYTSRMQFPMEMAAAPGRPGPPGKDGAPGRPGAPGSPGLPGQIGREGRQGLPGVRGLPGTKGEKGDIGIGIAGENGLPGPPGPQGPPGYGKMGATGPMGQQGIPGIPGPPGPMGQPGKAGHCNPSDCFGAMPMEQQYPPMKTMKGPFG

SEQ ID NO: 867847 - protein, 1045 aa, Homo sapiens
TQGWARVPPPVSMATSQGFPGDSRVPFGQAGLEPTLTGDPGIQGIKGEKGEPCLSCSSVVGAQHLVSSTGASGDVGSPGFGLPGLPGRAGVPGLKGEKGNFGEAGPAGSPGPPGPVGPAGIKGAKGEPCEPCPALSNLQDGDVRVVALPGPSGEKGEPGPPGFGLPGKQGKAGERGLKGQKGDAGNPGDPGTPGTTGRPGLSGEPGVQGPAGPKGEKGQPGLPGVQGPPGLKGVQGEPGPPGRGVQGPQGEPGAPGLPGIQGLPGPRGPPGPTGEKGAQGSPGVKGATGPVGPPGASVSGPPGRDGQQGQTGLRGTPVSTVPWGSRKGEPGECSCPSQGDLIFSGMPGPPGIPGPPGPPGVPGLQGVPGNNGLPGQPGLTAELGSLPIEQHLLKSICGDCVQGQRAHPGYLVEKGEKGDQGIPGVPGLDNCAQCFLSLERPRAEEARGDNSEGDPGCVGSPGLPGPPGLPGQRGEEGPPGMRGSPGPPGPIGPPGFPGAVGSPGLPGLQGERGLTGLTGDKGEPGPPGQPGYPGATGPPGLPGIKGERGYTGSAGEKGEPGPPGSEGLPGPPGPAGPRGERGPQGNSGEKGDQGFQGQPGFPGPPGPPGFPGKVGSPGPPGPQAEKGSEGIRGPSGLPGSPGPPGPPGIQGPAGLDGLDGKDGKPGLRGDPGPAGPPGLMGPPGFKGKTGHPGLPGPKGDCGKPGPPGSTGRPGAEGEPGAMGPQGRPGPPGHVGPPGPPGQPGPAGISAVGLKGDRGATGERGLAGLPGQPGPPGHPGPPGEPGTDGAAGKEGPPGKQGFYGPPGPKGDPGAAGQKGQAGEKGRAGMPGGPGKSGSMGPVGPPGPAGERGHPGAPGPSGSPGLPGVPGSMGDMVNYDEIKRFIRQEIIKMFDERMAYYTSRMQFPMEMAAAPGRPGPPGKDGAPGRPGAPGSPGLPGQIGREGRQGLPGVRGLPGTKGEKGDIGIGIAGENGLPGPPGPQGPPGYGKMGATGPMGQQGIPGIPGPPGPMGQPGKAGHCNPSDCFGAMPMEQQYPPMKTMKGPFG

SEQ ID NO: 867848 - protein, 1086 aa, Homo sapiens
TQGWARVPPPVSMATSQGFPGDSRVPFGQAGLEPTLTGDPGIQGIKGEKGEPCLSCSSVVGAQHLVSSTGASGDVGSPGFGLPGLPGRAGVPGLKGEKGNFGEAGPAGSPGPPGPVGPAGIKGAKGEPCEPCPALSNLQDGDVRVVALPGPSGEKGEPGPPGFGLPGKQGKAGERGLKGQKGDAGNPGDPGTPGTTGRPGLSGEPGVQGPAGPKGEKGDGCTACPSLQGTVTDMAGRPGQPGPKGEQGPEGVGRPGKPGQPGLPGVQGPPGLKGVQGEPGPPGRGVQGPQGEPGAPGLPGIQGLPGPRGPPGPTGEKGAQGSPGVKGATGPVGPPGASVSGPPGRDGQQGQTGLRGTPVSTVPWGSRKGEPGECSCPSQGDLIFSGMPGPPGIPGPPGPPGVPGLQGVPGNNGLPGQPGLTAELGSLPIEQHLLKSICGDCVQGQRAHPGYLVEKGEKGDQGIPGVPGLDNCAQCFLSLERPRAEEARGDNSEGDPGCVGSPGLPGPPGLPGQRGEEGPPGMRGSPGPPGPIGPPGFPGAVGSPGLPGLQGERGLTGLTGDKGEPGPPGQPGYPGATGPPGLPGIKGERGYTGSAGEKGEPGPPGSEGLPGPPGPAGPRGERGPQGNSGEKGDQGFQGQPGFPGPPGPPGFPGKVGSPGPPGPQAEKGSEGIRGPSGLPGSPGPPGPPGIQGPAGLDGLDGKDGKPGLRGDPGPAGPPGLMGPPGFKGKTGHPGLPGPKGDCGKPGPPGSTGRPGAEGEPGAMGPQGRPGPPGHVGPPGPPGQPGPAGISAVGLKGDRGATGERGLAGLPGQPGPPGHPGPPGEPGTDGAAGKEGPPGKQGFYGPPGPKGDPGAAGQKGQAGEKGRAGMPGGPGKSGSMGPVGPPGPAGERGHPGAPGPSGSPGLPGVPGSMGDMVNYDEIKRFIRQEIIKMFDERMAYYTSRMQFPMEMAAAPGRPGPPGKDGAPGRPGAPGSPGLPGQIGREGRQGLPGVRGLPGTKGEKGDIGIGIAGENGLPGPPGPQGPPGYGKMGATGPMGQQGIPGIPGPPGPMGQPGKAGHCNPSDCFGAMPMEQQYPPMKTMKGPFG

SEQ ID NO: 867849 - protein, 556 aa, Homo sapiens
MPPSKKVIFAWGGGLGQGLQGERGLTGLTGDKGEPGPPGQPGYPGATGPPGLPGIKGERGYTGSAGEKGEPGPPGSEGLPGPPGPAGPRGERGPQGNSGEKGDQGFQGQPGFPGPPGPPGFPGKVGSPGPPGPQAEKGSEGIRGPSGLPGSPGPPGPPGIQGPAGLDGLDGKDGKPGLRGDPGPAGPPGLMGPPGFKGKTGHPGLPGPKGDCGKPGPPGSTGRPGAEGEPGAMGPQGRPGPPGHVGPPGPPGQPGPAGISAVGLKGDRGATGERGLAGLPGQPGPPGHPGPPGEPGTDGAAGKEGPPGKQGFYGPPGPKGDPGAAGQKGQAGEKGRAGMPGGPGKSGSMGPVGPPGPAGERGHPGAPGPSGSPGLPGVPGSMGDMVNYDEIKRFIRQEIIKMFDERMAYYTSRMQFPMEMAAAPGRPGPPGKDGAPGRPGAPGSPGLPGQIGREGRQGLPGVRGLPGTKGEKGDIGIGIAGENGLPGPPGPQGPPGYGKMGATGPMGQQGIPGIPGPPGPMGQPGKAGHCNPSDCFGAMPMEQQYPPMKTMKGPFG

SEQ ID NO: 867850 - protein, 366 aa, Homo sapiens
MGPPGFKGKTGHPGLPGPKGDCGKPGPPGSTGRPGAEGEPGAMGPQGRPGPPGHVGPPGPPGQPGPAGISAVGLKGDRGATGERGLAGLPGQPGPPGHPGPPGEPGTDGAAGKEGPPGKQGFYGPPGPKGDPGAAGQKGQAGEKGRAGMPGGPGKSGSMGPVGPPGPAGERGHPGAPGPSGSPGLPGVPGSMGDMVNYDEIKRFIRQEIIKMFDERMAYYTSRMQFPMEMAAAPGRPGPPGKDGAPGRPGAPGSPGLPGQIGREGRQGLPGVRGLPGTKGEKGDIGIGIAGENGLPGPPGPQGPPGYGKMGATGPMGQQGIPGIPGPPGPMGQPGKAGHCNPSDCFGAMPMEQQYPPMKTMKGPFG

SEQ ID NO: 867851 - protein, 218 aa, Homo sapiens [sequence omitted]

SEQ ID NO: 867852 - protein, 1460 aa, Homo sapiens
MWVSWAPGLWLLGLWATFGHGANTGAQCPPSQQEGLKLEHSSSLPANVTGFNLIHRLSLMKKSAIKKIRNPKGPLILRLGAAPVTQPTRRVFPRGLPEEFALVLTLLLKKHTHQKTWYLFQVTDANGYPQISLEVNSQERSLELRAQGQDGDFVSCIFPVPQLFDLRWHKLMLSVAGRVASVHVDCSSASSQPLGPRRPMRPVGHVFLGLDAEQGKPVSFDLQQVHIYCDPELVLEEGCCEILPAGCPPETSKARRDTQSNELIEINPQSEGKVYTRCFCLEEPQNSEVDAQLTGRISQKAERGAKVHQETAADECPPCVHGARDSNVTLAPSGPKGGKGERGLPGPPGSKGEKGARGNDCVRISPDAPLQCAEGPKGEKGESGALGPSGLPGSTGEKGQKGEKGDGGIKGVPGKPGRDGRPGEICVIGPKGQKGDPGFVGPEGLAGEPGPPGLPGPPGIGLPGTPGDPGGPPGPKGDKGSSGIPGKEGPGGKPGKPGVKGEKGDPCEVCPTLPEGFQNFVGLPGKPGPKGEPGDPVPARGDPGIQGIKGEKGEPCLSCSSVVGAQHLVSSTGASGDVGSPGFGLPGLPGRAGVPGLKGEKGNFGEAGPAGSPGPPGPVGPAGIKGAKGEPCEPCPALSNLQDGDVRVVALPGPSGEKGEPGPPGFGLPGKQGKAGERGLKGQKGDAGNPGDPGTPGTTGRPGLSGEPGVQGPAGPKGEKGDGCTACPSLQGTVTDMAGRPGQPGPKGEQGPEGVGRPGKPGQPGLPGVQGPPGLKGVQGEPGPPGRGVQGPQGEPGAPGLPGIQGLPGPRGPPGPTGEKGAQGSPGVKGATGPVGPPGASVSGPPGRDGQQGQTGLRGTPVSTVPWGSRKGEPGECSCPSQGDLIFSGMPGPPGIPGPPGPPGVPGLQGVPGNNGLPGQPGLTAELGSLPIEQHLLKSICGDCVQGQRAHPGYLVEKGEKGDQGIPGVPGLDNCAQCFLSLERPRAEEARGDNSEGDPGCVGSPGLPGPPGLPGQRGEEGPPGMRGSPGPPGPIGPPGFPGAVGSPGLPVRTSAARPPLPPVSQGLQGERGLTGLTGDKGEPGPPGQPGYPGATGPPGLPGIKGERGYTGSAGEKGEPGPPGSEGLPGPPGPAGPRGERGPQGNSGEKGDQGFQGQPGFPGPPGPPGFPGKVGSPGPPGPQAEKGPAGLDGLDGKDGKPGLRGDPGPAGPPGLMGPPGFKGKTGHPGLPGPKGDCGKPGPPGSTGRPGAEGEPGAMGPQGRPGPPGHVGPPGPPGQPGPAGISAVGLKGDRGATGERGLAGLPGQPGPPGHPGPPGEPGTDGAAGKEGPLERQGSMDSWSKVIQELLARMARPEEGESGMLGGPGKTGPCGCWSPGLPEKTHLDYGLGNPCSCGAWLWSPGTRANTRQRKHITVDTHHHASGTAWAEARPEGPSSITLLQTETENSRDDNTEMITSYTA

SEQ ID NO: 867853 - protein, 1140 aa, Homo sapiens
MWVSWAPGLWLLGLWATFGHGANTGAQCPPSQQEGLKLEHSSSLPANVTGFNLIHRLSLMKKSAIKKIRNPKGPLILRLGAAPVTQPTRRVFPRGLPEEFALVLTLLLKKHTHQKTWYLFQVTDANGYPQISLEVNSQERSLELRAQGQDGDFVSCIFPVPQLFDLRWHKLMLSVAGRVASVHVDCSSASSQPLGPRRPMRPVGHVFLGLDAEQGKPVSFDLQQVHIYCDPELVLEEGCCEILPAGCPPETSKARRDTQSNELIEINPQSEGKVYTRCFCLEEPQNSEVDAQLTGRISQKAERGAKVHQETAADECPPCVHGARDSNVTLAPSGPKGGKGERGLPGPPGSKGEKGARGNDCVRISPDAPLQCAEGPKGEKGESGALGPSGLPGSTGEKGQKGEKGDGGIKGVPGKPGRDGRPGEICVIGPKGQKGDPGFVGPEGLAGEPGPPGLPGPPGIGLPGTPGDPGGPPGPKGDKGSSGIPGKEGPGGKPGKPGVKGEKGDPCEVCPTLPEGFQNFVGLPGKPGPKGEPGDPVPARGDPGIQGIKGEKGEPCLSCSSVVGAQHLVSSTGASGDVGSPGFGLPGLPGRAGVPGLKGEKGNFGEAGPAGSPGPPGPVGPAGIKGAKGEPCEPCPALSNLQDGDVRVVALPGPSGEKGEPGPPGFGLPGKQGKAGERGLKGQKGDAGNPGDPGTPGTTGRPGLSGEPGVQGPAGPKGEKGDGCTACPSLQGTVTDMAGRPGQPGPKGEQGPEGVGRPGKPGQPGLPGVQGPPGLKGVQGEPGPPGRGVQGPQGEPGAPGLPGIQGLPGPRGPPGPTGEKGAQGSPGVKGATGPVGPPGASVSGPPGRDGQQGQTGLRGTPVSTVPWGSRKGEPGECSCPSQGDLIFSGMPGPPGIPGPPGPPGVPGLQGVPGNNGLPGQPGLTAELGSLPIEQHLLKSICGDCVQGQRAHPGYLVEKGEKGDQGIPGVPGLDNCAQCFLSLERPRAEEARGDNSEGDPGCVGSPGLPGPPGLPGQRGEEGPPGMRGSPGPPGPIVSISGALVCLRSSQRGHYTQTPSRGLVPKRLGKAGGGNFHCPPHPSAEHLQGLCSPTTGCPGTALLCLLPAVLLRGGPQRHLFASLSPPSAALSTVAPGRPRQGA

SEQ ID NO: 867854 - protein, 1604 aa, Homo sapiens [sequence omitted]

SEQ ID NO: 867855 - protein, 46 aa, Homo sapiens
MGPPGFKGKTGHPGLPGPKGDCGKPGPPGSTGRPGAEVRARDPHGC

SEQ ID NO: 867856 - protein, 1095 aa, Homo sapiens
LRAGLECHLRSPWQPPRAFQETLGCLLGKLGWSPPLLSTWELSDKKGDPGIQGIKGEKGEPCLSCSSVVGAQHLVSSTGASGDVGSPGFGLPGLPGRAGVPGLKGEKGNFGEAGPAGSPGPPGPVGPAGIKGAKGEPCEPCPALSNLQDGDVRVVALPGPSGEKGEPGPPGFGLPGKQGKAGERGLKGQKGDAGNPGDPGTPGTTGRPGLSGEPGVQGPAGPKGEKGDGCTACPSLQGTVTDMAGRPGQPGPKGEQGPEGVGRPGKPGQPGLPGVQGPPGLKGVQGEPGPPGRGVQGPQGEPGAPGLPGIQGLPGPRGPPGPTGEKGAQGSPGVKGATGPVGPPGASVSGPPGRDGQQGQTGLRGTPVSTVPWGSRKGEPGECSCPSQGDLIFSGMPGPPGIPGPPGPPGVPGLQGVPGNNGLPGQPGLTAELGSLPIEQHLLKSICGDCVQGQRAHPGYLVEKGEKGDQGIPGVPGLDNCAQCFLSLERPRAEEARGDNSEGDPGCVGSPGLPGPPGLPGQRGEEGPPGMRGSPGPPGPIGPPGFPGAVGSPGLPGLQGERGLTGLTGDKGEPGPPGQPGYPGATGPPGLPGIKGERGYTGSAGEKGEPGPPGSEGLPGPPGPAGPRGERGPQGNSGEKGDQGFQGQPGFPGPPGPPGFPGKVGSPGPPGPQAEKGSEGIRGPSGLPGSPGPPGPPGIQGPAGLDGLDGKDGKPGLRGDPGPAGPPGLMGPPGFKGKTGHPGLPGPKGDCGKPGPPGSTGRPGAEGEPGAMGPQGRPGPPGHVGPPGPPGQPGPAGISAVGLKGDRGATGERGLAGLPGQPGPPGHPGPPGEPGTDGAAGKEGPPGKQGFYGPPGPKGDPGAAGQKGQAGEKGRAGMPGGPGKSGSMGPVGPPGPAGERGHPGAPGPSGSPGLPGVPGSMGDMVNYDEIKRFIRQEIIKMFDERMAYYTSRMQFPMEMAAAPGRPGPPGKDGAPGRPGAPGSPGLPGQIGREGRQGLPGVRGLPGTKGEKGDIGIGIAGENGLPGPPGPQGPPGYGKMGATGPMGQQGIPGIPGPPGPMGQPGKAGHCNPSDCFGAMPMEQQYPPMKTMKGPFG

SEQ ID NO: 867857 - protein, 366 aa, Homo sapiens; identical to SEQ ID NO: 867850

SEQ ID NO: 867858 - protein, 366 aa, Homo sapiens; identical to SEQ ID NO: 867850

SEQ ID NO: 867859 - protein, 366 aa, Homo sapiens; identical to SEQ ID NO: 867850

SEQ ID NO: 867860 - protein, 218 aa, Homo sapiens [sequence omitted]

SEQ ID NO: 867861 - protein, 1565 aa, Homo sapiens
MWVSWAPGLWLLGLWATFGHGANTGAQCPPSQQEGLKLEHSSSLPANVTGFNLIHRLSLMKKSAIKKIRNPKGPLILRLGAAPVTQPTRRVFPRGLPEEFALVLTLLLKKHTHQKTWYLFQVTDANGYPQISLEVNSQERSLELRAQGQDGDFVSCIFPVPQLFDLRWHKLMLSVAGRVASVHVDCSSASSQPLGPRRPMRPVGHVFLGLDAEQGKPVSFDLQQVHIYCDPELVLEEGCCEILPAGCPPETSKARRDTQSNELIEINPQSEGKVYTRCFCLEEPQNSEVDAQLTGRISQKAERGAKVHQETAADECPPCVHGARDSNVTLAPSGPKGGKGERGLPGPPGSKGEKGARGNDCVRISPDAPLQCAEGPKGEKGESGALGPSGLPGSTGEKGQKGEKGDGGIKGVPGKPGRDGRPGEICVIGPKGQKGDPGFVGPEGLAGEPGPPGLPGPPGIGLPGTPGDPGGPPGPKGDKGSSGIPGKEGPGGKPGKPGVKGEKGDPCEVCPTLPEGFQNFVGLPGKPGPKGEPGDPVPARGDPGIQGIKGEKGEPCLSCSSVVGAQHLVSSTGASGDVGSPGFGLPGLPGRAGVPGLKGEKGNFGEAGPAGSPGPPGPVGPAGIKGAKGEPCEPCPALSNLQDGDVRVVALPGPSGEKGEPGPPGFGLPGKQGKAGERGLKGQKGDAGNPGDPGTPGTTGRPGLSGEPGVQGPAGPKGEKGDGCTACPSLQGTVTDMAGRPGQPGPKGEQGPEGVGRPGKPGQPGLPGVQGPPGLKGVQGEPGPPGRGVQGPQGEPGAPGLPGIQGLPGPRGPPGPTGEKGAQGSPGVKGATGPVGPPGASVSGPPGRDGQQGQTGLRGTPVSTVPWGSRKGEPGECSCPSQGDLIFSGMPGPPGIPGPPGPPGVPGLQGVPGNNGLPGQPGLTAELGSLPIEQHLLKSICGDCVQGQRAHPGYLVEKGEKGDQGIPGVPGLDNCAQCFLSLERPRAEEARGDNSEGDPGCVGSPGLPGPPGLPGQRGEEGPPGMRGSPGPPGPIGPPGFPGAVGSPGLPGLQGERGLTGLTGDKGEPGPPGQPGYPGATGPPGLPGIKGERGYTGSAGEKGEPGPPGSEGLPGPPGPAGPRGERGPQGNSGEKGDQGFQGQPGFPGPPGPPGFPGKVGSPGPPGPQAEKGSEGIRGPSGLPGSPGPPGPPGIQGPAGLDGLDGKDGKPGLRGDPGPAGPPGLMGPPGFKGKTGHPGLPGPKGDCGKPGPPGSTGRPGAEGEPGAMGPQGRPGPPGHVGPPGPPGQPGPAGISAVGLKGDRGATGERGLAGLPGQPGPPGHPGPPGEPGTDGAAGKEGPPGKQGFYGPPGPKGDPGAAGQKGQAGEKGRAGMPGGPGKSGSMGPVGPPGPAGERGHPGAPGPSGSPGLPGVPGSMGDMVNYDEIKRFIRQEIIKMFDERMAYYTSRMQFPMEMAAAPGRPGPPGKDGAPGRPGLPGTKGEKGDIGIGIAGENGLPGPPGPQGPPGYGKMGATGPMGQQGIPGIPGPPGPMGQPGKAGHCNPSDCFGAMPMEQQYPPMKTMKGPFG

SEQ ID NO: 867862 - protein, 1195 aa, Homo sapiens
MWVSWAPGLWLLGLWATFGHGANTGAQCPPSQQEGLKLEHSSSLPANVTGFNLIHRLSLMKKSAIKKIRNPKGPLILRLGAAPVTQPTRRVFPRGLPEEFALVLTLLLKKHTHQKTWYLFQVTDANGYPQISLEVNSQERSLELRAQGQDGDFVSCIFPVPQLFDLRWHKLMLSVAGRVASVHVDCSSASSQPLGPRRPMRPVGHVFLGLDAEQGKPVSFDLQQVHIYCDPELVLEEGCCEILPAGCPPETSKARRDTQSNELIEINPQSEGKVYTRCFCLEEPQNSEVDAQLTGRISQKAERGAKVHQETAADECPPCVHGARDSNVTLAPSGPKGGKGERGLPGPPGSKGEKGARGNDCVRISPDAPLQCAEGPKGEKGESGALGPSGLPGSTGEKGQKGEKGDGGIKGVPGKPGRDGRPGEICVIGPKGQKGDPGFVGPEGLAGEPGPPGLPGPPGIGLPGTPGDPGGPPGPKGDKGSSGIPGKEGPGGKPGKPGVKGEKGDPCEVCPTLPEGFQNFVGLPGKPGPKGEPGDPVPARGDPGIQGIKGEKGEPCLSCSSVVGAQHLVSSTGASGDVGSPGFGLPGLPGRAGVPGLKGEKGNFGEAGPAGSPGPPGPVGPAGIKGAKGEPCEPCPALSNLQDGDVRVVALPGPSGEKGEPGPPGFGLPGKQGKAGERGLKGQKGDAGNPGDPGTPGTTGRPGLSGEPGVQGPAGPKGEKGDGCTACPSLQGTVTDMAGRPGQPGPKGEQGPEGVGRPGKPGQPGLPGVQGPPGLKGVQGEPGPPGRGVQGPQGEPGAPGLPGIQGLPGPRGPPGPTGEKGAQGSPGVKGATGPVGPPGASVSGPPGRDGQQGQTGLRGTPVSTVPWGSRKGEPGECSCPSQGDLIFSGMPGPPGIPGPPGPPGVPGLQGVPGNNGLPGQPGLTAELGSLPIEQHLLKSICGDCVQGQRAHPGYLVEKGEKGDQGIPGVPGLDNCAQCFLSLERPRAEEARGDNSEGDPGCVGSPGLPGPPGLPGQRGEEGPPGMRGSPGPPGPIGPPGFPGAVGSPGLPGLQGERGLTGLTGDKGEPGPPGQPGYPGATGPPGLPGIKGERGYTGSAGEKGEPGPPGSEGLPGPPGPAGPRGERGPQGNSGEKGDQGFQGSQAFRATGPMDTQATVDHLATWLSREGRKGSKPSGCVVPGARTLDRGPRRGGWK

SEQ ID NO: 867863 - protein, 78 aa, Homo sapiens
SDFPSVALPSLGPQGPPGYGKMGATGPMGQQGIPGIPGPPGPMGQPGKAGHCNPSDCFGAMPMEQQYPPMKTMKGPFG

SEQ ID NO: 867864 - protein, 68 aa, Homo sapiens
LLTSSSEALSTFQGPLRVSEPIKGVIGLCMRGCCVWGSQSTENPTDLSRPRVLPFNLFLFSFHTGFRW

SEQ ID NO: 867865 - protein, 381 aa, Homo sapiens
MFQLAVDLPACEALGPGPEFWLLPRSPPRPPRLWSFRSGQPARVPAPVWSPRPPRVERIHGQMQMPRARRAHRPRDQAAALVPKAGLAKPPAAAKSSPSLASSSSSSSSAVAGGAPEQQALLRRGKRHLQGDGLSSFDSRGSRPTTETEFIAWGPTGDEEALESNTFPGVYGPTTVSILQTRKTTVAATTTTTTTATPMTLQTKGFTESLDPRRRIPGGVSTTEPSTSPSNNGEVTQPPRILGEASGLAVHQIITITVSLIMVIAALITTLVLKNCCAQSGNTRRNSHQRKTNQQEESCQNLTDFPSARVPSSLDIFTAYNETLQCSHECVRASVPVYTDETLHSTTGEYKSTFNGNRPSSSDRHLIPVAFVSEKWFEISC

SEQ ID NO: 867866 - protein, 411 aa, Homo sapiens
MWIQQLLGLSSMSIRWPGRPLGSHAWILIAMFQLAVDLPACEALGPGPEFWLLPRSPPRPPRLWSFRSGQPARVPAPVWSPRPPRVERIHGQMQMPRARRAHRPRDQAAALVPKAGLAKPPAAAKSSPSLASSSSSSSSAVAGGAPEQQALLRRGKRHLQGDGLSSFDSRGSRPTTETEFIAWGPTGDEEALESNTFPGVYGPTTVSILQTRKTTVAATTTTTTTATPMTLQTKGFTESLDPRRRIPGGVSTTEPSTSPSNNGEVTQPPRILGEASGLAVHQIITITVSLIMVIAALITTLVLKNCCAQSGNTRRNSHQRKTNQQEESCQNLTDFPSARVPSSLDIFTAYNETLQCSHECVRASVPVYTDETLHSTTGEYKSTFNGNRPSSSDRHLIPVAFVSEKWFEISC

SEQ ID NO: 867867 - protein, 411 aa, Homo sapiens; identical to SEQ ID NO: 867866

SEQ ID NO: 867868 - protein, 553 aa, Homo sapiens
MVQRLWVSRLLRHRKAQLLLVNLLTFGLEVCLAAGITYVPPLLLEVGVEEKFMTMVLGIGPVLGLVCVPLLGSASDHWRGRYGRRRPFIWALSLGILLSLFLIPRAGWLAGLLCPDPRPLELALLILGVGLLDFCGQVCFTPLEALLSDLFRDPDHCRQAYSVYAFMISLGGCLGYLLPAIDWDTSALAPYLGTQEECLFGLLTLIFLTCVAATLLVAEEAALGPTEPAEGLSAPSLSPHCCPCRARLAFRNLGALLPRLHQLCCRMPRTLRRLFVAELCSWMALMTFTLFYTDFVGEGLYQGVPRAEPGTEARRHYDEGVRMGSLGLFLQCAISLVFSLVMDRLVQRFGTRAVYLASVAAFPVAAGATCLSHSVAVVTASAALTGFTFSALQILPYTLASLYHREKQVFLPKYRGDTGGASSEDSLMTSFLPGPKPGAPFPNGHVGAGGSGLLPPPPALCGASACDVSVRVVVGEPTEARVVPGRGICLDLAILDSAFLLSQVAPSLFMGSIVQLSQSVTAYMVSAAGLGLVAIYFATQVVFDKSDLAKYSA

SEQ ID NO: 867869 - protein, 553 aa, Homo sapiens; identical to SEQ ID NO: 867868

SEQ ID NO: 867870 - protein, 553 aa, Homo sapiens; identical to SEQ ID NO: 867868

SEQ ID NO: 867871 - protein, 527 aa, Homo sapiens [sequence omitted]

SEQ ID NO: 867872 - protein, 832 aa, Homo sapiens
MVVPSLKLQDLIEEIRGAKTQAQEREVIQKECAHIRASFRDGDPVHRHRQLAKLLYVHMLGYPAHFGQMECLKLIASSRFTDKRVGYLGAMLLLDERHDAHLLITNSIKKERVLAITWNQGDGRVGTLEIPGDCLLWVLKRTDFLRGLTDRPPKPCSDLSQGIQPVQGLALCTLSTMGSAEMCRDLAPEVEKLLLQPSPYVRKKAILTAVHMIRKVPELSSVFLPPCAQLLHERHHGILLGTITLITELCERSPAALRHFRKVVPQLVHILRTLVTMGYSTEHSISGVSDPFLQVQILRLLRILGRNHEESSETMNDLLAQVATNTDTSRNAGNAVLFETVLTIMDIRSAAGLRVLAVNILGRFLLNSDRNIRYVALTSLLRLVQSDHSAVQRHRPTVVECLRETDASLSRRALELSLALVNSSNVRAMMQELQAFLESCPPDLRADCASGILLAAERFAPTKRWHIDTILHVLTTAGTHVRDDAVANLTQLIGGAQELHAYSVRRLYNALAEDISQQPLVQVAAWCIGEYGDLLLAGNCEEIEPLQVDEEEVLALLEKVLQSHMSLPATRGYALTALMKLSTRLCGDNNRIRQVVSIYGSCLDVELQQRAVEYDTLFRKYDHMRAAILEKMPLVERDGPQADEEAKESKEAAQLSEAAPVPTEPQASQLLDLLDLLDGASGDVQHPPHLDPSPGGALVHLLDLPCVPPPPAPIPDLKVFEREGVQLNLSFIRPPENPALLLITITATNFSEGDVTHFICQAAVPKSLQLQLQAPSGNTVPARGGLPITQLFRILNPNKAPLRLKLRLTYDHFHQSVQEIFEVNNLPVESWQ

SEQ ID NO: 867873 - protein, 899 aa, Homo sapiens
MVVPSLKLQDLIEEIRGAKTQAQEREVIQKECAHIRASFRDGDPVHRHRQLAKLLYVHMLGYPAHFGQMECLKLIASSRFTDKRVGYLGAMLLLDERHDAHLLITNSIKKERVLAITWNQGDGRVGTLEIPGDCLLWVLKRTDFLRGLTDRPPKPCSDLSQGIQPVQGLALCTLSTMGSAEMCRDLAPEVEKLLLQPSPYVRKKAILTAVHMIRKVPELSSVFLPPCAQLLHERHHGKAVGPPILCFRSMDRRIENRMGTPAHRRRVVHTHRHTRNRLSCPWPPPFTSPTLTPGILLGTITLITELCERSPAALRHFRKVGLVKGQALGVVPQLVHILRTLVTMGYSTEHSISGVSDPFLQVQILRLLRILGRNHEESSETMNDLLAQVATNTDTSRNAGNAVLFETVLTIMDIRSAAGLRVLAVNILGRFLLNSDRNIRYVALTSLLRLVQSDHSAVQRHRPTVVECLRETDASLSRRALELSLALVNSSNVRAMMQELQAFLESCPPDLRADCASGILLAAERFAPTKRWHIDTILHVLTTAGTHVRDDAVANLTQLIGGAQELHAYSVRRLYNALAEDISQQPLVQVAAWCIGEYGDLLLAGNCEEIEPLQVDEEEVLALLEKVLQSHMSLPATRGYALTALMKLSTRLCGDNNRIRQVVSIYGSCLDVELQQRAVEYDTLFRKYDHMRAAILEKMPLVERDGPQADEEAKESKEAAQLSEAAPVPTEPQASQLLDLLDLLDGASGDVQHPPHLDPSPGGALVHLLDLPCVPPPPAPIPDLKVFEREGVQLNLSFIRPPENPALLLITITATNFSEGDVTHFICQAAVPKSLQLQLQAPSGNTVPARGGLPITQLFRILNPNKAPLRLKLRLTYDHFHQSVQEIFEVNNLPVESWQ

SEQ ID NO: 867874 - protein, 983 aa, Homo sapiens
MVVPSLKLQDLIEEIRGAKTQAQEREVIQKECAHIRASFRDGDPVHRHRQLAKLLYVHMLGYPAHFGQMECLKLIASSRFTDKRVGYLGAMLLLDERHDAHLLITNSIKKERVLAITWNQGDGRVGTLEIPGDCLLWVLKRTDFLRGLTDRPPKPCSDLSQGIQPVQGLALCTLSTMGSAEMCRDLAPEVEKLLLQPSPYVRKKAILTAVHMIRKVPELSSVFLPPCAQLLHERHHGKAVGPPILCFRSMDRRIENRMGTPAHRRRVVHTHRHTRNRLSCPWPPPFTSPTLTPGILLGTITLITELCERSPAALRHFRKVGLVKGQALGVVPQLVHILRTLVTMGYSTEHSISGVSDPFLQVQILRLLRILGRNHEESSETMNDLLAQVATNTDTSRNAGNAVLFETVLTIMDIRSAAGLRVLAVNILGRFLLNSDRNIRTGRGVGADGHGMIEPPTILTRYVALTSLLRLVQSDHSAVQRHRPTVVECLRETDASLSRLSSDRGDRRAGQRFPVPCGQDSSQFRAAGVRGLRGTGPWGSRGPEAWTRMTWATCMETLSPARRALELSLALVNSSNVRAMMQELQAFLESCPPDLRADCASGILLAAERFAPTKRWHIDTILHVLTTAGTHVRDDAVANLTQLIGGAQELHAYSVRRLYNALAEDISQQPLVQVAAWCIGEYGDLLLAGNCEEIEPLQVDEEEVLALLEKVLQSHMSLPATRGYALTALMKLSTRLCGDNNRIRQVVSIYGSCLDVELQQRAVEYDTLFRKYDHMRAAILEKMPLVERDGPQADEEAKESKEAAQLSEAAPVPTEPQASQLLDLLDLLDGASGDVQHPPHLDPSPGGALVHLLDLPCVPPPPAPIPDLKVFEREGVQLNLSFIRPPENPALLLITITATNFSEGDVTHFICQAAVPKSLQLQLQAPSGNTVPARGGLPITQLFRILNPNKAPLRLKLRLTYDHFHQSVQEIFEVNNLPVESWQ

SEQ ID NO: 867875 - protein, 859 aa, Homo sapiens
MVVPSLKLQDLIEEIRGAKTQAQEREVIQKECAHIRASFRDGDPVHRHRQLAKLLYVHMLGYPAHFGQMECLKLIASSRFTDKRVGYLGAMLLLDERHDAHLLITNSIKKERVLAITWNQGDGRVGTLEIPGDCLLWVLKRTDFLRGLTDRPPKPCSDLSQGIQPVQGLALCTLSTMGSAEMCRDLAPEVEKLLLQPSPYVRKKAILTAVHMIRKVPELSSVFLPPCAQLLHERHHGILLGTITLITELCERSPAALRHFRKVVPQLVHILRTLVTMGYSTEHSISGVSDPFLQVQILRLLRILGRNHEESSETMNDLLAQVATNTDTSRNAGNAVLFETVLTIMDIRSAAGLRVLAVNILGRFLLNSDRNIRYVALTSLLRLVQSDHSAVQRHRPTVVECLRETDASLSRRALELSLALVNSSNVRAMMQELQAFLESCPPDLRADCASGILLAAERFAPTKRWHIDTILHVLTTVRQGPVRELGRSGQDSPHCLGHAHTFQAGTHVRDDAVANLTQLIGGAQELHAYSVRRLYNALAEDISQQPLVQVAAWCIGEYGDLLLAGNCEEIEPLQVDEEEVLALLEKVLQSHMSLPATRGYALTALMKLSTRLCGDNNRIRQVVSIYGSCLDVELQQRAVEYDTLFRKYDHMRAAILEKMPLVERDGPQADEEAKESKEAAQLSEAAPVPTEPQASQLLDLLDLLDGASGDVQHPPHLDPSPGGALVHLLDLPCVPPPPAPIPDLKVFEREGVQLNLSFIRPPENPALLLITITATNFSEGDVTHFICQAAVPKSLQLQLQAPSGNTVPARGGLPITQLFRILNPNKAPLRLKLRLTYDHFHQSVQEIFEVNNLPVESWQ

SEQ ID NO: 867876 - protein, 797 aa, Homo sapiens
MVVPSLKLQDLIEEIRGAKTQAQEREVIQKECAHIRASFRDGDPVHRHRQLAKLLYVHMLGYPAHFGQMECLKLIASSRFTDKRVGYLGAMLLLDERHDAHLLITNSIKKERVLAITWNQGDGRVGTLEIPGDCLLWVLKRTDFLRGLTDRPPKPCSDLSQGIQPVQGLALCTLSTMGSAEMCRDLAPEVEKLLLQPSPYVRKKAILTAVHMIRKVPELSSVFLPPCAQLLHERHHGILLGTITLITELCERSPAALRHFRKVVPQLVHILRTLVTMGYSTEHSISGVSDPFLQVQILRLLRILGRNHEESSETMNDLLAQVATNTDTSRNAGNAVLFETVLTIMDIRSAAGLRVLAVNILGRFLLNSDRNIRYVALTSLLRLVQSDHSAVQRHRPTVVECLRETDASLSRRALELSLALVNSSNVRAMMQELQAFLESCPPDLRADCASGILLAAERFAPTKRWHIDTILHVLTTAGTHVRDDAVANLTQLIGGAQELHAYSVRRLYNALAEDISQQPLVQVAAWCIGEYGDLLLAGNCEEIEPLQVDEEEVLALLEKVLQSHMSLPATRGYALTALMKLSTRLCGDNKAAILEKMPLVERDGPQADEEAKESKEAAQLSEAAPVPTEPQASQLLDLLDLLDGASGDVQHPPHLDPSPGGALVHLLDLPCVPPPPAPIPDLKVFEREGVQLNLSFIRPPENPALLLITITATNFSEGDVTHFICQAAVPKSLQLQLQAPSGNTVPARGGLPITQLFRILNPNKAPLRLKLRLTYDHFHQSVQEIFEVNNLPVESWQ

SEQ ID NO: 867877 - protein, 478 aa, Homo sapiens
MVVPSLKLQDLIEEIRGAKTQAQEREVIQKECAHIRASFRDGDPVHRHRQLAKLLYVHMLGYPAHFGQMECLKLIASSRFTDKRVGYLGAMLLLDERHDAHLLITNSIKKERVLAITWNQGDGRVGTLEIPGDCLLWVLKRTDFLRGLTDRPPKPCSDLSQGIQPVQGLALCTLSTMGSAEMCRDLAPEVEKLLLQPSPYVRKKAILTAVHMIRKVPELSSVFLPPCAQLLHERHHGKAVGPPILCFRSMDRRIENRMGTPAHRRRVVHTHRHTRNRLSCPWPPPFTSPTLTPGILLGTITLITELCERSPAALRHFRKVGLVKGQALGVVPQLVHILRTLVTMGYSTEHSISGVSDPFLQVQILRLLRILGRNHEESSETMNDLLAQVATNTDTSRNAGNAVLFETVLTIMDIRSAAGLRVLAVNILGRFLLNSDRNIRYVALTSLLRLVQSDHSAVQRHRPTVVECLRETDASLSR

SEQ ID NO: 867878 - protein, 916 aa, Homo sapiens
MVVPSLKLQDLIEEIRGAKTQAQEREVIQKECAHIRASFRDGDPVHRHRQLAKLLYVHMLGYPAHFGQMECLKLIASSRFTDKRVGYLGAMLLLDERHDAHLLITNSIKKERVLAITWNQGDGRVGTLEIPGDCLLWVLKRTDFLRGLTDRPPKPCSDLSQGIQPVQGLALCTLSTMGSAEMCRDLAPEVEKLLLQPSPYVRKKAILTAVHMIRKVPELSSVFLPPCAQLLHERHHGKAVGPPILCFRSMDRRIENRMGTPAHRRRVVHTHRHTRNRLSCPWPPPFTSPTLTPGILLGTITLITELCERSPAALRHFRKVGLVKGQALGVVPQLVHILRTLVTMGYSTEHSISGVSDPFLQVQILRLLRILGRNHEESSETMNDLLAQVATNTDTSRNAGNAVLFETVLTIMDIRSAAGLRVLAVNILGRFLLNSDRNIRYVALTSLLRLVQSDHSAVQRHRPTVVECLRETDASLSRRALELSLALVNSSNVRAMMQELQAFLESCPPDLRADCASGILLAAERHHPACADNGEAGASQRAGQKWSRFTTLTGHAHTFQAGTHVRDDAVANLTQLIGGAQELHAYSVRRLYNALAEDISQQPLVQVAAWCIGEYGDLLLAGNCEEIEPLQVDEEEVLALLEKVLQSHMSLPATRGYALTALMKLSTRLCGDNNRIRQVVSIYGSCLDVELQQRAVEYDTLFRKYDHMRAAILEKMPLVERDGPQADEEAKESKEAAQLSEAAPVPTEPQASQLLDLLDLLDGASGDVQHPPHLDPSPGGALVHLLDLPCVPPPPAPIPDLKVFEREGVQLNLSFIRPPENPALLLITITATNFSEGDVTHFICQAAVPKSLQLQLQAPSGNTVPARGGLPITQLFRILNPNKAPLRLKLRLTYDHFHQSVQEIFEVNNLPVESWQ

SEQ ID NO: 867879 - protein, 478 aa, Homo sapiens; identical to SEQ ID NO: 867877

SEQ ID NO: 867880 - protein, 832 aa, Homo sapiens; identical to SEQ ID NO: 867872

SEQ ID NO: 867881 - protein, 194 aa, Homo sapiens
GNVCLWRICALQRLLPILQVSAEQLQALASQLLDLLDLLDGASGDVQHPPHLDPSPGGALVHLLDLPCVPPPPAPIPDLKVFEREGVQLNLSFIRPPENPALLLITITATNFSEGDVTHFICQAAVPKSLQLQLQAPSGNTVPARGGLPITQLFRILNPNKAPLRLKLRLTYDHFHQSVQEIFEVNNLPVESWQ

SEQ ID NO: 867882 - protein, 832 aa, Homo sapiens; identical to SEQ ID NO: 867872

SEQ ID NO: 867883 - protein, 478 aa, Homo sapiens; identical to SEQ ID NO: 867877

SEQ ID NO: 867884 - protein, 322 aa, Homo sapiens
MVVPSLKLQDLIEEIRGAKTQAQEREVIQKECAHIRASFRDGDPVHRHRQLAKLLYVHMLGYPAHFGQMECLKLIASSRFTDKRVGYLGAMLLLDERHDAHLLITNSIKKERVLAITWNQGDGRVGTLEIPGDCLLWVLKRTDFLRGLTDRPPKPCSDLSQGIQPVQGLALCTLSTMGSAEMCRDLAPEVEKLLLQPSPYVRKKAILTAVHMIRKVPELSSVFLPPCAQLLHERHHGKAVGPPILCFRSMDRRIENRMGTPAHRRRVVHTHRHTRNRLSCPWPPPFTSPTLTPGILLGTITLITELCERSPAALRHFRKVGW

SEQ ID NO: 867885 - protein, 55 aa, Homo sapiens
MPEMRSCLRQYSPSWISALQLAYGYHPLCLSHYGPAHHLTHTGPACWFLPPSPII

SEQ ID NO: 867886 - protein, 482 aa, Homo sapiens
HEELRRRAHCPSCWFSTLVLAPGVCKMKIEEVKSTTKTQRIASHSHVKGLGLDESGLAKQAASGLVGQENAREACGVIVELIKSKKMAGRAVLLAGPPGTGKTALALAIAQELGSKVPFCPMVGSEVYSTEIKKTEVLMENFRRAIGLRIKETKEVYEGEVTELTPCETENPMGGYGKTISHVIIGLKTAKGTKQLKLDPSIFESLQKERVEAGDVIYIEANSGAVKRQGRCDTYATEFDLEAEEYVPLPKGDVHKKKEIIQDVTLHDLDVANARPQGGQDILSMMGQLMKPKKTEITDKLRGEINKVVNKYIDQGIAELVPGVLFVDEVHMLDIECFTYLHRALESSIAPIVIFASNRGNCVIRGTEDITSPHGIPLDLLDRVMIIRTMLYTPQEMKQIIKIRAQTEGINISEEALNHLGEIGTKTTLRYSVQLLTPANLLAKINGKDSIEKEHVEEISELFYDAKSSAKILADQQDKYMK

SEQ ID NO: 867887 - protein, 962 aa, Homo sapiens
MVVPSLKLQDLIEEIRGAKTQAQEREVIQKECAHIRASFRDGDPVHRHRQLAKLLYVHMLGYPAHFGQMECLKLIASSRFTDKRVGYLGAMLLLDERHDAHLLITNSIKKERVLAITWNQGDGRVGTLEIPGDCLLWVLKRTDFLRGLTDRPPKPCSDLSQGIQPVQGLALCTLSTMGSAEMCRDLAPEVEKLLLQPSPYVRKKAILTAVHMIRKVPELSSVFLPPCAQLLHERHHGKAVGPPILCFRSMDRRIENRMGTPAHRRRVVHTHRHTRNRLSCPWPPPFTSPTLTPGILLGTITLITELCERSPAALRHFRKVGLVKGQALGVVPQLVHILRTLVTMGYSTEHSISGVSDPFLQVQILRLLRILGRNHEESSETMNDLLAQVATNTDTSRNAGNAVLFETVLTIMDIRSAAGLRVLAVNILGRFLLNSDRNIRYVALTSLLRLVQSDHSAVQRHRPTVVECLRETDASLSRLSSDRGDRRAGQRFPVPCGQDSSQFRAAGVRGLRGTGPWGSRGPEAWTRMTWATCMETLSPARRALELSLALVNSSNVRAMMQELQAFLESCPPDLRADCASGILLAAERFAPTKRWHIDTILHVLTTAGTHVRDDAVANLTQLIGGAQELHAYSVRRLYNALAEDISQQPLVQVAAWCIGEYGDLLLAGNCEEIEPLQVDEEEVLALLEKVLQSHMSLPATRGYALTALMKLSTRLCGDNNRIRQVVSIYGSCLDVELQQRAVEYDTLFRKYDHMRAAILEKMPLVERDGPQADEEAKESKEAAQLSEAAPVPTEPQASQLLDLLDLLDGASGDVQHPPHLDPSPGGALVHLLDLPCVPPPPAPIPDLKVFEREGVQLNLSFIRPPENPALLLITITATNFSEGDVTHFICQAAVPKSLQLQLQAPSGNTVPARGGLPITQLFRILNPNKAPLRLKLRLTYDHFHQSVQEIFEVNNLPVESWQ

SEQ ID NO: 867888 - protein, 906 aa, Homo sapiens
MVVPSLKLQDLIEEIRGAKTQAQEREVIQKECAHIRASFRDGDPVHRHRQLAKLLYVHMLGYPAHFGQMECLKLIASSRFTDKRVGYLGAMLLLDERHDAHLLITNSIKKERVLAITWNQGDGRVGTLEIPGDCLLWVLKRTDFLRGLTDRPPKPCSDLSQGIQPVQGLALCTLSTMGSAEMCRDLAPEVEKLLLQPSPYVRKKAILTAVHMIRKVPELSSVFLPPCAQLLHERHHGILLGTITLITELCERSPAALRHFRKVVPQLVHILRTLVTMGYSTEHSISGVSDPFLQVQILRLLRILGRNHEESSETMNDLLAQVATNTDTSRNAGNAVLFETVLTIMDIRSAAGLRVLAVNILGRFLLNSDRNIRYVALTSLLRLVQSDHSAVQRHRPTVVECLRETDASLSRRALELSLALVNSSNVRAMMQELQAFLESCPPDLRADCASGILLAAERFAPTKRWHIDTILHVLTTAGTHVRDDAVANLTQLIGGAQELHAYSVRRLYNALAEDISQQPLVQVAAWCIGEYGDLLLAGNCEEIEPLQVDEEEVLALLEKVLQSHMSLPATRGYALTALMKLSTRLCGDNKYRRGPSPLRDGLSLGPPIFEFLSRHTCPALPTPKPLGSCFGAKSGYFPAPWAFPSCHILQWHTAIATYILHWPSRIRQVVSIYGSCLDVELQQRAVEYDTLFRKYDHMRAAILEKMPLVERDGPQADEEAKESKEAAQLSEAAPVPTEPQASQLLDLLDLLDGASGDVQHPPHLDPSPGGALVHLLDLPCVPPPPAPIPDLKVFEREGVQLNLSFIRPPENPALLLITITATNFSEGDVTHFICQAAVPKSLQLQLQAPSGNTVPARGGLPITQLFRILNPNKAPLRLKLRLTYDHFHQSVQEIFEVNNLPVESWQ

SEQ ID NO: 867889 - protein, 980 aa, Homo sapiens
MVVPSLKLQDLIEEIRGAKTQAQEREVIQKECAHIRASFRDGDPVHRHRQLAKLLYVHMLGYPAHFGQMECLKLIASSRFTDKRVGYLGAMLLLDERHDAHLLITNSIKKERVLAITWNQGDGRVGTLEIPGDCLLWVLKRTDFLRGLTDRPPKPCSDLSQGIQPVQGLALCTLSTMGSAEMCRDLAPEVEKLLLQPSPYVRKKAILTAVHMIRKVPELSSVFLPPCAQLLHERHHGKAVGPPILCFRSMDRRIENRMGTPAHRRRVVHTHRHTRNRLSCPWPPPFTSPTLTPGILLGTITLITELCERSPAALRHFRKVGLVKGQALGVVPQLVHILRTLVTMGYSTEHSISGVSDPFLQVQILRLLRILGRNHEESSETMNDLLAQVATNTDTSRNAGNAVLFETVLTIMDIRSAAGLRVLAVNILGRFLLNSDRNIRYVALTSLLRLVQSDHSAVQRHRPTVVECLRETDASLSRLSSDRGDRRAGQRFPVPCGQDSSQFRAAGVRGLRGTGPWGSRGPEAWTRMTWATCMETLSPARRALELSLALVNSSNVRAMMQELQGRGSQCPVAKTRASLEQLEKGTKGDRSLGKQRAWGILLAAERFAPTKRWHIDTILHVLTTAGTHVRDDAVANLTQLIGGAQELHAYSVRRLYNALAEDISQQPLVQVAAWCIGEYGDLLLAGNCEEIEPLQVDEEEVLALLEKVLQSHMSLPATRGYALTALMKLSTRLCGDNNRIRQVVSIYGSCLDVELQQRAVEYDTLFRKYDHMRAAILEKMPLVERDGPQADEEAKESKEAAQLSEAAPVPTEPQASQLLDLLDLLDGASGDVQHPPHLDPSPGGALVHLLDLPCVPPPPAPIPDLKVFEREGVQLNLSFIRPPENPALLLITITATNFSEGDVTHFICQAAVPKSLQLQLQAPSGNTVPARGGLPITQLFRILNPNKAPLRLKLRLTYDHFHQSVQEIFEVNNLPVESWQ

SEQ ID NO: 867890 - protein, 925 aa, Homo sapiens
MVVPSLKLQDLIEEIRGAKTQAQEREVIQKECAHIRASFRDGDPVHRHRQLAKLLYVHMLGYPAHFGQMECLKLIASSRFTDKRVGYLGAMLLLDERHDAHLLITNSIKKERVLAITWNQGDGRVGTLEIPGDCLLWVLKRTDFLRGLTDRPPKPCSDLSQGIQPVQGLALCTLSTMGSAEMCRDLAPEVEKLLLQPSPYVRKKAILTAVHMIRKVPELSSVFLPPCAQLLHERHHGKAVGPPILCFRSMDRRIENRMGTPAHRRRVVHTHRHTRNRLSCPWPPPFTSPTLTPGILLGTITLITELCERSPAALRHFRKVGLVKGQALGVVPQLVHILRTLVTMGYSTEHSISGVSDPFLQVQILRLLRILGRNHEESSETMNDLLAQVATNTDTSRNAGNAVLFETVLTIMDIRSAAGLRVLAVNILGRFLLNSDRNIRYVALTSLLRLVQSDHSAVQRHRPTVVECLRETDASLSRRALELSLALVNSSNVRAMMQELQAFLESCPPDLRADCASGILLAAERLRCPGVEEGRIWGASVPGLMSHISPRFAPTKRWHIDTILHVLTTAGTHVRDDAVANLTQLIGGAQELHAYSVRRLYNALAEDISQQPLVQVAAWCIGEYGDLLLAGNCEEIEPLQVDEEEVLALLEKVLQSHMSLPATRGYALTALMKLSTRLCGDNNRIRQVVSIYGSCLDVELQQRAVEYDTLFRKYDHMRAAILEKMPLVERDGPQADEEAKESKEAAQLSEAAPVPTEPQASQLLDLLDLLDGASGDVQHPPHLDPSPGGALVHLLDLPCVPPPPAPIPDLKVFEREGVQLNLSFIRPPENPALLLITITATNFSEGDVTHFICQAAVPKSLQLQLQAPSGNTVPARGGLPITQLFRILNPNKAPLRLKLRLTYDHFHQSVQEIFEVNNLPVESWQ

SEQ ID NO: 867891 - protein, 379 aa, Homo sapiens
RASVPREIRAACSIDTITACADKAGTHVRDDAVANLTQLIGGAQELHAYSVRRLYNALAEDISQQPLVQVAAWCIGEYGDLLLAGNCEEIEPLQVDEEEVLALLEKVLQSHMSLPATRGYALTALMKLSTRLCGDNNRIRQVVSIYGSCLDVELQQRAVEYDTLFRKYDHMRAAILEKMPLVERDGPQADEEAKESKEAAQLSEAAPVPTEPQASQLLDLLDLLDGASGDVQHPPHLDPSPGGALVHLLDLPCVPPPPAPIPDLKVFEREGVQLNLSFIRPPENPALLLITITATNFSEGDVTHFICQAAVPKSLQLQLQAPSGNTVPARGGLPITQLFRILNPNKAPLRLKLRLTYDHFHQSVQEIFEVNNLPVESWQ

SEQ ID NO: 867892 - protein, 794 aa, Homo sapiens
MVVPSLKLQDLIEEIRGAKTQAQEREVIQKECAHIRASFRDGDPVHRHRQLAKLLYVHMLGYPAHFGQMECLKLIASSRFTDKRVGYLGAMLLLDERHDAHLLITNSIKKERVLAITWNQGDGRVGTLEIPGDCLLWVLKRTDFLRGLTDRPPKPCSDLSQGIQPVQGLALCTLSTMGSAEMCRDLAPEVEKLLLQPSPYVRKKAILTAVHMIRKVPELSSVFLPPCAQLLHERHHGILLGTITLITELCERSPAALRHFRKVVPQLVHILRTLVTMGYSTEHSISGVSDPFLQVQILRLLRILGRNHEESSETMNDLLAQVATNTDTSRNAGNAVLFETVLTIMDIRSAAGLRVLAVNILGRFLLNSDRNIRYVALTSLLRLVQSDHSAVQRHRPTVVECLRETDASLSRRALELSLALVNSSNVRAMMQELQAFLESCPPDLRADCASGILLAAERFAPTKRWHIDTILHVLTTAGTHVRDDAVANLTQLIGGAQELHAYSVRRLYNALAEDISQQPLVQVAAWCIGEYGDLLLAGNCEEIEPLQVDEEEVLALLEKVLQSHMSLPATRGYALTALMKLSTRLCGDNNRIRQVVSIYGSCLDVELQQRAVEYDTLFRKYDHMRAAILEKMPLVERDGPQADEEAKESKEAAQLSEAAPVPTEPQASQLLDLLDLLDGASGDVQHPPHLDPSPGGALVHLLDLPCVPPPPAPIPDLKVFEREGVQLNLSFIRPPENPALLLITITATNFSEGDVTHFICQAAVPKVCKDQSSEVAWGLQEKRPLSGGGGWETV

SEQ ID NO: 867893 - protein, 794 aa, Homo sapiens; identical to SEQ ID NO: 867892

SEQ ID NO: 867894 - protein, 590 aa, Homo sapiens
MVVPSLKLQDLIEEIRGAKTQAQEREVIQKECAHIRASFRDGDPVHRHRQLAKLLYVHMLGYPAHFGQMECLKLIASSRFTDKRVGYLGAMLLLDERHDAHLLITNSIKKERVLAITWNQGDGRVGTLEIPGDCLLWVLKRTDFLRGLTDRPPKPCSDLSQGIQPVQGLALCTLSTMGSAEMCRDLAPEVEKLLLQPSPYVRKKAILTAVHMIRKVPELSSVFLPPCAQLLHERHHGILLGTITLITELCERSPAALRHFRKVVPQLVHILRTLVTMGYSTEHSISGVSDPFLQVQILRLLRILGRNHEESSETMNDLLAQVATNTDTSRNAGNAVLFETVLTIMDIRSAAGLRVLAVNILGRFLLNSDRNIRYVALTSLLRLVQSDHSAVQRHRPTVVECLRETDASLSRRALELSLALVNSSNVRAMMQELQAFLESCPPDLRADCASGILLAAERFAPTKRWHIDTILHVLTTAGTHVRDDAVANLTQLIGGAQELHAYSVRRLYNALAEDISQQPLVQVAAWCIGEYGDLLLAGNCEEIEPLQVDEEEVLALLEKVLQSHMSLPATRGYALTALMKLSTRLCGDNK

SEQ ID NO: 867895 - protein, 494 aa, Homo sapiens
MVVPSLKLQDLIEEIRGAKTQAQEREVIQKECAHIRASFRDGDPVHRHRQLAKLLYVHMLGYPAHFGQMECLKLIASSRFTDKRVGYLGAMLLLDERHDAHLLITNSIKKERVLAITWNQGDGRVGTLEIPGDCLLWVLKRTDFLRGLTDRPPKPCSDLSQGIQPVQGLALCTLSTMGSAEMCRDLAPEVEKLLLQPSPYVRKKAILTAVHMIRKVPELSSVFLPPCAQLLHERHHGILLGTITLITELCERSPAALRHFRKVVPQLVHILRTLVTMGYSTEHSISGVSDPFLQVQILRLLRILGRNHEESSETMNDLLAQVATNTDTSRNAGNAVLFETVLTIMDIRSAAGLRVLAVNILGRFLLNSDRNIRYVALTSLLRLVQSDHSAVQRHRPTVVECLRETDASLSRRALELSLALVNSSNVRAMMQELQAFLESCPPDLRADCASGILLAAERFAPTKRWHIDTILHVLTTVRQGPVRELGRSGQDSPH

SEQ ID NO: 867896 - protein, 551 aa, Homo sapiens
MLCSLLLCECLLLVAGYAHDDDWIDPTDMLNYDAASGTMRKSQAKYGISGEKDVSPDLSCADEISECYHKLDSLTYKIDECEKKKREDYESQSNPVFRRYLNKILIEAGKLGLPDENKGDMHYDAEIILKRETLLEIQKFLNGEDWKPGALDDALSDILINFKFHDFETWKWRFEDSFGVDPYNVLMVLLCLLCIVVLVATELWTYVRWYTQLRRVLIISFLFSLGWNWMYLYKLAFAQHQAEVAKMEPLNNVCAKKMDWTGSIWEWFRSSWTYKDDPCQKYYELLLVNPIWLVPPTKALAVTFTTFVTEPLKHIGKGTGEFIKALMKEIPALLHLPVLIIMALAILSFCYGAGKSVHVLRHIGGPESEPPQALRPRDRRRQEEIDYRPDGGAGDADFHYRGQMGPTEQGPYAKTYEGRREILRERDVDLRFQTGNKSPEVLRAFDVPDAEAREHPTVVPSHKSPVLDTKPKETGGILGEGTPKESSTESSQSAKPVSGQDTSGNTEGSPAAEKAQLKSEAAGSPDQGSTYSPARGVAGPRGQDPVSSPCG

SEQ ID NO: 867897 - protein, 551 aa, Homo sapiens; identical to SEQ ID NO: 867896

SEQ ID NO: 867898 - protein, 551 aa, Homo sapiens; identical to SEQ ID NO: 867896

SEQ ID NO: 867899 - protein, 551 aa, Homo sapiens; identical to SEQ ID NO: 867896

SEQ ID NO: 867900 - protein, 211 aa, Homo sapiens
MYFFSLQSFCYGAGKSVHVLRHIGGPESEPPQALRPRDRRRQEEIDYRPDGGAGDADFHYRGQMGPTEQGPYAKTYEGRREILRERDVDLRFQTGNKSPEVLRAFDVPDAEAREHPTVVPSHKSPVLDTKPKETGGILGEGTPKESSTESSQSAKPVSGQDTSGNTEGSPAAEKAQLKSEAAGSPDQGSTYSPARGVAGPRGQDPVSSPCG

SEQ ID NO: 867901 - protein, 501 aa, Homo sapiens
MLCSLLLCECLLLVAGYAHDDDWIDPTDMLNYDAASGTMRKSQAKYGISGEKDVSPDLSCADEISECYHKLDSLTYKIDECEKKKREDYESQSNPVFRRYLNKILIEAGKLGLFHDFETWKWRFEDSFGVDPYNVLMVLLCLLCIVVLVATELWTYVRWYTQLRRVLIISFLFSLGWNWMYLYKLAFAQHQAEVAKMEPLNNVCAKKMDWTGSIWEWFRSSWTYKDDPCQKYYELLLVNPIWLVPPTKALAVTFTTFVTEPLKHIGKGTGEFIKALMKEIPALLHLPVLIIMALAILSFCYGAGKSVHVLRHIGGPESEPPQALRPRDRRRQEEIDYRPDGGAGDADFHYRGQMGPTEQGPYAKTYEGRREILRERDVDLRFQTGNKSPEVLRAFDVPDAEAREHPTVVPSHKSPVLDTKPKETGGILGEGTPKESSTESSQSAKPVSGQDTSGNTEGSPAAEKAQLKSEAAGSPDQGSTYSPARGVAGPRGQDPVSSPCG

SEQ ID NO: 867902 - protein, 122 aa, Homo sapiens
MYQTQRHESIPRWYPVINHLFWIQSPRRQVESWGKAHRKKAVLKAASRPSLSLAKTHQGIQKVHPQRKRPSSSLKPQAAQTKAAHTAPQEVWLDHVDRIRSAAPVARGTPAQTTASSLLRAL

SEQ ID NO: 867903 - protein, 551 aa, Homo sapiens; identical to SEQ ID NO: 867896

SEQ ID NO: 867904 - protein, 551 aa, Homo sapiens; identical to SEQ ID NO: 867896

SEQ ID NO: 867905 - protein, 551 aa, Homo sapiens; identical to SEQ ID NO: 867896

SEQ ID NO: 867906 - protein, 551 aa, Homo sapiens; identical to SEQ ID NO: 867896

SEQ ID NO: 867907 - protein, 551 aa, Homo sapiens; identical to SEQ ID NO: 867896

SEQ ID NO: 867908 - protein, 501 aa, Homo sapiens; identical to SEQ ID NO: 867901

SEQ ID NO: 867909 - protein, 225 aa, Homo sapiens [sequence omitted]

SEQ ID NO: 867910 - protein, 574 aa, Homo sapiens
MAPPGSSTVFLLALTIIASTWALTPTHYLTKHDVERLKASLDRPFTNLESAFYSIVGLSSLGAQVPDAKKACTYIRSNLDPSNVDSLFYAAQASQALSGCEISISNETKDLLLAAVSEDSSVTQIYHAVAALSGFGLPLASQEALSALTARLSKEETVLATVQALQTASHLSQQADLRSIVEEIEDLVARLDELGGVYLQFEEGLETTALFVAATYKLMDHVGTEPSIKEDQVIQLMNAIFSKKNFESLSEAFSVASAAAVLSHNRYHVPVVVVPEGSASDTHEQAILRLQVTNVLSQPLTQATVKLEHAKSVASRATVLQKTSFTPVGDVFELNFMNVKFSSGYYDFLVEVEGDNRYIANTVELRVKISTEVGITNVDLSTVDKDQSIAPKTTRVTYPAKAKGTFIADSHQNFALFFQLVDVNTGAELTPHQTFVRLHNQKTGQEVVFVAEPDNKNVYKFELDTSERKIEFDSASGTYTLYLIIGDATLKNPILWNVADVVIKFPEEEAPSTVLSQNLFTPKQEIQHLFREPEKRPPTVVSQYIHCPDPLAVASALRSVDPDWCQCLQLHFCS

SEQ ID NO: 867911 - protein, 574 aa, Homo sapiens; identical to SEQ ID NO: 867910

SEQ ID NO: 867912 - protein, 574 aa, Homo sapiens; identical to SEQ ID NO: 867910

SEQ ID NO: 867913 - protein, 574 aa, Homo sapiens; identical to SEQ ID NO: 867910

SEQ ID NO: 867914 - protein, 574 aa, Homo sapiens; identical to SEQ ID NO: 867910

SEQ ID NO: 867915 - protein, 525 aa, Homo sapiens
MTWRDIVGLSSLGAQVPDAKKACTYIRSNLDPSNVDSLFYAAQASQALSGCEISISNETKDLLLAAVSEDSSVTQIYHAVAALSGFGLPLASQEALSALTARLSKEETVLATVQALQTASHLSQQADLRSIVEEIEDLVARLDELGGVYLQFEEGLETTALFVAATYKLMDHVGTEPSIKEDQVIQLMNAIFSKKNFESLSEAFSVASAAAVLSHNRYHVPVVVVPEGSASDTHEQAILRLQVTNVLSQPLTQATVKLEHAKSVASRATVLQKTSFTPVGDVFELNFMNVKFSSGYYDFLVEVEGDNRYIANTVELRVKISTEVGITNVDLSTVDKDQSIAPKTTRVTYPAKAKGTFIADSHQNFALFFQLVDVNTGAELTPHQTFVRLHNQKTGQEVVFVAEPDNKNVYKFELDTSERKIEFDSASGTYTLYLIIGDATLKNPILWNVADVVIKFPEEEAPSTVLSQNLFTPKQEIQHLFREPEKRPPTVVSQYIHCPDPLAVASALRSVDPDWCQCLQLHFCS

SEQ ID NO: 867916 - protein, 520 aa, Homo sapiens
PTKASTRRVLIGRGRKACTYIRSNLDPSNVDSLFYAAQASQALSGCEISISNETKDLLLAAVSEDSSVTQIYHAVAALSGFGLPLASQEALSALTARLSKEETVLATVQALQTASHLSQQADLRSIVEEIEDLVARLDELGGVYLQFEEGLETTALFVAATYKLMDHVGTEPSIKEDQVIQLMNAIFSKKNFESLSEAFSVASAAAVLSHNRYHVPVVVVPEGSASDTHEQAILRLQVTNVLSQPLTQATVKLEHAKSVASRATVLQKTSFTPVGDVFELNFMNVKFSSGYYDFLVEVEGDNRYIANTVELRVKISTEVGITNVDLSTVDKDQSIAPKTTRVTYPAKAKGTFIADSHQNFALFFQLVDVNTGAELTPHQTFVRLHNQKTGQEVVFVAEPDNKNVYKFELDTSERKIEFDSASGTYTLYLIIGDATLKNPILWNVADVVIKFPEEEAPSTVLSQNLFTPKQEIQHLFREPEKRPPTVVSQYIHCPDPLAVASALRSVDPDWCQCLQLHFCS

SEQ ID NO: 867917 - protein, 517 aa, Homo sapiens
MSPLVLSVPDAKKACTYIRSNLDPSNVDSLFYAAQASQALSGCEISISNETKDLLLAAVSEDSSVTQIYHAVAALSGFGLPLASQEALSALTARLSKEETVLATVQALQTASHLSQQADLRSIVEEIEDLVARLDELGGVYLQFEEGLETTALFVAATYKLMDHVGTEPSIKEDQVIQLMNAIFSKKNFESLSEAFSVASAAAVLSHNRYHVPVVVVPEGSASDTHEQAILRLQVTNVLSQPLTQATVKLEHAKSVASRATVLQKTSFTPVGDVFELNFMNVKFSSGYYDFLVEVEGDNRYIANTVELRVKISTEVGITNVDLSTVDKDQSIAPKTTRVTYPAKAKGTFIADSHQNFALFFQLVDVNTGAELTPHQTFVRLHNQKTGQEVVFVAEPDNKNVYKFELDTSERKIEFDSASGTYTLYLIIGDATLKNPILWNVADVVIKFPEEEAPSTVLSQNLFTPKQEIQHLFREPEKRPPTVVSQYIHCPDPLAVASALRSVDPDWCQCLQLHFCS

SEQ ID NO: 867918 - protein, 574 aa, Homo sapiens; identical to SEQ ID NO: 867910

SEQ ID NO: 867919 - protein, 481 aa, Homo sapiens
PTKASTRRVLIGRGSKDLLLAAVSEDSSVTQIYHAVAALSGFGLPLASQEALSALTARLSKEETVLATVQALQTASHLSQQADLRSIVEEIEDLVARLDELGGVYLQFEEGLETTALFVAATYKLMDHVGTEPSIKEDQVIQLMNAIFSKKNFESLSEAFSVASAAAVLSHNRYHVPVVVVPEGSASDTHEQAILRLQVTNVLSQPLTQATVKLEHAKSVASRATVLQKTSFTPVGDVFELNFMNVKFSSGYYDFLVEVEGDNRYIANTVELRVKISTEVGITNVDLSTVDKDQSIAPKTTRVTYPAKAKGTFIADSHQNFALFFQLVDVNTGAELTPHQTFVRLHNQKTGQEVVFVAEPDNKNVYKFELDTSERKIEFDSASGTYTLYLIIGDATLKNPILWNVADVVIKFPEEEAPSTVLSQNLFTPKQEIQHLFREPEKRPPTVVSQYIHCPDPLAVASALRSVDPDWCQCLQLHFCS

SEQ ID NO: 867920 - protein, 662 aa, Homo sapiens
MAPPGSSTVFLLALTIIASTWALTPTHYLTKHDVERLKASLDRPFTNLESAFYSIVGLSSLGAQVPDAKKACTYIRSNLDPSNVDSLFYAAQASQALSGCEISISNETKDLLLAAVSEDSSVTQIYHAVAALSGFGLPLASQEALSALTARLSKEETVLATVQALQTASHLSQQADLRSIVEEIEDLVARLDELGGVYLQFEEGLETTALFVAATYKLMDHVGTEPSIKEDQVIQLMNAIFSKKNFESLSEAFSVASAAAVLSHNRYHVPVVVVPEGSASDTHEQAILRLQVTNVLSQPLTQATVKLEHAKSVASRATVLQKTSFTPVGDVFELNFMNVKFSSGYYDFLVEVEGDNRYIANTVELRVKISTEVGITNVDLSTVDKDQSIAPKTTRVTYPAKAKGTFIADSHQNFALFFQLVDVNTGAELTPHQTFVRLHNQKTGQEVVFVAEPDNKNVYKFELDTSERKIEFDSASGTYTLPHFIPLGGIGPFGKKPNPFLGNWWVVGWLELYPEPRVDVGPFKVLPVKEERLPSNWSLFPRNLFHSQNREISGTCFRGSLGGKRGRPPPWCPNTFTALILSPLLLLFALWIRIGANVSNFTFAPSTIIFHLGHAAMLGLMYVYWTQLNMFQTLKYLAILGSVTFLAGNRMLAQQAVKRTAH

SEQ ID NO: 867921 - protein, 606 aa, Homo sapiens
MAPPGSSTVFLLALTIIASTWALTPTHYLTKHDVERLKASLDRPFTNLESAFYSIVGLSSLGAQVPDAKKACTYIRSNLDPSNVDSLFYAAQASQALSGCEISISNETKDLLLAAVSEDSSVTQIYHAVAALSGFGLPLASQEALSALTARLSKEETVLATVQALQTASHLSQQADLRSIVEEIEDLVARLDELGGVYLQFEEGLETTALFVAATYKLMDHVGTEPSIKEDQVIQLMNAIFSKKNFESLSEAFSVASAAAVLSHNRYHVPVVVVPEGSASDTHEQAILRLQVTNVLSQPLTQATVKLEHAKSVASRATVLQKTSFTPVGDVFELNFMNVKFSSGYYDFLVEVEGDNRYIANTVELRVKISTEVGITNVDLSTVDKDQSIAPKTTRVTYPAKAKGTFIADSHQNFALFFQLVDVNTGAELTPHQTFVRLHNQKTGQEVVFVAEPDNKNVYKFELDTSERKIEFDSASGTYTLYLIIGDATLKNPILWNVADVVIKFPEEEAPSTVLSQNLFTPKQEIQHLFREPEKRPPTVVSQYIHCPDPLAVASALRSAMLGLMYVYWTQLNMFQTLKYLAILGSVTFLAGNRMLAQQAVKRTAH

SEQ ID NO: 867922 - protein, 590 aa, Homo sapiens
MAPPGSSTVFLLALTIIASTWALTPTHYLTKHDVERLKASLDRPFTNLESAFYSIVGLSSLGAQVPDAKKACTYIRSNLDPSNVDSLFYAAQASQALSGCEISISNETKDLLLAAVSEDSSVTQIYHAVAALSGFGLPLASQEALSALTARLSKEETVLARVWSTVLESRSLFSKRTVQALQTASHLSQQADLRSIVEEIEDLVARLDELGGVYLQFEEGLETTALFVAATYKLMDHVGTEPSIKEDQVIQLMNAIFSKKNFESLSEAFSVASAAAVLSHNRYHVPVVVVPEGSASDTHEQAILRLQVTNVLSQPLTQATVKLEHAKSVASRATVLQKTSFTPVGDVFELNFMNVKFSSGYYDFLVEVEGDNRYIANTVELRVKISTEVGITNVDLSTVDKDQSIAPKTTRVTYPAKAKGTFIADSHQNFALFFQLVDVNTGAELTPHQTFVRLHNQKTGQEVVFVAEPDNKNVYKFELDTSERKIEFDSASGTYTLYLIIGDATLKNPILWNVADVVIKFPEEEAPSTVLSQNLFTPKQEIQHLFREPEKRPPTVVSQYIHCPDPLAVASALRSVDPDWCQCLQLHFCS

SEQ ID NO: 867923 - protein, 470 aa, Homo sapiens
MAPPGSSTVFLLALTIIASTWALTPTHYLTKHDVERLKASLDRPFTNLESAFYSIVGLSSLGAQVPDAKKACTYIRSNLDPSNVDSLFYAAQASQALSGCEISISNETKDLLLAAVSEDSSVTQIYHAVAALSGFGLPLASQEALSALTARLSKEETVLATVQALQTASHLSQQADLRSIVEEIEDLVARLDELGGVYLQFEEGLETTALFVAATYKLMDHVGTEPSIKEDQVIQLMNAIFSKKNFESLSEAFSVASAAAVLSHNRYHVPVVVVPEGSASDTHEQAILRLQVTNVLSQPLTQATVKLEHAKSVASRATVLQKTSFTPVGDVFELNFMNVKFSSGYYDFLVEVEGDNRYIANTVELRVKISTEVGITNVDLSTVDKDQSIAPKTTRVTYPAKAKGTFIADSHQNFALFFQLVDVNTGAELTPHQTFVRLHNQKTGQEVVFVAEPDNKNVYKFELDTSETAH

SEQ ID NO: 867924 - protein, 357 aa, Homo sapiens
QLTYINGSSRVGRRDPWDGPAAIFSKKNFESLSEAFSVASAAAVLSHNRYHVPVVVVPEGSASDTHEQAILRLQVTNVLSQPLTQATVKLEHAKSVASRATVLQKTSFTPVGDVFELNFMNVKFSSGYYDFLVEVEGDNRYIANTVELRVKISTEVGITNVDLSTVDKDQSIAPKTTRVTYPAKAKGTFIADSHQNFALFFQLVDVNTGAELTPHQTFVRLHNQKTGQEVVFVAEPDNKNVYKFELDTSERKIEFDSASGTYTLYLIIGDATLKNPILWNVADVVIKFPEEEAPSTVLSQNLFTPKQEIQHLFREPEKRPPTVVSQYIHCPDPLAVASALRSVDPDWCQCLQLHFCS

SEQ ID NO: 867925 - protein, 316 aa, Homo sapiens
ALEYPHLLPHVPVVVVPEGSASDTHEQAILRLQVTNVLSQPLTQATVKLEHAKSVASRATVLQKTSFTPVGDVFELNFMNVKFSSGYYDFLVEVEGDNRYIANTVELRVKISTEVGITNVDLSTVDKDQSIAPKTTRVTYPAKAKGTFIADSHQNFALFFQLVDVNTGAELTPHQTFVRLHNQKTGQEVVFVAEPDNKNVYKFELDTSERKIEFDSASGTYTLYLIIGDATLKNPILWNVADVVIKFPEEEAPSTVLSQNLFTPKQEIQHLFREPEKRPPTVVSQYIHCPDPLAVASALRSVDPDWCQCLQLHFCS

SEQ ID NO: 867926 - protein, 416 aa, Homo sapiens
MAPPGSSTVFLLALTIIASTWALTPTHYLTKHDVERLKASLDRPFTNLESAFYSIVGLSSLGAQVPDAKKACTYIRSNLDPSNVDSLFYAAQASQALSGCEISISNETKDLLLAAVSEDSSVTQIYHAVAALSGFGLPLASQEALSALTARLSKEETVLATVQALQTASHLSQQADLRSIVEEIEDLVARLDELGGVYLQFEEGLETTALFVAATYKLMDHVGTEPSIKEDQVIQLMNAIFSKKNFESLSEAFSVASAAAVLSHNRYHVPVVVVPEGSASDTHEQAILRLQVTNVLSQPLTQATVKLEHAKSVASRATVLQKTSFTPVGDVFELNFMNVKFSSGYYDFLVEVEGDNRYIANTVELRVKISTEWLPCVFPGMVGGPIPGTPADLEPSCPGCGAPFSYAGCPMATVRS

SEQ ID NO: 867927 - protein, 395 aa, Homo sapiens
MAPPGSSTVFLLALTIIASTWALTPTHYLTKHDVERLKASLDRPFTNLESAFYSIVGLSSLGAQVPDAKKACTYIRSNLDPSNVDSLFYAAQASQALSGCEISISNETKDLLLAAVSEDSSVTQIYHAVAALSGFGLPLASQEALSALTARLSKEETVLATVQALQTASHLSQQADLRSIVEEIEDLVARLDELGGVYLQFEEGLETTALFVAATYKLMDHVGTEPSIKEDQVIQLMNAIFSKKNFESLSEAFSVASAAAVLSHNRYHVPVVVVPEGSASDTHEQAILRLQVTNVLSQPLTQATVKLEHAKSVASRATVLQKTSFTPVGDVFELNFMNVKFSSGYYDFLVEVEGDNRYIANTVELRVKISTEVGSVTFLAGNRMLAQQAVKRTAH

SEQ ID NO: 867928 - protein, 312 aa, Homo sapiens
MAPPGSSTVFLLALTIIASTWALTPTHYLTKHDVERLKASLDRPFTNLESAFYSIVGLSSLGAQVPDAKKACTYIRSNLDPSNVDSLFYAAQASQALSGCEISISNETKDLLLAAVSEDSSVTQIYHAVAALSGFGLPLASQEALSALTARLSKEETVLATVQALQTASHLSQQADLRSIVEEIEDLVARLDELGGVYLQFEEGLETTALFVAATYKLMDHVGTEPSIKEDQVIQLMNAIFSKKNFESLSEAFSVASAAAVLSHNRYHVPVVVVPEGSASDTHEQAILRQSDAGPAGSQENSTLVPEERWKF

SEQ ID NO: 867929 - protein, 316 aa, Homo sapiens
MAPPGSSTVFLLALTIIASTWALTPTHYLTKHDVERLKASLDRPFTNLESAFYSIVGLSSLGAQVPDAKKACTYIRSNLDPSNVDSLFYAAQASQALSGCEISISNETKDLLLAAVSEDSSVTQIYHAVAALSGFGLPLASQEALSALTARLSKEETVLATVQALQTASHLSQQADLRSIVEEIEDLLLLRSACWDEKRGDLIIEFEVIFPERIPQTSRTVLEQVLPNSYLSSPRTDQGPFQSSRHPGPYYHVADHAEGAEGPGQAPRTADRPPEHISQPPKARTLDPRAPELLGHQVVGPARTQASRLPTARPPS

SEQ ID NO: 867930 - protein, 205 aa, Homo sapiens
MAPPGSSTVFLLALTIIASTWALTPTHYLTKHDVERLKASLDRPFTNLESAFYSIVGLSSLGAQVPDAKKACTYIRSNLDPSNVDSLFYAAQASQALSGCEISISNETKDLLLAAVSEDSSVTQIYHAVAALSGFGLPLASQEALSALTARLSKEETVLATVQALQSASGMAEGETGGVHHLFNLCRNDFGHSHTAICGIPTDAD

SEQ ID NO: 867931 - protein, 160 aa, Homo sapiens [sequence omitted]

SEQ ID NO: 867932 - protein, 110 aa, Homo sapiens
MAPPGSSTVFLLALTIIASTWALTPTHYLTKHDVERLKASLDRPFTNLESAFYSIVGLSSLGAQVPDAKTSIGTYIQINQGRCDSKGHGPHGRGGVFMREGPKPLWADLP

SEQ ID NO: 867933 - protein, 302 aa, Homo sapiens
PTKASTRRVLIGRGSKDLLLAAVSEDSSVTQIYHAVAALSGFGLPLASQEALSALTARLSKEETVLATVQALQTASHLSQQADLRSIVEEIEDLVARLDELGGVYLQFEEGLETTALFVAATYKLMDHVGTEPSIKEDQVIQLMNAIFSKKNFESLSEAFSVASAAAVLSHNRYHVPVVVVPEGSASDTHEQAILRLQVTNVLSQPLTQATVKLEHAKSVASRATVLQKTSFTPVGDVFELNFMNVKFSSGYYDFLVEVEGDNRYIANTVELRVKISTEVGITNVDLSTVDKDQSIAPKTTR

SEQ ID NO: 867934 - protein, 142 aa, Homo sapiens
NHVILDGGMAPPGSSTVFLLALTIIASTWALTPTHYLTKHDVERLKASLDRPFTNLESAFYSIVGLSSLGAQVPDAKKACTYIRSNLDPSNVDSLFYAAQASQALSGCEISISNETKDLLLAAVSEDSSVTQIYHAVAALSP

SEQ ID NO: 867935 - protein, 574 aa, Homo sapiens; identical to SEQ ID NO: 867910

SEQ ID NO: 867936 - protein, 574 aa, Homo sapiens; identical to SEQ ID NO: 867910

SEQ ID NO: 867937 - protein, 574 aa, Homo sapiens; identical to SEQ ID NO: 867910

SEQ ID NO: 867938 - protein, 574 aa, Homo sapiens; identical to SEQ ID NO: 867910

SEQ ID NO: 867939 - protein, 542 aa, Homo sapiens
MAPPGSSTVFLLALTIIASTWALTPTHYLTKHDVERLKASLDRPFTNLESAFYSIVGLSSLGAQVPDAKISISNETKDLLLAAVSEDSSVTQIYHAVAALSGFGLPLASQEALSALTARLSKEETVLATVQALQTASHLSQQADLRSIVEEIEDLVARLDELGGVYLQFEEGLETTALFVAATYKLMDHVGTEPSIKEDQVIQLMNAIFSKKNFESLSEAFSVASAAAVLSHNRYHVPVVVVPEGSASDTHEQAILRLQVTNVLSQPLTQATVKLEHAKSVASRATVLQKTSFTPVGDVFELNFMNVKFSSGYYDFLVEVEGDNRYIANTVELRVKISTEVGITNVDLSTVDKDQSIAPKTTRVTYPAKAKGTFIADSHQNFALFFQLVDVNTGAELTPHQTFVRLHNQKTGQEVVFVAEPDNKNVYKFELDTSERKIEFDSASGTYTLYLIIGDATLKNPILWNVADVVIKFPEEEAPSTVLSQNLFTPKQEIQHLFREPEKRPPTVVSQYIHCPDPLAVASALRSVDPDWCQCLQLHFCS

SEQ ID NO: 867940 - protein, 574 aa, Homo sapiens; identical to SEQ ID NO: 867910

SEQ ID NO: 867941 - protein, 562 aa, Homo sapiens
MAPPGSSTVFLLALTIIASTWALTPTHYLTKHDVERLKASLDRPFTNLESAFYSIVGLSSLGAQVPDAKKACTYIRSNLDPSNVDSLFYAAQASQALSGCEISISNETKDLLLAAVSEDSSVTQIYHAVAALSGFGLPLASQEALSALTARLSKEETVLATVQALQTASHLSQQADLRSIVEEIEDLVARLDELGGVYLQFEEGLETTALFVAATYKLDQVIQLMNAIFSKKNFESLSEAFSVASAAAVLSHNRYHVPVVVVPEGSASDTHEQAILRLQVTNVLSQPLTQATVKLEHAKSVASRATVLQKTSFTPVGDVFELNFMNVKFSSGYYDFLVEVEGDNRYIANTVELRVKISTEVGITNVDLSTVDKDQSIAPKTTRVTYPAKAKGTFIADSHQNFALFFQLVDVNTGAELTPHQTFVRLHNQKTGQEVVFVAEPDNKNVYKFELDTSERKIEFDSASGTYTLYLIIGDATLKNPILWNVADVVIKFPEEEAPSTVLSQNLFTPKQEIQHLFREPEKRPPTVVSQYIHCPDPLAVASALRSVDPDWCQCLQLHFCS

SEQ ID NO: 867942 - protein, 599 aa, Homo sapiens
MAPPGSSTVFLLALTIIASTWALTPTHYLTKHDVERLKASLDRPFTNLESAFYSIVGLSSLGAQVPDAKKACTYIRSNLDPSNVDSLFYAAQASQALSGCEISISNETKDLLLAAVSEDSSVTQIYHAVAALSGFGLPLASQEALSALTARLSKEETVLATVQALQTASHLSQQADLRSIVEEIEDLVARLDELGGVYLQFEEGLETTALFVAATYKLMDHVGTEPSIKEDQVIQLMNAIFSKKNFESLSEAFSVASAAAVLSHNRYHVPVVVVPEGSASDTHEQAILRLQVTNVLSQPLTQATVKLEHAKSVASRATVLQKTSFTPVGDVFELNFMNVKFSSGYYDFLVEVEGDNRYIANTVELRVKISTEVGITNVDLSTVDKDQSIAPKTTRVTYPAKAKGTFIADSHQNFALFFQLVDVNTGAELTPHQTFVRLHNQKTGQEVVFVAEPDNKNVYKFELDTSERKIEFDSASGTYTLYLIIGDATLKNPILWNVADVVIKFPEEEAPSTVLSQNLFTPKQEIQWIRIGANVSNFTFAPSTIIFHLGHAAMLGLMYVYWTQLNMFQTLKYLAILGSVTFLAGNRMLAQQAVKRTAH

SEQ ID NO: 867943 - protein, 449 aa, Homo sapiens
MQRKHVPTSDLTLIPAMWIPSSTLPRPARPSQDVRTVQALQTASHLSQQADLRSIVEEIEDLVARLDELGGVYLQFEEGLETTALFVAATYKLMDHVGTEPSIKEDQVIQLMNAIFSKKNFESLSEAFSVASAAAVLSHNRYHVPVVVVPEGSASDTHEQAILRLQVTNVLSQPLTQATVKLEHAKSVASRATVLQKTSFTPVGDVFELNFMNVKFSSGYYDFLVEVEGDNRYIANTVELRVKISTEVGITNVDLSTVDKDQSIAPKTTRVTYPAKAKGTFIADSHQNFALFFQLVDVNTGAELTPHQTFVRLHNQKTGQEVVFVAEPDNKNVYKFELDTSERKIEFDSASGTYTLYLIIGDATLKNPILWNVADVVIKFPEEEAPSTVLSQNLFTPKQEIQHLFREPEKRPPTVVSQYIHCPDPLAVASALRSVDPDWCQCLQLHFCS

SEQ ID NO: 867944 - protein, 459 aa, Homo sapiens
MAPPGSSTVFLLALTIIASTWALTPTHYLTKHDVERLKASLDRPFTNLESAFYSIVGLSSLGAQVPDAKKACTYIRSNLDPSNVDSLFYAAQASQALSGCEISISNETKDLLLAAVSEDSSVTQIYHAVAALSGFGLPLASQEALSALTARLSKEETVLATVQALQTASHLSQQADLRSIVEEIEDLVARLDELGGVYLQFEEGLETTALFVAATYKLMDHVGTEPSIKEDQVIQLMNAIFSKKNFESLSEAFSVASAAAVLSHNRYHVPVVVVPEGSASDTHEQAILRLQVTNVLSQPLTQATVKLEHAKSVASRATVLQKTSFTPVGDVFELNFMNVKFSSGYYDFLVEVEGDNRYIANTVELRVKISTEVGITNVDLSTVDKDQSIAPKTTRVTYPAKAKGTFIADSHQNFAFGSGLVPMSPTSLLLLARLYFTWDMLLCWDSCMSTGLSSTCSRP

SEQ ID NO: 867945 - protein, 514 aa, Homo sapiens
MAPPGSSTVFLLALTIIASTWALTPTHYLTKHDVERLKASLDRPFTNLESAFYSIVGLSSLGAQVPDAKKACTYIRSNLDPSNVDSLFYAAQASQALSGCEISISNETKDLLLAAVSEDSSVTQIYHAVAALSGFGLPLASQEALSALTARLSKEETVLATVQALQTASHLSQQADLRSIVEEIEDLVARLDELGGVYLQFEEGLETTALFVAATYKLMDHVGTEPSIKEDQVIQLMNAIFSKKNFESLSEAFSVASAAAVLSHNRYHVPVVVVPEGSASDTHEQAILRLQVTNVLSQPLTQATVKLEHAKSVASRATVLQKTSFTPVGDVFELNFMNVKFSSGYYDFLVEVEGDNRYIANTVELRVKISTEVGITNVDLSTVDKDQSIAPKTTRVTYPAKAKGTFIADSHQNFALFFQLVDVNTGAELTPHQQGAFCPDFPLTRKELRQGQVGVMVGRRPRRTTKRLYHTFRTLGDTRLAEQTICSFGTLCRLGSLKILHVYSSEYGTLERER

SEQ ID NO: 867946 - protein, 395 aa, Homo sapiens
MAPPGSSTVFLLALTIIASTWALTPTHYLTKHDVERLKASLDRPFTNLESAFYSIVGLSSLGAQVPDAKKACTYIRSNLDPSNVDSLFYAAQASQALSGCEISISNETKDLLLAAVSEDSSVTQIYHAVAALSGFGLPLASQEALSALTARLSKEETVLATVQALQTASHLSQQADLRSIVEEIEDLVARLDELGGVYLQFEEGLETTALFVAATYKLMDHVGTEPSIKEDQVIQLMNAIFSKKNFESLSEAFSVASAAAVLSHNRYHVPVVVVPEGSASDTHEQAILRLQVTNVLSQPLTQATVKLEHAKSVASRATVLQKTSFTPVGDVFELNFMNVKFSSGYYDFLVEVEGDNRYIANTVELRVKISTEVGITNVDLSTVDKDQSIAPKTTR

SEQ ID NO: 867947 - protein, 395 aa, Homo sapiens; identical to SEQ ID NO: 867946

SEQ ID NO: 867948 - protein, 261 aa, Homo sapiens
RARYPTCERHAFTPVGDVFELNFMNVKFSSGYYDFLVEVEGDNRYIANTVELRVKISTEVGITNVDLSTVDKDQSIAPKTTRVTYPAKAKGTFIADSHQNFALFFQLVDVNTGAELTPHQTFVRLHNQKTGQEVVFVAEPDNKNVYKFELDTSERKIEFDSASGTYTLYLIIGDATLKNPILWNVADVVIKFPEEEAPSTVLSQNLFTPKQEIQHLFREPEKRPPTVVSQYIHCPDPLAVASALRSVDPDWCQCLQLHFCS

SEQ ID NO: 867949 - protein, 187 aa, Homo sapiens
MAPPGSSTVFLLALTIIASTWALTPTHYLTKHDVERLKASLDRPFTNLESAFYSIVGLSSLGAQVPDAKKACTYIRSNLDPSNVDSLFYAAQASQALSGCEISISNETKDLLLAAVSEDSSVTQIYHAVAALSGFGLPLASQEAGSGLVPMSPTSLLLLARLYFTWDMLLCWDSCMSTGLSSTCSRP

SEQ ID NO: 867950 - protein, 172 aa, Homo sapiens
MATVVLGGDTMGPERIFPNQTEELGHQGPSEGTGDWSSEEPEEEQEETGSGPAGYSYQPLNQDPEQEEVELAPVGDGDVVADIQDRIQALGLHLPDPPLESEDEDEEGATALNNHSSIPMDPEHVELVKRTMAGVSLPAPGVPAWAREISDAQWEDVVQKALQARQASPAWK

SEQ ID NO: 867951 - protein, 187 aa, Homo sapiens
  misc_feature (4)..(4): Xaa can be any naturally occurring amino acid
NSAXGEAAALSAPARMATVVLGGDTMGPERIFPNQTEELGHQGPSEGTGDWSSEEPEEEQEETGSGPAGYSYQPLNQDPEQEEVELAPVGDGDVVADIQDRIQALGLHLPDPPLESEDEDEEGATALNNHSSIPMDPEHVELVKRTMAGVSLPAPGVPAWAREISDAQWEDVVQKALQARQASPAWK

SEQ ID NO: 867952 - protein, 185 aa, Homo sapiens
MGPERHLSGAPARMATVVLGGDTMGPERIFPNQTEELGHQGPSEGTGDWSSEEPEEEQEETGSGPAGYSYQPLNQDPEQEEVELAPVGDGDVVADIQDRIQALGLHLPDPPLESEDEDEEGATALNNHSSIPMDPEHVELVKRTMAGVSLPAPGVPAWAREISDAQWEDVVQKALQARQASPAWK

SEQ ID NO: 867953 - protein, 172 aa, Homo sapiens; identical to SEQ ID NO: 867950

SEQ ID NO: 867954 - protein, 172 aa, Homo sapiens; identical to SEQ ID NO: 867950

SEQ ID NO: 867955 - protein, 149 aa, Homo sapiens
  misc_feature (4)..(4): Xaa can be any naturally occurring amino acid
NSAXGEAAALSAPARMATVVLGGDTMGPERIFPNQTEELGHQGPSEGTGDWSSEEPEEEQEETGSGPAGYSYQPLNQDPEQEEVELAPVGDGDVVADIQDRIQALGLHLPDPPLESEDEDEEGATALNNHSSIPMDPVYRASRPVRTRP

SEQ ID NO: 867956 - protein, 185 aa, Homo sapiens; identical to SEQ ID NO: 867952

SEQ ID NO: 867957 - protein, 172 aa, Homo sapiens; identical to SEQ ID NO: 867950

SEQ ID NO: 867958 - protein, 115 aa, Homo sapiens
LGTLYWRCSLMVELAPVGDGDVVADIQDRIQALGLHLPDPPLESEDEDEEGATALNNHSSIPMDPEHVELVKRTMAGVSLPAPGVPAWAREISDAQWEDVVQKALQARQASPAWK

SEQ ID NO: 867959 - protein, 541 aa, Homo sapiens
MAGAIIENMSTKKLCIVGGILLVFQIIAFLVGGLIAPGPTTAVSYMSVKCVDARKNHHKTKWFVPWGPNHCDKIRDIEEAIPREIEANDIVFSVHIPLPHMEMSPWFQFMLFILQLDIAFKLNNQIRENAEVSMDVSLAYRDDAFAEWTEMAHERVPRKLKCTFTSPKTPEHEGRYYECDVLPFMEIGSVAHKFYLLNIRLPVNEKKKINVGIGEIKDIRLVGIHQNGGFTKVWFAMKTFLTPSIFIIMVWYWRRITMMSRPPVLLEKVIFALGISMTFINIPVEWFSIGFDWTWMLLFGDIRQGIFYAMLLSFWIIFCGEHMMDQHERNHIAGYWKQVGPIAVGSFCLFIFDMCERGVQLTNPFYSIWTTDIGTELAMAFIIVAGICLCLYFLFLCFMVFQVFRNISGKQSSLPAMSKVRRLHYEGLIFRFKFLMLITLACAAMTVIFFIVSQVTEGHWKWGGVTVQVNSAFFTGIYGMWNLYVFALMFLYAPSHKNYGEDQSNGDLGVHSGEELQLTTTITHVDGPTEIYKLTRKEAQE

SEQ ID NO: 867960 - protein, 574 aa, Homo sapiens
NGHERVPRKLKCTFTSPKTPEHEGRYYECDVLPFMEMGSVAHKFYLLNIRLPVNEKKKINVGIGEIKDIRLVGIHQNGGFTKGVDARKNHHKTKWFVPWGPNHCDKIRDIEEAIPREIEANDIVFSVHIPLPHMEMSPWFQFMLFILQLDIAFKLNNQIRENAEVSMDVSLAYRDDAFAEWTEMAHERVPRKLKCTFTSPKTPEHEGRYYECDVLPFMEIGSVAHKFYLLNIRLPVNEKKKINVGIGEIKDIRLVGIHQNGGFTKVWFAMKTFLTPSIFIIMVWYWRRITMMSRPPVLLEKVIFALGISMTFINIPVEWFSIGFDWTWMLLFGDIRQGIFYAMLLSFWIIFCGEHMMDQHERNHIAGYWKQVGPIAVGSFCLFIFDMCERGVQLTNPFYSIWTTDIGTELAMAFIIVAGICLCLYFLFLCFMVFQVFRNISGKQSSLPAMSKVRRLHYEGLIFRFKFLMLITLACAAMTVIFFIVSQVTEGHWKWGGVTVQVNSAFFTGIYGMWNLYVFALMFLYAPSHKNYGEDQSNGDLGVHSGEELQLTTTITHVDGPTEIYKLTRKEAQE

SEQ ID NO: 867961 - protein, 541 aa, Homo sapiens; identical to SEQ ID NO: 867959

SEQ ID NO: 867962 - protein, 437 aa, Homo sapiens
TFEWEKSSSWVRAVLPGLASEAGENAEVSMDVSLAYRDDAFAEWTEMAHERVPRKLKCTFTSPKTPEHEGRYYECDVLPFMEIGSVAHKFYLLNIRLPVNEKKKINVGIGEIKDIRLVGIHQNGGFTKVWFAMKTFLTPSIFIIMVWYWRRITMMSRPPVLLEKVIFALGISMTFINIPVEWFSIGFDWTWMLLFGDIRQGIFYAMLLSFWIIFCGEHMMDQHERNHIAGYWKQVGPIAVGSFCLFIFDMCERGVQLTNPFYSIWTTDIGTELAMAFIIVAGICLCLYFLFLCFMVFQVFRNISGKQSSLPAMSKVRRLHYEGLIFRFKFLMLITLACAAMTVIFFIVSQVTEGHWKWGGVTVQVNSAFFTGIYGMWNLYVFALMFLYAPSHKNYGEDQSNGDLGVHSGEELQLTTTITHVDGPTEIYKLTRKEAQE

SEQ ID NO: 867963 - protein, 264 aa, Homo sapiens
MAGAIIENMSTKKLCIVGGILLVFQIIAFLVGGLIAPGPTTAVSYMSVKCVDARKNHHKTKWFVPWGPNHCDKIRDIEEAIPREIEANDIVFSVHIPLPHMEMSPWFQFMLFILQLDIAFKLNNQIRENAEVSMDVSLAYRDDAFAEWTEMAHERVPRKLKCTFTSPKTPEHEGRYYECDVLPFMEIGSVAHKFYLLNIRLPVNEKKKINVGIGEIKDIRLVGIHQNGGFTKVWFAMKTFLTPSIFIIMVWAEWGVEYLTFFLF

SEQ ID NO: 867964 - protein, 264 aa, Homo sapiens; identical to SEQ ID NO: 867963

SEQ ID NO: 867965 - protein, 127 aa, Homo sapiens
MAGAIIENMSTKKLCIVGGILLVFQIIAFLVGGLIAPGPTTAVSYMSVKCVDARKNHHKTKWFVPWGPNHCDKIRDIEEAIPREIEANDIVFSVHIPLPHMEMSPWFQFMLFILQLDIAFKLNNQIS

SEQ ID NO: 867966 - protein, 541 aa, Homo sapiens; identical to SEQ ID NO: 867959

SEQ ID NO: 867967 - protein, 644 aa, Homo sapiens
CDPLPCSFKRPQAAERPQSQLRALGEPEPAAPGESVRAPSVPVPSSPRSSTSEVLQRPERRRGRRECVRGGSKKLTLKHLFQGEKKKGGRKNGWGNYRKHEHQEAVHCWWDSARVPNHRLSGGRLDCIPINETIPNINSPGPTTAVSYMSVKCVDARKNHHKTKWFVPWGPNHCDKIRDIEEAIPREIEANDIVFSVHIPLPHMEMSPWFQFMLFILQLDIAFKLNNQIRENAEVSMDVSLAYRDDAFAEWTEMAHERVPRKLKCTFTSPKTPEHEGRYYECDVLPFMEIGSVAHKFYLLNIRLPVNEKKKINVGIGEIKDIRLVGIHQNGGFTKVWFAMKTFLTPSIFIIMVWYWRRITMMSRPPVLLEKVIFALGISMTFINIPVEWFSIGFDWTWMLLFGDIRQGIFYAMLLSFWIIFCGEHMMDQHERNHIAGYWKQVGPIAVGSFCLFIFDMCERGVQLTNPFYSIWTTDIGTELAMAFIIVAGICLCLYFLFLCFMVFQVFRNISGKQSSLPAMSKVRRLHYEGLIFRFKFLMLITLACAAMTVIFFIVSQVTEGHWKWGGVTVQVNSAFFTGIYGMWNLYVFALMFLYAPSHKNYGEDQSNGDLGVHSGEELQLTTTITHVDGPTEIYKLTRKEAQE

SEQ ID NO: 867968 - protein, 541 aa, Homo sapiens; identical to SEQ ID NO: 867959

SEQ ID NO: 867969 - protein, 545 aa, Homo sapiens
MAGAIIENMSTKKLCIVGGILLVFQIIAFLVGGLIAPGPTTAVSYMSVKCVDARKNHHKTKWFVPWGPNHCDKIRDIEEAIPREIEANDIVFSVHIPLPHMEMSPWFQFMLFILQLDIAFKLNNQIRENAEVSMDVSLAYRDDAFAEWTEMAHERVPRKLKCTFTSPKTPEHEGRYYECDVLPFMEIGSVAHKFYLLNIRLPVNEKKKINVGIGEIKDIRLVGIHQNGGFTKVWFAMKTFLTPSIFIIMVWYWRRITMMSRPPVLLEKVIFALGISMTFINIPVEWFSIGFDWTWMLLFGDIRQGIFYAMLLSFWIIFCGEHMMDQHERNHIAGYWKQVGPIAVGSFCLFIFDMCERGVQLTNPFYSIWTTDIGTELAMAFIIVAGICLCLYFLFLCFMVFQVFRNISGKQSSLPAMSKVRRLHYEGLIFRFKFLMLITLACAAMTVIFFIVSQVTEGHWKWGGVTVQVNSAFFTGIYGMWNLYVFALMFLYAPSHKNYGEDQSNGMQLPCKSREDCALFVSELYQELFSASKYSFINDNAASGI

SEQ ID NO: 867970 - protein, 356 aa, Homo sapiens
MAGAIIENMSTKKLCIVGGILLVFQIIAFLVGGLIAPGPTTAVSYMSVKCVDARKNHHKTKWFVPWGPNHCDKIRDIEEAIPREIEANDIVFSVHIPLPHMEMSPWFQFMLFILQLDIAFKLNNQIRENAEVSMDVSLAYRDDAFAEWTEMAHERVPRKLKCTFTSPKTPEHEGRYYECDVLPFMEIGSVAHKFYLLNIRLPVNEKKKINVGIGEIKDIRLVGIHQNGGFTKVWFAMKTFLTPSIFIIMVWYWRRITMMSRPPVLLEKVIFALGISMTFINIPVEWFSIGFDWTWMLLFGDIRQGIFYAMLLSFWIIFCGEHMMVRAAGRDRRLYQLLCAGCQADTCPPLPLVSSG

SEQ ID NO: 867971 - protein, 103 aa, Homo sapiens
MQVYMEPPPPPPLSHSVRSECLHERASGRLAPPPQPVSQTRVSQPCFLAPRTRVAGPLQPRATGPYRAPPHQQEGGWLCPEPGGEAASPVCECRDLPEPPGPL

SEQ ID NO: 867972 - protein, 103 aa, Homo sapiens; identical to SEQ ID NO: 867971

SEQ ID NO: 867973 - protein, 34 aa, Homo sapiens
MPPVGPLISKGGFREQSEVKGLETQATQPAGAAE

SEQ ID NO: 867974 - protein, 103 aa, Homo sapiens; identical to SEQ ID NO: 867971

SEQ ID NO: 867975 - protein, 97 aa, Homo sapiens
PASAGLHCETCQSCFVKNNKVVTEICDLKTRLPSPQGSWASGKTGPCLPSRGCSLWEGEWVRPSLLRVEPRVGPGCHYRTEAVSRWAGPGWPLSLHL

SEQ ID NO: 867976 - protein, 103 aa, Homo sapiens; identical to SEQ ID NO: 867971

SEQ ID NO: 867977 - protein, 103 aa, Homo sapiens; identical to SEQ ID NO: 867971

SEQ ID NO: 867978 - protein, 708 aa, Homo sapiens
MSERGIKWACEYCTYENWPSAIKCTMCRAQRPSGTIITEDPFKSGSSDVGRDWDPSSTEGGSSPLICPDSSARPRVKSSYSMENANKWSCHMCTYLNWPRAIRCTQCLSQRRTRSPTESPQSSGSGSRPVAFSVDPCEEYNDRNKLNTRTQHWTCSVCTYENWAKAKRCVVCDHPRPNNIEAIELAETEEASSIINEQDRARWRGSCSSGNSQRRSPPATKRDSEVKMDFQRIELAGAVGSKEELEVDFKKLKQIKNRMKKTDWLFLNACVGVVEGDLAAIEAYKSSGGDIARQLTADEVRLLNRPSAFDVGYTLVHLAIRFQRQDMLAILLTEVSQQAAKCIPAMVCPELTEQIRREIAASLHQRKGDFACYILTDLVTFTLPADIEDLPPTVQEKLFDEVLDRDVQKELEEESPIINWSLELATRLDSRLYALWNRTAGDCLLDSVLQATWGIYDKDSVLRKALHDSLHDCSHWFYTRWKDWESWYSQSFGLHFSLREEQWQEDWAFILSLASQPGASLEQTHIFVLAHILRRPIIVYGVKYYKSFRGETLGYTRFQGVYLPLLWEQSFCWKSPIALGYTRGHFSALVAMENDGYGNRGAGANLNTDDDVTITFLPLVDSERKLLHVHFLSAQELGNEEQQEKLLREWLDCCVTEGGVLVAMQKSSRRRNHPLVTQMVEKWLDRYRQIRPCTSLSDGEEDEDDEDE

SEQ ID NO: 867979 - protein, 708 aa, Homo sapiens; identical to SEQ ID NO: 867978

SEQ ID NO: 867980 - protein, 117 aa, Homo sapiens
MENDGYGNRGAGANLNTDDDVTITFLPLVDSERKLLHVHFLSAQELGNEEQQEKLLREWLDCCVTEGGVLVAMQKSSRRRNHPLVTQMVEKWLDRYRQIRPCTSLSDGEEDEDDEDE

SEQ ID NO: 867981 - protein, 213 aa, Homo sapiens
GTGPESFGSEDWAFILSLASQPGASLEQTHIFVLAHILRRPIIVYGVKYYKSFRGETLGYTRFQGVYLPLLWEQSFCWKSPIALGYTRGHFSALVAMENDGYGNRGAGANLNTDDDVTITFLPLVDSERKLLHVHFLSAQELGNEEQQEKLLREWLDCCVTEGGVLVAMQKSSRRRNHPLVTQMVEKWLDRYRQIRPCTSLSDGEEDEDDEDE

SEQ ID NO: 867982 - protein, 256 aa, Homo sapiens [sequence omitted]

SEQ ID NO: 867983 - protein, 708 aa, Homo sapiens; identical to SEQ ID NO: 867978

SEQ ID NO: 867984 - protein, 708 aa, Homo sapiens; identical to SEQ ID NO: 867978

SEQ ID NO: 867985 - protein, 476 aa, Homo sapiens
MSERGIKWACEYCTYENWPSAIKCTMCRAQRPSGTIITEDPFKSGSSDVGRDWDPSSTEGGSSPLICPDSSARPRVKSSYSMENANKWSCHMCTYLNWPRAIRCTQCLSQRRTRSPTESPQSSGSGSRPVAFSVDPCEEYNDRNKLNTRTQHWTCSVCTYENWAKAKRCVVCDHPRPNNIEAIELAETEEASSIINEQDRARWRGSCSSGNSQRRSPPATKRDSEVKMDFQRIELAGAVGSKEELEVDFKKLKQIKNRMKKTDWLFLNACVGVVEGDLAAIEAYKSSGGDIARQLTADEVRLLNRPSAFDVGYTLVHLAIRFQRQDMLAILLTEVSQQAAKCIPAMVCPELTEQIRREIAASLHQRKGDFACYILTDLVTFTLPADIEDLPPTVQEKLFDEVLDRDVQKELEEESPIINWSLELATRLDSRLYALWNRTAGDCLLDSVLQATWGIYDKDSVLRKALHDSLHDCSHW

SEQ ID NO: 867986 - protein, 708 aa, Homo sapiens; identical to SEQ ID NO: 867978

SEQ ID NO: 867987 - protein, 708 aa, Homo sapiens; identical to SEQ ID NO: 867978

SEQ ID NO: 867988 - protein, 708 aa, Homo sapiens; identical to SEQ ID NO: 867978

SEQ ID NO: 867989 - protein, 708 aa, Homo sapiens; identical to SEQ ID NO: 867978

SEQ ID NO: 867990 - protein, 708 aa, Homo sapiens; identical to SEQ ID NO: 867978

SEQ ID NO: 867991 - protein, 423 aa, Homo sapiens
RETANCTPAPPGLAPLPNGAMSGSQARRCQVRAWTLRPSSAGLARTSPSSTLLSPVSSTCPSSPGFNPSLAKARVACGSQASALHTFHSPSPQSNLSPAQPSSSSSSSPGPIMAKDFQDIQQLSSEENDHPFHQGEGPGTRRLNPRRGNPFLKGPPPAQPLAQRLCSMVCFSLLALSFNILLLVVICVTGSQSEGHRGAQLQAELRSLKEAFSNFSSSTLTEVQAISTHGGSVGDKITSLGAKLEKQQQDLKADHDALLFHLKHFPVDLRFVACQMELLHSNGSQRTCCPVNWVEHQGSCYWFSHSGKAWAEAEKYCQLENAHLVVINSWEEQKFIVQHTNPFNTWIGLTDSDGSWKWVDGTDYRHNYKNWAVTQPDNWHGHELGGSEDCVEVQPDGRWNDDFCLQVYRWVCEKRRNATGEVA

SEQ ID NO: 867992 - protein, 241 aa, Homo sapiens
LQEFGTEVICVTGSQSAQLQAELRSLKEAFSNFSSSTLTEVQAISTHGGSVGDKITSLGAKLEKQQQDLKADHDALLFHLKHFPVDLRFVACQMELLHSNGSQRTCCPVNWVEHQGSCYWFSHSGKAWAEAEKYCQLENAHLVVINSWEEQKFIVQHTNPFNTWIGLTDSDGSWKWVDGTDYRHNYKNWAVTQPDNWHGHELGGSEDCVEVQPDGRWNDDFCLQVYRWVCEKRRNATGEVA

SEQ ID NO: 867993 - protein, 169 aa, Homo sapiens
RETANCTPAPPGLAPLPNGAMSGSQARRCQVRAWTLRPSSAGLARTSPSSTLLSPVSSTCPSSPGFNPSLAKARVACGSQASALHTFHSPSPQSNLSPAQPSSSSSSSPGPIMAKDFQDIQQLSSEENDHPFHQGEGPGTRRLNPRRGNPFLKGKCAVSAALLPLCLSS

SEQ ID NO: 867994 - protein, 404 aa, Homo sapiens
RETANCTPAPPGLAPLPNGAMSGSQARRCQVRAWTLRPSSAGLARTSPSSTLLSPVSSTCPSSPGFNPSLAKARVACGSQASALHTFHSPSPQSNLSPAQPSSSSSSSPGPIMAKDFQDIQQLSSEENDHPFHQGPPPAQPLAQRLCSMVCFSLLALSFNILLLVVICVTGSQSEGHRGAQLQAELRSLKEAFSNFSSSTLTEVQAISTHGGSVGDKITSLGAKLEKQQQDLKADHDALLFHLKHFPVDLRFVACQMELLHSNGSQRTCCPVNWVEHQGSCYWFSHSGKAWAEAEKYCQLENAHLVVINSWEEQKFIVQHTNPFNTWIGLTDSDGSWKWVDGTDYRHNYKNWAVTQPDNWHGHELGGSEDCVEVQPDGRWNDDFCLQVYRWVCEKRRNATGEVA

SEQ ID NO: 867995 - protein, 311 aa, Homo sapiens
MAKDFQDIQQLSSEENDHPFHQGEGPGTRRLNPRRGNPFLKGPPPAQPLAQRLCSMVCFSLLALSFNILLLVVICVTGSQSEGHRGAQLQAELRSLKEAFSNFSSSTLTEVQAISTHGGSVGDKITSLGAKLEKQQQDLKADHDALLFHLKHFPVDLRFVACQMELLHSNGSQRTCCPVNWVEHQGSCYWFSHSGKAWAEAEKYCQLENAHLVVINSWEEQKFIVQHTNPFNTWIGLTDSDGSWKWVDGTDYRHNYKNWAVTQPDNWHGHELGGSEDCVEVQPDGRWNDDFCLQVYRWVCEKRRNATGEVA

SEQ ID NO: 867996 - protein, 292 aa, Homo sapiens
MAKDFQDIQQLSSEENDHPFHQGPPPAQPLAQRLCSMVCFSLLALSFNILLLVVICVTGSQSEGHRGAQLQAELRSLKEAFSNFSSSTLTEVQAISTHGGSVGDKITSLGAKLEKQQQDLKADHDALLFHLKHFPVDLRFVACQMELLHSNGSQRTCCPVNWVEHQGSCYWFSHSGKAWAEAEKYCQLENAHLVVINSWEEQKFIVQHTNPFNTWIGLTDSDGSWKWVDGTDYRHNYKNWAVTQPDNWHGHELGGSEDCVEVQPDGRWNDDFCLQVYRWVCEKRRNATGEVA

SEQ ID NO: 867997 - protein, 247 aa, Homo sapiens
RWQLRVAGRGSRVAGRRSRRSLGAEVPGPGRGGRGLAREPRGLMAVADIKKVNNFIREQDLYALKSVKIPVRNHGILMETHKELKPLLSPSSETTVTVELPEADRAGAGTGAQAGQLMGFFKGIDQDIERAVQSEIFLHESYCMDTSHQPLLPAPPKTPMDGADCGIQWWNAVFIMLLIGIVLPVFYLVYFKIQASGETPNSLNTTVIPNGSMAMGTVPGQAPRLAVAVPAVTSADSQFSQTTQAGS

SEQ ID NO: 867998 - protein, 296 aa, Homo sapiens
MRHEELLTKTFQGPAVVCGTPTSHVYMFKNGSGDSGDSSEEESHRVVLRPRGKERHKSGVHQPPQAGAGDVVLLQRELAQEDSLNKLALQYGCKVADIKKVNNFIREQDLYALKSVKIPVRNHGILMETHKELKPLLSPSSETTVTVELPEADRAGAGTGAQAGQLMGFFKGIDQDIERAVQSEIFLHESYCMDTSHQPLLPAPPKTPMDGADCGIQWWNAVFIMLLIGIVLPVFYLVYFKIQASGETPNSLNTTVIPNGSMAMGTVPGQAPRLAVAVPAVTSADSQFSQTTQAGS

SEQ ID NO: 867999 - protein, 296 aa, Homo sapiens; identical to SEQ ID NO: 867998

SEQ ID NO: 868000 - protein, 247 aa, Homo sapiens; identical to SEQ ID NO: 867997

SEQ ID NO: 868001 - protein, 162 aa, Homo sapiens
RWQLRVAGRGSRVAGRRSRRSLGAEVADIKKVNNFIREQDLYALKSVKIPVRNHGILMETHKELKPLLSPSSETTVTVELPEADRAGAGTGAQAGQLMGFFKGIDQDIERAVQSEIFLHESYCMDTSHQPLLPAPPKTPMDGADCGIQWWNAVFIMLLIGKI

SEQ ID NO: 868002 - protein, 170 aa, Homo sapiens
METHKELKPLLSPSSETTVTVELPEADRAGAGTGAQAGQLMGFFKGIDQDIERAVQSEIFLHESYCMDTSHQPLLPAPPKTPMDGADCGIQWWNAVFIMLLIGIVLPVFYLVYFKIQASGETPNSLNTTVIPNGSMAMGTVPGQAPRLAVAVPAVTSADSQFSQTTQAGS

SEQ ID NO: 868003 - protein, 326 aa, Homo sapiens
MRHEELLTKTFQGPAVVCGTPTSHVYMFKNGSGDSGDSSEEESHRVVLRPRGKERHKSGVHQPPQAGAGDVVLLQRELAQEDSLNKLALQYGCKHIYFRPNGAGDTRQNLIPDFYAFRVINNGKVADIKKVNNFIREQDLYALKSVKIPVRNHGILMETHKELKPLLSPSSETTVTVELPEADRAGAGTGAQAGQLMGFFKGIDQDIERAVQSEIFLHESYCMDTSHQPLLPAPPKTPMDGADCGIQWWNAVFIMLLIGIVLPVFYLVYFKIQASGETPNSLNTTVIPNGSMAMGTVPGQAPRLAVAVPAVTSADSQFSQTTQAGS

SEQ ID NO: 868004 - protein, 114 aa, Homo sapiens
MEKPLFPLVPLHWFGFGYTALVVSGGIVGYVKTGSVPSLAAGLLFGSLAGLGAYQLYQDPRNVWGFLAATSVTFVGVMGMRSYYYGKFMPVGLIAGASLLMAAKVGVRMLMTSD

SEQ ID NO: 868005 - protein, 145 aa, Homo sapiens
PAFLPALPRPRGAARTQSRFRRDLAAVSRGLRSVVDSAGLRQMQAWGSLLSGLRREEWRSPSSHCSVPSLAAGLLFGSLAGLGAYQLYQDPRNVWGFLAATSVTFVGVMGMRSYYYGKFMPVGLIAGASLLMAAKVGVRMLMTSD

SEQ ID NO: 868006 - protein, 104 aa, Homo sapiens
MEKPLFPLVPLHWFGFGYTALVVSGGIVGYVKTGSVPSLAAGLLFGSLAGLGAYQLYQDPRNVWGFLAATSVTFVGVMGMRSYYYGKFMPVGLIAGARNLENCI

SEQ ID NO: 868007 - protein, 104 aa, Homo sapiens; identical to SEQ ID NO: 868006

SEQ ID NO: 868008 - protein, 114 aa, Homo sapiens; identical to SEQ ID NO: 868004

SEQ ID NO: 868009 - protein, 151 aa, Homo sapiens
MEKPLFPLVPLHWFGFGYTALVVSGGIVGYVKTGSVPSLAAGLLFGSLAGLGAYQLYQDPRNVWGFLAATSVTFVGVMGMRSYYYGKFMPVGLIAGARWSMALVAQAGVQWCDLSSLQPPPPRFKRFSCLTLLSSWDFRCAPPHPANFLYF

SEQ ID NO: 868010 - protein, 104 aa, Homo sapiens; identical to SEQ ID NO: 868006

SEQ ID NO: 868011 - protein, 104 aa, Homo sapiens; identical to SEQ ID NO: 868006

SEQ ID NO: 868012 - protein, 243 aa, Homo sapiens
MAASSISSPWGKHVFKAILMVLVALILLHSALAQSRRDFAPPGQQKREAPVDVLTQIGRSVRGTLDAWIGPETMHLVSESSSQVLWAISSAISVAFFALSGIAAQLLNALGLAGDYLAQGLKLSPGQVQTFLLWGAGALVVYWLLSLLLGLVLALLGRILWGLKLVIFLAGFVALMRSVPDPSTRALLLLALLILYALLSRLTGSRASGAQLEAKVRGLERQVEELRWRQRRAAKGARSVEEE

SEQ ID NO: 868013 - protein, 243 aa, Homo sapiens; identical to SEQ ID NO: 868012

SEQ ID NO: 868014 - protein, 165 aa, Homo sapiens
MAASSISSPWGKHVFKAFFALSGIAAQLLNALGLAGDYLAQGLKLSPGQVQTFLLWGAGALVVYWLLSLLLGLVLALLGRILWGLKLVIFLAGFVALMRSVPDPSTRALLLLALLILYALLSRLTGSRASGAQLEAKVRGLERQVEELRWRQRRAAKGARSVEEE

SEQ ID NO: 868015 - protein, 243 aa, Homo sapiens; identical to SEQ ID NO: 868012

SEQ ID NO: 868016 - protein, 77 aa, Homo sapiens
  misc_feature (8)..(8): Xaa can be any naturally occurring amino acid
QRLSHACXSTHGRMPHTPPVSYQRAELLRGHAALLPAPCPFLALSLNLQNIDPCRSPTSQEKQRKTIPPACPCGPVF

SEQ ID NO: 868017 - protein, 243 aa, Homo sapiens; identical to SEQ ID NO: 868012

SEQ ID NO: 868018 - protein, 231 aa, Homo sapiens
  misc_feature (161)..(161): Xaa can be any naturally occurring amino acid
  misc_feature (165)..(167): Xaa can be any naturally occurring amino acid
  misc_feature (172)..(172): Xaa can be any naturally occurring amino acid
  misc_feature (177)..(177): Xaa can be any naturally occurring amino acid
  misc_feature (179)..(179): Xaa can be any naturally occurring amino acid
  misc_feature (181)..(181): Xaa can be any naturally occurring amino acid
  misc_feature (185)..(186): Xaa can be any naturally occurring amino acid
  misc_feature (190)..(191): Xaa can be any naturally occurring amino acid
  misc_feature (193)..(193): Xaa can be any naturally occurring amino acid
  misc_feature (199)..(199): Xaa can be any naturally occurring amino acid
  misc_feature (217)..(218): Xaa can be any naturally occurring amino acid
  misc_feature (220)..(225): Xaa can be any naturally occurring amino acid
  misc_feature (227)..(228): Xaa can be any naturally occurring amino acid
MAASSISSPWGKHVFKAILMVLVALILLHSALAQSRRDFAPPGQQKREAPVDVLTQIGRSVRGTLDAWIGPETMHLVSESSSQVLWAISSAISVAFFALSGIAAQLLNALGLAGDYLAQGLKLSPGQVQTFLLWGAGALVVYWLLSLLLGLVLALLGRIPXFPNXXXNPSFXYSPNXTXPXPTTXXPQHXXQXNHNSPXILHTFTLSPFSQHYSNFXXPXXXXXXPXXLHI

SEQ ID NO: 868019 - protein, 243 aa, Homo sapiens; identical to SEQ ID NO: 868012

SEQ ID NO: 868020 - protein, 243 aa, Homo sapiens; identical to SEQ ID NO: 868012

SEQ ID NO: 868021 - protein, 224 aa, Homo sapiens
MTNWLPSAAASALAQSRRDFAPPGQQKREAPVDVLTQIGRSVRGTLDAWIGPETMHLVSESSSQVLWAISSAISVAFFALSGIAAQLLNALGLAGDYLAQGLKLSPGQVQTFLLWGAGALVVYWLLSLLLGLVLALLGRILWGLKLVIFLAGFVALMRSVPDPSTRALLLLALLILYALLSRLTGSRASGAQLEAKVRGLERQVEELRWRQRRAAKGARSVEEE

SEQ ID NO: 868022 - protein, 209 aa, Homo sapiens
QLIRLGTSAGLVARFSEVAREAQPWPGPDLPAVGSRGPGRLLAAVSAPRLGLGLAGADPVGPEACHLPGRLRGPDEVGARPFHPGPATPGLADPLRPAEPAHWLPSLWGPTRGQGARAGTPGGGAALAPEASGQGGPQCGGGVSRMPHTPPVSYQRAELLRGHAALLPAPCPFLALSLNLQNIDPCRSPTSQEKQRKTIPPACPCGPVF

SEQ ID NO: 868023 - protein, 80 aa, Homo sapiens
PTSPTAPTSPTAPTSPTAPTSPTAPTSPTGPTSPTALLPAPCPFLALSLNLQNIDPCRSPTSQEKQRKTIPPACPCGPVF

SEQ ID NO: 868024 - protein, 71 aa, Homo sapiens
GAYYYKIRGRVDRDPERGGRTRLLVCTTACTSLPIAPQPETEKELLTSAHPGSPGGTQAAPFPSRGLQRAG

SEQ ID NO: 868025 - protein, 106 aa, Homo sapiens
VTRKNMLLATKQICKEFTDLLAQDRSPLGNSRPNPILEPGIQSCLTHFNLISHGFGSPAVCAAVTALQNYLTEALKAMDKMYLSNNPNSHTDNNAKSSDKEEKHRK

SEQ ID NO: 868026 - protein, 197 aa, Homo sapiens
GKGFTSISRLNRHRIIHTGEKLYNCNECGKALSSHSTLIIHERIHTGEKPCKCKVCGKASRQSSALIQHQRMHTGERPYKCNECDKTFRCNSSLSNHQRIHTGEKPYRCLECGMSFGQSAALIQHQRIHTGEKPFKCNTCGKTFRQSSSLIAHQRIHTGEKPYECNACGKLFSQRSSLTNHYKIHIEEDSLKADLHV

SEQ ID NO: 868027 - protein, 384 aa, Homo sapiens
MKPHFRNTVERMYRDTFSYNFYNRPILSRRNTVWLCYEVKTKGPSRPPLDAKIFRGQVYSELKYHPEMRFFHWFSKWRKLHRDQEYEVTWYISWSPCTKCTRDMATFLAEDPKVTLTIFVARLYYFWDPDYQEALRSLCQKRDGPRATMKIMNYDEFQHCWSKFVYSQRELFEPWNNLPKYYILLHIMLGEILRHSMDPPTFTFNFNNEPWVRGRHETYLCYEVERMHNDTWVLLNQRRGFLCNQAPHKHGFLEGRHAELCFLDVIPFWKLDLDQDYRVTCFTSWSPCFSCAQEMAKFISKNKHVSLCIFTARIYDDQGRCQEGLRTLAEAGAKISIMTYSEFKHCWDTFVDHQGCPFQPWDGLDEHSQDLSGRLRAILQNQEN

SEQ ID NO: 868028 - protein, 125 aa, Homo sapiens
MEPGAESETLVLQTKILVGTSRPRMKPHFRNTVERMYRDTFSYNFYNRPILSRRNTVWLCYEVKTKGPSRPRLDAKIFRGQVPRSFIRAPFQVLSSPFGQCAPPHGTAQVQWPPQLTAGREQGRP

SEQ ID NO: 868029 - protein, 384 aa, Homo sapiens
MKPHFRNTVERMYRDTFSYNFYNRPILSRRNTVWLCYEVKTKGPSRPPLDAKIFRGQVYSELKYHPEMRFFHWFSKWRKLHRDQEYEVTWYISWSPCTKCTRDMATFLAEDPKVTLTIFVARLYYFWDPDYQEALRSLCQKRDGPRATMKIMNYDEFQHCWSKFVYSQRELFEPWNNLPKYYILLHIMLGEILRHSMDPPTFTFNFNNEPWVRGRHETYLCYEVERMHNDTWVLLNQRRGFLCNQAPHKHGFLEGRHAELCFLDVIPFWKLDLDQDYRVTCFTSWSPCFSCAQEMAKFISKNKHVSLCIFTARIYDDQGRCQEGLQMLRDAGAQVSIMTYDEFKHCWDTFVDHQGCPFQPWDGLDEHSQDLSGRLRAILQNQEN

SEQ ID NO: 868030 - protein, 384 aa, Homo sapiens; identical to SEQ ID NO: 868027

SEQ ID NO: 868031 - protein, 384 aa, Homo sapiens; identical to SEQ ID NO: 868027

SEQ ID NO: 868032 - protein, 317 aa, Homo sapiens
MRFFHWFSKWRKLHRDQEYEVTWYISWSPCTKCTRDMATFLAEDPKVTLTIFVARLYYFWDPDYQEALRSLCQKRDGPRATMKIMNYDEFQHCWSKFVYSQRELFEPWNNLPKYYILLHIMLGEILRHSMDPPTFTFNFNNEPWVRGRHETYLCYEVERMHNDTWVLLNQRRGFLCNQAPHKHGFLEGRHAELCFLDVIPFWKLDLDQDYRVTCFTSWSPCFSCAQEMAKFISKNKHVSLCIFTARIYDDQGRCQEGLRTLAEAGAKISIMTYSEFKHCWDTFVDHQGCPFQPWDGLDEHSQDLSGRLRAILQNQEN

SEQ ID NO: 868033 - protein, 196 aa, Homo sapiens
MKPHFRNTVERMYRDTFSYNFYNRPILSRRNTVWLCYEVKTKGPSRPPLDAKIFRGQAPHKHGFLEGRHAELCFLDVIPFWKLDLDQDYRVTCFTSWSPCFSCAQEMAKFISKNKHVSLCIFTARIYDDQGRCQEGLRTLAEAGAKISIMTYSEFKHCWDTFVDHQGCPFQPWDGLDEHSQDLSGRLRAILQNQEN

SEQ ID NO: 868034 - protein, 235 aa, Homo sapiens
MKPHFRNTVERMYRDTFSYNFYNRPILSRRNTVWLCYEVKTKGPSRPRLDAKIFRGQVYSQPEHHAEMCFLSWFCGNQLPAYKCFQITWFVSWTPCPDCVAKLAEFLAEHPNVTLTISAARLYYYWERDYRRALCRLSQAGARVKIMDDEEFAYCWENFVYSEGQPFMPWYKFDDNYAFLHRTLKEILRNPMEAMYPHIFYFHFKNLRKAYGRNESWLCFTMEVVKHHSPVSWKR

SEQ ID NO: 868035 - protein, 127 aa, Homo sapiens
MRFFHWFSKWRKLHRDQEYEVTWYISWSPCTKCTRDMATFLAEDPKVTLTIFVARLYYFWDPDYQEALRSLCQKRDGPRATMKIMNYDEFQHCWSKFVYSQRELFEPWNNLPKYYILLHIMLGEILR

SEQ ID NO: 868036 - protein, 36 aa, Homo sapiens
MGTFTINRNVWARKKASGKSTVNAPATFQGLRAAQS

SEQ ID NO: 868037 - protein, 366 aa, Homo sapiens
MKPHFRNTVERMYRDTFSYNFYNRPILSRRNTVWLCYEVKTKGPSRPPLDAKIFRGQVYSELKYHPEMRFFHWFSKWRKLHRDQEYEVTWYISWSPCTKCTRDMATFLAEDPKVTLTIFVARLYYFWDPDYQEALRSLCQKRDGPRATMKIMNYDEFQHCWSKFVYSQRELFEPWNNLPKYYILLHIMLGEILRHSMDPPTFTFNFNNEPWVRGRHETYLCYEVERMHNDTWVLLNQRRGFLCNQAPHKHGFLEGRHAELCFLDVIPFWKLDLDQDYRVTCFTSWSPCFSCAQEMAKFISKNKHVSLCIFTARIYDDQGRCQEGLRTLAEAGADHQGCPFQPWDGLDEHSQDLSGRLRAILQNQEN

SEQ ID NO: 868038 - protein, 317 aa, Homo sapiens; identical to SEQ ID NO: 868032

SEQ ID NO: 868039 - protein, 310 aa, Homo sapiens
MKPHFRNTVERMYRDTFSYNFYNRPILSRRNTVWLCYEVKTKGPSRPPLDAKIFRGQVYSELKYHPEMRFFHWFSKWRKLHRDQEYEVTWYISWSPCTKCTRDMATFLAEDPKVTLTIFVARLYYFWDPDYQEALRSLCQKRDGPRATMKIMNYDEFQHCWSKFVYSQRELFEPWNNLPKYYILLHIMLGEILRHSMDPPTFTFNFNNEPWVRGRHETYLCYEVERMHNDTWVLLNQRRGFLCNQAPHKHGFLEGRHAELCFLDVIPFWKLDLDQDYRVTCFTSWSPCFSCAQEMAKFISKNKHVSTAKT

SEQ ID NO: 868040 - protein, 131 aa, Homo sapiens
MPVFHCLAQLPGVPVNDTHRSLKEVRFLLDLIKQTKCDPSRLSWTGPFLPSPSAMLTFLSDGTGWEFRIHLDGVRSGDTSVHIFPFKKGSWPECSPSGHRLHVSVSVKAAMTISVTYSYSTMSIFTAGLYD

SEQ ID NO: 868041 - protein, 89 aa, Homo sapiens
SPKTEGAGRRQHTGLAVVPTDHPQLTPCPVMLPHDLCVLIQPSIESAQALLSLRVSAAPSGRRCLFGSALSLPVCAALGRLPYHMGLTK

SEQ ID NO: 868042 - protein, 69 aa, Homo sapiens
AAAGSGGSAQWQKCRLLLRRAVAEERFRLEFFVPPKVSYPIIPPSLGGPEEAPGQQLRVPGTAFGDRVV

SEQ ID NO: 868043 - protein, 101 aa, Homo sapiens
AAAGSGGSAQWQKCRLLLRRAVAEERFRLEFFVPPKASRPKVSIPLSAIIEVRTTMPLEMPEKDNTFVLKVENGAEYILETIDSLQKHSWVADIQGCVDPG

SEQ ID NO: 868044 - protein, 158 aa, Homo sapiens
LLPLVLNPRKKCKKKKYVNSGTVTLLSFSVDSEFTFVDYIKGGTQLNFTVAIDFTASNGNPLQPTSLHYMSPYQLSAYAMALKAVGEIIQDYDSDKLFPAYGFGAKLPPEGRISHQFPLNNNDEDPNCAGIEGVLESYFQSLRTVQLYGPTYFAPVIN

SEQ ID NO: 868045 - protein, 282 aa, Homo sapiens
MPLLTQQIQDEDDQYSLVASLDNVRNLSTILKAIHFREHATCFATKNGIKVTVENAKCVQANAFIQAGIFQEFKVQEESVTFRINLTVLLDCLSIFGSSPMPGTLTALRMCYQGYGYPLMLFLEEGGVVTVCKINTQEPEETLDFDFCSTNVINKIILQSEGLREAFSELDMTSEVLQITMSPDKPYFRLSTFGNAGSSHLDYPKDSDLMEAFHCNQTQVNRYKISLLKPSTKALVLSCKVSIRTDNRGFLSLQYMIRNEDGQICFVEYYCCPDEEVPESES

SEQ ID NO: 868046 - protein, 173 aa, Homo sapiens
MCYQGYGYPLMLFLEEGGVVTVCKINTQEPEETLDFDFCSTNVINKIILQSEGLREAFSELDMTSEVLQITMSPDKPYFRLSTFGNAGSSHLDYPKDSDLMEAFHCNQTQVNRYKISLLKPSTKALVLSCKVSIRTDNRGFLSLQYMIRNEDGQICFVEYYCCPDEEVPESES

SEQ ID NO: 868047 - protein, 173 aa, Homo sapiens; identical to SEQ ID NO: 868046

SEQ ID NO: 868048 - protein, 173 aa, Homo sapiens; identical to SEQ ID NO: 868046

SEQ ID NO: 868049 - protein, 155 aa, Homo sapiens
MVTVCKINTQEPEETLDFDFCSTNVINKIILQSEGLREAFSELDMTSEVLQITMSPDKPYFRLSTFGNAGSSHLDYPKDSDLMEAFHCNQTQVNRYKISLLKPSTKALVLSCKVSIRTDNRGFLSLQYMIRNEDGQICFVEYYCCPDEEVPESES

SEQ ID NO: 868050 - protein, 155 aa, Homo sapiens
MCYQGYGYPLMLFLEEGGVVTVCKINTQEPEETLDFDFCSTNVINKSEVLQITMSPDKPYFRLSTFGNAGSSHLDYPKDSDLMEAFHCNQTQVNRYKISLLKPSTKALVLSCKVSIRTDNRGFLSLQYMIRNEDGQICFVEYYCCPDEEVPESES

SEQ ID NO: 868051 - protein, 105 aa, Homo sapiens
MPLLTQQIQDEDDQYSLVASLDNVRNLSTILKAIHFREHATCFATKNGIKVTVENAKCVQANAFIQAGIFQEFKVQEESVTFRINLTVLLDCLSIFGSSPMPGKL

SEQ ID NO: 868052 - protein, 284 aa, Homo sapiens
MPLLTQQIQDEDDQYSLVASLDNVRNLSTILKAIHFREHATCFATKNGIKVTVENAKCVQANAFIQAGIFQEFKVQEESVTFRINLTVLLDCLSIFGSSPMPGTLTALRMCYQGYGYPLMLFLEEGGVVTVCKINTQEPEETLDFDFCSTNVINKIILQSEGLREAFSELDMTSEVLQITMSPDKPYFRLSTFGNAGSSHLDYPKDSDLMEAFHCNQTQVNRYKISLLKPSTKALVLSCKGLTFSSRLECSGTISAHCSLDLLGSSSLPSSASQSARITGNEPP

SEQ ID NO: 868053 - protein, 282 aa, Homo sapiens; identical to SEQ ID NO: 868045

SEQ ID NO: 868054 - protein, 282 aa, Homo sapiens; identical to SEQ ID NO: 868045

SEQ ID NO: 868055 - protein, 173 aa, Homo sapiens; identical to SEQ ID NO: 868046

SEQ ID NO: 868056 - protein, 173 aa, Homo sapiens; identical to SEQ ID NO: 868046

SEQ ID NO: 868057 - protein, 282 aa, Homo sapiens; identical to SEQ ID NO: 868045

SEQ ID NO: 868058 - protein, 76 aa, Homo sapiens
RNRGGSEGRLKCSRLTAVSSSWAQRWESPYVAQAGLQHLGSSGLASQSAGIIGLCRLLPVSVARHARLSRPPSALW

SEQ ID NO: 868059 - protein, 281 aa, Homo sapiens
  misc_feature (6)..(6): Xaa can be any naturally occurring amino acid
MVRGWXGAHTKNWRPQLLVLLKLDEDLHVKYPRLLTFASQLKAGKGLTIVGSVIQGSFLESYGEAQAAEQTIKNMMEIEKVKGFCQVVVASKVREGLAHLIQSCGLGGMRHNSVVLGWPYGWRQSEDPRAWKTFIDTVRCTTAAHLALLVPKNIAFYPSNHERYLEGHIDVWWIVHDGGMLMLLPFLLRQHKVWRKCRMRIFTVAQMDDNSIQMKKDLAVFLYHLRLEAEVEVVEMRNPGLSGLPFKRDVIMAGSNVRDELANGGGKPCEVRHAPGKRSGK

SEQ ID NO: 868060 - protein, 103 aa, Homo sapiens
ASGRGVSARGGGDSGGDSGGRLGRRVRRGRARTMPHFTVVPVDGPRRGDYDNLEGLSWVDYGERAELDDSDGHGNHRESSPFLSPLEASRGIDYYDRNLALFE

SEQ ID NO: 868061 - protein, 1118 aa, Homo sapiens
ASGRGVSARGGGDSGGDSGGRLGRRVRRGRARTMPHFTVVPVDGPRRGDYDNLEGLSWVDYGERAELDDSDGHGNHRESSPFLSPLEASRGIDYYDRNLALFEEELDIRPKVSSLLGKLVSYTNLTQGAKEHEEAESGEGTRRRAAEAPSMGTLMGVYLPCLQNIFGVILFLRLTWMVGTAGVLQALLIVLICCCCTLLTAISMSAIATNGVVPAGGSYFMISRSLGPEFGGAVGLCFYLGTTFAAAMYILGAIEILLTYIAPPAAIFYPSGAHDTSNATLNNMRVYGTIFLTFMTLVVFVGVKYVNKFASLFLACVIISILSIYAGGIKSIFDPPVFPVCMLGNRTLSRDQFDICAKTAVVDNETVATQLWSFFCHSPNLTTDSCDPYFMLNNVTEIPGIPGAAAGVLQENLWSAYLEKGDIVEKHGLPSADAPSLKESLPLYVVADIATSFTVLVGIFFPSVTGIMAGSNRSGDLRDAQKSIPVGTILAIITTSLVYFSSVVLFGACIEGVVLRDKYGDGVSRNLVVGTLAWPSPWVIVIGSFFSTCGAGLQSLTGAPRLLQAIAKDNIIPFLRVFGHGKVNGEPTWALLLTALIAELGILIASLDMVAPILSMFFLMCYLFVNLACAVQTLLRTPNWRPRFKYYHWALSFLGMSLCLALMFVSSWYYALVAMLIAGMIYKYIEYQGAEKEWGDGIRGLSLSAARYALLRLEEGPPHTKNWRPQLLVLLKLDEDLHVKYPRLLTFASQLKAGKGLTIVGSVIQGSFLESYGEAQAAEQTIKNMMEIEKVKGFCQVVVASKVREGLAHLIQSCGLGGMRHNSVVLGWPYGWRQSEDPRAWKTFIDTVRCTTAAHLALLVPKNIAFYPSNHERYLEGHIDVWWIVHDGGMLMLLPFLLRQHKVWRKCRMRIFTVAQMDDNSIQMKKDLAVFLYHLRLEAEVEVVEMHNSDISAYTYERTLMMEQRSQMLRQMRLTKTEREREAQLVKDRHSALRLESLYSDEEDESAVGADKIQMTWTRDKYMTETWDPSHAPDNFRELVHIKPDQSNVRRMHTAVKLNEVIVTRSHDARLVLLNMPGPPRNSEGDENYMEFLEVLTEGLERVLLVRGGGREVITIYS

SEQ ID NO: 868062 - protein, 1168 aa, Homo sapiens
YVRVSLPPPPPAAGRPGAAVADDAREEEEEAAPPPPPPPPPRLAAARPPGSQPRPPAAGEAQAAADMNHQQQQQQQKAGEQQLSEPEDMEMEAGDTDDPPRITQNPVINGNVALSDGHNTAEEDMEDDTSWRSEATFQFTVERFSRLSESVLSPPCFVRNLPWKIMVMPRFYPDRPHQKSVGFFLQCNAESDSTSWSCHAQAVLKIINYRDDEKSFSRRISHLFFHKENDWGFSNFMAWSEVTDPEKGFIDDDKVTFEVFVQADAPHGVAWDSKKHTGYVGLKNQGATCYMNSLLQTLFFTNQLRKAVYMMPTEGDDSSKSVPLALQRVFYELQHSDKPVGTKKLTKSFGWETLDSFMQHDVQELCRVLLDNVENKMKGTCVEGTIPKLFRGKMVSYIQCKEVDYRSDRREDYYDIQLSIKGKKNIFESFVDYVAVEQLDGDNKYDAGEHGLQEAEKGVKFLTLPPVLHLQLMRFMYDPQTDQNIKINDRFEFPEQLPLDEFLQKTDPKDPANYILHAVLVHSGDNHGGHYVVYLNPKGDGKWCKFDDDVVSRCTKEEAIEHNYGGHDDDLSVRHCTNAYMLVYIRESKLSEVLQAVTDHDIPQQLVERLQEEKRIEAQKRKERQEAHLYMQVQIVAEDQFCGHQGNDMYDEEKVKYTVFKVLKNSSLAEFVQSLSQTMGFPQDQIRLWPMQARSNGTKRPAMLDNEADGNKTMIELSDNENPWTIFLETVDPELAASGATLPKFDKDHDVMLFLKMYDPKTRSLNYCGHIYTPISCKIRDLLPVMCDRAGFIQDTSLILYEEVKPNLTERIQDYDVSLDKALDELMDGDIIVFQKDDPENDNSELPTAKEYFRDLYHRVDVIFCDKTIPNDPGFVVTLSNRMNYFQVAKTVAQRLNTDPMLLQFFKSQGYRDGPGNPLRHNYEGTLRDLLQFFKPRQPKKLYYQQLKMKITDFENRRSFKCIWLNSQFREEEITLYPDKHGCVRDLLEECKKAVELGEKASGKLRLLEIVSYKIIGVHQEDELLECLSPATSRTFRIEEIPLDQVDIDKENEMLVTVAHFHKEVFGTFGIPFLLRIHQGEHFREVMKRIQSLLDIQEKEFEKFKFAIVMMGRHQYINEDEYEVNLKDFEPQPGNMSHPRPWLGLDHFNKAPKRSRYTYLEKAIKIHN

SEQ ID NO: 868063 - protein, 1168 aa, Homo sapiens; identical to SEQ ID NO: 868062

SEQ ID NO: 868064 - protein, 1232 aa, Homo sapiens
YVRVSLPPPPPAAGRPGAAVADDAREEEEEAAPPPPPPPPPRLAAARPPGSQPRPPAAGEAQAAADMNHQQQQQQQKAGEQQLSEPEDMEMEAGDTDDPPRITQNPVINGNVALSDGHNTAEEDMEDDTSWRSEATFQFTVERFSRLSESVLSPPCFVRNLPWKIMVMPRFYPDRPHQKSVGFFLQCNAESDSTSWSCHAQAVLKIINYRDDEKSFSRRISHLFFHKENDWGFSNFMAWSEVTDPEKGFIDDDKVTFEVFVQADAPHGVAWDSKKHTGYVGLKNQGATCYMNSLLQTLFFTNQLRKAVYMMPTEGDDSSKSVPLALQRVFYELQHSDKPVGTKKLTKSFGWETLDSFMQHDVQELCRVLLDNVENKMKGTCVEGTIPKLFRGKMVSYIQCKEVDYRSDRREDYYDIQLSIKGKKNIFESFVDYVAVEQLDGDNKYDAGEHGLQEAEKGVKFLTLPPVLHLQLMRFMYDPQTDQNIKINDRFEFPEQLPLDEFLQKTDPKDPANYILHAVLVHSGDNHGGHYVVYLNPKGDGKWCKFDDDVVSRCTKEEAIEHNYGGHDDDLSVRHCTNAYMLVYIRESKLSEVLQAVTDHDIPQQLVERLQEEKRIEAQKRKERQEAHLYMQVQIVAEDQFCGHQGNDMYDEEKVKYTVFKVLKNSSLAEFVQSLSQTMGFPQDQIRLWPMQARSNGTKRPAMLDNEADGNKTVNIVNRYLVWNRAEGVSPLHLVQLVSLLVHLTRIGRFLQYLTVVFRSVTKPLDSSKISVSFGNEMIELSDNENPWTIFLETVDPELAASGATLPKFDKDHDVMLFLKMYDPKTRSLNYCGHIYTPISCKIRDLLPVMCDRAGFIQDTSLILYEEVKPNLTERIQDYDVSLDKALDELMDGDIIVFQKDDPENDNSELPTAKEYFRDLYHRVDVIFCDKTIPNDPGFVVTLSNRMNYFQVAKTVAQRLNTDPMLLQFFKSQGYRDGPGNPLRHNYEGTLRDLLQFFKPRQPKKLYYQQLKMKITDFENRRSFKCIWLNSQFREEEITLYPDKHGCVRDLLEECKKAVELGEKASGKLRLLEIVSYKIIGVHQEDELLECLSPATSRTFRIEEIPLDQVDIDKENEMLVTVAHFHKEVFGTFGIPFLLRIHQGEHFREVMKRIQSLLDIQEKEFEKFKFAIVMMGRHQYINEDEYEVNLKDFEPQPGNMSHPRPWLGLDHFNKAPKRSRYTYLEKAIKIHN

SEQ ID NO: 868065 - protein, 1118 aa, Homo sapiens; identical to SEQ ID NO: 868061

SEQ ID NO: 868066 - protein, 520 aa, Homo sapiens
RGKTPIGRYEAGCVLKNSSLAEFVQSLSQTMGFPQDQIRLWPMQARSNGTKRPAMLDNEADGNKTMIELSDNENPWTIFLETVDPELAASGATLPKFDKDHDVMLFLKMYDPKTRSLNYCGHIYTPISCKIRDLLPVMCDRAGFIQDTSLILYEEVKPNLTERIQDYDVSLDKALDELMDGDIIVFQKDDPENDNSELPTAKEYFRDLYHRVDVIFCDKTIPNDPGFVVTLSNRMNYFQVAKTVAQRLNTDPMLLQFFKSQGYRDGPGNPLRHNYEGTLRDLLQFFKPRQPKKLYYQQLKMKITDFENRRSFKCIWLNSQFREEEITLYPDKHGCVRDLLEECKKAVELGEKASGKLRLLEIVSYKIIGVHQEDELLECLSPATSRTFRIEEIPLDQVDIDKENEMLVTVAHFHKEVFGTFGIPFLLRIHQGEHFREVMKRIQSLLDIQEKEFEKFKFAIVMMGRHQYINEDEYEVNLKDFEPQPGNMSHPRPWLGLDHFNKAPKRSRYTYLEKAIKIHN

SEQ ID NO: 868067 - protein, 1147 aa, Homo sapiens
YVRVSLPPPPPAAGRPGAAVADDAREEEEEAAPPPPPPPPPRLAAARPPGSQPRPPAAGEAQAAADMNHQQQQQQQKAGEQQLSEPEDMEMEAGDTDDPPRITQNPVINGNVALSDGHNTAEEDMEDDTSWRSEATFQFTVERFSRLSESVLSPPCFVRNLPWKIMVMPRFYPDRPHQKSVGFFLQCNAESDSTSWSCHAQAVLKIINYRDDEKSFSRRISHLFFHKENDWGFSNFMAWSEVTDPEKGFIDDDKVTFEVFVQADAPHGVAWDSKKHTGYVGLKNQGATCYMNSLLQTLFFTNQLRKAVYMMPTEGDDSSKSVPLALQRVFYELQHSDKPVGTKKLTKSFGWETLDSFMQHDVQELCRVLLDNVENKMKGTCVEGTIPKLFRGKMVSYIQCKEVDYRSDRREDYYDIQLSIKGKKNIFESFVDYVAVEQLDGDNKYDAGEHGLQEAEKGVKFLTLPPVLHLQLMRFMYDPQTDQNIKINDRFEFPEQLPLDEFLQKTDPKDPANYILHAVLVHSGDNHGGHYVVYLNPKGDGKWCKFDDDVVSRCTKEEAIEHNYGGHDDDLSVRHCTNAYMLVYIRESKLSEVLQAVTDHDIPQQLVERLQEEKRIEAQKRKERQEAHLYMQVQIVAEDQFCGHQGNDMYDEEKVKYTVFKVLKNSSLAEFVQSLSQTMGFPQDQIRLWPMQARSNGTKRPAMLDNEADGNKTMIELSDNENPWTIFLETVDPELAASGATLPKFDKDHDVMLFLKMYDPKTRSLNYCGHIYTPISCKIRDLLPVMCDRAGFIQDTSLILYEEVKPNLTERIQDYDVSLDKALDELMDGDIIVFQKDDPENDNSELPTAKEYFRDLYHRVDVIFCDVAKTVAQRLNTDPMLLQFFKSQGYRDGPGNPLRHNYEGTLRDLLQFFKPRQPKKLYYQQLKMKITDFENRRSFKCIWLNSQFREEEITLYPDKHGCVRDLLEECKKAVELGEKASGKLRLLEIVSYKIIGVHQEDELLECLSPATSRTFRIEEIPLDQVDIDKENEMLVTVAHFHKEVFGTFGIPFLLRIHQGEHFREVMKRIQSLLDIQEKEFEKFKFAIVMMGRHQYINEDEYEVNLKDFEPQPGNMSHPRPWLGLDHFNKAPKRSRYTYLEKAIKIHN

SEQ ID NO: 868068 - protein, 1168 aa, Homo sapiens; identical to SEQ ID NO: 868062

SEQ ID NO: 868069 - protein, 1168 aa, Homo sapiens; identical to SEQ ID NO: 868062

SEQ ID NO: 868070 - protein, 1291 aa, Homo sapiens
ASGRGVSARGGGDSGGDSGGRLGRRVRRGRARTMPHFTVVPVDGPRRGDYDNLEGLSWVDYGERAELDDSDGHGNHRESSPFLSPLEASRGIDYYDRNLALFEEELDIRPKVSSLLGKLVSYTNLTQGAKEHEEAESGEGTRRRAAEAPSMGTLMGVYLPCLQNIFGVILFLRLTWMVGTAGVLQALLIVLICCCCTLLTAISMSAIATNGVVPAGGSYFMISRSLGPEFGGAVGLCFYLGTTFAAAMYILGAIEILLTYIAPPAAIFYPSGAHDTSNATLNNMRVYGTIFLTFMTLVVFVGVKYVNKFASLFLACVIISILSIYAGGIKSIFDPPVFPVCMLGNRTLSRDQFDICAKTAVVDNETVATQLWSFFCHSPNLTTDSCDPYFMLNNVTEIPGIPGAAAGVLQGGSSLPSSCSGAHRLSRGTEHRAVLVWPAWERGQDWPPSQPPSVLPAWLLAAEFGVSGACLASVQGLQQPVFPSHQPLTLPGDVPTGSIKASVEGGQWRALGDGGSATFVCRLLAGQLLLCGQGSPVADAAVIGLKLFPESPKLPCICASGYGCPKLPGVVGGSCGGDTATPAENLWSAYLEKGDIVEKHGLPSADAPSLKESLPLYVVADIATSFTVLVGIFFPSVTGIMAGSNRSGDLRDAQKSIPVGTILAIITTSLVYFSSVVLFGACIEGVVLRDKYGDGVSRNLVVGTLAWPSPWVIVIGSFFSTCGAGLQSLTGAPRLLQAIAKDNIIPFLRVFGHGKVNGEPTWALLLTALIAELGILIASLDMVAPILSMFFLMCYLFVNLACAVQTLLRTPNWRPRFKYYHWALSFLGMSLCLALMFVSSWYYALVAMLIAGMIYKYIEYQGAEKEWGDGIRGLSLSAARYALLRLEEGPPHTKNWRPQLLVLLKLDEDLHVKYPRLLTFASQLKAGKGLTIVGSVIQGSFLESYGEAQAAEQTIKNMMEIEKVKGFCQVVVASKVREGLAHLIQSCGLGGMRHNSVVLGWPYGWRQSEDPRAWKTFIDTVRCTTAAHLALLVPKNIAFYPSNHERYLEGHIDVWWIVHDGGMLMLLPFLLRQHKVWRKCRMRIFTVAQMDDNSIQMKKDLAVFLYHLRLEAEVEVVEMHNSDISAYTYERTLMMEQRSQMLRQMRLTKTEREREAQLVKDRHSALRLESLYSDEEDESAVGADKIQMTWTRDKYMTETWDPSHAPDNFRELVHIKPDQSNVRRMHTAVKLNEVIVTRSHDARLVLLNMPGPPRNSEGDENYMEFLEVLTEGLERVLLVRGGGREVITIYS

SEQ ID NO: 868071 - protein, 1087 aa, Homo sapiens
VLRGPAALIPYPPPQGLEAGSRRSQRTPPEPREGEEWRYTRHGNHRESSPFLSPLEASRGIDYYDRNLALFEEELDIRPKVSSLLGKLVSYTNLTQGAKEHEEAESGEGTRRRAAEAPSMGTLMGVYLPCLQNIFGVILFLRLTWMVGTAGVLQALLIVLICCCCTLLTAISMSAIATNGVVPAGGSYFMISRSLGPEFGGAVGLCFYLGTTFAAAMYILGAIEILLTYIAPPAAIFYPSGAHDTSNATLNNMRVYGTIFLTFMTLVVFVGVKYVNKFASLFLACVIISILSIYAGGIKSIFDPPVFPVCMLGNRTLSRDQFDICAKTAVVDNETVATQLWSFFCHSPNLTTDSCDPYFMLNNVTEIPGIPGAAAGVLQENLWSAYLEKGDIVEKHGLPSADAPSLKESLPLYVVADIATSFTVLVGIFFPSVTGIMAGSNRSGDLRDAQKSIPVGTILAIITTSLVYFSSVVLFGACIEGVVLRDKYGDGVSRNLVVGTLAWPSPWVIVIGSFFSTCGAGLQSLTGAPRLLQAIAKDNIIPFLRVFGHGKVNGEPTWALLLTALIAELGILIASLDMVAPILSMFFLMCYLFVNLACAVQTLLRTPNWRPRFKYYHWALSFLGMSLCLALMFVSSWYYALVAMLIAGMIYKYIEYQGAEKEWGDGIRGLSLSAARYALLRLEEGPPHTKNWRPQLLVLLKLDEDLHVKYPRLLTFASQLKAGKGLTIVGSVIQGSFLESYGEAQAAEQTIKNMMEIEKVKGFCQVVVASKVREGLAHLIQSCGLGGMRHNSVVLGWPYGWRQSEDPRAWKTFIDTVRCTTAAHLALLVPKNIAFYPSNHERYLEGHIDVWWIVHDGGMLMLLPFLLRQHKVWRKCRMRIFTVAQMDDNSIQMKKDLAVFLYHLRLEAEVEVVEMHNSDISAYTYERTLMMEQRSQMLRQMRLTKTEREREAQLVKDRHSALRLESLYSDEEDESAVGADKIQMTWTRDKYMTETWDPSHAPDNFRELVHIKPDQSNVRRMHTAVKLNEVIVTRSHDARLVLLNMPGPPRNSEGDENYMEFLEVLTEGLERVLLVRGGGREVITIYS

SEQ ID NO: 868072 - protein, 932 aa, Homo sapiens
MRAGGACRPGAAGTAAGTAAGGWDGGCGGAEPARCLTSPWCQWTGRGAATMTTSRGSVGWTTGSAPSWMTRTTYIAPPAAIFYPSGAHDTSNATLNNMRVYGTIFLTFMTLVVFVGVKYVNKFASLFLACVIISILSIYAGGIKSIFDPPVFPVCMLGNRTLSRDQFDICAKTAVVDNETVATQLWSFFCHSPNLTTDSCDPYFMLNNVTEIPGIPGAAAGVLQENLWSAYLEKGDIVEKHGLPSADAPSLKESLPLYVVADIATSFTVLVGIFFPSVTGIMAGSNRSGDLRDAQKSIPVGTILAIITTSLVYFSSVVLFGACIEGVVLRDKYGDGVSRNLVVGTLAWPSPWVIVIGSFFSTCGAGLQSLTGAPRLLQAIAKDNIIPFLRVFGHGKVNGEPTWALLLTALIAELGILIASLDMVAPILSMFFLMCYLFVNLACAVQTLLRTPNWRPRFKYYHWALSFLGMSLCLALMFVSSWYYALVAMLIAGMIYKYIEYQGAEKEWGDGIRGLSLSAARYALLRLEEGPPHTKNWRPQLLVLLKLDEDLHVKYPRLLTFASQLKAGKGLTIVGSVIQGSFLESYGEAQAAEQTIKNMMEIEKVKGFCQVVVASKVREGLAHLIQSCGLGGMRHNSVVLGWPYGWRQSEDPRAWKTFIDTVRCTTAAHLALLVPKNIAFYPSNHERYLEGHIDVWWIVHDGGMLMLLPFLLRQHKVWRKCRMRIFTVAQMDDNSIQMKKDLAVFLYHLRLEAEVEVVEMHNSDISAYTYERTLMMEQRSQMLRQMRLTKTEREREAQLVKDRHSALRLESLYSDEEDESAVGADKIQMTWTRDKYMTETWDPSHAPDNFRELVHIKPDQSNVRRMHTAVKLNEVIVTRSHDARLVLLNMPGPPRNSEGDENYMEFLEVLTEGLERVLLVRGGGREVITIYS

SEQ ID NO: 868073 - protein, 128 aa, Homo sapiens
SRGSDGDQAEEEYYRKLAGLVEEMHAAYGKPVFLIGHSLGCLHLLYFLLRQPQAWKDRFIDGFISLGAPWGGSIKPMLVLASETGSHYIAQTGLELLGSSILLPQPPRVLALQALGGSSKKSACLFRC

SEQ ID NO: 868074 - protein, 223 aa, Homo sapiens
MTLEDKRQRTNRRSFKCIWLNSQFREEEITLYPDKHGCVRDLLEECKKAVELGEKASGKLRLLEIVSYKIIGVHQEDELLECLSPATSRTFRIEEIPLDQVDIDKENEMLVTVAHFHKEVFGTFGIPFLLRIHQGEHFREVMKRIQSLLDIQEKEFEKFKFAIVMMGRHQYINEDEYEVNLKDFEPQPGNMSHPRPWLGLDHFNKAPKRSRYTYLEKAIKIHN

SEQ ID NO: 868075 - protein, 1022 aa, Homo sapiens
YVRVSLPPPPPAAGRPGAAVADDAREEEEEAAPPPPPPPPPRLAAARPPGSQPRPPAAGEAQAAADMNHQQQQQQQKAGEQQLSEPEDMEMEAGDTDDPPRITQNPVINGNVALSDGHNTAEEDMEDDTSWRSEATFQFTVERFSRLSESVLSPPCFVRNLPWKIMVMPRFYPDRPHQKSVGFFLQCNAESDSTSWSCHAQAVLKIINYRDDEKSFSRRISHLFFHKENDWGFSNFMAWSEVTDPEKGFIDDDKVTFEVFVQADAPHGVAWDSKKHTGYVGLKNQGATCYMNSLLQTLFFTNQLRKAVYMMPTEGDDSSKSVPLALQRVFYELQHSDKPVGTKKLTKSFGWETLDSFMQHDVQELCRVLLDNVENKMKGTCVEGTIPKLFRGKMVSYIQCKEVDYRSDRREDYYDIQLSIKGKKNIFESFVDYVAVEQLDGDNKYDAGEHGLQEAEKGVKFLTLPPVLHLQLMRFMYDPQTDQNIKINDRFEFPEQLPLDEFLQKTDPKDPANYILHAVLVHSGDNHGGHYVVYLNPKGDGKWCKFDDDVVSRCTKEEAIEHNYGGHDDDLSVRHCTNAYMLVYIRESKLSEVLQAVTDHDIPQQLVERLQEEKRIEAQKRKERQEAHLYMQVQIVAEDQFCGHQGNDMYDEEKVKYTVFKVLKNSSLAEFVQSLSQTMGFPQDQIRLWPMQARSNGTKRPAMLDNEADGNKTMIELSDNENPWTIFLETVDPELAASGATLPKFDKDHDVMLFLKMYDPKTRSLNYCGHIYTPISCKIRDLLPVMCDRAGFIQDTSLILYEEVKPNLTERIQDYDVSLDKALDELMDGDIIVFQKDDPENDNSELPTAKEYFRDLYHRVDVIFCDKTIPNDPGFVVTLSNRMNYFQVAKTVAQRLNTDPMLLQFFKSQGYRDGPGNPLRHNYEGTLRDLLQFFKPRQPKKLYYQQLKMKITDFENRRSFKCIWLNSQFREEEITLYPDKHGCVRDLLEECKKAVELGEKASGKLRQVFLEPNCGRSVRGGS

SEQ ID NO: 868076 - protein, 1000 aa, Homo sapiens
ASGRGVSARGGGDSGGDSGGRLGRRVRRGRARTMPHFTVVPVDGPRRGDYDNLEGLSWVDYGERAELDDSDGHGNHRESSPFLSPLEASRGIDYYDRNLALFEEELDIRPKVSSLLGKLVSYTNLTQGAKEHEEAESGEGTRRRAAEAPSMGTLMGVYLPCLQNIFGVILFLRLTWMVGTAGVLQALLIVLICCCCTLLTAISMSAIATNGVVPAGGSYFMISRSLGPEFGGAVGLCFYLGTTFAAAMYILGAIEILLTYIAPPAAIFYPSGAHDTSNATLNNMRVYGTIFLTFMTLVVFVGVKYVNKFASLFLACVIISILSIYAGGIKSIFDPPVFPVCMLGNRTLSRDQFDICAKTAVVDNETVATQLWSFFCHSPNLTTDSCDPYFMLNNVTEIPGIPGAAAGVLQENLWSAYLEKGDIVEKHGLPSADAPSLKESLPLYVVADIATSFTVLVGIFFPSVTGIMAGSNRSGDLRDAQKSIPVGTILAIITTSLVYFSSVVLFGACIEGVVLRDKYGDGVSRNLVVGTLAWPSPWVIVIGSFFSTCGAGLQSLTGAPRLLQAIAKDNIIPFLRVFGHGKVNGEPTWALLLTALIAELGILIASLDMVAPILSMFFLMCYLFVNLACAVQTLLRTPNWRPRFKYYHWALSFLGMSLCLALMFVSSWYYALVAMLIAGMIYKYIEYQGAEKEWGDGIRGLSLSAARYALLRLEEGPPHTKNWRPQLLVLLKLDEDLHVKYPRLLTFASQLKAGKGLTIVGSVIQGSFLESYGEAQAAEQTIKNMMEIEKVKGFCQVVVASKVREGLAHLIQSCGLGGMRHNSVVLGWPYGWRQSEDPRAWKTFIDTVRCTTAAHLALLVPKNIAFYPSNHERYLEGHIDVWWIVHDGGMLMLLPFLLRQHKVWRKCRMRIFTVAQMDDNSIQMKKDLAVFLYHLRLEAEVEVVEMHNSDISAYTYERTLMMEQRSQMLRQMRLTKTEREREPSVKDRTRLAETCKDPLD

SEQ ID NO: 868077 - protein, 813 aa, Homo sapiens
ASGRGVSARGGGDSGGDSGGRLGRRVRRGRARTMPHFTVVPVDGPRRGDYDNLEGLSWVDYGERAELDDSDGHGNHRESSPFLSPLEASRGIDYYDRNLALFEEELDIRPKVSSLLGKLVSYTNLTQGAKEHEEAESGEGTRRRAAEAPSMGTLMGVYLPCLQNIFGVILFLRLTWMVGTAGVLQALLIVLICCCCTLLTAISMSAIATNGVVPAGGSYFMISRSLGPEFGGAVGLCFYLGTTFAAAMYILGAIEILLTYIAPPAAIFYPSGAHDTSNATLNNMRVYGTIFLTFMTLVVFVGVKYVNKFASLFLACVIISILSIYAGGIKSIFDPPVFPVCMLGNRTLSRDQFDICAKTAVVDNETVATQLWSFFCHSPNLTTDSCDPYFMLNNVTEIPGIPGAAAGVLQENLWSAYLEKGDIVEKHGLPSADAPSLKESLPLYVVADIATSFTVLVGIFFPSVTGIMAGSNRSGDLRDAQKSIPVGTILAIITTSLVYFSSVVLFGACIEGVVLRDKYGDGVSRNLVVGTLAWPSPWVIVIGSFFSTCGAGLQSLTGAPRLLQAIAKDNIIPFLRVFGHGKVNGEPTWALLLTALIAELGILIASLDMVAPILSMFFLMCYLFVNLACAVQTLLRTPNWRPRFKYYHWALSFLGMSLCLALMFVSSWYYALVAMLIAGMIYKYIEYQGAEKEWGDGIRGLSLSAARYALLRLEEGPPHTKNWRPQLLVLLKLDEDLHVKYPRLLTFASQLKAGKGLTIVGSVIQGSFLESYGEAQAAEQTPCAALRLPTWPCSCPRTSPSTPATTSATWRAT

SEQ ID NO: 868078 - protein, 245 aa, Homo sapiens
YVRVSLPPPPPAAGRPGAAVADDAREEEEEAAPPPPPPPPPRLAAARPPGSQPRPPAAGEAQAAADMNHQQQQQQQKAGEQQLSEPEDMEMEAGDTDDPPRITQNPVINGNVALSDGHNTAEEDMEDDTSWRSEATFQFTVERFSRLSESVLSPPCFVRNLPWKIMVMPRFYPDRPHQKSVGFFLQCNAESDSTSWSCHAQAVLKIINLSHLVSHYCLQPLCKVDALNTVRTDIVGVFLLNQEHC

SEQ ID NO: 868079 - protein, 599 aa, Homo sapiens
YVRVSLPPPPPAAGRPGAAVADDAREEEEEAAPPPPPPPPPRLAAARPPGSQPRPPAAGEAQAAADMNHQQQQQQQKAGEQQLSEPEDMEMEAGDTDDPPRITQNPVINGNVALSDGHNTAEEDMEDDTSWRSEATFQFTVERFSRLSESVLSPPCFVRNLPWKIMVMPRFYPDRPHQKSVGFFLQCNAESDSTSWSCHAQAVLKIINYRDDEKSFSRRISHLFFHKENDWGFSNFMAWSEVTDPEKGFIDDDKVTFEVFVQADAPHGVAWDSKKHTGYVGLKNQGATCYMNSLLQTLFFTNQLRKAVYMMPTEGDDSSKSVPLALQRVFYELQHSDKPVGTKKLTKSFGWETLDSFMQHDVQELCRVLLDNVENKMKGTCVEGTIPKLFRGKMVSYIQCKEVDYRSDRREDYYDIQLSIKGKKNIFESFVDYVAVEQLDGDNKYDAGEHGLQEAEKGVKFLTLPPVLHLQLMRFMYDPQTDQNIKINDRFEFPEQLPLDEFFKSKGSHAFLVGLNEMSTVFFSFLDDTRIARLLGLLGKRSRASAASSPETQAGQGLSQPDPASFAPQAAMSGDSQIYASLGNAIAACKIDGTTQSNI

SEQ ID NO: 868080 - protein, 106 aa, Homo sapiens
YTFLGPPDNFRELVHIEADGSWRPVTGYTTCRDQSNVRRMHTAVKLNEVIVTRSHDARLVLLNMPGPPRNSEGDENYMEFLEVLTEGLERVLLVRGGGREVITIYS

SEQ ID NO: 868081 - protein, 216 aa, Homo sapiens
ASGRGVSARGGGDSGGDSGGRLGRRVRRGRARTMPHFTVVPVDGPRRGDYDNLEGLSWVDYGERAELDDSDGHGNHRESSPFLSPLEASRGIDYYDRNLALFEEELDIRPKVSSLLGKLVSYTNLTQGAKEHEEAESGEGTRRRAAEAPSMGTLMGVYLPCLQNIFGVILFLRLTWMVGTAGVLQALLIVLICCCCTLLTAISMSAIATNGVVPGQ

SEQ ID NO: 868082 - protein, 1168 aa, Homo sapiens; identical to SEQ ID NO: 868062

SEQ ID NO: 868083 - protein, 79 aa, Homo sapiens
ASGRGVSARGGGDSGGDSGGRLGRRVRRGRARTMPHFTVVPVDGPRRGDYDNLEGLSWVDYGERAELDDSDDMATTERA

SEQ ID NO: 868084 - protein, 1112 aa, Homo sapiens
ILCSHSDVGERTSPIPQQRPLQSHAEMAGNHRLGLEAGDTDDPPRITQNPVINGNVALSDGHNTAEEDMEDDTSWRSEATFQFTVERFSRLSESVLSPPCFVRNLPWKIMVMPRFYPDRPHQKSVGFFLQCNAESDSTSWSCHAQAVLKIINYRDDEKSFSRRISHLFFHKENDWGFSNFMAWSEVTDPEKGFIDDDKVTFEVFVQADAPHGVAWDSKKHTGYVGLKNQGATCYMNSLLQTLFFTNQLRKAVYMMPTEGDDSSKSVPLALQRVFYELQHSDKPVGTKKLTKSFGWETLDSFMQHDVQELCRVLLDNVENKMKGTCVEGTIPKLFRGKMVSYIQCKEVDYRSDRREDYYDIQLSIKGKKNIFESFVDYVAVEQLDGDNKYDAGEHGLQEAEKGVKFLTLPPVLHLQLMRFMYDPQTDQNIKINDRFEFPEQLPLDEFLQKTDPKDPANYILHAVLVHSGDNHGGHYVVYLNPKGDGKWCKFDDDVVSRCTKEEAIEHNYGGHDDDLSVRHCTNAYMLVYIRESKLSEVLQAVTDHDIPQQLVERLQEEKRIEAQKRKERQEAHLYMQVQIVAEDQFCGHQGNDMYDEEKVKYTVFKVLKNSSLAEFVQSLSQTMGFPQDQIRLWPMQARSNGTKRPAMLDNEADGNKTMIELSDNENPWTIFLETVDPELAASGATLPKFDKDHDVMLFLKMYDPKTRSLNYCGHIYTPISCKIRDLLPVMCDRAGFIQDTSLILYEEVKPNLTERIQDYDVSLDKALDELMDGDIIVFQKDDPENDNSELPTAKEYFRDLYHRVDVIFCDKTIPNDPGFVVTLSNRMNYFQVAKTVAQRLNTDPMLLQFFKSQGYRDGPGNPLRHNYEGTLRDLLQFFKPRQPKKLYYQQLKMKITDFENRRSFKCIWLNSQFREEEITLYPDKHGCVRDLLEECKKAVELGEKASGKLRLLEIVSYKIIGVHQEDELLECLSPATSRTFRIEEIPLDQVDIDKENEMLVTVAHFHKEVFGTFGIPFLLRIHQGEHFREVMKRIQSLLDIQEKEFEKFKFAIVMMGRHQYINEDEYEVNLKDFEPQPGNMSHPRPWLGLDHFNKAPKRSRYTYLEKAIKIHN

SEQ ID NO: 868085 - protein, 1011 aa, Homo sapiens
SSDPHHLIMVMPRFYPDRPHQKSVGFFLQCNAESDSTSWSCHAQAVLKIINYRDDEKSFSRRISHLFFHKENDWGFSNFMAWSEVTDPEKGFIDDDKVTFEVFVQADAPHGVAWDSKKHTGYVGLKNQGATCYMNSLLQTLFFTNQLRKAVYMMPTEGDDSSKSVPLALQRVFYELQHSDKPVGTKKLTKSFGWETLDSFMQHDVQELCRVLLDNVENKMKGTCVEGTIPKLFRGKMVSYIQCKEVDYRSDRREDYYDIQLSIKGKKNIFESFVDYVAVEQLDGDNKYDAGEHGLQEAEKGVKFLTLPPVLHLQLMRFMYDPQTDQNIKINDRFEFPEQLPLDEFLQKTDPKDPANYILHAVLVHSGDNHGGHYVVYLNPKGDGKWCKFDDDVVSRCTKEEAIEHNYGGHDDDLSVRHCTNAYMLVYIRESKLSEVLQAVTDHDIPQQLVERLQEEKRIEAQKRKERQEAHLYMQVQIVAEDQFCGHQGNDMYDEEKVKYTVFKVLKNSSLAEFVQSLSQTMGFPQDQIRLWPMQARSNGTKRPAMLDNEADGNKTMIELSDNENPWTIFLETVDPELAASGATLPKFDKDHDVMLFLKMYDPKTRSLNYCGHIYTPISCKIRDLLPVMCDRAGFIQDTSLILYEEVKPNLTERIQDYDVSLDKALDELMDGDIIVFQKDDPENDNSELPTAKEYFRDLYHRVDVIFCDKTIPNDPGFVVTLSNRMNYFQVAKTVAQRLNTDPMLLQFFKSQGYRDGPGNPLRHNYEGTLRDLLQFFKPRQPKKLYYQQLKMKITDFENRRSFKCIWLNSQFREEEITLYPDKHGCVRDLLEECKKAVELGEKASGKLRLLEIVSYKIIGVHQEDELLECLSPATSRTFRIEEIPLDQVDIDKENEMLVTVAHFHKEVFGTFGIPFLLRIHQGEHFREVMKRIQSLLDIQEKEFEKFKFAIVMMGRHQYINEDEYEVNLKDFEPQPGNMSHPRPWLGLDHFNKAPKRSRYTYLEKAIKIHN

SEQ ID NO: 868086 - protein, 878 aa, Homo sapiens
MNSLLQTLFFTNQLRKAVYMMPTEGDDSSKSVPLALQRVFYELQHSDKPVGTKKLTKSFGWETLDSFMQHDVQELCRVLLDNVENKMKGTCVEGTIPKLFRGKMVSYIQCKEVDYRSDRREDYYDIQLSIKGKKNIFESFVDYVAVEQLDGDNKYDAGEHGLQEAEKGVKFLTLPPVLHLQLMRFMYDPQTDQNIKINDRFEFPEQLPLDEFLQKTDPKDPANYILHAVLVHSGDNHGGHYVVYLNPKGDGKWCKFDDDVVSRCTKEEAIEHNYGGHDDDLSVRHCTNAYMLVYIRESKLSEVLQAVTDHDIPQQLVERLQEEKRIEAQKRKERQEAHLYMQVQIVAEDQFCGHQGNDMYDEEKVKYTVFKVLKNSSLAEFVQSLSQTMGFPQDQIRLWPMQARSNGTKRPAMLDNEADGNKTMIELSDNENPWTIFLETVDPELAASGATLPKFDKDHDVMLFLKMYDPKTRSLNYCGHIYTPISCKIRDLLPVMCDRAGFIQDTSLILYEEVKPNLTERIQDYDVSLDKALDELMDGDIIVFQKDDPENDNSELPTAKEYFRDLYHRVDVIFCDKTIPNDPGFVVTLSNRMNYFQVAKTVAQRLNTDPMLLQFFKSQGYRDGPGNPLRHNYEGTLRDLLQFFKPRQPKKLYYQQLKMKITDFENRRSFKCIWLNSQFREEEITLYPDKHGCVRDLLEECKKAVELGEKASGKLRLLEIVSYKIIGVHQEDELLECLSPATSRTFRIEEIPLDQVDIDKENEMLVTVAHFHKEVFGTFGIPFLLRIHQGEHFREVMKRIQSLLDIQEKEFEKFKFAIVMMGRHQYINEDEYEVNLKDFEPQPGNMSHPRPWLGLDHFNKAPKRSRYTYLEKAIKIHN

SEQ ID NO: 868087 - protein, 751 aa, Homo sapiens
RKKVQKKNIFESFVDYVAVEQLDGDNKYDAGEHGLQEAEKGVKFLTLPPVLHLQLMRFMYDPQTDQNIKINDRFEFPEQLPLDEFLQKTDPKDPANYILHAVLVHSGDNHGGHYVVYLNPKGDGKWCKFDDDVVSRCTKEEAIEHNYGGHDDDLSVRHCTNAYMLVYIRESKLSEVLQAVTDHDIPQQLVERLQEEKRIEAQKRKERQEAHLYMQVQIVAEDQFCGHQGNDMYDEEKVKYTVFKVLKNSSLAEFVQSLSQTMGFPQDQIRLWPMQARSNGTKRPAMLDNEADGNKTMIELSDNENPWTIFLETVDPELAASGATLPKFDKDHDVMLFLKMYDPKTRSLNYCGHIYTPISCKIRDLLPVMCDRAGFIQDTSLILYEEVKPNLTERIQDYDVSLDKALDELMDGDIIVFQKDDPENDNSELPTAKEYFRDLYHRVDVIFCDKTIPNDPGFVVTLSNRMNYFQVAKTVAQRLNTDPMLLQFFKSQGYRDGPGNPLRHNYEGTLRDLLQFFKPRQPKKLYYQQLKMKITDFENRRSFKCIWLNSQFREEEITLYPDKHGCVRDLLEECKKAVELGEKASGKLRLLEIVSYKIIGVHQEDELLECLSPATSRTFRIEEIPLDQVDIDKENEMLVTVAHFHKEVFGTFGIPFLLRIHQGEHFREVMKRIQSLLDIQEKEFEKFKFAIVMMGRHQYINEDEYEVNLKDFEPQPGNMSHPRPWLGLDHFNKAPKRSRYTYLEKAIKIHN

SEQ ID NO: 868088 - protein, 947 aa, Homo sapiens
YVRVSLPPPPPAAGRPGAAVADDAREEEEEAAPPPPPPPPPRLAAARPPGSQPRPPAAGEAQAAADMNHQQQQQQQKAGEQQLSEPEDMEMEAGDTDDPPRITQNPVINGNVALSDGHNTAEEDMEDDTSWRSEATFQFTVERFSRLSESVLSPPCFVRNLPWKIMVMPRFYPDRPHQKSVGFFLQCNAESDSTSWSCHAQAVLKIINYRDDEKSFSRRISHLFFHKENDWGFSNFMAWSEVTDPEKGFIDDDKVTFEVFVQADAPHGVAWDSKKHTGYVGLKNQGATCYMNSLLQTLFFTNQLRKAVYMMPTEGDDSSKSVPLALQRVFYELQHSDKPVGTKKLTKSFGWETLDSFMQHDVQELCRVLLDNVENKMKGTCVEGTIPKLFRGKMVSYIQCKEVDYRSDRREDYYDIQLSIKGKKNIFESFVDYVAVEQLDGDNKYDAGEHGLQEAEKGVKFLTLPPVLHLQLMRFMYDPQTDQNIKINDRFEFPEQLPLDEFLQKTDPKDPANYILHAVLVHSGDNHGGHYVVYLNPKGDGKWCKFDDDVVSRCTKEEAIEHNYGGHDDDLSVRHCTNAYMLVYIRESKLSEVLQAVTDHDIPQQLVERLQEEKRIEAQKRKERQEAHLYMQVQIVAEDQFCGHQGNDMYDEEKVKYTVFKVLKNSSLAEFVQSLSQTMGFPQDQIRLWPMQARSNGTKRPAMLDNEADGNKTMIELSDNENPWTIFLETVDPELAASGATLPKFDKDHDVMLFLKMYDPKTRSLNYCGHIYTPISCKIRDLLPVMCDRAGFIQDTSLILYEEVKPNLTERIQDYDVSLDKALDELMDGDIIVFQKDDPENDNSELPTAKEYFRDLYHRVDVIFCDKTIPNDPGFVVTLSNRMNYFQVAKTVAQRLNTDPMLLQFFKSQGYRDGPGNPLRHNYEGTLRDLLQFFKPRQPKKLYYQQV

SEQ ID NO: 868089 - protein, 1168 aa, Homo sapiens; identical to SEQ ID NO: 868062

SEQ ID NO: 868090 - protein, 888 aa, Homo sapiens
YVRVSLPPPPPAAGRPGAAVADDAREEEEEAAPPPPPPPPPRLAAARPPGSQPRPPAAGEAQAAADMNHQQQQQQQKAGEQQLSEPEDMEMEAGDTDDPPRITQNPVINGNVALSDGHNTAEEDMEDDTSWRSEATFQFTVERFSRLSESVLSPPCFVRNLPWKIMVMPRFYPDRPHQKSVGFFLQCNAESDSTSWSCHAQAVLKIINYRDDEKSFSRRISHLFFHKENDWGFSNFMAWSEVTDPEKGFIDDDKVTFEVFVQADAPHGVAWDSKKHTGYVGLKNQGATCYMNSLLQTLFFTNQLRKAVYMMPTEGDDSSKSVPLALQRVFYELQHSDKPVGTKKLTKSFGWETLDSFMQHDVQELCRVLLDNVENKMKGTCVEGTIPKLFRGKMVSYIQCKEVDYRSDRREDYYDIQLSIKGKKNIFESFVDYVAVEQLDGDNKYDAGEHGLQEAEKGVKFLTLPPVLHLQLMRFMYDPQTDQNIKINDRFEFPEQLPLDEFLQKTDPKDPANYILHAVLVHSGDNHGGHYVVYLNPKGDGKWCKFDDDVVSRCTKEEAIEHNYGGHDDDLSVRHCTNAYMLVYIRESKLSEVLQAVTDHDIPQQLVERLQEEKRIEAQKRKERQEAHLYMQVQIVAEDQFCGHQGNDMYDEEKVKYTVFKVLKNSSLAEFVQSLSQTMGFPQDQIRLWPMQARSNGTKRPAMLDNEADGNKTMIELSDNENPWTIFLETVDPELAASGATLPKFDKDHDVMLFLKMYDPKTRSLNYCGHIYTPISCKIRDLLPVMCDRAGFIQDTSLILYEEVKPNLTERIQDYDVSLDKALDELMDGDIIVFQKDDPENDNSELPTAKEYFRDLYHRVDVIFCDKTIPNDPGFVVTLSNRMNYFQL

SEQ ID NO: 868091 - protein, 1167 aa, Homo sapiens
ASGRGVSARGGGDSGGDSGGRLGRRVRRGRARTMPHFTVVPVDGPRRGDYDNLEGLSWVDYGERAELDDSDGHGNHRESSPFLSPLEASRGIDYYDRNLALFEEELDIRPKVSSLLGKLVSYTNLTQGAKEHEEAESGEGTRRRAAEAPSMGTLMGVYLPCLQNIFGVILFLRLTWMVGTAGVLQALLIVLICCCCTLLTAISMSAIATNGVVPAGGSYFMISRSLGPEFGGAVGLCFYLGTTFAAAMYILGAIEILLTYIAPPAAIFYPSGAHDTSNATLNNMRVYGTIFLTFMTLVVFVGVKYVNKFASLFLACVIISILSIYAGGIKSIFDPPVFPVCMLGNRTLSRDQFDICAKTAVVDNETVATQLWSFFCHSPNLTTDSCDPYFMLNNVTEIPGIPGAAAGVLQENLWSAYLEKGDIVEKHGLPSADAPSLKESLPLYVVADIATSFTVLVGIFFPSVTGIMAGSNRSGDLRDAQKSIPVGTILAIITTSLVYFSSVVLFGACIEGVVLRDKYGDGVSRNLVVGTLAWPSPWVIVIGSFFSTCGAGLQSLTGAPRLLQAIAKDNIIPFLRVFGHGKVNGEPTWALLLTALIAELGILIASLDMVAPILSMFFLMCYLFVNLACAVQTLLRTPNWRPRFKYYHWALSFLGMSLCLALMFVSSWYYALVAMLIAGMIYKYIEYQGAEKEWGDGIRGLSLSAARYALLRLEEGPPHTKNWRPQLLVLLKLDEDLHVKYPRLLTFASQLKAGKGLTIVGSVIQGSFLESYGEAQAAEQTIKNMMEIEKVKGFCQVVVASKVREGLAHLIQSCGLGGMRHNSVVLGWPYGWRQSEDPRAWKTFIDTVRCTTAAHLALLVPKNIAFYPSNHERYLEGHIDVWWIVHDGGMLMLLPFLLRQHKVWRKCRMRIFTVAQMDDNSIQMKKDLAVFLYHLRLEAEVEVVEMHNSDISAYTYERTLMMEQRSQMLRQMRLTKTEREREAQLVKDRHSALRLESLYSDEEDESAVGADKIQMTWTRDKYMTETWDPSHAPDNFRELVHIKPCVQQKQPQRHWNLGVEVGWGRQVVLDGPGVGTLLQDGSWRPVTGYTTCRDQSNVRRMHTAVKLNEVIVTRSHDARLVLLNMPGPPRNSEGDENYMEFLEVLTEGLERVLLVRGGGREVITIYS

SEQ ID NO: 868092 - protein, 1101 aa, Homo sapiens
ASGRGVSARGGGDSGGDSGGRLGRRVRRGRARTMPHFTVVPVDGPRRGDYDNLEGLSWVDYGERAELDDSDGHGNHRESSPFLSPLEASRGIDYYDRNLALFEEELDIRPKVSSLLGKLVSYTNLTQGAKEHEEAESGEGTRRRAAEAPSMGTLMGVYLPCLQNIFGVILFLRLTWMVGTAGVLQALLIVLICCCCTLLTAISMSAIATNGVVPAGGSYFMISRSLGPEFGGAVGLCFYLGTTFAAAMYILGAIEILLTYIAPPAAIFYPSGAHDTSNATLNNMRVYGTIFLTFMTLVVFVGVKYVNKFASLFLACVIISILSIYAGGIKSIFDPPVFPVCMLGNRTLSRDQFDICAKTAVVDNETVATQLWSFFCHSPNLTTDSCDPYFMLNNVTEIPGIPGAAAGVLQENLWSAYLEKGDIVEKHGLPSADAPSLKESLPLYVVADIATSFTVLVGIFFPSVTGIMAGSNRSGDLRDAQKSIPVGTILAIITTSLVYFSSVVLFGACIEGVVLRDKYGDGVSRNLVVGTLAWPSPWVIVIGSFFSTCGAGLQSLTGAPRLLQAIAKDNIIPFLRVFGHGKVNGEPTWALLLTALIAELGILIASLDMVAPILSMFFLMCYLFVNLACAVQTLLRTPNWRPRFKYYHWALSFLGMSLCLALMFVSSWYYALVAMLIAGMIYKYIEYQGAEKEWGDGIRGLSLSAARYALLRLEEGPPHTKNWRPQLLVLLKLDEDLHVKYPRLLTFASQLKAGKGLTIVGSVIQGSFLESYGEAQAAEQTIKNMMEIEKVKGFCQVVVASKVREGLAHLIQSCGLGGMRHNSVVLGWPYGWRQSEDPRAWKTFIDTVRCTTAAHLALLVPKNIAFYPSNHERYLEGHIDVWWIVHDGGMLMLLPFLLRQHKVWRKCRMRIFTVAQMDDNSIQMKKDLAVFLYHLRLEAEVEVVEMHNSDISAYTYERTLMMEQRSQMLRQMRLTKTEREREAQLVKDRHSALRLESLYSDEEDESAVGADKIQMTWTRDKYMTETWDPSHAPDNFRELVHIKPDQSNVRRMHTAVKLNEVIVTRSHDARLVLLNMPGPPRNSEGDENCIPLWRGRQLGGG

SEQ ID NO: 868093 - protein, 1082 aa, Homo sapiens
LWAMAAEGAVCGFVYLEGTAWAVPEDTEPLASCTLGHGNHRESSPFLSPLEASRGIDYYDRNLALFEEELDIRPKVSSLLGKLVSYTNLTQGAKEHEEAESGEGTRRRAAEAPSMGTLMGVYLPCLQNIFGVILFLRLTWMVGTAGVLQALLIVLICCCCTLLTAISMSAIATNGVVPAGGSYFMISRSLGPEFGGAVGLCFYLGTTFAAAMYILGAIEILLTYIAPPAAIFYPSGAHDTSNATLNNMRVYGTIFLTFMTLVVFVGVKYVNKFASLFLACVIISILSIYAGGIKSIFDPPVFPVCMLGNRTLSRDQFDICAKTAVVDNETVATQLWSFFCHSPNLTTDSCDPYFMLNNVTEIPGIPGAAAGVLQENLWSAYLEKGDIVEKHGLPSADAPSLKESLPLYVVADIATSFTVLVGIFFPSVTGIMAGSNRSGDLRDAQKSIPVGTILAIITTSLVYFSSVVLFGACIEGVVLRDKYGDGVSRNLVVGTLAWPSPWVIVIGSFFSTCGAGLQSLTGAPRLLQAIAKDNIIPFLRVFGHGKVNGEPTWALLLTALIAELGILIASLDMVAPILSMFFLMCYLFVNLACAVQTLLRTPNWRPRFKYYHWALSFLGMSLCLALMFVSSWYYALVAMLIAGMIYKYIEYQGAEKEWGDGIRGLSLSAARYALLRLEEGPPHTKNWRPQLLVLLKLDEDLHVKYPRLLTFASQLKAGKGLTIVGSVIQGSFLESYGEAQAAEQTIKNMMEIEKVKGFCQVVVASKVREGLAHLIQSCGLGGMRHNSVVLGWPYGWRQSEDPRAWKTFIDTVRCTTAAHLALLVPKNIAFYPSNHERYLEGHIDVWWIVHDGGMLMLLPFLLRQHKVWRKCRMRIFTVAQMDDNSIQMKKDLAVFLYHLRLEAEVEVVEMHNSDISAYTYERTLMMEQRSQMLRQMRLTKTEREREAQLVKDRHSALRLESLYSDEEDESAVGADKIQMTWTRDKYMTETWDPSHAPDNFRELVHIKPDQSNVRRMHTAVKLNEVIVTRSHDARLVLLNMPGPPRNSEGDENYMEFLEVLTEGLERVLLVRGGGREVITIYS

SEQ ID NO: 868094 - protein, 1054 aa, Homo sapiens
MGDTLSPGHGNHRESSPFLSPLEASRGIDYYDRNLALFEEELDIRPKVSSLLGKLVSYTNLTQGAKEHEEAESGEGTRRRAAEAPSMGTLMGVYLPCLQNIFGVILFLRLTWMVGTAGVLQALLIVLICCCCTLLTAISMSAIATNGVVPAGGSYFMISRSLGPEFGGAVGLCFYLGTTFAAAMYILGAIEILLTYIAPPAAIFYPSGAHDTSNATLNNMRVYGTIFLTFMTLVVFVGVKYVNKFASLFLACVIISILSIYAGGIKSIFDPPVFPVCMLGNRTLSRDQFDICAKTAVVDNETVATQLWSFFCHSPNLTTDSCDPYFMLNNVTEIPGIPGAAAGVLQENLWSAYLEKGDIVEKHGLPSADAPSLKESLPLYVVADIATSFTVLVGIFFPSVTGIMAGSNRSGDLRDAQKSIPVGTILAIITTSLVYFSSVVLFGACIEGVVLRDKYGDGVSRNLVVGTLAWPSPWVIVIGSFFSTCGAGLQSLTGAPRLLQAIAKDNIIPFLRVFGHGKVNGEPTWALLLTALIAELGILIASLDMVAPILSMFFLMCYLFVNLACAVQTLLRTPNWRPRFKYYHWALSFLGMSLCLALMFVSSWYYALVAMLIAGMIYKYIEYQGAEKEWGDGIRGLSLSAARYALLRLEEGPPHTKNWRPQLLVLLKLDEDLHVKYPRLLTFASQLKAGKGLTIVGSVIQGSFLESYGEAQAAEQTIKNMMEIEKVKGFCQVVVASKVREGLAHLIQSCGLGGMRHNSVVLGWPYGWRQSEDPRAWKTFIDTVRCTTAAHLALLVPKNIAFYPSNHERYLEGHIDVWWIVHDGGMLMLLPFLLRQHKVWRKCRMRIFTVAQMDDNSIQMKKDLAVFLYHLRLEAEVEVVEMHNSDISAYTYERTLMMEQRSQMLRQMRLTKTEREREAQLVKDRHSALRLESLYSDEEDESAVGADKIQMTWTRDKYMTETWDPSHAPDNFRELVHIKPDQSNVRRMHTAVKLNEVIVTRSHDARLVLLNMPGPPRNSEGDENYMEFLEVLTEGLERVLLVRGGGREVITIYS

SEQ ID NO: 868095 - protein, 1179 aa, Homo sapiens
YVRVSLPPPPPAAGRPGAAVADDAREEEEEAAPPPPPPPPPRLAAARPPGSQPRPPAAGEAQAAADMNHQQQQQQQKAGEQQLSEPEDMEMEAGDTDDPPRITQNPVINGNVALSDGHNTAEEDMEDDTSWRSEATFQFTVERFSRLSESVLSPPCFVRNLPWKIMVMPRFYPDRPHQKSVGFFLQCNAESDSTSWSCHAQAVLKIINYRDDEKSFSRRISHLFFHKENDWGFSNFMAWSEVTDPEKGFIDDDKVTFEVFVQADAPHGVAWDSKKHTGYVGLKNQGATCYMNSLLQTLFFTNQLRKAVYMMPTEGDDSSKSVPLALQRVFYELQHSDKPVGTKKLTKSFGWETLDSFMQHDVQELCRVLLDNVENKMKGTCVEGTIPKLFRGKMVSYIQCKEVDYRSDRREDYYDIQLSIKGKKNIFESFVDYVAVEQLDGDNKYDAGEHGLQEAEKGVKFLTLPPVLHLQLMRFMYDPQTDQNIKINDRFEFPEQLPLDEFLQKTDPKDPANYILHAVLVHSGDNHGGHYVVYLNPKGDGKWCKFDDDVVSRCTKEEAIEHNYGGHDDDLSVRHCTNAYMLVYIRESKLSEVLQAVTDHDIPQQLVERLQEEKRIEAQKRKERQEAHLYMQVQIVAEDQFCGHQGNDMYDEEKVKYTVFKVLKNSSLAEFVQSLSQTMGFPQDQIRLWPMQARSNGTKRPAMLDNEADGNKTMIELSDNENPWTIFLETVDPELAASGATLPKFDKDHDVMLFLKMYDPKTRSLNYCGHIYTPISCKIRDLLPVMCDRAGFIQDTSLILYEEVKPNLTERIQDYDVSLDKALDELMDGDIIVFQKDDPENDNSELPTAKEYFRDLYHRVDVIFCDKTIPNDPGFVVTLSNRMNYFQVAKTVAQRLNTDPMLLQFFKSQGYRDGPGNPLRHNYEGTLRDLLQFFKPRQPKKLYYQQLKMKITDFENRRSFKCIWLNSQFREEEITLYPDKHGCVRDLLEECKKAVELGEKASGKLRLLEIVSYKIIGVHQEDELLECLSPATSRTFRIEEIPLDQVDIDKENEMLVTVAHFHKEVFGTFGIPFLLRIHQGEHFREVMKRIQSLLDIQEKEFEKFKFAIVMMGRHQYINEDEYEVNLKDFEPQPGKGSPPPGGWCGFQTKKQVVWGWEGQPQVQVPAPLSPLADLWNQEQ

SEQ ID NO: 868096 - protein, 115 aa, Homo sapiens
MLVTVAHFHKEVFGTFGIPFLLRIHQGEHFREVMKRIQSLLDIQEKEFEKFKFAIVMMGRHQYINEDEYEVNLKDFEPQPGNMSHPRPWLGLDHFNKAPKRSRYTYLEKAIKIHN

SEQ ID NO: 868097 - protein, 1252 aa, Homo sapiens
ASGRGVSARGGGDSGGDSGGRLGRRVRRGRARTMPHFTVVPVDGPRRGDYDNLEGLSWVDYGERAELDDSDGHGNHRESSPFLSPLEASRGIDYYDRNLALFEEELDIRPKVSSLLGKLVSYTNLTQGAKEHEEAESGEGTRRRAAEAPSMGTLMGVYLPCLQNIFGVILFLRLTWMVGTAGVLQALLIVLICCCCTLLTAISMSAIATNGVVPAGGSYFMISRSLGPEFGGAVGLCFYLGTTFAAAMYILGAIEILLTYIAPPAAIFYPSGAHDTSNATLNNMRVYGTIFLTFMTLVVFVGVKYVNKFASLFLACVIISILSIYAGGIKSIFDPPVFPVCMLGNRTLSRDQFDICAKTAVVDNETVATQLWSFFCHSPNLTTDSCDPYFMLNNVTEIPGIPGAAAGVLQENLWSAYLEKGDIVEKHGLPSADAPSLKESLPLYVVADIATSFTVLVGIFFPSVTGIMAGSNRSGDLRDAQKSIPVGTILAIITTSLVYFSSVVLFGACIEGVVLRDKYGDGVSRNLVVGTLAWPSPWVIVIGSFFSTCGAGLQSLTGAPRLLQAIAKDNIIPFLRVSPSALPHGLAAPRPSPGWGERYGNTDAARPALIGPRGQAAIHEELLRSALGLALTWAWSCLDPESSWPVQGSSKGERPGEVESGRLVTPIGIDTGAAWAPKAGPGGEGGQAVGLGPKVWNGGDRTQLPSWCTQVFGHGKVNGEPTWALLLTALIAELGILIASLDMVAPILSMFFLMCYLFVNLACAVQTLLRTPNWRPRFKYYHWALSFLGMSLCLALMFVSSWYYALVAMLIAGMIYKYIEYQGAEKEWGDGIRGLSLSAARYALLRLEEGPPHTKNWRPQLLVLLKLDEDLHVKYPRLLTFASQLKAGKGLTIVGSVIQGSFLESYGEAQAAEQTIKNMMEIEKVKGFCQVVVASKVREGLAHLIQSCGLGGMRHNSVVLGWPYGWRQSEDPRAWKTFIDTVRCTTAAHLALLVPKNIAFYPSNHERYLEGHIDVWWIVHDGGMLMLLPFLLRQHKVWRKCRMRIFTVAQMDDNSIQMKKDLAVFLYHLRLEAEVEVVEMHNSDISAYTYERTLMMEQRSQMLRQMRLTKTEREREAQLVKDRHSALRLESLYSDEEDESAVGADKIQMTWTRDKYMTETWDPSHAPDNFRELVHIKPDQSNVRRMHTAVKLNEVIVTRSHDARLVLLNMPGPPRNSEGDENYMEFLEVLTEGLERVLLVRGGGREVITIYS

SEQ ID NO: 868098 - protein, 914 aa, Homo sapiens
  misc_feature (900)..(900): Xaa can be any naturally occurring amino acid
  misc_feature (904)..(904): Xaa can be any naturally occurring amino acid
YVRVSLPPPPPAAGRPGAAVADDAREEEEEAAPPPPPPPPPRLAAARPPGSQPRPPAAGEAQAAADMNHQQQQQQQKAGEQQLSEPEDMEMEAGDTDDPPRITQNPVINGNVALSDGHNTAEEDMEDDTSWRSEATFQFTVERFSRLSESVLSPPCFVRNLPWKIMVMPRFYPDRPHQKSVGFFLQCNAESDSTSWSCHAQAVLKIINYRDDEKSFSRRISHLFFHKENDWGFSNFMAWSEVTDPEKGFIDDDKVTFEVFVQADAPHGVAWDSKKHTGYVGLKNQGATCYMNSLLQTLFFTNQLRKAVYMMPTEGDDSSKSVPLALQRVFYELQHSDKPVGTKKLTKSFGWETLDSFMQHDVQELCRVLLDNVENKMKGTCVEGTIPKLFRGKMVSYIQCKEVDYRSDRREDYYDIQLSIKGKKNIFESFVDYVAVEQLDGDNKYDAGEHGLQEAEKGVKFLTLPPVLHLQLMRFMYDPQTDQNIKINDRFEFPEQLPLDEFLQKTDPKDPANYILHAVLVHSGDNHGGHYVVYLNPKGDGKWCKFDDDVVSRCTKEEAIEHNYGGHDDDLSVRHCTNAYMLVYIRESKLSEVLQAVTDHDIPQQLVERLQEEKRIEAQKRKERQEAHLYMQVQIVAEDQFCGHQGNDMYDEEKVKYTVFKVLKNSSLAEFVQSLSQTMGFPQDQIRLWPMQARSNGTKRPAMLDNEADGNKTMIELSDNENPWTIFLETVDPELAASGATLPKFDKDHDVMLFLKMYDPKTRSLNYCGHIYTPISCKIRDLLPVMCDRAGFIQDTSLILYEEVKPNLTERIQDYDVSLDKALDELMDGDIIVFQKDDPENDNSELPTAKEYFRDLYHRVDVIFCDKTIPNDPGFVVTLSNRMNYFQEIYFSRVGKRTKXWHKXGFKQQGIPKW

SEQ ID NO: 868099 - protein, 598 aa, Homo sapiens
ASGRGVSARGGGDSGGDSGGRLGRRVRRGRARTMPHFTVVPVDGPRRGDYDNLEGLSWVDYGERAELDDSDGHGNHRESSPFLSPLEASRGIDYYDRNLALFEEELDIRPKVSSLLGKLVSYTNLTQGAKEHEEAESGEGTRRRAAEAPSMGTLMGVYLPCLQNIFGVILFLRLTWMVGTAGVLQALLIVLICCCCTLLTAISMSAIATNGVVPAGGSYFMISRSLGPEFGGAVGLCFYLGTTFAAAMYILGAIEILLTYIAPPAAIFYPSGAHDTSNATLNNMRVYGTIFLTFMTLVVFVGVKYVNKFASLFLACVIISILSIYAGGIKSIFDPPVFPVCMLGNRTLSRDQFDICAKTAVVDNETVATQLWSFFCHSPNLTTDSCDPYFMLNNVTEIPGIPGAAAGVLQENLWSAYLEKGDIVEKHGLPSADAPSLKESLPLYVVADIATSFTVLVGIFFPSVTGIMAGSNRSGDLRDAQKSIPVGTILAIITTSLVYFSSVVLFGACIEGVVLRDKYGDGVSRNLVVGTLAWPSPWVIVIGSFFSTCGAGLQSLTGAPRLLQAIAKDNIIPFLRVSPSALPHGLAAPRPSPGWGER

SEQ ID NO: 868100 - protein, 128 aa, Homo sapiens; identical to SEQ ID NO: 868073

SEQ ID NO: 868101 - protein, 190 aa, Homo sapiens
YVRVSLPPPPPAAGRPGAAVADDAREEEEEAAPPPPPPPPPRLAAARPPGSQPRPPAAGEAQAAADMNHQQQQQQQKAGEQQLSEPEDMEMEAGDTDDPPRITQNPVINGNVALSDGHNTAEEDMEDGKCLWFTASQWAETLSENRFRSMLGTSWVHPWVLLSVASFQEAVTEENPVWVLSFKIAYTIAR

SEQ ID NO: 868102 - protein, 713 aa, Homo sapiens
MDELAGGGGGGPGMAAPPRQQQGPGGNLGLSPGGNGAAGGGGPPASEGAGPAAGPELSRPQQNTIPGILHYIQHEWARFEMERAHWEVERAELQARIAFLQGERKGQENLKKDLVRRIKMLEYALKQERAKYHKLKYGTELNQGDLKMPTFESEETKDTEAPTAPQNSQLTWKQGRQLLRQYLQEVGYTDTILDVRSQRVRSLLGLSNSEPNGSVETKNLEQILNGGESPKQKGQEIKRSSGDVLETFNFLENADDSDEDEENDMIEGIPEGKDKHRMNKHKIGNEGLAADLTDDPDTEEALKEFDFLVTAEDGEGAGEARSSGDGTEWAEPITFPSGGGKSFIMGSDDVLLSVLGLGDLADLTVTNDADYSYDLPANKDAFRKTWNPKYTLRSHFDGVRALAFHPVEPVLVTASEDHTLKLWNLQKTVPAKKSASLDVEPIYTFRAHIGPVLSLAISSNGEQCFSGGIDATIQWWNMPSPSVDPYDTYEPNVLAGTLVGHTDAVWGLAYSGIKNQLLSCSADGTVRLWNPQEKLPCICTYNGDKKHGIPTSVDFIGCDPAHMVTSFNTGSAVIYDLETSQSLVILSSQVDSGLQSNNHINRVVSHPTLPVTITAHEDRHIKFFDNKTGKMIHSMVAHLDAVTSLAVDPNGIYLMSGSHDCSIRLWNLDSKTCVQEITAHRKKLDESIYDVAFHSSKAYIASAGADALAKVFV

SEQ ID NO: 868103 - protein, 678 aa, Homo sapiens
MLEYALKQERAKYHKLKYGTELNQGDLKMPTFESEETKDTEAPTAPQNSQLTWKQGRQLLRQYLQEVGYTDTILDVRSQRVRSLLGLSNSEPNGSVETKNLEQILNGGESPKQKGQEIKRSSGDVLETFNFLENADDSDEDEENDMIEGIPEGKDKHRMNKHKIGNEGLAADLTDDPDTEEALKEFDFLVTAEDGEGAGEARSSGDGTEWDKDDLSPTAEVWDVDQGLISKLKEQYKKERKGKKGVKRANRTKLYDMIADLGDDELPHIPSGIINQSRSASTRMTDHEGARAEEAEPITFPSGGGKSFIMGSDDVLLSVLGLGDLADLTVTNDADYSYDLPANKDAFRKTWNPKYTLRSHFDGVRALAFHPVEPVLVTASEDHTLKLWNLQKTVPAKKSASLDVEPIYTFRAHIGPVLSLAISSNGEQCFSGGIDATIQWWNMPSPSVDPYDTYEPNVLAGTLVGHTDAVWGLAYSGIKNQLLSCSADGTVRLWNPQEKLPCICTYNGDKKHGIPTSVDFIGCDPAHMVTSFNTGSAVIYDLETSQSLVILSSQVDSGLQSNNHINRVVSHPTLPVTITAHEDRHIKFFDNKTGKMIHSMVAHLDAVTSLAVDPNGIYLMSGSHDCSIRLWNLDSKTCVQEITAHRKKLDESIYDVAFHSSKAYIASAGADALAKVFV

SEQ ID NO: 868104 - protein, 236 aa, Homo sapiens [sequence omitted]

SEQ ID NO: 868105 - protein, 678 aa, Homo sapiens; identical to SEQ ID NO: 868103

SEQ ID NO: 868106 - protein, 678 aa, Homo sapiens; identical to SEQ ID NO: 868103

SEQ ID NO: 868107 - protein, 678 aa, Homo sapiens; identical to SEQ ID NO: 868103

SEQ ID NO: 868108 - protein, 300 aa, Homo sapiens
MDWFHCNQCFRKDGAHFFVTSCGHIFCKKCVTLEKCAVCGTACKHLALSDNLKPQEKMFFKSPVETALQYFSHISQVWSFQKKQTDLLIAFYKHRITKLETAMQEAQQALVSQDKELSVLRKENGELKKFLAILKESPSRYQGSRSITPRPVGITSPSQSVTPRPSFQHSSQVVSRSSSAESIPYREAGFGSLGQGGRGLQGRRTPRDSYNETPSPASTHSLSYRTSSASSGQGIFSFRPSPNGHSGHTRVLTPNNFAQRESTTTLESLPSFQLPVLQTLYQQRRHMGLPSGREAWTTSR

SEQ ID NO: 868109 - protein, 240 aa, Homo sapiens
MDWFHCNQCFRKDGAHFFVTSCGHIFCKKCVTLEKCAVCGTACKHLALSDNLKPQEKMFFKSPVETALQYFSHISQVWSFQKKQTDLLIAFYKHRITKLETAMQEAQQALVSQDNRSSSAESIPYREAGFGSLGQGGRGLQGRRTPRDSYNETPSPASTHSLSYRTSSASSGQGIFSFRPSPNGHSGHTRVLTPNNFAQRESTTTLESLPSFQLPVLQTLYQQRRHMGLPSGREAWTTSR

SEQ ID NO: 868110 - protein, 242 aa, Homo sapiens
MDWFHCNQCFRKDGAHFFVTSCGHIFCKKCVTLEKCAVCGTACKHLALSDNLKPQEKMFFKSPVETALQYFSHISQVWSFQKKQTDLLIAFYKHRITKLETAMQEAQQALVSQDKELSVLRKENGELKKFLAILKESPSRYQGSRSITPRPVGITSPSQSVGPPQRNLFLIERLALVAWDKEAEVCREGELPETLIMNFICLLWTGDFFFQTIPKWAFRPHKSPHPQQFCSEGEHNYTRESS

SEQ ID NO: 868111 - protein, 144 aa, Homo sapiens
WTAKDGQHRGGGQHRGGGQHRRPRGLKGRSLVPSPLQDTRWGPCALAGGRLQPPRPNVTFTHSLSSCPPVTPSPPSPSSHHPFRSARAFPEASCDSGRGDTSLRGRPHGVTRPAPMRIRPPLHLGALAARFPLTPLFRVLLNSG

SEQ ID NO: 868112 - protein, 412 aa, Homo sapiens
APHPRPLQEVEMETYGAGTPLGSVASVHSPPAESCASLQIPLAVSSPARSGEPLHALSPRGTARSPSLSRLLCRQEAVHTDSLEGKIDSPRDTLDPAEPGEKTPVRPVTQGGSLQSPPHSPRPASVRTRKHTFGQRCVSSRPAAPGGEEAEASDPADEEVSHITSSACPWQPTAEPHGPEASPVAGGERDLRRLYSVDAQGFLDKPGRADEQWRPSAELGSGEPGEAKAWGPEAEPALGARRKKKMSPPCISVEPPAEDEGSARPSAAEGGSTTLRRRTPSCEATPHRDSLEPTEGSGAGGDPAAKGERWGQASCRAEHLTVPSFAFEPLDLGVPSGDPFLDGSHSVTPESRASSSGAIVPLEPPESEPPMPVGDPPEKRRGLYLTVPQCPLEKPGSPSATPAPGGGADDPV

SEQ ID NO: 868113 - protein, 412 aa, Homo sapiens; identical to SEQ ID NO: 868112

SEQ ID NO: 868114 - protein, 684 aa, Homo sapiens
MEENLISMREDHSFHVRYRMEASCLELALEGERLCKSGDCRAGVSFFEAAVQVGTEDLKTLSAIYSQLGNAYFYLHDYAKALEYHHHDLTLARTIGDQLGEAKASGNLGNTLKVLGNFDEAIVCCQRHLDISRELNDKVGEARALYNLGNVYHAKGKSFGCPGPQDVGEFPEEVRDALQAAVDFYEENLSLVTALGDRAAQGRAFGNLGNTHYLLGNFRDAVIAHEQRLLIAKEFGDKAAERRAYSNLGNAYIFLGEFETASEYYKKTLLLARQLKDRAVEAQSCYSLGNTYTLLQDYEKAIDYHLKHLAIAQELNDRIGEGRACWSLGNAYTALGNHDQAMHFAEKHLEISREVGDKSGELTARLNLSDLQMVLGLSYSTNNSIMSENTEIDSSLNGVRPKLGRRHSMENMELMKLTPEKVQNWNSEILAKQKPLIAKPSAKLLFVNRLKGKKYKTNSSTKVLQDASNSIDHRIPNSQRKISADTIGDEGFFDLLSRFQSNRMDDQRCCLQEKNCHTASTTTSSTPPKMMLKTSSVPVVSPNTDEFLDLLASSQSRRLDDQRASFSNLPGLRLTQNSQSVLSHLMTNDNKEADEDFFDILVKCQGSRLDDQRCAPPPATTKGPTVPDEDFFSLILRSQGKRMDEQRVLLQRDQNRDTDFGLKDFLQNNALLEFKNSGKKSADH

SEQ ID NO: 868115 - protein, 684 aa, Homo sapiens; identical to SEQ ID NO: 868114

SEQ ID NO: 868116 - protein, 684 aa, Homo sapiens; identical to SEQ ID NO: 868114

SEQ ID NO: 868117 - protein, 684 aa, Homo sapiens; identical to SEQ ID NO: 868114

SEQ ID NO: 868118 - protein, 665 aa, Homo sapiens
MEASCLELALEGERLCKSGDCRAGVSFFEAAVQVGTEDLKTLSAIYSQLGNAYFYLHDYAKALEYHHHDLTLARTIGDQLGEAKASGNLGNTLKVLGNFDEAIVCCQRHLDISRELNDKVGEARALYNLGNVYHAKGKSFGCPGPQDVGEFPEEVRDALQAAVDFYEENLSLVTALGDRAAQGRAFGNLGNTHYLLGNFRDAVIAHEQRLLIAKEFGDKAAERRAYSNLGNAYIFLGEFETASEYYKKTLLLARQLKDRAVEAQSCYSLGNTYTLLQDYEKAIDYHLKHLAIAQELNDRIGEGRACWSLGNAYTALGNHDQAMHFAEKHLEISREVGDKSGELTARLNLSDLQMVLGLSYSTNNSIMSENTEIDSSLNGVRPKLGRRHSMENMELMKLTPEKVQNWNSEILAKQKPLIAKPSAKLLFVNRLKGKKYKTNSSTKVLQDASNSIDHRIPNSQRKISADTIGDEGFFDLLSRFQSNRMDDQRCCLQEKNCHTASTTTSSTPPKMMLKTSSVPVVSPNTDEFLDLLASSQSRRLDDQRASFSNLPGLRLTQNSQSVLSHLMTNDNKEADEDFFDILVKCQGSRLDDQRCAPPPATTKGPTVPDEDFFSLILRSQGKRMDEQRVLLQRDQNRDTDFGLKDFLQNNALLEFKNSGKKSADH

SEQ ID NO: 868119 - protein, 684 aa, Homo sapiens; identical to SEQ ID NO: 868114

SEQ ID NO: 868120 - protein, 627 aa, Homo sapiens
MEENLISMREDHSFHVRYRMEASCLELALEGERLCKSGDCRAGVSFFEAAVQVGTEDLKTLSAIYSQLGNAYFYLHDYAKALEYHHHDLTLARTIGDQLGEAKASGNLGNTLKVLGNFDEAIVCCQRHLDISRELNDKVGEARALYNLGNVYHAKGKSFGCPGPQDVGEFPEEVRDALQAAVDFYEENLSLVTALGDRAAQGRAFGNLGNTHYLLGNFRDAVIAHEQRLLIAKEFGDKAAERRAYSNLGNAYIFLGEFETASEYYKKTLLLARQLKDRAVEAQSCYSLGNTYTLLQDYEKAIDYHLKHLAIAQELNDRIGEGRACWSLGNAYTALGNHDQAMHFAEKHLEISREVGDKSGELTARLNLSDLQMVLGLSYSTNNSIMSENTEIDSSLNGVRPKLGRRHSMENMELMKLTPEKVQNWNSEILAKQKPLIAKPSAKLLFVNRLKGKKYKTNSSTKVLQDASNSIDHRIPNSQRKISADTIGDEGFFDLLSRFQSNRMDDQRCCLQEKNCHTASTTTSSTPPKMMLKTSSVPVVSPNTDEFLDLLASSQSRRLDDQRASFSNLPGLRLTQNSQSVLSHLMTNDNKEADEDFFDILVKCQVCLYIFFVLHTAQIPLKTLVVL

SEQ ID NO: 868121 - protein, 639 aa, Homo sapiens
MEENLISMREDHSFHVRYRMEASCLELALEGERLCKSGDCRAGVSFFEAAVQVGTEDLKTLSAIYSQLGNAYFYLHDYAKALEYHHHDLTLARTIGDQLGEAKASGNLGNTLKVLGNFDEAIVCCQRHLDISRELNDKVGEARALYNLGNVYHAKGKSFGCPGPQDVGEFPEEVRDALQAAVDFYEENLSLVTALGDRAAQGRAFGNLGNTHYLLGNFRDAVIAHEQRLLIAKEFGDKAAERRAYSNLGNAYIFLGEFETASEYYKKTLLLARQLKDRAVEAQSCYSLGNTYTLLQDYEKAIDYHLKHLAIAQELNDRIGEGRACWSLGNAYTALGNHDQAMHFAEKHLEISREVGDKSGELTARLNLSDLQMVLGLSYSTNNSIMSENTEIDSSLNGVRPKLGRRHSMENMELMKLTPEKVQNWNSEILAKQKPLIAKPSAKLLFVNRLKGKKYKTNSSTKVLQDASNSIDHRIPNSQRKISADTIGDEGFFDLLSRFQSNRMDDQRCCLQEKNCHTASTTTSSTPPKMMLKTSSVPVVSPNTDEFLDLLASSQSRRLDDQRASFSNLPGLRLTQNSQSVLSHLMTNDNKEADEDFFDILVKCQGSRLDDQRTNNRRSGFMPFSFFPEMLTLIYSLCR

SEQ ID NO: 868122 - protein, 684 aa, Homo sapiens; identical to SEQ ID NO: 868114

SEQ ID NO: 868123 - protein, 684 aa, Homo sapiens; identical to SEQ ID NO: 868114

SEQ ID NO: 868124 - protein, 684 aa, Homo sapiens; identical to SEQ ID NO: 868114

SEQ ID NO: 868125 - protein, 632 aa, Homo sapiens
MEENLISMREDHSFHVRYRMEASCLELALEGERLCKSGDCRAGVSFFEAAVQVGTEDLKTLSAIYSQLGNAYFYLHDYAKALEYHHHDLTLARTIGDQLGEAKASGNLGNTLKVLGNFDEAIVCCQRHLDISRELNDKVGEARALYNLGNVYHAKGKSFGCPGPQDVGEFPEEVRDALQAAVDFYEENLSLVTALGDRAAQGRAFGNLGNTHYLLGNFRDAVIAHEQRLLIAKEFGDKAAERRAYSNLGNAYIFLGEFETASEYYKIGEGRACWSLGNAYTALGNHDQAMHFAEKHLEISREVGDKSGELTARLNLSDLQMVLGLSYSTNNSIMSENTEIDSSLNGVRPKLGRRHSMENMELMKLTPEKVQNWNSEILAKQKPLIAKPSAKLLFVNRLKGKKYKTNSSTKVLQDASNSIDHRIPNSQRKISADTIGDEGFFDLLSRFQSNRMDDQRCCLQEKNCHTASTTTSSTPPKMMLKTSSVPVVSPNTDEFLDLLASSQSRRLDDQRASFSNLPGLRLTQNSQSVLSHLMTNDNKEADEDFFDILVKCQGSRLDDQRCAPPPATTKGPTVPDEDFFSLILRSQGKRMDEQRVLLQRDQNRDTDFGLKDFLQNNALLEFKNSGKKSADH

SEQ ID NO: 868126 - protein, 684 aa, Homo sapiens; identical to SEQ ID NO: 868114

SEQ ID NO: 868127 - protein, 253 aa, Homo sapiens
RNLILALWYTNCKEALTPQKCIPHIIVRGLVRIRCVQEVERILYFMTRKGLINTGVLSVGADQYLLPKDYHNKSVIIIGAGPAGLAAARQLHNFGIKVTVLEAKDRIGGRVWDDKSFKGVTVGRGAQIVNGCINNPVALMCEQLGISMHKFGERCDLIQEGGRITDPTIDKRMDFHFNALLDVVSEWRKDKTQLQDVPLGEKIEEIYKAFIKESGIQFSELEGQVLQFHLSNLEYACGSNLHQVRLGFVKGVL

SEQ ID NO: 868128 - protein, 513 aa, Homo sapiens
RNLILALWYTNCKEALTPQKCIPHIIVRGLVRIRCVQEVERILYFMTRKGLINTGVLSVGADQYLLPKDYHNKSVIIIGAGPAGLAAARQLHNFGIKVTVLEAKDRIGGRVWDDKSFKGVTVGRGAQIVNGCINNPVALMCEQLGISMHKFGERCDLIQEGGRITDPTIDKRMDFHFNALLDVVSEWRKDKTQLQDVPLGEKIEEIYKAFIKESGIQFSELEGQVLQFHLSNLEYACGSNLHQVSARSWDHNEFFAQFAGDHTLLTPGYSVIIEKLAEGLDIQLKSPQVQCIDYSGDEVQVTTTDGTGYSAQKVLVTVPLALLQKGAIQFNPPLSEKKMKAINSLGAGIIEKIALQFPYRFWDSKVQGADFFGHVPPSASKRGLFAVFYDMDPQKKHSVLMSVIAGEAVASVRTLDDKQVLQQCMATLRELFKEQEVPDPTKYFVTRWSTDPWIQMAYSFVKTGGSGEAYDIIAEDIQGTVFFAGEATNRHFPQTVTGAYLSGVREASKIAAF

SEQ ID NO: 868129 - protein, 513 aa, Homo sapiens; identical to SEQ ID NO: 868128

SEQ ID NO: 868130 - protein, 321 aa, Homo sapiens
RNLILALWYTNCKEALTPQKCIPHIIVRGLVRIRCVQEVERILYFMTRKGLINTGVLSVGADQYLLPKDYHNKSVIIIGAGPAGLAAARQLHNFGIKVTVLEAKDRIGGRVWDDKSFKGVTVGRGAQIVNGCINNPVALMCEQLGISMHKFGERCDLIQEGGRITDPTIDKRMDFHFNALLDVVSEWRKDKTQLQDVPLGEKIEEIYKAFIKESGIQFSELEGQVLQFHLSNLEYACGSNLHQVSARSWDHNEFFAQFAGDHTLLTPGYSVIIEKLAEGLDIQLKSPQVQCIDYSGDEVQVTTTDGTGYSAQKVLVTVPLV

SEQ ID NO: 868131 - protein, 513 aa, Homo sapiens; identical to SEQ ID NO: 868128

SEQ ID NO: 868132 - protein, 321 aa, Homo sapiens; identical to SEQ ID NO: 868130

SEQ ID NO: 868133 - protein, 600 aa, Homo sapiens
RRLVRHVRPPGLSALPRAWRGWGGGDQDLLRLRCGRSREAAAVAAAAATTAFGCRIWNPCAALTMKQSSNVPAFLSKLWTLVEETHTNEFITWSQNGQSFLVLDEQRFAKEILPKYFKHNNMASFVRQLNMYGFRKVVHIDSGIVKQERDGPVEFQHPYFKQGQDDLLENIKRKVSSSKPEENKIRQEDLTKIISSAQKVQIKQETIESRLSELKSENESLWKEVSELRAKHAQQQQVIRKIVQFIVTLVQNNQLVSLKRKRPLLLNTNGAQKKNLFQHIVKEPTDNHHHKVPHSRTEGLKPRERISDDIIIYDVTDDNADEENIPVIPETNEDVISDPSNCSQYPDIVIVEDDNEDEYAPVIQSGEQNEPARESLSSGSDGSSPLMSSAVQLNGSSSLTSEDPVTMMDSILNDNINLLGKVELLDYLDSIDCSLEDFQAMLSGRQFSIDPDLLVDLFTSSVQMNPTDYINNTKSENKGLETTKNNVVQPVSEEGRKSKSKPDKQLIQYTAFPLLAFLDGNPASSVEQASTTASSEVLSSVDKPIEVDELLDSSLDPEPTQSKLVRLEPLTEAEASEATLFYLCELAPAPLDSDMPLLDS

SEQ ID NO: 868134 - protein, 582 aa, Homo sapiens
RRLVRHVRPPGLSALPRAWRGWGGGDQDLLRLRCGRSREAAAVAAAAATTAFGCRIWNPCAALTMKQSSNVPAFLSKLWTLVEETHTNEFITWSQNGQSFLVLDEQRFAKEILPKYFKHNNMASFVRQLNMYGFRKVVHIDSGIVKQERDGPVEFQHPYFKQGQDDLLENIKRKVSSSKPEENKIRQEDLTKIISSAQKVQIKQETIESRLSELKSENESLWKEVSELRAKHAQQQQVIRKIVQFIVTLVQNNQLVSLKRKRPLLLNTNGAQKKNLFQHIVKEPTDNHHHKVPHSRTEGLKPRERISDDIIIYDVTDDNADEENIPVIPETNEDVISDPSNCSQYPDIVIVEDDNEDEYAPVIQSGEQNEPARESLSSGSDGSSPLMSSAVQLNGSSSLTSEDPVTMMDSILNDNINLLGKVELLDYLDSIDCSLEDFQAMLSGRQFSIDPDLLVDSENKGLETTKNNVVQPVSEEGRKSKSKPDKQLIQYTAFPLLAFLDGNPASSVEQASTTASSEVLSSVDKPIEVDELLDSSLDPEPTQSKLVRLEPLTEAEASEATLFYLCELAPAPLDSDMPLLDS

SEQ ID NO: 868135 - protein, 461 aa, Homo sapiens
MASFVRQLNMYGFRKVVHIDSGIVKQERDGPVEFQHPYFKQGQDDLLENIKRKVSSSKPEENKIRQEDLTKIISSAQKVQIKQETIESRLSELKSENESLWKEVSELRAKHAQQQQVIRKIVQFIVTLVQNNQLVSLKRKRPLLLNTNGAQKKNLFQHIVKEPTDNHHHKVPHSRTEGLKPRERISDDIIIYDVTDDNADEENIPVIPETNEDVISDPSNCSQYPDIVIVEDDNEDEYAPVIQSGEQNEPARESLSSGSDGSSPLMSSAVQLNGSSSLTSEDPVTMMDSILNDNINLLGKVELLDYLDSIDCSLEDFQAMLSGRQFSIDPDLLVDSENKGLETTKNNVVQPVSEEGRKSKSKPDKQLIQYTAFPLLAFLDGNPASSVEQASTTASSEVLSSVDKPIEVDELLDSSLDPEPTQSKLVRLEPLTEAEASEATLFYLCELAPAPLDSDMPLLDS

SEQ ID NO: 868136 - protein, 368 aa, Homo sapiens
MSENESLWKEVSELRAKHAQQQQVIRKIVQFIVTLVQNNQLVSLKRKRPLLLNTNGAQKKNLFQHIVKEPTDNHHHKVPHSRTEGLKPRERISDDIIIYDVTDDNADEENIPVIPETNEDVISDPSNCSQYPDIVIVEDDNEDEYAPVIQSGEQNEPARESLSSGSDGSSPLMSSAVQLNGSSSLTSEDPVTMMDSILNDNINLLGKVELLDYLDSIDCSLEDFQAMLSGRQFSIDPDLLVDSENKGLETTKNNVVQPVSEEGRKSKSKPDKQLIQYTAFPLLAFLDGNPASSVEQASTTASSEVLSSVDKPIEVDELLDSSLDPEPTQSKLVRLEPLTEAEASEATLFYLCELAPAPLDSDMPLLDS

SEQ ID NO: 868137 - protein, 199 aa, Homo sapiens
CCLPLQLMEVCENKRFVKRFVLPGSVFHLDDNINLLGKVELLDYLDSIDCSLEDFQAMLSGRQFSIDPDLLVDSENKGLETTKNNVVQPVSEEGRKSKSKPDKQLIQYTAFPLLAFLDGNPASSVEQASTTASSEVLSSVDKPIEVDELLDSSLDPEPTQSKLVRLEPLTEAEASEATLFYLCELAPAPLDSDMPLLDS

SEQ ID NO: 868138 - protein, 582 aa, Homo sapiens; identical to SEQ ID NO: 868134

SEQ ID NO: 868139 - protein, 582 aa, Homo sapiens; identical to SEQ ID NO: 868134

SEQ ID NO: 868140 - protein, 294 aa, Homo sapiens
RRLVRHVRPPGLSALPRAWRGWGGGDQDLLRLRCGRSREAAAVAAAAATTAFGCRIWNPCAALTMKQSSNVPAFLSKLWTLVEETHTNEFITWSQNGQSFLVLDEQRFAKEILPKYFKHNNMASFVRQLNMYGFRKVVHIDSGIVKQERDGPVEFQHPYFKQGQDDLLENIKRKVSSSKPEENKIRQEDLTKIISSAQKVQIKQETIESRLSELKSENESLWKEVSELRAKHAQQQQVIRKIVQFIVTLVQNNQLVSLKRKRPLLLNTNGAQKKNLFQHIVKEPTDNHHHKVIF

SEQ ID NO: 868141 - protein, 574 aa, Homo sapiens
  misc_feature (4)..(5): Xaa can be any naturally occurring amino acid
  misc_feature (9)..(10): Xaa can be any naturally occurring amino acid
DLVXXNSTXXGAEFRELAFCRVALYLSSYCRQQRDPSRTVGYAFGCRIWNPCAALTMKQSSNVPAFLSKLWTLVEETHTNEFITWSQNGQSFLVLDEQRFAKEILPKYFKHNNMASFVRQLNMYGFRKVVHIDSGIVKQERDGPVEFQHPYFKQGQDDLLENIKRKVSSSKPEENKIRQEDLTKIISSAQKVQIKQETIESRLSELKSENESLWKEVSELRAKHAQQQQVIRKIVQFIVTLVQNNQLVSLKRKRPLLLNTNGAQKKNLFQHIVKEPTDNHHHKVPHSRTEGLKPRERISDDIIIYDVTDDNADEENIPVIPETNEDVISDPSNCSQYPDIVIVEDDNEDEYAPVIQSGEQNEPARESLSSGSDGSSPLMSSAVQLNGSSSLTSEDPVTMMDSILNDNINLLGKVELLDYLDSIDCSLEDFQAMLSGRQFSIDPDLLVDSENKGLETTKNNVVQPVSEEGRKSKSKPDKQLIQYTAFPLLAFLDGNPASSVEQASTTASSEVLSSVDKPIEVDELLDSSLDPEPTQSKLVRLEPLTEAEASEATLFYLCELAPAPLDSDMPLLDS

SEQ ID NO: 868142 - protein, 196 aa, Homo sapiens [sequence omitted]

SEQ ID NO: 868143 - protein, 582 aa, Homo sapiens; identical to SEQ ID NO: 868134

SEQ ID NO: 868144 - protein, 582 aa, Homo sapiens; identical to SEQ ID NO: 868134

SEQ ID NO: 868145 - protein, 356 aa, Homo sapiens
MNGVSEGTRGCSDRQPGVLTRDRSCSRKMNSSGCLSEEVGSLRPLTVVILSASIVVGVLGNGLVLWMTVFRMARTVSTVCFFHLALADFMLSLSLPIAMYYIVSRQWLLGEWACKLYITFVFLSYFASNCLLVFISVDRCISVLYPVWALNHRTVQRASWLAFGVWLLAAALCSAHLKFRTTRKWNGCTHCYLAFNSDNETAQIWIEGVVEGHIIGTIGHFLLGFLGPLAIIGTCAHLIRAKLLREGWVHANRPKRLLLVLVSAFFIFWSPFNVVLLVHLWRRVMLKEIYHPRMLLILQASFALGCVNSSLNPFLYVFVGRDFQEKFFQSLTSALARAFGEEEFLSSCPRGNAPRE

SEQ ID NO: 868146 - protein, 148 aa, Homo sapiens
LGLSSLSLPICQTELKPPPLTWADSARISLQGRCELCRDLQCHSHLQPHLSPGRVTAKEAQRGGLAHLGSPSQWGQSIHLARVFSTCPCNRQGGEPAGSLGLGDLRGWGRSALSPEGSVSSALEHSCGAEEPHSEFPPHVVGGRTVIA

SEQ ID NO: 868147 - protein, 67 aa, Homo sapiens
PTVHFVRVDTDRTRCLGYSSVLVRSKDTAWKSGAPGMSTPPWRAPLWACVPVEAPFSGRRSQRESSF

SEQ ID NO: 868148 - protein, 111 aa, Homo sapiens
MPEAPPLLLAAVLLGLVLLVVLLLLLRHWGWGLCLIGWNEFILQPIHNLLMGDTKEQRILNHVLQHAEPGNAQSVLEAIDTYCEQKEWAMNVGDKKARSCFLKKQDKQINK

SEQ ID NO: 868149 - protein, 271 aa, Homo sapiens
MPEAPPLLLAAVLLGLVLLVVLLLLLRHWGWGLCLIGWNEFILQPIHNLLMGDTKEQRILNHVLQHAEPGNAQSVLEAIDTYCEQKEWAMNVGDKKGKIVDAVIQEHQPSVLLELGAYCGYSAVRMARLLSPGARLITIEINPDCAAITQRMVDFAGVKDKVTLVVGASQDIIPQLKKKYDVDTLDMVFLDHWKDRYLPDTLLLEECGLLRKGTVLLADNVICPGAPDFLAHVRGSSCFECTHYQSFLEYREVVDGLEKAIYKGPGSEAGP

SEQ ID NO: 868150 - protein, 271 aa, Homo sapiens; identical to SEQ ID NO: 868149

SEQ ID NO: 868151 - protein, 271 aa, Homo sapiens; identical to SEQ ID NO: 868149

SEQ ID NO: 868152 - protein, 271 aa, Homo sapiens; identical to SEQ ID NO: 868149

SEQ ID NO: 868153 - protein, 271 aa, Homo sapiens; identical to SEQ ID NO: 868149

SEQ ID NO: 868154 - protein, 273 aa, Homo sapiens
  misc_feature (1)..(1): Xaa can be any naturally occurring amino acid
XGLGPGPGWFAKGPWLGLVLLVVLLLLLRHWGWGLCLIGWNEFILQPIHNLLMGDTKEQRILNHVLQHAEPGNAQSVLEAIDTYCEQKEWAMNVGDKKGKIVDAVIQEHQPSVLLELGAYCGYSAVRMARLLSPGARLITIEINPDCAAITQRMVDFAGVKDKVTLVVGASQDIIPQLKKKYDVDTLDMVFLDHWKDRYLPDTLLLEECGLLRKGTVLLADNVICPGAPDFLAHVRGSSCFECTHYQSFLEYREVVDGLEKAIYKGPGSEAGP

SEQ ID NO: 868155 - protein, 292 aa, Homo sapiens
MPEAPPLLLAAVLLGLVLLVVLLLLLRHWGWGLCLIGWNEFILQPIHNLLMGDTKEQRILNHVLQHAEPGNAQSVLEAIDTYCEQKEWAMNVGDKKGKIVDAVIQEHQPSVLLELGAYCGYSAVRMARLLSPGARLITIEINPDCAAITQRMVDFAGVKDKVTLVVGASQDIIPQLKKKYDVDTLDMVFLDHWKDRYLPDTLLLEVQWSGVFQSADVFCIPDDQIGLLSPLAQPEKSRSPGPSLMHSLAQTGRQPPCSRPRPLSSSRVALCSTSFQLTLLGHFFFFLNENTS

SEQ ID NO: 868156 - protein, 290 aa, Homo sapiens
MPEAPPLLLAAVLLGLVLLVVLLLLLRHWGWGLCLIGWNEFILQPIHNLLMGDTKEQRILNHVLQHAEPGNAQSVLEAIDTYCEQKEWAMNVGDKKGKIVDAVIQEHQPSVLLELGAYCGYSAVRMARLLSPGARLITIEINPDCAAITQRMVDFAGVKDKVCRDGLLSVRTWALQALFQVTLVVGASQDIIPQLKKKYDVDTLDMVFLDHWKDRYLPDTLLLEECGLLRKGTVLLADNVICPGAPDFLAHVRGSSCFECTHYQSFLEYREVVDGLEKAIYKGPGSEAGP

SEQ ID NO: 868157 - protein, 183 aa, Homo sapiens
QARSQWGPGKIVDAVIQEHQPSVLLELGAYCGYSAVRMARLLSPGARLITIEINPDCAAITQRMVDFAGVKDKVTLVVGASQDIIPQLKKKYDVDTLDMVFLDHWKDRYLPDTLLLEECGLLRKGTVLLADNVICPGAPDFLAHVRGSSCFECTHYQSFLEYREVVDGLEKAIYKGPGSEAGP

SEQ ID NO: 868158 - protein, 213 aa, Homo sapiens
PCGSWHVLPRWETQWATGFPAGLGPFPRVAAEGSTIPTPAAVDRGTPTVTGPVLLELGAYCGYSAVRMARLLSPGARLITIEINPDCAAITQRMVDFAGVKDKVTLVVGASQDIIPQLKKKYDVDTLDMVFLDHWKDRYLPDTLLLEECGLLRKGTVLLADNVICPGAPDFLAHVRGSSCFECTHYQSFLEYREVVDGLEKAIYKGPGSEAGP

SEQ ID NO: 868159 - protein, 175 aa, Homo sapiens
MPEAPPLLLAAVLLGLVLLVVLLLLLRHWGWGLCLIGWNEFILQPIHNLLMGDTKEQRILNHVLQHAEPGNAQSVLEAIDTYCEQKEWAMNVGDKKGKIVDAVIQEHQPSVLLELGAYCGYSAVRMARLLSPGARLITIEINPDCAAITQRMVDFAGVKDKLQHMPACAVGQRRL

SEQ ID NO: 868160 - protein, 128 aa, Homo sapiens
NGNLVLHASEIHHPLGDGVTLVVGASQDIIPQLKKKYDVDTLDMVFLDHWKDRYLPDTLLLEECGLLRKGTVLLADNVICPGAPDFLAHVRGSSCFECTHYQSFLEYREVVDGLEKAIYKGPGSEAGP

SEQ ID NO: 868161 - protein, 140 aa, Homo sapiens
KGPCPHGAHVLKVAPKSCTVLSCRSHAGQKVETWPQGLGTGVVPWPSEEHPSWFGAGSLGTSDPHLPHPPVCLQECGLLRKGTVLLADNVICPGAPDFLAHVRGSSCFECTHYQSFLEYREVVDGLEKAIYKGPGSEAGP

SEQ ID NO: 868162 - protein, 74 aa, Homo sapiens
TSTGSPHEAKGLHHTASPLATRDYPQLRAMGLPYPWVSSKPAGRQQPESVSASVFCVVLEDPWAAWGSTQGQGV

SEQ ID NO: 868163 - protein, 292 aa, Homo sapiens; identical to SEQ ID NO: 868155

SEQ ID NO: 868164 - protein, 271 aa, Homo sapiens; identical to SEQ ID NO: 868149

SEQ ID NO: 868165 - protein, 271 aa, Homo sapiens; identical to SEQ ID NO: 868149

SEQ ID NO: 868166 - protein, 271 aa, Homo sapiens; identical to SEQ ID NO: 868149

SEQ ID NO: 868167 - protein, 271 aa, Homo sapiens; identical to SEQ ID NO: 868149

SEQ ID NO: 868168 - protein, 221 aa, Homo sapiens
MGDTKEQRILNHVLQHAEPGNAQSVLEAIDTYCEQKEWAMNVGDKKGKIVDAVIQEHQPSVLLELGAYCGYSAVRMARLLSPGARLITIEINPDCAAITQRMVDFAGVKDKVTLVVGASQDIIPQLKKKYDVDTLDMVFLDHWKDRYLPDTLLLEECGLLRKGTVLLADNVICPGAPDFLAHVRGSSCFECTHYQSFLEYREVVDGLEKAIYKGPGSEAGP

SEQ ID NO: 868169 - protein, 305 aa, Homo sapiens
MPEAPPLLLAAVLLGLVLLVVLLLLLRHWGWGLCLIGWNEFILQPIHNLLMGDTKEQRILNHVLQHAEPGNAQSVLEAIDTYCEQKEWAMNVGDKKGKIVDAVIQEHQPSVLLELGAYCGYSAVRMARLLSPGARLITIEINPDCAAITQRMVDFAGVKDKVTLVVGASQDIIPQLKKKYDVDTLDMVFLDHWKDRYLPDTLLLENVAACARDPATGLNTRTCQETSIPRHVTRRTDDMHNYTTAGNTKQWDARTSQQRTRKKADSPDPQRNHQGRRTNTEKKNERQKHARDRHTKQTKTHTTHP

SEQ ID NO: 868170 - protein, 120 aa, Homo sapiens [sequence omitted]

SEQ ID NO: 868171 - protein, 290 aa, Homo sapiens; identical to SEQ ID NO: 868156

SEQ ID NO: 868172 - protein, 146 aa, Homo sapiens
MARLLSPGARLITIEINPDCAAITQRMVDFAGVKDKVTLVVGASQDIIPQLKKKYDVDTLDMVFLDHWKDRYLPDTLLLEECGLLRKGTVLLADNVICPGAPDFLAHVRGSSCFECTHYQSFLEYREVVDGLEKAIYKGPGSEAGP

SEQ ID NO: 868173 - protein, 111 aa, Homo sapiens; identical to SEQ ID NO: 868148

SEQ ID NO: 868174 - protein, 107 aa, Homo sapiens
MPEAPPLLLAAVLLGLVLLVVLLLLLRHWGWGLCLIGWNEFILQPIHNLLMGDTKEQRILNHVLQHAEPGNAQSVLEAIDTYCELTQPGTEGARRAPADLLRLRAVS

SEQ ID NO: 868175 - protein, 373 aa, Homo sapiens
MPPVPGVPFRNVDNDSPTSVELEDWVDAQHPTDEEEEEASSASSTLYLVFSPSSFSTSSSLILGGPEEEEVPSGVIPNLTESIPSSPPQGPPQGPSQSPLSSCCSSFSWSSFSEESSSQKGEDTGTCQGLPDSESSFTYTLDEKVAELVEFLLLKYEAEEPVTEAEMLMIVIKYKDYFPVILKRAREFMELLFGLALIEVGPDHFCVFANTVGLTDEGSDDEGMPENSLLIIILSVIFIKGNCASEEVIWEVLNAVGVYAGREHFVYGEPRELLTKVWVQGHYLEYREVPHSSPPYYEFLWGPRAHSESIKKKVLEFLAKLNNTVPSSFPSWYKDALKDVEERVQATIDTADDATVMASESLSVMSSNVSFSE

SEQ ID NO: 868176 - protein, 373 aa, Homo sapiens; identical to SEQ ID NO: 868175

SEQ ID NO: 868177 - protein, 289 aa, Homo sapiens
MPPVPGVPFRNVDNDSPTSVELEDWVDAQHPTDEEEGEDTGTCQGLPDSESSFTYTLDEKVAELVEFLLLKYEAEEPVTEAEMLMIVIKYKDYFPVILKRAREFMELLFGLALIEVGPDHFCVFANTVGLTDEGSDDEGMPENSLLIIILSVIFIKGNCASEEVIWEVLNAVGVYAGREHFVYGEPRELLTKVWVQGHYLEYREVPHSSPPYYEFLWGPRAHSESIKKKVLEFLAKLNNTVPSSFPSWYKDALKDVEERVQATIDTADDATVMASESLSVMSSNVSFSE

SEQ ID NO: 868178 - protein, 373 aa, Homo sapiens; identical to SEQ ID NO: 868175

SEQ ID NO: 868179 - protein, 373 aa, Homo sapiens; identical to SEQ ID NO: 868175

SEQ ID NO: 868180 - protein, 50 aa, Homo sapiens
MGLAAKGTGRLEELATGGSSCQGGKHGRAQGWDSLLDWVTLSPTLLPDTG

SEQ ID NO: 868181 - protein, 65 aa, Homo sapiens
MHSHMNSCKYRCSHTWIYAHAISPTRAHTCPHPHTYALTHTHAHTSTLTYTHAHTSLTHTHAHTG

SEQ ID NO: 868182 - protein, 120 aa, Homo sapiens
ESALGSLPPDPILLPHHHPKKLPQSQKMTSLPTSQRNLKLPERSPQLSSTYFQTYNLSVSSLLSSIPVKANSLLPSFGPISLSVFCSPLRESSPINNLFSLLCLLTHHLCLVPPWSFKHT

SEQ ID NO: 868183 - protein, 532 aa, Homo sapiens
PANATAPPLRWGPLRRVLSFSWELHVYGVGVLFLLPALLALAALAAAPAGPRLALVAAVLVLVASALRSAYMLTDPYGSQARLGVRGGLVLYNLPFPLLLTALAALTLLGLGAGLPPPLQNPLLLGAVALVHGVGLLATDLLSTWSVLNLLTQGLSCAWGAAVALGTLCLCRRRLLDGPRGWDASPGPRLLAVAGALGLLASGLQLAAALWLYPGPGRVGRFSWAWWGVHFWLRLLELTWALALALAAVAAARPRPPTEHACWAKLMRLACPAPSGKSEVPERPNNCYAGPSNVGAGSLDISKSLIRNPAESGQLATPSSGAWGSAASLGRGPQGGPGLSRNGVGPAPSLSELDLRPPSPINLSRSIDAALFREHLVRDSVFQRCGLRGLASPPPGGALRPRRGSHPKAELDDAGSSLLRGRCRSLSDVRVRGPVPQHVVEAPDGAAAAASGSSLDSFSRGSLKISWNPWRHGLSSVDSLPLDELPSTVQLLPAPTPAPDSTAARQGDGQGEVQPRGKPGESRSASSDTIEL

SEQ ID NO: 868184 - protein, 532 aa, Homo sapiens; identical to SEQ ID NO: 868183

SEQ ID NO: 868185 - protein, 532 aa, Homo sapiens; identical to SEQ ID NO: 868183

SEQ ID NO: 868186 - protein, 295 aa, Homo sapiens
MDNSGKEAEAMALLAEAERKVKNSQSFFSGLFGGSSKIEEACEIYARAANMFKMAKNWSAAGNAFCQAAQLHLQLQSKHDAATCFVDAGNAFKKADPQEAINCLMRAIEIYTDMGRFTIAAKHHISIAEIYETELVDIEKAIAHYEQSADYYKGEESNSSANKCLLKVAGYAALLEQYQKAIDIYEQVGTNAMDSPLLKYSAKDYFFKAALCHFCIDMLNAKLAVQKYEELFPAFSDSRECKLMKKLLEAHEEQNVDSYTESVKEYDSISRLDQWLTTMLLRIKKTIQGDEEDLR

SEQ ID NO: 868187 - protein, 295 aa, Homo sapiens; identical to SEQ ID NO: 868186

SEQ ID NO: 868188 - protein, 295 aa, Homo sapiens; identical to SEQ ID NO: 868186

SEQ ID NO: 868189 - protein, 295 aa, Homo sapiens; identical to SEQ ID NO: 868186

SEQ ID NO: 868190 - protein, 295 aa, Homo sapiens; identical to SEQ ID NO: 868186

SEQ ID NO: 868191 - protein, 330 aa, Homo sapiens
RELVSAGDRRGGRRGDLQVFPGSGSGALLSPFVAAMDNSGKEAEAMALLAEAERKVKNSQSFFSGLFGGSSKIEEACEIYARAANMFKMAKNWSAAGNAFCQAAQLHLQLQSKHDAATCFVDAGNAFKKADPQEAINCLMRAIEIYTDMGRFTIAAKHHISIAEIYETELVDIEKAIAHYEQSADYYKGEESNSSANKCLLKVAGYAALLEQYQKAIDIYEQVGTNAMDSPLLKYSAKDYFFKAALCHFCIDMLNAKLAVQKYEELFPAFSDSRECKLMKKLLEAHEEQNVDSYTESVKEYDSISRLDQWLTTMLLRIKKTIQGDEEDLR

SEQ ID NO: 868192 - protein, 295 aa, Homo sapiens; identical to SEQ ID NO: 868186

SEQ ID NO: 868193 - protein, 150 aa, Homo sapiens
HVVPGRKRRAPVRRQRSRASFTDLCSAARPRLSLPRVRVRRFAESLCGRHGQFREGSGGDGAVGRGGAQSEELAVLLLWPLWRLIQNRGSMRNLRQSSKHVQNGQKLECCWKRVLPGCTAAPAAPEQARRSHLLCGRWQRIQESRPPRGH

SEQ ID NO: 868194 - protein, 284 aa, Homo sapiens
WFLCWWFLCWKNSQSFFSGLFGGSSKIEEACEIYARAANMFKMAKNWSAAGNAFCQAAQLHLQLQSKHDAATCFVDAGNAFKKADPQEAINCLMRAIEIYTDMGRFTIAAKHHISIAEIYETELVDIEKAIAHYEQSADYYKGEESNSSANKCLLKVAGYAALLEQYQKAIDIYEQVGTNAMDSPLLKYSAKDYFFKAALCHFCIDMLNAKLAVQKYEELFPAFSDSRECKLMKKLLEAHEEQNVDSYTESVKEYDSISRLDQWLTTMLLRIKKTIQGDEEDLR

SEQ ID NO: 868195 - protein, 191 aa, Homo sapiens
MRAIEIYTDMGRFTIAAKHHISIAEIYETELVDIEKAIAHYEQSADYYKGEESNSSANKCLLKVAGYAALLEQYQKAIDIYEQVGTNAMDSPLLKYSAKDYFFKAALCHFCIDMLNAKLAVQKYEELFPAFSDSRECKLMKKLLEAHEEQNVDSYTESVKEYDSISRLDQWLTTMLLRIKKTIQGDEEDLR

SEQ ID NO: 868196 - protein, 191 aa, Homo sapiens; identical to SEQ ID NO: 868195

SEQ ID NO: 868197 - protein, 191 aa, Homo sapiens; identical to SEQ ID NO: 868195

SEQ ID NO: 868198 - protein, 248 aa, Homo sapiens
MDNSGKEAEAMALLAEAERKVKNSQSFFSGLFGGSSKIEEACEIYARAANMFKMAKNWSAAGNAFCQAAQLHLQLQSKHDAATCFVDAGNAFKKADPQEAINCLMRAIEIYTDMGRFTIAAKHHISIAEIYETELVDIEKVGTNAMDSPLLKYSAKDYFFKAALCHFCIDMLNAKLAVQKYEELFPAFSDSRECKLMKKLLEAHEEQNVDSYTESVKEYDSISRLDQWLTTMLLRIKKTIQGDEEDLR

SEQ ID NO: 868199 - protein, 189 aa, Homo sapiens
MRQSWWTSRRPLPTTSSLQTTTKARSPTGSPLPACPSPAGTATTSPHYSSPHSSANKCLLKVAGYAALLEQYQKAIDIYEQVGTNAMDSPLLKYSAKDYFFKAALCHFCIDMLNAKLAVQKYEELFPAFSDSRECKLMKKLLEAHEEQNVDSYTESVKEYDSISRLDQWLTTMLLRIKKTIQGDEEDLR

SEQ ID NO: 868200 - protein, 189 aa, Homo sapiens; identical to SEQ ID NO: 868199

SEQ ID NO: 868201 - protein, 98 aa, Homo sapiens
RGQREGAGGLALDFAWPEFFYHCLAEARSPGFPGVPGSRPGVVAPHTPHTHTPQSPALLWAPVVGKSLGFVRPGSHSHPMSHRALGRSLPLSGSVSSL

SEQ ID NO: 868202 - protein, 159 aa, Homo sapiens
MDNSGKEAEAMALLAEAERKVKNSQSFFSGLFGGSSKIEEACEIYARAANMFKMAKNWSAAGNAFCQAAQLHLQLQSKHDAATCFVDAGNAFKKADPQEAINCLMRAIEIYTDMGRFTIAAKHHISIAEIYETELVDIEKAIAHYEQSADYYKGEESNR

SEQ ID NO: 868203 - protein, 191 aa, Homo sapiens; identical to SEQ ID NO: 868195

SEQ ID NO: 868204 - protein, 135 aa, Homo sapiens
MDNSGKEAEAMALLAEAERKVKNSQSFFSGLFGGSSKIEEACEIYARAANMFKMAKNWSAAGNAFCQAAQLHLQLQSKHDAATCFVDAGNAFKKADPQGEGLCGPHGLAVRSAILAPCIDSSGFLAALVFPVADM

SEQ ID NO: 868205 - protein, 111 aa, Homo sapiens
MRQSWWTSRRPLPTTSSLQTTTKARSPTGSPLPACPSPAGTATTSPHYSSPHSSANKCLLKVAGYAALLEQYQKAIDIYEQVGTGGDGGFHPAPSQGLCLLLSPGTLFWNH

SEQ ID NO: 868206 - protein, 113 aa, Homo sapiens
MRAIEIYTDMGRFTIAAKHHISIAEIYETELVDIEKAIAHYEQSADYYKGEESNSSANKCLLKVAGYAALLEQYQKAIDIYEQVGTGGDGGFHPAPSQGLCLLLSPGTLFWNH

SEQ ID NO: 868207 - protein, 174 aa, Homo sapiens
MNQLPAGPPVPGSGSGPLAACPELTSATSPWLQVGTNAMDSPLLKYSAKDYFFKAALCHFCIDMLNAKVAHPTPAGPPHQATMCLSPGQVPLPPKRDVLLPHVWPLPASLWMRSVVLTAVFLCWHHLPTQPWRLLRVQLLPHLVLFPSWVHFLNPHCTPLKSAPLSPRLMGEDG

SEQ ID NO: 868208 - protein, 295 aa, Homo sapiens; identical to SEQ ID NO: 868186

SEQ ID NO: 868209 - protein, 295 aa, Homo sapiens; identical to SEQ ID NO: 868186

SEQ ID NO: 868210 - protein, 295 aa, Homo sapiens; identical to SEQ ID NO: 868186

SEQ ID NO: 868211 - protein, 315 aa, Homo sapiens
MDNSGKEAEAMALLAEAERKVKNSQSFFSGLFGGSSKIEEACEIYARAANMFKMAKNWSAAGNAFCQAAQLHLQLQSKHDAATCFVDAGNAFKKADPQEAINCLMRAIEIYTDMGRFTIAAKHHISIAEIYETELVDIEKAIAHYEQSADYYKGEESNSSANKCLLKVAGYAALLEQYQKAIDIYEQVGTNAMDSPLLKYSAKDYFFKAALCHFCIDMLNAKLAVQKYEELFPAFSDSRECKLMKKLLEAHEEQNVDSYTESVKEYDSISRLDQWLTTMLLRIKKTRYALLGLCHGACAMLITDRSLFLFCCYRH

SEQ ID NO: 868212 - protein, 299 aa, Homo sapiens
MSLHWTISGERECRMALLAEAERKVKNSQSFFSGLFGGSSKIEEACEIYARAANMFKMAKNWSAAGNAFCQAAQLHLQLQSKHDAATCFVDAGNAFKKADPQEAINCLMRAIEIYTDMGRFTIAAKHHISIAEIYETELVDIEKAIAHYEQSADYYKGEESNSSANKCLLKVAGYAALLEQYQKAIDIYEQVGTNAMDSPLLKYSAKDYFFKAALCHFCIDMLNAKLAVQKYEELFPAFSDSRECKLMKKLLEAHEEQNVDSYTESVKEYDSISRLDQWLTTMLLRIKKTIQGDEEDLR

SEQ ID NO: 868213 - protein, 358 aa, Homo sapiens
  misc_feature (79)..(79): Xaa can be any naturally occurring amino acid
  misc_feature (94)..(94): Xaa can be any naturally occurring amino acid
HVVPGRKRRAPVRRQRSRASFTDLCSAARPRLSLPRVRVRRFAESLCGRHGQFREGSGGDMIWPRRPGAPKVEKKTFPXQGFPIFQFFQYIGAXFGGSSKIEEACEIYARAANMFKMAKNWSAAGNAFCQAAQLHLQLQSKHDAATCFVDAGNAFKKADPQEAINCLMRAIEIYTDMGRFTIAAKHHISIAEIYETELVDIEKAIAHYEQSADYYKGEESNSSANKCLLKVAGYAALLEQYQKAIDIYEQVGTNAMDSPLLKYSAKDYFFKAALCHFCIDMLNAKLAVQKYEELFPAFSDSRECKLMKKLLEAHEEQNVDSYTESVKEYDSISRLDQWLTTMLLRIKKTIQGDEEDLR

SEQ ID NO: 868214 - protein, 191 aa, Homo sapiens; identical to SEQ ID NO: 868195

SEQ ID NO: 868215 - protein, 319 aa, Homo sapiens
MDNSGKEAEAMALLAEAERKVKNSQSFFSGLFGGSSKIEEACEIYARAANMFKMAKNWSAAGNAFCQAAQLHLQLQSKHDAATCFVDAGNAFKKADPQEAINCLMRAIEIYTDMGRFTIAAKHHISIAEIYETELVDIEKAIAHYEQSADYYKGEESNRYPLPACPSPAGTATTSPHYSSPHSSANKCLLKVAGYAALLEQYQKAIDIYEQVGTNAMDSPLLKYSAKDYFFKAALCHFCIDMLNAKLAVQKYEELFPAFSDSRECKLMKKLLEAHEEQNVDSYTESVKEYDSISRLDQWLTTMLLRIKKTIQGDEEDLR

SEQ ID NO: 868216 - protein, 302 aa, Homo sapiens
MDNSGKEAEAMALLAEAERKVKNSQSFFSGLFGGSSKIEEACEIYARAANMFKMAKNWSAAGNAFCQAAQLHLQLQSKHDAATCFVDAGNAFKKADPQEAINCLMRAIEIYTDMGRFTIAAKHHISIAEIYETELVDIEKAIAHYEQSADYYKGEESNRYPPSCLPQPRRDRHHFPSLLLPTQLSQQVSAEGGRRPLTSTNSGQASYSAKDYFFKAALCHFCIDMLNAKLAVQKYEELFPAFSDSRECKLMKKLLEAHEEQNVDSYTESVKEYDSISRLDQWLTTMLLRIKKTIQGDEEDLR

SEQ ID NO: 868217 - protein, 141 aa, Homo sapiens
MNQLPAGPPVPGSGSGPLAACPELTSATSPWLQVGTNAMDSPLLKYSAKDYFFKAALCHFCIDMLNAKLAVQKYEELFPAFSDSRECKLMKKLLEAHEEQNVDSYTESVKEYDSISRLDQWLTTMLLRIKKTIQGDEEDLR

SEQ ID NO: 868218 - protein, 275 aa, Homo sapiens
MDNSGKEAEAMALLAEAERKVKNSQSFFSGLFGGSSKIEEACEIYARAANMFKMAKNWSAAGNAFCQAAQLHLQLQSKHDAATCFVDAGNAFKKADPQEAINCLMRAIEIYTDMGRFTIAAKHHISIAEIYETELVDIEKAIAHYEQSADYYKGEESNSSANKCLLKVAGYAALLEQYQKAIDIYEQVGTNAMDSPLLKYSAKDYFFKAALCHFCIDMLNAKWVSKFGSRSSFLIPDECENVSEGWEVPGEENLRGRPRGAQNPGAGPPGVSLRG

SEQ ID NO: 868219 - protein, 176 aa, Homo sapiens
MDNSGKEAEAMALLAEAERKVKNSQSFFSGLFGGSSKIEEACEIYARAANMFKMAKNWSAAGNAFCQAAQLHLQLQSKHDAATCFVDAGNAFKKADPQEAINCLMRAIEIYTDMGRFTIAAKHHISIAEIYETELVDIEKVSGSRALHGLAARTSAALSSSHQGSPLVSECREGGM

SEQ ID NO: 868220 - protein, 111 aa, Homo sapiens; identical to SEQ ID NO: 868205

SEQ ID NO: 868221 - protein, 44 aa, Homo sapiens
MRNLRQSSKHVQNGQKLEWYVISARAPPRCSPPPSASTHTGLPE

SEQ ID NO: 868222 - protein, 326 aa, Homo sapiens
MNTSPGTVGSDPVILATAGYDHTVRFWQAHSGICTRTVQHQDSQVNALEVTPDRSMIAAAGYQHIRMYDLNSNNPNPIISYDGVNKNIASVGFHEDGRWMYTGGEDCTARIWDLRSRNLQCQRIFQVNAPINCVCLHPNQAELIVGDQSGAIHIWDLKTDHNEQLIPEPEVSITSAHIDPDASYMAAVNSTGNCYVWNLTGGIGDEVTQLIPKTKIPAHTRYALQCRFSPDSTLLATCSADQTCKIWRTSNFSLMTELSIKSGNPGESSRGWMWGCAFSGDSQYIVTASSDNLARLWCVETGEIKREYGGHQKAVVCLAFNDSVLG

SEQ ID NO: 868223 - protein, 254 aa, Homo sapiens
CARAARPCGRVAPARDSPLPAAEVGGGRRPRRVRGAGMEHAPWSPGASSRARAGHTMNTSPGTVGSDPVILATAGYDHTVRFWQAHSGICTRTVQHQDSQVNALEVTPDRSMIAAAGYQHIRMYDLNSNNPNPIISYDGVNKNIASVGFHEDGRWMYTGGEDCTARIWDLRSRNLQCQRIFQVNAPINCVCLHPNQAELIVGDQSGAIHIWDLKTDHNEQLIPEPEVSITSAHIDPDASYMAAVNSTAPRHLLG

SEQ ID NO: 868224 - protein, 152 aa, Homo sapiens
ARPDSLGNGQPCQKGRCQWAGGRRESRSFLPPRAGPAAAHGDRSEFLPAGTPRPRTLVSSHPPPPAPWSRPREPSITLRSASIDSLRLPSPSWTRRSAEPPVRYGGREPGAGNRLLGGWESTARGSRPAGRSKGGHRRKGELGGPARLRPFP

SEQ ID NO: 868225 - protein, 326 aa, Homo sapiens; identical to SEQ ID NO: 868222

SEQ ID NO: 868226 - protein, 326 aa, Homo sapiens; identical to SEQ ID NO: 868222

SEQ ID NO: 868227 - protein, 326 aa, Homo sapiens; identical to SEQ ID NO: 868222

SEQ ID NO: 868228 - protein, 326 aa, Homo sapiens; identical to SEQ ID NO: 868222

SEQ ID NO: 868229 - protein, 326 aa, Homo sapiens; identical to SEQ ID NO: 868222

SEQ ID NO: 868230 - protein, 326 aa, Homo sapiens; identical to SEQ ID NO: 868222

SEQ ID NO: 868231 - protein, 430 aa, Homo sapiens
MNTSPGTVGSDPVILATAGYDHTVRFWQAHSGICTRTVQHQDSQVNALEVTPDRSMIAAAGYQHIRMYDLNSNNPNPIISYDGVNKNIASVGFHEDGRWMYTGGEDCTARIWDLSWVLFKQRLRQGASCGRLTERSEEQEESELHQSASPALSPEPACYSPSTSHWLRLPAGAEGPASQVFPKRQVLQQREGRNGQAEAIWVGHQQAQMDSMCPGPARRSRNLQCQRIFQVNAPINCVCLHPNQAELIVGDQSGAIHIWDLKTDHNEQLIPEPEVSITSAHIDPDASYMAAVNSTGNCYVWNLTGGIGDEVTQLIPKTKIPAHTRYALQCRFSPDSTLLATCSADQTCKIWRTSNFSLMTELSIKSGNPGESSRGWMWGCAFSGDSQYIVTASSDNLARLWCVETGEIKREYGGHQKAVVCLAFNDSVLG

SEQ ID NO: 868232 - protein, 365 aa, Homo sapiens
MNTSPGTVGSDPVILATAGYDHTVRFWQAHSGICTRTVQHQDSQVNALEVTPDRSMIAAAGYQHIRMYDLNSNNPNPIISYDGVNKNIASVGFHEDGRWMYTGGEDCTARIWDLRSRNLQCQRIFQVNAPINCVCLHPNQAELIVGDQSGAIHIWDLKTDHNEQLIPEPEVSITSAHIDPDASYMAAVNSTGNCYVWNLTGGIGDEVTQLIPKTKIPAHTRYALQCRFSPDSTVRAGPAGPGGDLPGLGAGEGRGCWMEWLLLDTPHAHPLRLLATCSADQTCKIWRTSNFSLMTELSIKSGNPGESSRGWMWGCAFSGDSQYIVTASSDNLARLWCVETGEIKREYGGHQKAVVCLAFNDSVLG

SEQ ID NO: 868233 - protein, 142 aa, Homo sapiens
MAAVNSTGNCYVWNLTGGIGDEVTQLIPKTKIPAHTRYALQCRFSPDSTLLATCSADQTCKIWRTSNFSLMTELSIKSGNPGESSRGWMWGCAFSGDSQYIVTASSDNLARLWCVETGEIKREYGGHQKAVVCLAFNDSVLG

SEQ ID NO: 868234 - protein, 365 aa, Homo sapiens; identical to SEQ ID NO: 868232

SEQ ID NO: 868235 - protein, 109 aa, Homo sapiens
NLSPWPGVASCSWLARLLATCSADQTCKIWRTSNFSLMTELSIKSGNPGESSRGWMWGCAFSGDSQYIVTASSDNLARLWCVETGEIKREYGGHQKAVVCLAFNDSVLG

SEQ ID NO: 868236 - protein, 293 aa, Homo sapiens
MNTSPGTVGSDPVILATAGYDHTVRFWQAHSGICTRTVQHQDSQVNALEVTPDRSMIAAAGYQHIRMYDLNSNNPNPIISYDGVNKNIASVGFHEDGRWMYTGGEDCTARIWDLRSRNLQCQRIFQVNAPINCVCLHPNQAELIVGDQSGAIHIWDLKTDHNEQLIPEPEVSITSAHIDPDASYMAAVNSTGNCYVWNLTGGIGDEVTQLIPKTKIPAHTRYALQCRFSPDSTLLATCSADQTCKIWRTSNFSLMTELSIKSGNPGESSRGWMWGCAFSGDSQYIVTGEPRPG

SEQ ID NO: 868237 - protein, 293 aa, Homo sapiens
MNTSPGTVGSDPVILATAGYDHTVRFWQAHSGICTRTVQHQDSQVNALEVTPDRSMIAAAGYQHIRMYDLNSNNPNPIISYDGVNKNIASVGFHEDGRWMYTGGEDCTARIWDLRSRNLQCQRIFQVNAPINCVCLHPNQAELIVGDQSGAIHIWDLKTDHNEQLIPEPEVSITSAHIDPDASYMAAVNSTGNCYVWNLTGGIGDEVTQLIPKTKIPAHTRYALQCRFSPDSTLLATCSADQTCKIWRTSNFSLMTELSIKSGNPGESSRGWMWGCWDPQNQLPSLSAFAWYP

SEQ ID NO: 868238 - protein, 90 aa, Homo sapiens
PRVLPTRRVGRGPKAAEGSEAGAHPQASVFSAPPCPRFRASVHREHHHHGQVEGFISPCQQLSSLVQVAWPAHWIGDGPGWARSGAQSGR

SEQ ID NO: 868239 - protein, 326 aa, Homo sapiens; identical to SEQ ID NO: 868222

SEQ ID NO: 868240 - protein, 326 aa, Homo sapiens; identical to SEQ ID NO: 868222

SEQ ID NO: 868241 - protein, 326 aa, Homo sapiens; identical to SEQ ID NO: 868222

SEQ ID NO: 868242 - protein, 326 aa, Homo sapiens; identical to SEQ ID NO: 868222

SEQ ID NO: 868243 - protein, 382 aa, Homo sapiens
CARAARPCGRVAPARDSPLPAAEVGGGRRPRRVRGAGMEHAPWSPGASSRARAGHTMNTSPGTVGSDPVILATAGYDHTVRFWQAHSGICTRTVQHQDSQVNALEVTPDRSMIAAAGYQHIRMYDLNSNNPNPIISYDGVNKNIASVGFHEDGRWMYTGGEDCTARIWDLRSRNLQCQRIFQVNAPINCVCLHPNQAELIVGDQSGAIHIWDLKTDHNEQLIPEPEVSITSAHIDPDASYMAAVNSTGNCYVWNLTGGIGDEVTQLIPKTKIPAHTRYALQCRFSPDSTLLATCSADQTCKIWRTSNFSLMTELSIKSGNPGESSRGWMWGCAFSGDSQYIVTASSDNLARLWCVETGEIKREYGGHQKAVVCLAFNDSVLG

SEQ ID NO: 868244 - protein, 260 aa, Homo sapiens
MYDLNSNNPNPIISYDGVNKNIASVGFHEDGRWMYTGGEDCTARIWDLRSRNLQCQRIFQVNAPINCVCLHPNQAELIVGDQSGAIHIWDLKTDHNEQLIPEPEVSITSAHIDPDASYMAAVNSTGNCYVWNLTGGIGDEVTQLIPKTKIPAHTRYALQCRFSPDSTLLATCSADQTCKIWRTSNFSLMTELSIKSGNPGESSRGWMWGCAFSGDSQYIVTASSDNLARLWCVETGEIKREYGGHQKAVVCLAFNDSVLG

SEQ ID NO: 868245 - protein, 389 aa, Homo sapiens
MNTSPGTVGSDPVILATAGYDHTVRFWQAHSGICTRTVQHQDSQVNALEVTPDRSMIAAAGYQHIRMYDLNSNNPNPIISYDGVNKNIASVGFHEDGRWMYTGGEDCTARIWDLRELRQGASCGRLTERSEDEEESELHQSASPALSPEPACYSPSTSHWLRLPAGAEGPASQVFPKRSRNLQCQRIFQVNAPINCVCLHPNQAELIVGDQSGAIHIWDLKTDHNEQLIPEPEVSITSAHIDPDASYMAAVNSTGNCYVWNLTGGIGDEVTQLIPKTKIPAHTRYALQCRFSPDSTLLATCSADQTCKIWRTSNFSLMTELSIKSGNPGESSRGWMWGCAFSGDSQYIVTASSDNLARLWCVETGEIKREYGGHQKAVVCLAFNDSVLG

SEQ ID NO: 868246 - protein, 225 aa, Homo sapiens
  misc_feature (1)..(1): Xaa can be any naturally occurring amino acid
XEEVEIIHADVLVTCSSNHAGVRCDLPRHSPGSPGAAPQAELIVGDQSGAIHIWDLKTDHNEQLIPEPEVSITSAHIDPDASYMAAVNSTGNCYVWNLTGGIGDEVTQLIPKTKIPAHTRYALQCRFSPDSTLLATCSADQTCKIWRTSNFSLMTELSIKSGNPGESSRGWMWGCAFSGDSQYIVTASSDNLARLWCVETGEIKREYGGHQKAVVCLAFNDSVLG

SEQ ID NO: 868247 - protein, 198 aa, Homo sapiens
MNTSPGTVGSDPVILATAGYDHTVRFWQAHSGICTRTVQHQDSQVNALEVTPDRSMIAAAGYQHIRMYDLNSNNPNPIISYDGVNKNIASVGFHEDGRWMYTGGEDCTARIWDLRSRNLQCQRIFQVNAPINCVCLHPNQAELIVGDQSGAIHIWDLKTDHNEQLIPEPEVSITSAHIDPDASYMAAVNSTAPRHLLG

SEQ ID NO: 868248 - protein, 212 aa, Homo sapiens
MNTSPGTVGSDPVILATAGYDHTVRFWQAHSGICTRTVQHQDSQVNALEVTPDRSMIAAAGYQHIRMYDLNSNNPNPIISYDGVNKNIASVGFHEDGRWMYTGGEDCTARIWDLRSRNLQCQRIFQVNAPINCVCLHPNQAELIVGDQSGAIHIWDLKTDHNEQLIPEPEVSITSAHIDPDASYMAAVNSTETVCLDSDGGLGDEVARLSPG

SEQ ID NO: 868249 - protein, 126 aa, Homo sapiens
MSYKPIAPAPSSTPGSSTPGPGTPVPTGSVPSPSGSVPGAGAPFRPLFNDFGPPSMGYVQAMKPPGAQGSQSTYTDLLSVIEEMGKEIRPTYAGSKSAMERLKRGIIHARALVRECLAETERNART

SEQ ID NO: 868250 - protein, 138 aa, Homo sapiens
GAQGSGRQSPASFGPQSGEARKAPVAAATAAATATPAGPKLGRAEQTSEAARVRREGSARAREDPSARTGSPAPGPGSQGPASRAWGLIGLRARRPGPRTRQLRRAVATAQSGADRCEVRKAEANRRRLRPAGAGLGQ

SEQ ID NO: 868251 - protein, 126 aa, Homo sapiens; identical to SEQ ID NO: 868249

SEQ ID NO: 868252 - protein, 126 aa, Homo sapiens; identical to SEQ ID NO: 868249

SEQ ID NO: 868253 - protein, 101 aa, Homo sapiens
MGYVQAMKPPGAQGSQSTYTDLLSVIEEMGKEIRPTYAGSKSAMERLKREVSEARPPCSGNRHWTILHEGRKDIWRPPEPSLEDVQYYYQRGVLNRIEIES

SEQ ID NO: 868254 - protein, 126 aa, Homo sapiens; identical to SEQ ID NO: 868249

SEQ ID NO: 868255 - protein, 135 aa, Homo sapiens
MKHPLEGIGRTRSWAWKSWEAASLPRADLLLAPVAAGSVPSPSGSVPGAGAPFRPLFNDFGPPSMGYVQAMKPPGAQGSQSTYTDLLSVIEEMGKEIRPTYAGSKSAMERLKRGIIHARALVRECLAETERNART

SEQ ID NO: 868256 - protein, 105 aa, Homo sapiens
MSYKPIAPAPSSTPGSSTPGPGTPVPTGSVPSPSGSVPGAGAPFRPLFNDFGPPSMGYVQAMKPPGAQGSQSTYTDLLSVIEEMGKEIRPTYAGSKSAMERLKRA

SEQ ID NO: 868257 - protein, 138 aa, Homo sapiens; identical to SEQ ID NO: 868250

SEQ ID NO: 868258 - protein, 71 aa, Homo sapiens
  misc_feature (10)..(10): Xaa can be any naturally occurring amino acid
  misc_feature (14)..(14): Xaa can be any naturally occurring amino acid
  misc_feature (53)..(56): Xaa can be any naturally occurring amino acid
QLAEKGDVPXKAEXKLGYNAPGFPQVHDVVKTTGPSGIVNTTQLKGEIGYPGXXXXREFGTSNGLILSCSF

SEQ ID NO: 868259 - protein, 391 aa, Homo sapiens [sequence omitted]

SEQ ID NO: 868260 - protein, 156 aa, Homo sapiens
FETGSCSAAQAGVAYLAYVANVKYLGECSNVLKTRDLSRCMCPAENPGCRDQPFTILYRDMDVVSGRSVPADIFQMQATTRYPGAYYIFQIKSGNEGREFYMRQTGPISATLVMTRPIKGPREIQLDLEMITVNTVINFRGSSVIRLRIYVSQYPF

SEQ ID NO: 868261 - protein, 151 aa, Homo sapiens
AILKSSQDPWDANGPHQCHPGDDTPHQRAPGNPAGLGNDHCQHCHQLQRQLRDPTADICVAVPILSLGLEPPTLPLIGTKGQEKRGNNRENESDTDVRHFLLNVSPKSQPRLPDSHLYYCRPVTLQDLPPPVPMTQLSKSIIIAPLIEDCW

SEQ ID NO: 868262 - protein, 120 aa, Homo sapiens
MRPEGFAEKNQVESGQSQGKSMAQLRHRGGASLTDGGKGAPRWGCRATMQAFSHWCSPVLSIANGPHQCHPGDDTPHQRAPGNPAGLGNDHCQHCHQLQRQLRDPTADICVAVPILSLGL

SEQ ID NO: 868263 - protein, 448 aa, Homo sapiens
MPGIKRILTVTILALCLPSPGNAQAQCTNGFDLDRQSGQCLDIDECRTIPEACRGDMMCVNQNGGYLCIPRTNPVYRGPYSNPYSTPYSGPYPAAAPPLSAPNYPTISRPLICRFGYQMDESNQCVDVDECATDSHQCNPTQICINTEGGYTCSCTDGYWLLEGQCLDIDECRYGYCQQLCANVPGSYSCTCNPGFTLNEDGRSCQDVNECATENPCVQTCVNTYGSFICRCDPGYELEEDGVHCSDMDECSFSEFLCQHECVNQPGTYFCSCPPGYILLDDNRSCQDINECEHRNHTCNLQQTCYNLQGGFKCIDPIRCEEPYLRISDNRCMCPAENPGCRDQPFTILYRDMDVVSGRSVPADIFQMQATTRYPGAYYIFQIKSGNEGREFYMRQTGPISATLVMTRPIKGPREIQLDLEMITVNTVINFRGSSVIRLRIYVSQYPF

SEQ ID NO: 868264 - protein, 448 aa, Homo sapiens; identical to SEQ ID NO: 868263

SEQ ID NO: 868265 - protein, 1102 aa, Homo sapiens
MFQLPVNNLGSLRKARKTVKKILSDIGLEYCKEHIEDFKQFEPNDFYLKNTTWEDVGLWDPSLTKNQDYRTKPFCCSACPFSSKFFSAYKSHFRNVHSEDFENRILLNCPYCTFNADKKTLETHIKIFHAPNASAPSSSLSTFKDKNKNDGLKPKQADSVEQAVYYCKKCTYRDPLYEIVRKHIYREHFQHVAAPYIAKAGEKSLNGAVPLGSNAREESSIHCKRCLFMPKSYEALVQHVIEDHERIGYQVTAMIGHTNVVVPRSKPLMLIAPKPQDKKSMGLPPRIGSLASGNVRSLPSQQMVNRLSIPKPNLNSTGVNMMSSVHLQQNNYGVKSVGQGYSVGQSMRLGLGGNAPVSIPQQSQSVKQLLPSGNGRSYGLGSEQRSQAPARYSLQSANASSLSSGQLKSPSLSQSQASRVLGQSSSKPAAAATGPPPGNTSSTQKWKICTICNELFPENVYSVHFEKEHKAEKVPAVANYIMKIHNFTSKCLYCNRYLPTDTLLNHMLIHGLSCPYCRSTFNDVEKMAAHMRMVHIDEEMGPKTDSTLSFDLTLQQGSHTNIHLLVTTYNLRDAPAESVAYHAQNNPPVPPKPQPKVQEKADIPVKSSPQAAVPYKKDVGKTLCPLCFSILKGPISDALAHHLRERHQVIQTVHPVEKKLTYKCIHCLGVYTSNMTASTITLHLVHCRGVGKTQNGQDKTNAPSRLNQSPSLAPVKRTYEQMEFPLLKKRKLDDDSDSPSFFEEKPEEPVVLALDPKGHEDDSYEARKSFLTKYFNKQPYPTRREIEKLAASLWLWKSDIASHFSNKRKKCVRDCEKYKPGVLLGFNMKELNKVKHEMDFDAEWLFENHDEKDSRVNASKTADKKLNLGKEDDSSSDSFENLEEESNESGSPFDPVFEVEPKISNDNPEEHVLKVIPEDASESEEKLDQKEDGSKYETIHLTEEPTKLMHNASDSEVDQDDVVEWKDGASPSESGPGSQQVSDFEDNTCEMKPGTWSDESSQSEDARSSKPAAKKKATMQGDREQLKWKNSSYGKVEGFWSKDQSQWKNASENDERLSNPQIEWQNSTIDSEDGEQFDNMTDGVAEPMHGSLAGVKLSSQQA

SEQ ID NO: 868266 - protein, 874 aa, Homo sapiens
MPKSYEALVQHVIEDHERIGYQVTAMIGHTNVVVPRSKPLMLIAPKPQDKKSMGLPPRIGSLASGNVRSLPSQQMVNRLSIPKPNLNSTGVNMMSSVHLQQNNYGVKSVGQGYSVGQSMRLGLGGNAPVSIPQQSQSVKQLLPSGNGRSYGLGSEQRSQAPARYSLQSANASSLSSGQLKSPSLSQSQASRVLGQSSSKPAAAATGPPPGNTSSTQKWKICTICNELFPENVYSVHFEKEHKAEKVPAVANYIMKIHNFTSKCLYCNRYLPTDTLLNHMLIHGLSCPYCRSTFNDVEKMAAHMRMVHIDEEMGPKTDSTLSFDLTLQQGSHTNIHLLVTTYNLRDAPAESVAYHAQNNPPVPPKPQPKVQEKADIPVKSSPQAAVPYKKDVGKTLCPLCFSILKGPISDALAHHLRERHQVIQTVHPVEKKLTYKCIHCLGVYTSNMTASTITLHLVHCRGVGKTQNGQDKTNAPSRLNQSPSLAPVKRTYEQMEFPLLKKRKLDDDSDSPSFFEEKPEEPVVLALDPKGHEDDSYEARKSFLTKYFNKQPYPTRREIEKLAASLWLWKSDIASHFSNKRKKCVRDCEKYKPGVLLGFNMKELNKVKHEMDFDAEWLFENHDEKDSRVNASKTADKKLNLGKEDDSSSDSFENLEEESNESGSPFDPVFEVEPKISNDNPEEHVLKVIPEDASESEEKLDQKEDGSKYETIHLTEEPTKLMHNASDSEVDQDDVVEWKDGASPSESGPGSQQVSDFEDNTCEMKPGTWSDESSQSEDARSSKPAAKKKATMQGDREQLKWKNSSYGKVEGFWSKDQSQWKNASENDERLSNPQIEWQNSTIDSEDGEQFDNMTDGVAEPMHGSLAGVKLSSQQA

SEQ ID NO: 868267 - protein, 874 aa, Homo sapiens; identical to SEQ ID NO: 868266

SEQ ID NO: 868268 - protein, 107 aa, Homo sapiens [sequence omitted]

SEQ ID NO: 868269 - protein, 1102 aa, Homo sapiens; identical to SEQ ID NO: 868265

SEQ ID NO: 868270 - protein, 1102 aa, Homo sapiens; identical to SEQ ID NO: 868265

SEQ ID NO: 868271 - protein, 1102 aa, Homo sapiens; identical to SEQ ID NO: 868265

SEQ ID NO: 868272 - protein, 874 aa, Homo sapiens; identical to SEQ ID NO: 868266

SEQ ID NO: 868273 - protein, 891 aa, Homo sapiens
AAAGPGAARAKETAFVEVVLFESSPSGDYTTYTTGLTGRFSRAGATLSAEGEIVQMHPLGLCNNNDEEDLYEYGWVGVVKLEQPELDPKPCLTVLGKAKRAVQRGATAVIFDVSENPEAIDQLNQGSEDPLKRPVVYVKGADAIKLMNIVNKQKVARARIQHRPPRQPTEYFDMGIFLAFFVVVSLVCLILLVKIKLKQRRSQNSMNRLAVQALEKMETRKFNSKSKGRREGSCGALDTLSSSSTSDCAICLEKYIDGEELRVIPCTHRFHRKCVDPWLLQHHTCPHCRHNIIEQKGNPSAVCVETSNLSRGRQQRVTLPVHYPGRVHRTNAIPAYPTRTSMDSHGNPVTLLTMDRHGEQSLYSPQTPAYIRSYPPLHLDHSLAAHRCGLEHRAYSPAHPFRRPKLSGRSFSKAACFSQYETMYQHYYFQGLSYPEQEGQSPPSLAPRGPARAFPPSGSGSLLFPTVVHVAPPSHLESGSTSSFSCYHGHRSVCSGYLADCPGSDSSSSSSSGQCHCSSSDSVVDCTEVSNQGVYGSCSTFRSSLSSDYDPFIYRSRSPCRASEAGGSGSSGRGPALCFEGSPPPEELPAVHSHGAGRGEPWPGPASPSGDQVSTCSLEMNYSSNSSLEHRGPNSSTSEVGLEASPGAAPDLRRTWKGGHELPSCACCCEPQPSPAGPSAGAAGSSTLFLGPHLYEGSGPAGGEPQSGSSQGLYGLHPDHLPRTDGVKYEGLPCCFYEEKQVARGGGGGSGCYTEDYSVSVQYTLTEEPPPGCYPGARDLSQRIPIIPEDVDCDLGLPSDCQGTHSLGSWGGTRGPDTPRPHRGLGATREEERALCCQARALLRPGCPPEEAGAVRANFPSALQDTQESSTTATEAAGPRSHSADSSSPGA

SEQ ID NO: 868274 - protein, 128 aa, Homo sapiens
AAAGPGAARAKETAFVEVVLFESSPSGDYTTYTTGLTGRFSRAGATLSAEGEIVQVAARRPGPAPPPPQDGSGGCARRPRRGLPDWRAGGRGGREAGGIPPLRAGRRAGRGLRGASAGGERTWGLELL

SEQ ID NO: 868275 - protein, 655 aa, Homo sapiens
RQVKAGGYSDEGGICLEKYIDGEELRVIPCTHRFHRKCVDPWLLQHHTCPHCRHNIIEQKGNPSAVCVETSNLSRGRQQRVTLPVHYPGRVHRTNAIPAYPTRTSMDSHGNPVTLLTMDRHGEQSLYSPQTPAYIRSYPPLHLDHSLAAHRCGLEHRAYSPAHPFRRPKLSGRSFSKAACFSQYETMYQHYYFQGLSYPEQEGQSPPSLAPRGPARAFPPSGSGSLLFPTVVHVAPPSHLESGSTSSFSCYHGHRSVCSGYLADCPGSDSSSSSSSGQCHCSSSDSVVDCTEVSNQGVYGSCSTFRSSLSSDYDPFIYRSRSPCRASEAGGSGSSGRGPALCFEGSPPPEELPAVHSHGAGRGEPWPGPASPSGDQVSTCSLEMNYSSNSSLEHRGPNSSTSEVGLEASPGAAPDLRRTWKGGHELPSCACCCEPQPSPAGPSAGAAGSSTLFLGPHLYEGSGPAGGEPQSGSSQGLYGLHPDHLPRTDGVKYEGLPCCFYEEKQVARGGGGGSGCYTEDYSVSVQYTLTEEPPPGCYPGARDLSQRIPIIPEDVDCDLGLPSDCQGTHSLGSWGGTRGPDTPRPHRGLGATREEERALCCQARALLRPGCPPEEAGAVRANFPSALQDTQESSTTATEAAGPRSHSADSSSPGA

SEQ ID NO: 868276 - protein, 891 aa, Homo sapiens; identical to SEQ ID NO: 868273

SEQ ID NO: 868277 - protein, 891 aa, Homo sapiens; identical to SEQ ID NO: 868273

SEQ ID NO: 868278 - protein, 443 aa, Homo sapiens
AAAGPGAARAKETAFVEVVLFESSPSGDYTTYTTGLTGRFSRAGATLSAEGEIVQMHPLGLCNNNDEEDLYEYGWVGVVKLEQPELDPKPCLTVLGKAKRAVQRGATAVIFDVSENPEAIDQLNQGSEDPLKRPVVYVKGADAIKLMNIVNKQKVARARIQHRPPRQPTEYFDMGIFLAFFVVVSLVCLILLVKIKLKQRRSQNSMNRLAVQALEKMETRKFNSKSKGRREGSCGALDTLSSSSTSDCAICLEKYIDGEELRVIPCTHRFHRKCVDPWLLQHHTCPHCRHNIIEQKGNPSAVCVETSNLSRGRQQRVTLPVHYPGRVHRTNAIPAYPTRTSMDSHGNPVTLLTMDRHGEQSLYSPQTPAYIRSYPPLHLAALRRRRVLSGPTSLVPSRTLRSPAPLPLRLQDRDLTQQTAAAREPELRRNSYLEIGNCMETPN

SEQ ID NO: 868279 - protein, 891 aa, Homo sapiens; identical to SEQ ID NO: 868273

SEQ ID NO: 868280 - protein, 891 aa, Homo sapiens; identical to SEQ ID NO: 868273

SEQ ID NO: 868281 - protein, 108 aa, Homo sapiens [sequence omitted]

SEQ ID NO: 868282 - protein, 118 aa, Homo sapiens
MESRSVAQTGVHWHNLSSLQPLPPRFKQFSCLSLRSSWDYTHLPPCLANFFVFLVETAFRHVGQAGLKLLTSGDQPTSASQSAGITGISHRTQPVGRFLITDSIFLFVTDLLKFSISS

SEQ ID NO: 868283 - protein, 101 aa, Homo sapiens
SSTDCSSDPCRRRECVKLQRRRNRPLRSSPAATTHLCPWGPPCAPLRPGTETDWPGRHEAPRRTDSAAPTALQTLEGKDWAERRRAGQIPLTFLDLERSSK

SEQ ID NO: 868284 - protein, 315 aa, Homo sapiens
MQPESGANGTVIAEFILLGLLEAPGLQPVVFVLFLFAYLVTVRGNLSILAAVLVEPKLHTPMYFFLGNLSVLDVGCISVTVPSMLSRLLSRKRAVPCGACLTQLFFFHLFVGVDCFLLTAMAYDQFLAICRPLTYSTRMSQTVQRMLVAASWACAFTNALTHTVAMSTLNFCGPNVINHFYCDLPQLFQLSCSSTQLNELLLFAVGFIMAGTPMALIVISYIHVAAAVLRIRSVEGRKKAFSTCGSHLTVVAIFYGSGIFNYMRLGSTKLSDKDKAVGIFNTVINPMLNPIIYSFRNPDVQSAIWRMLTGRRSLA

SEQ ID NO: 868285 - protein, 377 aa, Homo sapiens
QGAGSLTKDWKVAVVKVQAVGAAQRQVTMKGLYFQQSSTDEEITFVFQEKEDLPVTEDNFVKLQVKACALSQINTKLLAEMKMKKDLFPVGREIAGIVLDVGSKVSFFQPDDEVVGILPLDSEDPGLCEVVRVHEHYLVHKPEKVTWTEAAGSIRDGVRAYTALHYLSHLSPGKSVLIMDGASAFGTIAIQLAHHRGAKVISTACSLEDKQCLERFRPPIARVIDVSNGKVHVAESCLEETGGLGVDIVLDAGVRLYSKDDEPAVKLQLLPHKHDIITLLGVGGHWVTTEENLQLDPPDSHCLFLKGATLAFLNDEVWNLSNVQQGKYLCILKDVMEKLSTGVFRPQLDEPIPLYEAKVSMEAVQKNQGRKKQVVQF

SEQ ID NO: 868286 - protein, 187 aa, Homo sapiens
QGAGSLTKDWKVAVVKVQAVGAAQRQVTMKGLYFQQSSTDEEITFVFQEKEDLPVTEDNFVKLQVKACALSQINTKLLAEMKMKKDLFPVGREIAGIVLDVGSKVSFFQPDDEVVGILPLDSEDPGLCEVVRVHEHYLVHKPEKVTWTEAAGSIRDGVRAYTALHYLSHLSPGKSVLIMDGASAFGQ

SEQ ID NO: 868287 - protein, 250 aa, Homo sapiens
QGAGSLTKDWKVAVVKVQAVGAAQRQVTMKGLYFQQSSTDEEITFVFQEKEDLPVTEDNFVKLQVKACALSQINTKLLAEMKMKKDLFPVGREIAGIVLDVGSKVSFFQPDDEVVGILPLDSEDPGLCEVVRVHEHYLVHKPEKVTWTEAAGSIRDGVRAYTALHYLSHLSPGLAHHRGAKVISTACSLEDKQCLERFRPPIARVIDVSNGKVHVAESCLEETGGLGVDIVLDAGGRYLMKLVACVVFLV

SEQ ID NO: 868288 - protein, 330 aa, Homo sapiens
QGAGSLTKDWKVAVVKVQAVGAAQRQVTMKGLYFQQSSTDEEITFVFQEKEDLPVTEDNFVKLQVKACALSQINTKLLAEMKMKKDLFPVGREIAGIVLDVGSKVSFFQPDDEVVGILPLDSEDPGLCEVVRVHEHYLVHKPEKVTWTEAAGSIRDGVRAYTALHYLSHLSPGKSVLIMDGASAFGTIAIQLAHHRGAKVISTACSLEDKQCLERFRPPIARVIDVSNGKVHVAESCLEETGGLGVDIVLDAGVRLYSKDDEPAVKLQLLPHKHDIITLLGVGGHWVTTEENLQLDPPDSHCLFLKGATLAFLNDEVWNLSNVQQGKYLS

SEQ ID NO: 868289 - protein, 329 aa, Homo sapiens
QGAGSLTKDWKVAVVKVQAVGAAQRQVTMKGLYFQQSSTDEEITFVFQEKEDLPVTEDNFVKLQVKACALSQINTKLLAEMKMKKDLFPVGREIAGIVLDVGSKVSFFQPDDEVVGILPLDSEDPGLCEVVRVHEHYLVHKPEKVTWTEAAGSIRDGVRAYTALHYLSHLSPGKSVLIMDGASAFGTIAIQLAHHRGAKVISTACSLEDKQCLERFRPPIARVIDVSNGKVHVAESCLEETGGLGVDIVLDAGVRLYSKDDEPAVKLQLLPHKHDIITLLGVGGHWVTTEENLQLDPPDSHCLFLKGATLAFLNDEVWNLSNVQQGKYL

SEQ ID NO: 868290 - protein, 330 aa, Homo sapiens; identical to SEQ ID NO: 868288

SEQ ID NO: 868291 - protein, 364 aa, Homo sapiens
QGAGSLTKDWKVAVVKVQAVGAAQRQVTMKGLYFQQSSTDEEITFVFQEKEDLPVTEDNFVKLQVKACALSQINTKLLAEMKMKKDLFPVGREIAGIVLDVGSKVSFFQPDDEVVGILPLDSEDPGLCEVVRVHEHYLVHKPEKVTWTEAAGSIRDGVRAYTALHYLSHLSPGKSVLIMDGASAFGTIAIQLAHHRGAKVISTACSLEDKQCLERFRPPIARVIDVSNGKVHVAESCLEETGGLGVDIVLDAGVRLYSKDDEPAVKLQLLPHKHDIITLLGVGGHWVTTEENLQLDPPDSHCLFLKGATLAFLNDEVWNLSNVQQGKYLCILKDVMEKLSTGVFRPQSDEHIPVFEARIFFGNC

SEQ ID NO: 868292 - protein, 367 aa, Homo sapiens
QGAGSLTKDWKVAVVKVQAVGAAQRQSSTDEEITFVFQEKEDLPVTEDNFVKLQVKACALSQINTKLLAEMKMKKDLFPVGREIAGIVLDVGSKVSFFQPDDEVVGILPLDSEDPGLCEVVRVHEHYLVHKPEKVTWTEAAGSIRDGVRAYTALHYLSHLSPGKSVLIMDGASAFGTIAIQLAHHRGAKVISTACSLEDKQCLERFRPPIARVIDVSNGKVHVAESCLEETGGLGVDIVLDAGVRLYSKDDEPAVKLQLLPHKHDIITLLGVGGHWVTTEENLQLDPPDSHCLFLKGATLAFLNDEVWNLSNVQQGKYLCILKDVMEKLSTGVFRPQLDEPIPLYEAKVSMEAVQKNQGRKKQVVQF

SEQ ID NO: 868293 - protein, 295 aa, Homo sapiens
MKKDLFPVGREIAGIVLDVGSKVSFFQPDDEVVGILPLDSEDPGLCEVVRVHEHYLVHKPEKVTWTEAAGSIRDGVRAYTALHYLSHLSPGKSVLIMDGASAFGTIAIQLAHHRGAKVISTACSLEDKQCLERFRPPIARVIDVSNGKVHVAESCLEETGGLGVDIVLDAGVRLYSKDDEPAVKLQLLPHKHDIITLLGVGGHWVTTEENLQLDPPDSHCLFLKGATLAFLNDEVWNLSNVQQGKYLCILKDVMEKLSTGVFRPQLDEPIPLYEAKVSMEAVQKNQGRKKQVVQF

SEQ ID NO: 868294 - protein, 258 aa, Homo sapiens
QGAGSLTKDWKVAVVKVQAVGAAQRQVTMKGLYFQQSSTDEEITFVFQEKEDLPVTEDNFVKLQVKACALSQINTKLLAEMKMKKDLFPVGREIAGIVLDVGSKVSFFQPDDEVVGILPLDSEDPGLCEVVRVHEHYLVHKPEKVTWTEAAGSIRDGVRAYTALHYLSHLSPGKSVLIMDGASAFGTIAIQLAHHRGAKVISTACSLEDKQCLERFRPPIARVIDVSNGKVHVAESCLEETGGLGVDIVLDAGVGSSR

SEQ ID NO: 868295 - protein, 265 aa, Homo sapiens
QGAGSLTKDWKVAVVKVQAVGAAQRQVTMKGLYFQQSSTDEEITFVFQEKEDLPVTEDNFVKLQVKACALSQINTKLLAEMKMKKDLFPVGREIAGIVLDVGSKVSFFQPDDEVVGILPLDSEDPGLCEVVRVHEHYLVHKPEKVTWTEAAGSIRDGVRAYTALHYLSHLSPGKSVLIMDGASAFGTIAIQLAHHRGAKVISTACSLEDKQCLERFRPPIARVIDVSNGKVHVAESCLEETGGLGVDIVLDAGGYIFQHSSYIFT

SEQ ID NO: 868296 - protein, 226 aa, Homo sapiens
QGAGSLTKDWKVAVVKVQAVGAAQRQVTMKGLYFQQSSTDEEITFVFQEKEDLPVTEDNFVKLQVKACALSQINTKLLAEMKMKKDLFPVGREIAGIVLDVGSKVSFFQPDDEVVGILPLDSEDPGLCEVVRVHEHYLVHKPEKVTWTEAAGSIRDGVRAYTALHYLSHLSPGKSVLIMDGASAFGTIAIQLAHHRGAKVISTACSLEDKQCLERFRPPIENSTIA

SEQ ID NO: 868297 - protein, 226 aa, Homo sapiens; identical to SEQ ID NO: 868296

SEQ ID NO: 868298 - protein, 377 aa, Homo sapiens; identical to SEQ ID NO: 868285

SEQ ID NO: 868299 - protein, 141 aa, Homo sapiens
QGAGSLTKDWKVAVVKVQAVGAAQRQVTMKGLYFQQSSTDEEITFVFQEKEDLPVTEDNFVKLQVKACALSQINTKLLAEMKMKKDLFPVGREIAGIVLDVGSKVSFFQPDDEVVEVLSRLGAVAHVCNPSTLGGQGGRIT

SEQ ID NO: 868300 - protein, 141 aa, Homo sapiens; identical to SEQ ID NO: 868299

SEQ ID NO: 868301 - protein, 325 aa, Homo sapiens
QGAGSLTKDWKVAVVKVQAVGAAQRQVTMKGLYFQQSSTDEEITFVFQEKEDLPVTEDNFVKLQVKACALSQINTKLLAEMKMKKDLFPVGREIAGIVLDVGSKVSFFQPDDEVVGILPLDSEDPGLCEVVRVHEHYLVHKPEKVTWTEAAGSIRDGVRAYTALHYLSHLSPGKSVLIMDGASAFGTIAIQLAHHRGAKVISTACSLEDKQCLERFRPPIARVIDVSNGKVHVAESCLEETGGLGVDIVLDAGVRLYSKDDEPAVKLQLLPHKHDIITLLGVGGHWVTTEENLQVKKQKHRDVDTDSRTQQVAEQESHSGSLSPF

SEQ ID NO: 868302 - protein, 226 aa, Homo sapiens; identical to SEQ ID NO: 868296

SEQ ID NO: 868303 - protein, 409 aa, Homo sapiens
  misc_feature (325)..(325): Xaa can be any naturally occurring amino acid
  misc_feature (327)..(328): Xaa can be any naturally occurring amino acid
  misc_feature (333)..(333): Xaa can be any naturally occurring amino acid
  misc_feature (335)..(335): Xaa can be any naturally occurring amino acid
  misc_feature (338)..(338): Xaa can be any naturally occurring amino acid
  misc_feature (341)..(341): Xaa can be any naturally occurring amino acid
  misc_feature (345)..(345): Xaa can be any naturally occurring amino acid
  misc_feature (347)..(347): Xaa can be any naturally occurring amino acid
  misc_feature (349)..(349): Xaa can be any naturally occurring amino acid
  misc_feature (352)..(352): Xaa can be any naturally occurring amino acid
  misc_feature (365)..(367): Xaa can be any naturally occurring amino acid
  misc_feature (370)..(373): Xaa can be any naturally occurring amino acid
  misc_feature (392)..(392): Xaa can be any naturally occurring amino acid
  misc_feature (395)..(395): Xaa can be any naturally occurring amino acid
  misc_feature (397)..(397): Xaa can be any naturally occurring amino acid
  misc_feature (403)..(404): Xaa can be any naturally occurring amino acid
QGAGSLTKDWKVAVVKVQAVGAAQRQVTMKGLYFQQSSTDEEITFVFQEKEDLPVTEDNFVKLQVKACALSQINTKLLAEMKMKKDLFPVGREIAGIVLDVGSKVSFFQPDDEVVGILPLDSEDPGLCEVVRVHEHYLVHKPEKVTWTEAAGSIRDGVRAYTALHYLSHLSPGKSVLIMDGASAFGTIAIQLAHHRGAKVISTACSLEDKQCLERFRPPIARVIDVSNGKVHVAESCLEETGGLGVDIVLDAGVRLYSKDDEPAVKLQLLPHKHDIITLLGVGGHWVTTEENLQLDPPDSHCLFLKGATLAFLNDEVWNLPNAPXPXXPTPLXDXTLXLPXAPPXPXPXPPXPPPPPPPPPPPPXXXPPXXXXPPPPPPPPPPPPPPPPPPXHPXPXSPPETXXKNQGR

SEQ ID NO: 868304 - protein, 349 aa, Homo sapiens
MKGLYFQQSSTDEEITFVFQEKEDLPVTEDNFVKLQVKACALSQINTKLLAEMKMKKDLFPVGREIAGIVLDVGSKVSFFQPDDEVVGILPLDSEDPGLCEVVRVHEHYLVHKPEKVTWTEAAGSIRDGVRAYTALHYLSHLSPGKSVLIMDGASAFGTIAIQLAHHRGAKVISTACSLEDKQCLERFRPPIARVIDVSNGKVHVAESCLEETGGLGVDIVLDAGVRLYSKDDEPAVKLQLLPHKHDIITLLGVGGHWVTTEENLQLDPPDSHCLFLKGATLAFLNDEVWNLSNVQQGKYLCILKDVMEKLSTGVFRPQLDEPIPLYEAKVSMEAVQKNQGRKKQVVQF

SEQ ID NO: 868305 - protein, 127 aa, Homo sapiens
LNALYFIIFQPDDEVVGILPLDSEDPGLCEVVRVHEHYLVHKPEKVTWTEAAGSIRDGVRAYTALHYLSHLSPGKSVLIMDGASAFGTIAIQLAHHRGAKVISTACSLEDKQCLERFRPPIENSTIA

SEQ ID NO: 868306 - protein, 226 aa, Homo sapiens; identical to SEQ ID NO: 868296

SEQ ID NO: 868307 - protein, 268 aa, Homo sapiens
QGAGSLTKDWKVAVVKVQAVGAAQRQVTMKGLYFQQSSTDEEITFVFQEKEDLPVTEDNFVKLQVKACALSQINTKLLAEMKMKKDLFPVGREIAGIVLDVGSKVSFFQPDDEVVGILPLDSEDPGLCEVVRVHEHYLVHKPEKVTWTEAAGSIRDGVRAYTALHYLSHLSPGKSVLIMDGASAFGTIAIQLAHHRGAKVISTACSLEDKQCLERFRPPIARVIDVSNGKVHVAESCLEETGGLGVDIVLDAGGRYLMKLVACVVFLV

SEQ ID NO: 868308 - protein, 74 aa, Homo sapiens
CMIYRYLKKKDLRTGLLCEQQSWDSKAQFQIPHKTQLFSANNAANCEPTPTHNWASMFRELREAFIEKELLYLT

SEQ ID NO: 868309 - protein, 105 aa, Homo sapiens
QWWGWDLSQVFQLHNSRVRRAALLMGRGSELPVCLAFLVCLMAALGCCEVLSTVHPEETVLRAPPTNFQRCQLQQGSALVRETAWGVGRGRPSEKMAWRGWGLCS

SEQ ID NO: 868310 - protein, 372 aa, Homo sapiens
MTFQFNFTIEDHLENELTPIRDGALTLDSSKELSVSESQKGEERDRKCSAEQFDLPQDHLWEHKSMENAAPSQDTDSPLSAASSSRNLEPHGKQPSLRAAKEHAMPKDLKKMLENKVIETLPGFQHVKLSVVKTILLKENFPGENIVSKSFSSHSDLITGVYEGGLKIWECTFDLLAYFTKAKVKFAGKKVLDLGCGSGLLGITAFKGGSKEIHFQDYNSMVIDEVTLPNVVANSTLEDEENDVNEPDVKRCRKPKVTQLYKCRFFSGEWSEFCKLVLSSEKLFVKYDLILTSETIYNPDYYSNLHQTFLRLLSKNGRVLLASKAHYFGVGGGVHLFQKFVEERDVFKTRILKIIDEGLKRFIIEITFKFPG

SEQ ID NO: 868311 - protein, 372 aa, Homo sapiens; identical to SEQ ID NO: 868310

SEQ ID NO: 868312 - protein, 372 aa, Homo sapiens; identical to SEQ ID NO: 868310

SEQ ID NO: 868313 - protein, 378 aa, Homo sapiens
MTFQFNFTIEDHLENELTPIRDGALTLDSSKELSVSESQKGEERDRKCSAEQFDLPQDHLWEHKSMENAAPSQDTDSPLSAASSSRNLEPHGKQPSLRAAKEHAMPKDLKKMLENKVIETLPGFQHVKLSVVKTILLKENFPGENIVSKSFSSHSDLITGVYEGGLKIWECTFDLLAYFTKAKVKFAGKKVLDLGCGSGLLGITAFKGGSKEIHFQDYNSMVIDEVTLPNVVANSTLEDEENDVNEPDVKRCRKPKVTQLYKCRFFSGEWSEFCKLVLSSEKLFVKYDLILTSETIYNPDYYSNLHQTFLRLLSKNGRVLLASKAQSKEIHFQDYNSMVIDEVTLPNVVANSTLEDEENDVNEPDVKKMQETKSNTTI

SEQ ID NO: 868314 - protein, 128 aa, Homo sapiens
TNYQSPVWVQTPSTKVVSPGPENKYDPEKDKTNFTVYITCGVIAFVIVAGVFAKVSYDKAHRPPREMNIHRALADILRQQGPIPIAHCERETISAIDTSPKENTPVRSSSKNHYTPVRTAKQTPGRLQ

SEQ ID NO: 868315 - protein, 222 aa, Homo sapiens
MNPLLILTFVAAAVSLNSGYHFCGGSLINEQWVVSAGHCYKSRIQVRLGEHNIEVLEGNEQFINAAKIIRHPQYDRKTLNNDIMLIKLSSRAVINARVSTISLPTAPPATGTKCLISGWGNTASSGADYPDELQCLDAPVLSQAKCEASYPGKITSNMFCVGFLEGGKDSCQGDSGGPVVCNGQLQGVVSWGDGCAQKNKPGVYTKVYNYVKWIKNTIAANS

SEQ ID NO: 868316 - protein, 216 aa, Homo sapiens
ENSVPYQVSLNSGYHFCGGSLINEQWVVSAGHCYKSRIQVRLGEHNIEVLEGNEQFINAAKIIRHPQYDRKTLNNDIMLIKLSSRAVINARVSTISLPTAPPATGTKCLISGWGNTASSGADYPDELQCLDAPVLSQAKCEASYPGKITSNMFCVGFLEGGKDSCQGDSGGPVVCNGQLQGVVSWGDGCAQKNKPGVYTKVYNYVKWIKNTIAANS

SEQ ID NO: 868317 - protein, 161 aa, Homo sapiens
MNPLLILTFVAAAVSLNSGYHFCGGSLINEQWVVSAGHCYKSRIQVRLGEHNIEVLEGNEQFINAAKIIRHPQYDRKTLNNDIMLIKLSSRAVINARVSTISLPTAPPATGTKCLISGWGNTASSGADYPDELQCLDAPVLSQAKCEAWSLHQGLQLCEMD

SEQ ID NO: 868318 - protein, 214 aa, Homo sapiens
MNPLLILTFVAAAVSLNSGYHFCGGSLINEQWVVSAGHCYKSRIQVRLGEHNIEVLEGNEQFINAAKIIRHPQYDRKTLNNDIMLIKARVSTISLPTAPPATGTKCLISGWGNTASSGADYPDELQCLDAPVLSQAKCEASYPGKITSNMFCVGFLEGGKDSCQGDSGGPVVCNGQLQGVVSWGDGCAQKNKPGVYTKVYNYVKWIKNTIAANS

SEQ ID NO: 868319 - protein, 114 aa, Homo sapiens
PTRHLKFYNELIRDANESASAETENPQSSIIDSQGEQNGDIRRTDEVTIHQGNCTCGESGRGRERKTLTDSYCVYIEREDIRDSIWKKTCTLNNCFAEMLLICSFAPATLPQPL

SEQ ID NO: 868320 - protein, 121 aa, Homo sapiens
MAPRPLLLLLLLLGGSAARPAPPRARRHSDGTFTSELSRLREGARLQRLLQGLVGKRSEQDAENSMAWTRLSAGLLCPSGSNMPILQAWMPLDGTWSPWLPPGPMVSEPAGAAAEGTLRPR

SEQ ID NO: 868321 - protein, 539 aa, Homo sapiens
EVLRVQDKYFHIKCFVCKACGCDLAEGGFFVRQGEYICTLDYQRLYGTRCFSCDQFIEGEVVSALGKTYHPDCFVCAVCRLPFPPGDRVTFNGKECMCQKCSLPVSVGSSAHLSQGLRSCGGCGTEIKNGQALVALDKHWHLGCFKCKSCGKLLNAEYISKDGLPYCEADYHAKFGIRCDSCEKYITGRVLEAGEKHYHPSCALCVRCGQMFAEGEEMYLQGSSIWHPACRQAARTEDRNKETRTSSESIISVPASSTSGSPSRVIYAKLGGEILDYRDLAALPKSKAIYDIDRPDMISYSPYISHSAGDRQSYGEGDQDDRSYKQCRTSSPSSTGSVSLGRYTPTSRSPQHYSRPGSESGRSTPSLSVLSDSKPPPSTYQQAPRHFHVPDTGVKDNIYRKPPIYRQHAARRSDGEDGSLDQDNRKKSSWLMLKGDADTRTNSPDLDTQSLSHSSGTDRDPLQRMAGDSFHSQYKIYPYDSLIVTNRIRVKLPKDVDRTRLERHLSPEEFQEVFGMSIEEFDRLALWKRNDLKKKALLF

SEQ ID NO: 868322 - protein, 498 aa, Homo sapiens
EVLRVQDKYFHIKCFVCKACGCDLAEGGFFVRQGEYICTLDYQRLYGTRCFSCDQFIEGEVVSALGKTYHPDCFVCAVCRLPFPPGDRVTFNGKECMCQKCSLPVSVGSSAHLSQGLRSCGGCGTEIKNGQALVALDKHWHLGCFKCKSCGKLLNAEYISKDGLPYCEADYHAKFGIRCDSCEKYITGRVLEAGEKHYHPSCALCVRCGQMFAEGEEMYLQGSSIWHPACRQAARTEDRNKETRTSSESIISVPASSTSGSPSRVIYAKLGGEILDYRDLAALPKSKAIYDIDRPDMISYSPYISHSAGDRQSYGESPQLLSPTPTEGDQDDRSYKQCRTSSPSSTGSVSLGRYTPTSRSPQHYSRPAARRSDGEDGSLDQDNRKKSSWLMLKGDADTRTNSPDLDTQSLSHSSGTDRDPLQRMAGDSFHSQYKIYPYDSLIVTNRIRVKLPKDVDRTRLERHLSPEEFQEVFGMSIEEFDRLALWKRNDLKKKALLF

SEQ ID NO: 868323 - protein, 377 aa, Homo sapiens
CGRGQAWLRRRGAAAAAVALPDARPSVPVPRWVTVDSQGAAGAGDRLLAEGEGVHPRRHTFQGARHSSRAVRLGSGAQKLLQAGEKHYHPSCALCVRCGQMFAEGEEMYLQGSSIWHPACRQAARTEDRNKETRTSSESIISVPASSTSGSPSRVIYAKLGGEILDYRDLAALPKSKAIYDIDRPDMISYSPYISHSAGDRQSYGEGDQDDRSYKQCRTSSPSSTGSVSLGRYTPTSRSPQHYSRPAARRSDGEDGSLDQDNRKKSSWLMLKGDADTRTNSPDLDTQSLSHSSGTDRDPLQRMAGDSFHSQYKIYPYDSLIVTNRIRVKLPKDVDRTRLERHLSPEEFQEVFGMSIEEFDRLALWKRNDLKKKALLF

SEQ ID NO: 868324 - protein, 373 aa, Homo sapiens
MFAEGEEMYLQGSSIWHPACRQAARTEDRNKETRTSSESIISVPASSTSGSPSRVIYAKLGGEILDYRDLAALPKSKAIYDIDRPDMISYSPYISHSAGDRQSYGESPQLLSPTPTEGDQDDRSYKQCRTSSPSSTGSVSLGRYTPTSRSPQHYSRPAGTVSVGTSSCLSLSQHPSPTSVFRHHYIPYFRGSESGRSTPSLSVLSDSKPPPSTYQQAPRHFHVPDTGVKDNIYRKPPIYRQHAARRSDGEDGSLDQDNRKKSSWLMLKGDADTRTNSPDLDTQSLSHSSGTDRDPLQRMAGDSFHSQYKIYPYDSLIVTNRIRVKLPKDVDRTRLERHLSPEEFQEVFGMSIEEFDRLALWKRNDLKKKALLF

SEQ ID NO: 868325 - protein, 164 aa, Homo sapiens
EVLRVQDKYFHIKCFVCKACGCDLAEGGFFVRQGEYICTLDYQRLYGTRCFSCDQFIEGEVVSALGKTYHPDCFVCAVCRLPFPPGDRVTFNGKECMCQKCSLPVSVGSSAHLSQGLRSCGGCGTEIKNGQALVALDKHWHLGCFKCKTEERPGFAVRQSQVQI

SEQ ID NO: 868326 - protein, 445 aa, Homo sapiens
MTELRQRVAHEPVAPPEDKESESEAKVDGETASDSESRAESAPLPVSADDTPEVLNRALSNLSSRWKNWWVRGILTLAMIAFFFIIIYLGPMVLMIIVMCVQIKCFHEIITIGYNVYHSYDLPWFRTLSWYFLLCVNYFFYGETVTDYFFTLVQREEPLRILSKYHRFISFTLYLIGFCMFVLSLVKKHYRLQFYMFGWTHVTLLIVVTQSHLVIHNLFEGMIWFIVPISCVICNDIMAYMFGFFFGRTPLIKLSPKKTWEGFIGGFFATVVFGLLLSYVMSGYRCFVCPVEYNNDTNSFTVDCEPSDLFRLQEYNIPGVIQSVIGWKTVRMYPFQIHSIALSTFASLIGPFGGFFASGFKRAFKIKDFANTIPGHGGIMDRFDCQYLMATFVNVYIASFIRGPNPSKLIQQFLTLRPDQQLHIFNTLRSHLIDKGMLTSTTEDE

SEQ ID NO: 868327 - protein, 144 aa, Homo sapiens
MTELRQRVAHEPVAPPEDKESESEAKVDGETASDSESRAESAPLPVSADDTPEVLNRALSNLSSRWKNWWVRGILTLAMIAFFFIIIYLGPMVLMIIVSAISHYFSFPFSFCCRPGCLKCEVLGWLWELTGVQASQKTSAIEHL

SEQ ID NO: 868328 - protein, 367 aa, Homo sapiens
MIAFFFIIIYLGPMVLMIIVMCVQIKCFHEIITIGYNVYHSYDLPWFRTLSWYFLLCVNYFFYGETVTDYFFTLVQREEPLRILSKYHRFISFTLYLIGFCMFVLSLVKKHYRLQFYMFGWTHVTLLIVVTQSHLVIHNLFEGMIWFIVPISCVICNDIMAYMFGFFFGRTPLIKLSPKKTWEGFIGGFFATVVFGLLLSYVMSGYRCFVCPVEYNNDTNSFTVDCEPSDLFRLQEYNIPGVIQSVIGWKTVRMYPFQIHSIALSTFASLIGPFGGFFASGFKRAFKIKDFANTIPGHGGIMDRFDCQYLMATFVNVYIASFIRGPNPSKLIQQFLTLRPDQQLHIFNTLRSHLIDKGMLTSTTEDE

SEQ ID NO: 868329 - protein, 367 aa, Homo sapiens; identical to SEQ ID NO: 868328

SEQ ID NO: 868330 - protein, 457 aa, Homo sapiens
MTELRQRVAHEPVAPPEDKESESEAKVDGETASDSESRAESAPLPVSADDTPEVLNRALSNLSSRWKNWWVRGILTLAMIAFFFIIIYLGPMVLMIIVMCVQIKCFHEIITIGYNVYHSYDLPWFRTLSWYFLLCVNYFFYGETVTDYFFTLVQREEPLRILSKYHRFISFTLYLIGFCMFVLSLVKKHYRLQFYMFGWTHVTLLIVVTQSHLVIHNLFEGMIWVRIGSWIFPFILFIVPISCVICNDIMAYMFGFFFGRTPLIKLSPKKTWEGFIGGFFATVVFGLLLSYVMSGYRCFVCPVEYNNDTNSFTVDCEPSDLFRLQEYNIPGVIQSVIGWKTVRMYPFQIHSIALSTFASLIGPFGGFFASGFKRAFKIKDFANTIPGHGGIMDRFDCQYLMATFVNVYIASFIRGPNPSKLIQQFLTLRPDQQLHIFNTLRSHLIDKGMLTSTTEDE

SEQ ID NO: 868331 - protein, 325 aa, Homo sapiens
MSRLRHPRTRYFLLCVNYFFYGETVTDYFFTLVQREEPLRILSKYHRFISFTLYLIGFCMFVLSLVKKHYRLQFYMFGWTHVTLLIVVTQSHLVIHNLFEGMIWFIVPISCVICNDIMAYMFGFFFGRTPLIKLSPKKTWEGFIGGFFATVVFGLLLSYVMSGYRCFVCPVEYNNDTNSFTVDCEPSDLFRLQEYNIPGVIQSVIGWKTVRMYPFQIHSIALSTFASLIGPFGGFFASGFKRAFKIKDFANTIPGHGGIMDRFDCQYLMATFVNVYIASFIRGPNPSKLIQQFLTLRPDQQLHIFNTLRSHLIDKGMLTSTTEDE

SEQ ID NO: 868332 - protein, 402 aa, Homo sapiens
MSRLRHPRTRWKNWWVRGILTLAMIAFFFIIIYLGPMVLMIIVMCVQIKCFHEIITIGYNVYHSYDLPWFRTLSWYFLLCVNYFFYGETVTDYFFTLVQREEPLRILSKYHRFISFTLYLIGFCMFVLSLVKKHYRLQFYMFGWTHVTLLIVVTQSHLVIHNLFEGMIWVRIGSWIFPFILFIVPISCVICNDIMAYMFGFFFGRTPLIKLSPKKTWEGFIGGFFATVVFGLLLSYVMSGYRCFVCPVEYNNDTNSFTVDCEPSDLFRLQEYNIPGVIQSVIGWKTVRMYPFQIHSIALSTFASLIGPFGGFFASGFKRAFKIKDFANTIPGHGGIMDRFDCQYLMATFVNVYIASFIRGPNPSKLIQQFLTLRPDQQLHIFNTLRSHLIDKGMLTSTTEDE

SEQ ID NO: 868333 - protein, 133 aa, Homo sapiens
WACMHLNFYFIYSSQKTVRMYPFQIHSIALSTFASLIGPFGGFFASGFKRAFKIKDFANTIPGHGGIMDRFDCQYLMATFVNVYIASFIRGPNPSKLIQQFLTLRPDQQLHIFNTLRSHLIDKGMLTSTTEDE

SEQ ID NO: 868334 - protein, 445 aa, Homo sapiens; identical to SEQ ID NO: 868326

SEQ ID NO: 868335 - protein, 517 aa, Homo sapiens
GDARRGVVLFSDPLSQPTAAPGPGSAKGPRVPGLRGARVRGRRVGVPAQGLTEVAPPGRRKELLGSGARLLPRWAGCGDSPLPQLREAFLEESESEAKVDGETASDSESRAESAPLPVSADDTPEVLNRALSNLSSRWKNWWVRGILTLAMIAFFFIIIYLGPMVLMIIVMCVQIKCFHEIITIGYNVYHSYDLPWFRTLSWYFLLCVNYFFYGETVTDYFFTLVQREEPLRILSKYHRFISFTLYLIGFCMFVLSLVKKHYRLQFYMFGWTHVTLLIVVTQSHLVIHNLFEGMIWFIVPISCVICNDIMAYMFGFFFGRTPLIKLSPKKTWEGFIGGFFATVVFGLLLSYVMSGYRCFVCPVEYNNDTNSFTVDCEPSDLFRLQEYNIPGVIQSVIGWKTVRMYPFQIHSIALSTFASLIGPFGGFFASGFKRAFKIKDFANTIPGHGGIMDRFDCQYLMATFVNVYIASFIRGPNPSKLIQQFLTLRPDQQLHIFNTLRSHLIDKGMLTSTTEDE

SEQ ID NO: 868336 - protein, 452 aa, Homo sapiens
MTELRQRVAHEPVAPPEDKESESEAKVDGETASDSESRAESAPLPVSADDTPEVLNRALSNLSSRWKNWWVRGILTLAMIAFFFIIIYLGPMVLMIIVMCVQIKCFHEIITIGYNVYHSYDLPWFRTLSWYFLLCVNYFFYGETVTDYFFTLVQREEPLRILSKYHRFISFTLYLIGFCMFVLSLVKKHYRLQFYMFGWTHVTLLIVVTQSHLVIHNLFEGMIWFIVPISCVICNDIMAYMFGFFFGRTPLIKLSPKKTWEGFIGGFFATVVFGLLLSYVMSGYRCFVCPVEYNNDTNSFTVDCEPSDLFRLQEYNIPGVIQSVIGWVMCHSQGKTVRMYPFQIHSIALSTFASLIGPFGGFFASGFKRAFKIKDFANTIPGHGGIMDRFDCQYLMATFVNVYIASFIRGPNPSKLIQQFLTLRPDQQLHIFNTLRSHLIDKGMLTSTTEDE

SEQ ID NO: 868337 - protein, 390 aa, Homo sapiens [sequence omitted]

SEQ ID NO: 868338 - protein, 185 aa, Homo sapiens
MVGTYFLAGLSVIPPQLSYVMSGYRCFVCPVEYNNDTNSFTVDCEPSDLFRLQEYNIPGVIQSVIGWKTVRMYPFQIHSIALSTFASLIGPFGGFFASGFKRAFKIKDFANTIPGHGGIMDRFDCQYLMATFVNVYIASFIRGPNPSKLIQQFLTLRPDQQLHIFNTLRSHLIDKGMLTSTTEDE

SEQ ID NO: 868339 - protein, 193 aa, Homo sapiens
MQPQHGPWQTRMRKISNHGSLRVAKVAYPLGLCVGVFIYVAYIKWHRATATQAFFSITRAAPGARWGQQAHSPLGTAADGHEVFYGIMFDAGSTGTRVHVFQFTRPPRETPTLTHETFKALKPGLSAYADDVEKSAQGIRELLDVAKQDIPFDFWKATPLVLKATAGLRLLPGEKAQKLLQKTEVFKGIRFPW

SEQ ID NO: 868340 - protein, 484 aa, Homo sapiens
MKKGIRYETSRKTSYIFQQPQHGPWQTRMRKISNHGSLRVAKVAYPLGLCVGVFIYVAYIKWHRATATQAFFSITRAAPGARWGQQAHSPLGTAADGHEVFYGIMFDAGSTGTRVHVFQFTRPPRETPTLTHETFKALKPGLSAYADDVEKSAQGIRELLDVAKQDIPFDFWKATPLVLKATAGLRLLPGEKAQKLLQKVKEVFKASPFLVGDDCVSIMNGTDEGVSAWITINFLTGSLKTPGGSSVGMLDLGGGSTQIAFLPRVEGTLQASPPGYLTALRMFNRTYKLYSYSYLGLGLMSARLAILGGVEGQPAKDGKELVSPCLSPSFKGEWEHAEVTYRVSGQKAAASLHELCAARVSEVLQNRVHRTEEVKHVDFYAFSYYYDLAAGVGLIDAEKGGSLVVGDFEIAAKYVCRTLETQPQSSPFSCMDLTYVSLLLQEFGFPRSKVLKLTRKIDNVETSWALGAIFHYIDSLNRQKSPAS

SEQ ID NO: 868341 - protein, 484 aa, Homo sapiens; identical to SEQ ID NO: 868340

SEQ ID NO: 868342 - protein, 467 aa, Homo sapiens
MQPQHGPWQTRMRKISNHGSLRVAKVAYPLGLCVGVFIYVAYIKWHRATATQAFFSITRAAPGARWGQQAHSPLGTAADGHEVFYGIMFDAGSTGTRVHVFQFTRPPRETPTLTHETFKALKPGLSAYADDVEKSAQGIRELLDVAKQDIPFDFWKATPLVLKATAGLRLLPGEKAQKLLQKVKEVFKASPFLVGDDCVSIMNGTDEGVSAWITINFLTGSLKTPGGSSVGMLDLGGGSTQIAFLPRVEGTLQASPPGYLTALRMFNRTYKLYSYSYLGLGLMSARLAILGGVEGQPAKDGKELVSPCLSPSFKGEWEHAEVTYRVSGQKAAASLHELCAARVSEVLQNRVHRTEEVKHVDFYAFSYYYDLAAGVGLIDAEKGGSLVVGDFEIAAKYVCRTLETQPQSSPFSCMDLTYVSLLLQEFGFPRSKVLKLTRKIDNVETSWALGAIFHYIDSLNRQKSPAS

SEQ ID NO: 868343 - protein, 450 aa, Homo sapiens
MKKGIRYETSRKTSYIFQQPQHGPWQTRMRKISNHGSLRVAKVAYPLGLCVGVFIYVAYIKWHRATATQAFFSITRAAPGARWGQQAHSPLGTAADGHEVFYGIMFDAGSTGTRVHVFQFTRPPRETPTLTHETFKALKPGLSAYADDVEKSAQGIRELLDVAKQDIPFDFWKATPLVLKATAGLRLLPGEKAQKLLQKVKEVFKASPFLVGDDCVSIMNGTDEGVSAWITINFLTGSLKTPGGSSVGMLDLGGGSTQIAFLPRVEGTLQASPPGYLTALRMFNRTYKLYSYSYLGLGLMSARLAILGGVEGQPAASLHELCAARVSEVLQNRVHRTEEVKHVDFYAFSYYYDLAAGVGLIDAEKGGSLVVGDFEIAAKYVCRTLETQPQSSPFSCMDLTYVSLLLQEFGFPRSKVLKLTRKIDNVETSWALGAIFHYIDSLNRQKSPAS

SEQ ID NO: 868344 - protein, 414 aa, Homo sapiens
RAWCGAQALGNRGVVSRGWRPGWRRPGRGSPKDRLPPAPRKRALVSVGVAERAVHETPTLTHETFKALKPGLSAYADDVEKSAQGIRELLDVAKQDIPFDFWKATPLVLKATAGLRLLPGEKAQKLLQKVKEVFKASPFLVGDDCVSIMNGTDEGVSAWITINFLTGSLKTPGGSSVGMLDLGGGSTQIAFLPRVEGTLQASPPGYLTALRMFNRTYKLYSYSYLGLGLMSARLAILGGVEGQPAKDGKELVSPCLSPSFKGEWEHAEVTYRVSGQKAAASLHELCAARVSEVLQNRVHRTEEVKHVDFYAFSYYYDLAAGVGLIDAEKGGSLVVGDFEIAAKYVCRTLETQPQSSPFSCMDLTYVSLLLQEFGFPRSKVLKLTRKIDNVETSWALGAIFHYIDSLNRQKSPAS

SEQ ID NO: 868345 - protein, 419 aa, Homo sapiens
MQPQHGPWQTRMRKISNHGSLRVAKVAYPLGLCVGVFIYVAYIKWHRATATQAFFSITRAAPGARWGQQAHSPLGTAADGHEVFYGIMFDAGSTGTRVHVFQFTRPPRETPTLTHETFKALKPGLSAYADDVEKVKEVFKASPFLVGDDCVSIMNGTDEGVSAWITINFLTGSLKTPGGSSVGMLDLGGGSTQIAFLPRVEGTLQASPPGYLTALRMFNRTYKLYSYSYLGLGLMSARLAILGGVEGQPAKDGKELVSPCLSPSFKGEWEHAEVTYRVSGQKAAASLHELCAARVSEVLQNRVHRTEEVKHVDFYAFSYYYDLAAGVGLIDAEKGGSLVVGDFEIAAKYVCRTLETQPQSSPFSCMDLTYVSLLLQEFGFPRSKVLKLTRKIDNVETSWALGAIFHYIDSLNRQKSPAS

SEQ ID NO: 868346 - protein, 484 aa, Homo sapiens; identical to SEQ ID NO: 868340

SEQ ID NO: 868347 - protein, 106 aa, Homo sapiens
SAEPAGACSGWNWGLHLPLRPQVGVTWSVKGRVSSPVCRTLETQPQSSPFSCMDLTYVSLLLQEFGFPRSKVLKLTRKIDNVETSWALGAIFHYIDSLNRQKSPAS

SEQ ID NO: 868348 - protein, 484 aa, Homo sapiens; identical to SEQ ID NO: 868340

SEQ ID NO: 868349 - protein, 120 aa, Homo sapiens
MFPPRGGARRSSARAAPTHFLLLDTEAAPPIEEGRLSYNKAEDARTGRAARYITERARCESARRQKRVPTRGRPHLWGGRERPPHLSVGGEGATQNYVWAGEQPLSLHEKENLLRRASRG

SEQ ID NO: 868350 - protein, 498 aa, Homo sapiens
MKKGIRYETSRKTSYIFQQPQHGPWQTRMRKISNHGSLRVAKVAYPLGLCVGVFIYVAYIKWHRATATQAFFSITRAAPGARWGQQAHSPLGTAADGHEVFYGIMFDAGSTGTRVHVFQFTRPPRETPTLTHETFKALKPGLSAYADDVEKSAQGIRELLDVAKQDIPFDFWKATPLVLKATAGLRLLPGEKAQKLLQKVKEVFKASPFLVGDDCVSIMNGTDEGVSAWITINFLTGSLKTPGGSSVGMLDLGGGSTQIAFLPRVEGTLQASPPGYLTALRMFNRTYKLYSYSYLGLGLMSARLAILGGVEGQPAKDGKELVSPCLSPSFKGEWEHAEVTYRVSGQKAAASLHELCAARVSEVLQNRVHRTEEVKHVDFYAFSYYYDLAAGVGLIDAEKGGSLVVGDFEIAAKYVCRTLETQPQSSPFSCMDLTYVSLLLQEFGFPRSKVLKLTRNNLTMFETQGLGALPWGGRGPHFFSISRSSALETGQDTVPSLH

SEQ ID NO: 868351 - protein, 395 aa, Homo sapiens
MKKGIRYETSRKTSYIFQQPQHGPWQTRMRKISNHGSLRVAKVAYPLGLCVGVFIYVAYIKWHRATATQAFFSITRAAPGARWGQQAHSPLGTAADGHEVFYGIMFDAGSTGTRVHVFQFTRPPRETPTLTHETFKALKPGLSAYADDVEKSAQGIRELLDVAKQDIPFDFWKATPLVLKATAGLRLLPGEKAQKLLQKVKEVFKASPFLVGDDCVSIMNGTDEGVSAWITINFLTGSLKTPGGSSVGMLDLGGGSTQIAFLPRVEGTLQASPPGYLTALRMFNRTYKLYSYSYLGLGLMSARLAILGGVEGQPAKDGKELVSPCLSPSFKGEWEHAEVTYRVSGQKAGTGRVAACWFLRVRVVASSPPCLSHIPWDVPREAPDLSLKSLYLPWK

SEQ ID NO: 868352 - protein, 453 aa, Homo sapiens
  misc_feature (433)..(433): Xaa can be any naturally occurring amino acid
MKKGIRYETSRKTSYIFQQPQHGPWQTRMRKISNHGSLRVAKVAYPLGLCVGVFIYVAYIKWHRATATQAFFSITRAAPGARWGQQAHSPLGTAADGHEVFYGIMFDAGSTGTRVHVFQFTRPPRETPTLTHETFKALKPGLSAYADDVEKSAQGIRELLDVAKQDIPFDFWKATPLVLKATAGLRLLPGEKAQKLLQKVKEVFKASPFLVGDDCVSIMNGTDEGVSAWITINFLTGSLKTPGGSSVGMLDLGGGSTQIAFLPRVEGTLQASPPGYLTALRMFNRTYKLYSYSYLGLGLMSARLAILGGVEGQPAASLHELCAARVSEVLQNRVHRTEEVKHVDFYAFSYYYDLAAGVGLIDAEKEQLVVGGLRDRNKYVLSDPGKHGDKKPFHSDLTYVAWSPDRLPEATLSHRNGTWHLAWAFISSTESTXWHRHQIDVHSDIRTHVISYN

SEQ ID NO: 868353 - protein, 350 aa, Homo sapiens
MKKGIRYETSRKTSYIFQQPQHGPWQTRMRKISNHGSLRVAKVAYPLGLCVGVFIYVAYIKWHRATATQAFFSITRAAPGARWGQQAHSPLGTAADGHEVFYGIMFDAGSTGTRVHVFQFTRPPRETPTLTHETFKALKPGLSAYADDVEKSAQGIRELLDVAKQDIPFDFWKATPLVLKATAGLRLLPGEKAQKLLQKVKEVFKASPFLVGDDCVSIMNGTDEGVSAWITINFLTGSLKTPGGSSVGMLDLGGGSTQIAFLPRVEGTLQASPPGYLTALRMFNRTYKLYSYSYLGLGLMSARLAILGGVEGQPAKDGKELVSPCLSPSFKGEWEHAEVTYRVSGQKAGG

SEQ ID NO: 868354 - protein, 108 aa, Homo sapiens
MKKGIRYETSRKTSYIFQQPQHGPWQTRMRKISNHGSLRVAKVAYPLGLCVGVFIYVAYIKWHRATATQAFFSITRAAPGARWGQQAHSPLGTAADGHEVFYGIMFDA

SEQ ID NO: 868355 - protein, 484 aa, Homo sapiens; identical to SEQ ID NO: 868340

SEQ ID NO: 868356 - protein, 90 aa, Homo sapiens
RAWCGAQALGNRGVVSRGWRPGWRRPGRGSPKDRLPPAPRKRALVSVGVAERAVHETPTLTHETFKALKPGLSAYADDVEKGAEPLELLQ

SEQ ID NO: 868357 - protein, 471 aa, Homo sapiens
MKKGIRYETSRKTSYIFQQPQHGPWQTRMRKISNHGSLRVAKVAYPLGLCVGVFIYVAYIKWHRATATQAFFSITRAAPGARWGQQAHSPLGTAADGHEVFYGIMFDAGSTGTRVHVFQFTRPPRETPTLTHETFKALKPGLSAYADDVEKSAQGIRELLDVAKQDIPFDFWKATPLVLKATAGLRLLPGEKAQKLLQKVKEVFKASPFLVGDDCVSIMNGTDEGVSAWITINFLTGSLKTPGGSSVGMLDLGGGSTQIAFLPRVEGTLQASPPGYLTALRMFNRTYKLYSYSYLGLGLMSARLAILGGVEGQPAKDGKELVSPCLSPSFKGEWEHAEVTYRVSGQKAAASLHELCAARVSEVLQNRVHRTEEVKHVDFYAFSYYYDLAAGVGLIDAEKGGSLVVGDFEIAAKYGGSHLEREGTCLIPSVSDPGDTAAEQPLLMHGPHLRQPATPGVRLSQEQSAEAHSEN

SEQ ID NO: 868358 - protein, 437 aa, Homo sapiens
MKKGIRYETSRKTSYIFQQPQHGPWQTRMRKISNHGSLRVAKVAYPLGLCVGVFIYVAYIKWHRATATQAFFSITRAAPGARWGQQAHSPLGTAADGHEVFYGIMFDAGSTGTRVHVFQFTRPPRETPTLTHETFKALKPGLSAYADDVEKSAQGIRELLDVAKQDIPFDFWKATPLVLKATAGLRLLPGEKAQKLLQKVKEVFKASPFLVGDDCVSIMNGTDEGVSAWITINFLTGSLKTPGGSSVGMLDLGGGSTQIAFLPRVEGTLQASPPGYLTALRMFNRTYKLYSYSYLGLGLMSARLAILGGVEGQPAASLHELCAARVSEVLQNRVHRTEEVKHVDFYAFSYYYDLAAGVGLIDAEKGGSLVVGDFEIAAKYGGSHLEREGTCLIPSVSDPGDTAAEQPLLMHGPHLRQPATPGVRLSQEQSAEAHSEN

SEQ ID NO: 868359 - protein, 484 aa, Homo sapiens; identical to SEQ ID NO: 868340

SEQ ID NO: 868360 - protein, 366 aa, Homo sapiens
RAWCGAQALGNRGVVSRGWRPGWRRPGRGSPKDRLPPAPRKRALVSVGVAERAVHETPTLTHETFKALKPGLSAYADDVEKVKEVFKASPFLVGDDCVSIMNGTDEGVSAWITINFLTGSLKTPGGSSVGMLDLGGGSTQIAFLPRVEGTLQASPPGYLTALRMFNRTYKLYSYSYLGLGLMSARLAILGGVEGQPAKDGKELVSPCLSPSFKGEWEHAEVTYRVSGQKAAASLHELCAARVSEVLQNRVHRTEEVKHVDFYAFSYYYDLAAGVGLIDAEKGGSLVVGDFEIAAKYVCRTLETQPQSSPFSCMDLTYVSLLLQEFGFPRSKVLKLTRKIDNVETSWALGAIFHYIDSLNRQKSPAS

SEQ ID NO: 868361 - protein, 157 aa, Homo sapiens
MVRSPGPRESWGRIPRVEAGVAPAGAGEPKRPAAACSPEKGTRLRGCGGARGACNLTVLLQLGVVSPTDAEKGGSLVVGDFEIAAKYVCRTLETQPQSSPFSCMDLTYVSLLLQEFGFPRSKVLKLTRKIDNVETSWALGAIFHYIDSLNRQKSPAS

SEQ ID NO: 868362 - protein, 484 aa, Homo sapiens; identical to SEQ ID NO: 868340

SEQ ID NO: 868363 - protein, 129 aa, Homo sapiens
MKKGIRYETSRKTSYIFQQPQHGPWQTRMRKISNHGSLRVAKVAYPLGLCVGVFIYVAYIKWHRATATQAFFSITRAAPGARWGQQAHSPLGTAADGHEVFYGIMFDAGSTGTRVHVFQFTRPPRDTSS

SEQ ID NO: 868364 - protein, 395 aa, Homo sapiens; identical to SEQ ID NO: 868351

SEQ ID NO: 868365 - protein, 395 aa, Homo sapiens; identical to SEQ ID NO: 868351

SEQ ID NO: 868366 - protein, 341 aa, Homo sapiens
MKKGIRYETSRKTSYIFQQPQHGPWQTRMRKISNHGSLRVAKVAYPLGLCVGVFIYVAYIKWHRATATQAFFSITRAAPGARWGQQAHSPLGTAADGHEVFYGIMFDAGSTGTRVHVFQFTRPPRETPTLTHETFKALKPGLSAYADDVEKSAQGIRELLDVAKQDIPFDFWKATPLVLKATAGLRLLPGEKAQKLLQKVKEVFKASPFLVGDDCVSIMNGTDEGVSAWITINFLTGSLKTPGGSSVGMLDLGGGSTQIAFLPRVEGTLQASPPGYLTALRMFNRTYKLYSYSYLGLGLMSARLAILGDRARLRLHLKKSRMMREMRQFQEGALRSVQVAA

SEQ ID NO: 868367 - protein, 111 aa, Homo sapiens
AYADDVEKVRILSRVSLFNCRMCSSQFFSFECGRLSSQRKGALTVLPGHFMPFGMVRREKVCSARAQRRTRPHPAPSSDSTVPALTSPTWGSRGLGTGQKHKSCKLTKIII

SEQ ID NO: 868368 - protein, 626 aa, Homo sapiens
MDEQEALNSIMNDLVALQMNRRHRMPGYETMKNKDTGHSNRQSDVRIKFEHNGERRIIAFSRPVKYEDVEHKVTTVFGQPLDLHYMNNELSILLKNQDDLDKAIDILDRSSSMKSLRILLLSQDRNHNSSSPHSGVSRQVRIKASQSAGDINTIYQPPEPRSRHLSVSSQNPGRSSPPPGYVPERQQHIARQGSYTSINSEGEFIPETSEQCMLDPLSSAENSLSGSCQSLDRSADSPSFRKSRMSRAQSFPDNRQEYSDRETQLYDKGVKGGTYPRRYHVSVHHKDYSDGRRTFPRIRRHQGNLFTLVPSSRSLSTNGENMGLAVQYLDPRGRLRSADSENALSVQERNVPTKSPSAPINWRRGKLLGQGAFGRVYLCYDVDTGRELASKQVQFDPDSPETSKEVSALECEIQLLKNLQHERIVQYYGCLRDRAEKTLTIFMEYMPGGSVKDQLKAYGALTESVTRKYTRQILEGMSYLHSNMIVHRDIKGANILRDSAGNVKLGDFGASKRLQTICMSGTGMRSVTGTPYWMSPEVISGEGYGRKADVWSLGCTVVEMLTEKPPWAEYEAMAAIFKIATQPTNPQLPSHISEHGRDFLRRIFVEARQRPSAEELLTHHFAQLMY

SEQ ID NO: 868369 - protein, 501 aa, Homo sapiens
MDEQEALNSIMNDLVALQMNRRHRMPGYETMKNKDTGHSNRQSDVRIKFEHNGERRIIAFSRPVKYEDVEHKVTTVFGQPLDLHYMNNELSILLKNQDDLDKAIDILDRSSSMKSLRILLLSQDRNHNSSSPHSGVSRQVRIKASQSAGDINTIYQPPEPRSRHLSVSSQNPGRSSPPPGYVPERQQHIARQGSYTSINSEGEFIPETSEQCMLDPLSSAENSLSGSCQSLDRSADSPSFRKSRMSRAQSFPDNRQEYSDRETQLYDKGVKGGTYPRRYHVSVHHKDYSDGRRTFPRIRRHQGNLFTLVPSSRSLSTNGENMGLAVQYLDPRGRLRSADSENALSVQERNVPTKSPSAPINWRRGKLLGQGAFGRVYLCYDVDTGRELASKQVQFDPDSPETSKEVSALECEIQLLKNLQHERIVQYYGCLRDRAEKTLTIFMEYMPGGSVKDQLKAYGALTESVTRKYTRQILEGMSYLHSNMIVHRDIKGAWAALWWRC

SEQ ID NO: 868370 - protein, 626 aa, Homo sapiens; identical to SEQ ID NO: 868368

SEQ ID NO: 868371 - protein, 657 aa, Homo sapiens
MDEQEALNSIMNDLVALQMNRRHRMPGYETMKNKDTGHSNRQKKHNSSSSALLNSPTVTTSSCAGASEKKKFLSDVRIKFEHNGERRIIAFSRPVKYEDVEHKVTTVFGQPLDLHYMNNELSILLKNQDDLDKAIDILDRSSSMKSLRILLLSQDRNHNSSSPHSGVSRQVRIKASQSAGDINTIYQPPEPRSRHLSVSSQNPGRSSPPPGYVPERQQHIARQGSYTSINSEGEFIPETSEQCMLDPLSSAENSLSGSCQSLDRSADSPSFRKSRMSRAQSFPDNRQEYSDRETQLYDKGVKGGTYPRRYHVSVHHKDYSDGRRTFPRIRRHQGNLFTLVPSSRSLSTNGENMGLAVQYLDPRGRLRSADSENALSVQERNVPTKSPSAPINWRRGKLLGQGAFGRVYLCYDVDTGRELASKQVQFDPDSPETSKEVSALECEIQLLKNLQHERIVQYYGCLRDRAEKTLTIFMEYMPGGSVKDQLKAYGALTESVTRKYTRQILEGMSYLHSNMIVHRDIKGANILRDSAGNVKLGDFGASKRLQTICMSGTGMRSVTGTPYWMSPEVISGEGYGRKADVWSLGCTVVEMLTEKPPWAEYEAMAAIFKIATQPTNPQLPSHISEHGRDFLRRIFVEARQRPSAEELLTHHFAQLMY

SEQ ID NO: 868372 - protein, 384 aa, Homo sapiens
KWLTLTYPEARIPLSYSDRETQLYDKGVKGGTYPRRYHVSVHHKDYSDGRRTFPRIRRHQGNLFTLVPSSRSLSTNGENMGLAVQYLDPRGRLRSADSENALSVQERNVPTKSPSAPINWRRGKLLGQGAFGRVYLCYDVDTGRELASKQVQFDPDSPETSKEVSALECEIQLLKNLQHERIVQYYGCLRDRAEKTLTIFMEYMPGGSVKDQLKAYGALTESVTRKYTRQILEGMSYLHSNMIVHRDIKGANILRDSAGNVKLGDFGASKRLQTICMSGTGMRSVTGTPYWMSPEVISGEGYGRKADVWSLGCTVVEMLTEKPPWAEYEAMAAIFKIATQPTNPQLPSHISEHGRDFLRRIFVEARQRPSAEELLTHHFAQLMY

SEQ ID NO: 868373 - protein, 158 aa, Homo sapiens
MEGPRRGPEVGGFCKYRLLRVSRALCHDTSLGLTWLRTCSVRGFVRTLPFCLKLKAKENDRRLRTELTLAPGWEAAALLDATYCKWPEYQRGGFHGQMHSRCLPLHLDHLVVFKFLVPEAKSTTCLLVTCLPAVVVDVLAGRFGISHQSFCTVLVSSI

SEQ ID NO: 868374 - protein, 385 aa, Homo sapiens
PGDRWSCAARLGAACGRTPSSPPVCPGGLGVPACVPSVPSWPGVRGAGSGFAMAVRRDSVWKYCWGVLMVLCRTAISKSIVLEPIYWNSSNSKFLPGQGLVLYPQIGDKLDIICPKVDSKTVGQYEYYKVYMVDKDQADRCTIKKENTPLLNCAKPDQDIKFTIKFQEFSPNLWGLEFQKNKDYYIISTSNGSLEGLDNQEGGVCQTRAMKILMKVGQDASSAGSTRNKDPTRRPELEAGTNGRSSTTSPFVKPNPGSSTDGNSAGHSGNNILGSEVALFAGIASGCIIFIVIIITLVVLLLKYRRRHRKHSPQHTTTLSLSTLATPKRSGNNNGSEPSDIIIPLRTADSVFCPHYEKVSGDYGHPVYIVQEMPPQSPANIYYKV

SEQ ID NO: 868375 - protein, 385 aa, Homo sapiens; identical to SEQ ID NO: 868374

SEQ ID NO: 868376 - protein, 219 aa, Homo sapiens
  misc_feature (20)..(20): Xaa can be any naturally occurring amino acid
  misc_feature (35)..(35): Xaa can be any naturally occurring amino acid
  misc_feature (44)..(44): Xaa can be any naturally occurring amino acid
  misc_feature (51)..(51): Xaa can be any naturally occurring amino acid
  misc_feature (59)..(59): Xaa can be any naturally occurring amino acid
  misc_feature (73)..(73): Xaa can be any naturally occurring amino acid
  misc_feature (78)..(78): Xaa can be any naturally occurring amino acid
MSPGPSGISWTMYTGARIPXDLLVVRAEDAVPSPXRDDNVLGSXPLFVPLXLGVASVLXDSVVVFCGECFLFXPRYFXKRTTSVMMMTMKMMHPEAIPANKAIFGTEDVVPRMSGAVAQGSAAPHLRPPLHICITHGTLMSGVPSSSRWQQQLQSMGNPFIEIVFANKVPFSQMLGCLRRRLGVHRREWGWGKGWLQLQLTAAASETESWKGKKKKAIR

SEQ ID NO: 868377 - protein, 97 aa, Homo sapiens
DELGPKSDHTASRRHDSTHSGFQCMGRHSLLSNSDVQEEKPLFIPGNKDGYCWERNRLGGKGESRPLMIYSGRTVVVLAIRYTAPSCRRVGLLWMIF

SEQ ID NO: 868378 - protein, 385 aa, Homo sapiens; identical to SEQ ID NO: 868374

SEQ ID NO: 868379 - protein, 107 aa, Homo sapiens
MYNIYLQYILYISISYFCGAVAMVTSHSTYVILSITPTSPFCAFMQEFLVSHQKLLLGWGRGARRGKMGNSLILMKSNVCIISWLRFGSMLNCEKSDELIKEFPATN

SEQ ID NO: 868380 - protein, 405 aa, Homo sapiens
GDVTPSGDKAPPPGSGPGRRPARSGCPARGHSEPGGREEGGMPQTVILPGPAPWGFRLSGGIDFNQPLVITRITPGSKAAAANLCPGDVILAIDGFGTESMTHADAQDRIKAAAHQLCLKIDRGETHLWSPQVSEDGKAHPFKINLESEPQDGNYFEHKHNIRPKPFVIPGRSSGCSTPSGIDCGSGRSTPSSVSTVSTICPGDLKVAAKLAPNIPLEMELPGVKIVHAQFNTPMQLYSDDNIMETLQGQVSTALGETPLMSEPTASVPPESDVYRMLHDNRNEPTQPRQSGSFRVLQGMVDDGSDDRPAGTRSVRAPVTKVHGGSGGAQRMPLCDKCGSGIVGAVVKARDKYRHPECFVCADCNLNLKQKGYFFIEGELYCETHARARTKPPEGYDTVTLYPKA

SEQ ID NO: 868381 - protein, 76 aa, Homo sapiens
EAVNRTRGPDWSVVGAVVKARDKYRHPECFVCADCNLNLKQKGYFFIEGELYCETHARARTKPPEGYDTVTLYPKA

SEQ ID NO: 868382 - protein, 357 aa, Homo sapiens
GDVTPSGDKAPPPGSGPGRRPARSGCPARGHSEPGGREEGGMPQTVILPGPAPWGFRLSGGIDFNQPLVITRITPGSKAAAANLCPGDVILAIDGFGTESMTHADAQDRIKAAAHQLCLKIDRGETHLWSPQVSEDGKAHPFKINLESEPQEFKPIGTAHNRRAQPFVAAANIDDKRQVVSASYNSPIGLYSTSNIQDALHGQLRGLIPSSPQNEPTASVPPESDVYRMLHDNRNEPTQPRQSGSFRVLQGMVDDGSDDRPAGTRSVRAPVTKVHGGSGGAQRMPLCDKCGSGIVGAVVKARDKYRHPECFVCADCNLNLKQKGYFFIEGELYCETHARARTKPPEGYDTVTLYPKA

SEQ ID NO: 868383 - protein, 214 aa, Homo sapiens
GDVTPSGDKAPPPGSGPGRRPARSGCPARGHSEPGGREEGGMPQTVILPGPAPWGFRLSGGIDFNQPLVITRITPGSKAAAANLCPGDVILAIDGFGTESMTHADAQDRIKAAAHQLCLKIDRGETHLWSPQVSEDGKAHPFKINLESEPQEFKPIGTAHNRRAQPFVAAANIDDKRQVVSASYNSPIGLYSTSNIQDALHGQLRGLIPSSPQK

SEQ ID NO: 868384 - protein, 214 aa, Homo sapiens; identical to SEQ ID NO: 868383

SEQ ID NO: 868385 - protein, 214 aa, Homo sapiens; identical to SEQ ID NO: 868383

SEQ ID NO: 868386 - protein, 230 aa, Homo sapiens
GDVTPSGDKAPPPGSGPGRRPARSGCPARGHSEPGGREEGGMPQTVILPGPAPWGFRLSGGIDFNQPLVITRITPGSKAAAANLCPGDVILAIDGFGTESMTHADAQDRIKAAAHQLCLKIDRGETHLWSPQVSEDGKAHPFKINLESEPQEFKPIGTAHNRRAQPFVAAANIDDKRQVVSASYNSPIGLYSTSNIQDALHGQLRGLIPSSPQKTGTTLNTSIIFGPNLS

SEQ ID NO: 868387 - protein, 357 aa, Homo sapiens; identical to SEQ ID NO: 868382

SEQ ID NO: 868388 - protein, 317 aa, Homo sapiens
GDVTPSGDKAPPPGSGPGRRPARSGCPARGHSEPGGREEGGMPQTVILPGPAPWGFRLSGGIDFNQPLVITRITPGSKAAAANLCPGDVILAIDGFGTESMTHADAQDRIKAAAHQLCLKIDRGETHLWSPQVSEDGKAHPFKINLESEPQDGNYFEHKHNIRPKPFVIPGRSSEPTASVPPESDVYRMLHDNRNEPTQPRQSGSFRVLQGMVDDGSDDRPAGTRSVRAPVTKVHGGSGGAQRMPLCDKCGSGIVGAVVKARDKYRHPECFVCADCNLNLKQKGYFFIEGELYCETHARARTKPPEGYDTVTLYPKA

SEQ ID NO: 868389 - protein, 214 aa, Homo sapiens; identical to SEQ ID NO: 868383

SEQ ID NO: 868390 - protein, 248 aa, Homo sapiens
MRLIQNMCTIAEYPAPGNAAASDCCVGAAGRRLVKIAVVGASGVGKTALVVRFLTKRFIGDYERNAGNLYTRQVQIEGETLALQVQDTPGIQVHENSLSCSEQLNRCIRWADAVVIVFSITDYKSYELISQLHQHVQQLHLGTRLPVVVVANKADLLHIKQVDPQLGLQLASMLGCSFYEVSVSENYNDVYSAFHVLCKEVSHKQQPSSTPEKRRTSLIPRPKSPNMQDLKRRFKQALSAKVRTVTSV

SEQ ID NO: 868391 - protein, 113 aa, Homo sapiens
SGVWVWSLSPAEPRRSAPPRPYLHLFIVVISYRGAPQSGPPARSRAALAFSSPSVPSRAVRRSRGDAPHSEHVHHRRVPRAGQRRGLRLLCGRRRPPPGQDRRGGRQRRGQDR

SEQ ID NO: 868392 - protein, 113 aa, Homo sapiens; identical to SEQ ID NO: 868391

SEQ ID NO: 868393 - protein, 136 aa, Homo sapiens
FLELISQLRAAAHACNPSTLGGRGGQITRSRDRDHPGQHGETPSLPKIQKLTRRGGVHLWFQLLRRLRQENRLNLGGGGCGEPRSNHCTPAWAMRAKLSLKQTNKNKSVQQDCKIQNEHKIQNTLFLYTRNAHIKI

SEQ ID NO: 868394 - protein, 157 aa, Homo sapiens
MKIRGQKRGVTSVTQQACGRAGVQVVILSLPLAGPLCFVTSLQKVGLIPYIRPQAWPALFPPCPRPPAMPVRAVCEHSLERRYSLVSPLRPARKLISISFGDLNPFPLRQIRNRRAYHLEKVRLELTELEAIREDFLRERDTSPDKGELVSDEEEDT

SEQ ID NO: 868395 - protein, 401 aa, Homo sapiens
ALEDPWMLCSEDQGPTREVIAQLLEDALQVESQEQPEQAFVKPHLVSEYDIYGFRTVPEDDEEEKLVAKVRALDLKTLYLTENQEVSTGVKWENYFASTVNREMMCSPELKNLIRAGIPHEHRSKVWKWCVDRHTRKFKDNTEPGHFQTLLQKALEKQNPASKQIELDLLRTLPNNKHYSCPTSEGIQKLRNVLLAFSWRNPDIGYCQGLNRLVAVALLYLEQEDAFWCLVTIVEVFMPRDYYTKTLLGSQVDQRVFRDLMSEKLPRLHGHFEQYKVDYTLITFNWFLVVFVDSVVSDILFKIWDSFLYEGPKVIFRFALALFKYKEEEILKLQDSMSIFKYLRYFTRTILDAEIRNRRAYHLEKVRLELTELEAIREDFLRERDTSPDKGELVSDEEEDT

SEQ ID NO: 868396 - protein, 102 aa, Homo sapiens [sequence omitted]

SEQ ID NO: 868397 - protein, 102 aa, Homo sapiens [sequence omitted]

SEQ ID NO: 868398 - protein, 927 aa, Homo sapiens
QGAAAEPGAGPAREPARLCGYLQKLSGKGPLRGYRSRWFVFDARRCYLYYFKSPQDALPLGHLDIADACFSYQGPDEAAEPGTEPPAHFQVHSAGAVTVLKAPNRQLMTYWLQELQQKRWEYCNSLDMVKWDSRTSPTPGDFPKGLVARDNTDLIYPHPNASAEKARNVLAVETVPGELVGEQAANQPAPGHPNSINFYSLKQWGNELKNSMSSFRPGRGHNDSRRTVFYTNEEWELLDPTPKDLEESIVQEEKKKLTPEGNKGVTGSGFPFDFGRNPYKGKRPLKDIIGSYKNRHSSGDPSSEGTSGSGSVSIRKPASEMQLQVQSQQEELEQLKKDLSSQKELVRLLQQTVRSSQYDKYFTSSRLCEGVPKDTLELLHQKDDQILGLTSQLERFSLEKESLQQEVRTLKSKVGELNEQLGMLMETIQAKDEVIIKLSEGEGNGPPPTVAPSSPSVVPVARDQLELDRLKDNLQGYKTQNKFLNKEILELSALRRNAERRERDLMAKYSSLEAKLCQIESKYLILLQEMKTPVCSEDQGPTREVIAQLLEDALQVESQEQPEQAFVKPHLVSEYDIYGFRTVPEDDEEEKLVAKVRALDLKTLYLTENQEVSTGVKWENYFASTVNREMMCSPELKNLIRAGIPHEHRSKVWKWCVDRHTRKFKDNTEPGHFQTLLQKALEKQNPASKQIELDLLRTLPNNKHYSCPTSEGIQKLRNVLLAFSWRNPDIGYCQGLNRLVAVALLYLEQEDAFWCLVTIVEVFMPRDYYTKTLLGSQVDQRVFRDLMSEKLPRLHGHFEQYKVDYTLITFNWFLVVFVDSVVSDILFKIWDSFLYEGPKVIFRFALALFKYKEEEILKLQDSMSIFKYLRYFTRTILDAEIRNRRAYHLEKVRLELTELEAIREDFLRERDTSPDKGELVSDEEEDT

SEQ ID NO: 868399 - protein, 793 aa, Homo sapiens
QGAAAEPGAGPAREPARLCGYLQKLSGKGPLRGYRSRWFVFDARRCYLYYFKSPQDALPLGHLDIADACFSYQGPDEAAEPGTEPPAHFQVHSAGAVTVLKAPNRQLMTYWLQELQQKRWEYCNSLDMVKWDSRTSPTPGDFPKGLVARDNTDLIYPHPNASAEKARNVLAVETVPGELVGEQAANQPAPGHPNSINFYSLKQWGNELKNSMSSFRPGRGHNDSRRTVFYTNEEWELLDPTPKDLEESIVQEEKKKLTPEGNKGVTGSGFPFDFGRNPYKGKRPLKDIIGSYKNRHSSGDPSSEGTSGSGSVSIRKPASEMQLQVQSQQEELEQLKKDLSSQKELVRLLQQTVRSSQYDKYFTSSRLCEGVPKDTLELLHQKDDQILGLTSQLERFSLEKESLQQEVRTLKSKVGELNEQLGMLMETIQAKDEVIIKLSEGEGNGPPPTVAPSSPSVVPVARDQLELDRLKDNLQGYKTQNKFLNKEILELSALRRNAERRERDLMAKYSSLEAKLCQIESKYLILLQEMKTPVCSEDQGPTREVIAQLLEDALQVESQEQPEQAFVKPHLVSEYDIYGFRTVPEDDEEEKLVAKVRALDLKTLYLTENQEVSTGVKWENYFASTVNREMMCSPELKNLIRAGIPHEHRSKVWKWCVDRHTRKFKDNTEPGHFQTLLQKALEKQNPASKQIELDLLRTLPNNKHYSCPTSEGIQKLRNVLLAFSWRNPDIGYCQGLNRLVAVALLYLEQEDAFWCLVTIVEVFMPSEVGQEKCLLLGRVRSKSSSICLAGLAP

SEQ ID NO: 868400 - protein, 927 aa, Homo sapiens; identical to SEQ ID NO: 868398

SEQ ID NO: 868401 - protein, 312 aa, Homo sapiens
MKTPVCSEDQGPTREVIAQLLEDALQVESQEQPEQAFVKPHLVSEYDIYGFRTVPEDDEEEKLVAKVRALDLKTLYLTENQEVSTGVKWENYFASTVNREMMCSPELKNLIRAGIPHEHRSKVWKWCVDRHTRKFKDNTEPGHFQTLLQKALEKQNPASKQIELDLLRTLPNNKHYSCPTSEGIQKLRNVLLAFSWRNPDIGYCQGLNRLVAVALLYLEQEDAFWCLVTIVEVFMPRDYYTKTLLGSQVDQRVFRDLMSEKLPRLHGHFEQYKVDYTLITFNWFLVVFVDSVVSDILFKIWDSFLYEGPKVS

SEQ ID NO: 868402 - protein, 187 aa, Homo sapiens
AGVLEDPPPGSQVVRLLVCLPGDLAGLIHFSPLFPLQVDQRVFRDLMSEKLPRLHGHFEQYKVDYTLITFNWFLVVFVDSVVSDILFKIWDSFLYEGPKVIFRFALALFKYKEEEILKLQDSMSIFKYLRYFTRTILDAEIRNRRAYHLEKVRLELTELEAIREDFLRERDTSPDKGELVSDEEEDT

SEQ ID NO: 868403 - protein, 927 aa, Homo sapiens; identical to SEQ ID NO: 868398

SEQ ID NO: 868404 - protein, 789 aa, Homo sapiens
QGAAAEPGAGPAREPARLCGYLQKLSGKGPLRGYRSRWFVFDARRCYLYYFKSPQDALPLGHLDIADACFSYQGPDEAAEPGTEPPAHFQVHSAGAVTVLKAPNRQLMTYWLQELQQKRWEYCNSLDMVKWDSRTSPTPGDFPKGLVARDNTDLIYPHPNASAEKARNVLAVETVPGELVGEQAANQPAPGHPNSINFYSLKQWGNELKNSMSSFRPGRGHNDSRRTVFYTNEEWELLDPTPKDLEESIVQEEKKKLTPEGNKGVTGSGFPFDFGRNPYKGKRPLKDIIGSYKNRHSSGDPSSEGTSGSGSVSIRKPASEMQLQVQSQQEELEQLKKDLSSQKELVRLLQQTVRSSQYDKYFTSSRLCEGVPKDTLELLHQKDDQILGLTSQLERFSLEKESLQQEVRTLKSKVGELNEQLGMLMETIQAKDEVIIKLSEGEGNGPPPTVAPSSPSVVPVARDQLELDRLKDNLQGYKTQNKFLNKEILELSALRRNAERRERDLMAKYSSLEAKLCQIESKYLILLQEMKTPVCSEDQGPTREVIAQLLEDALQVESQEQPEQAFVKPHLVSEYDIYGFRTVPEDDEEEKLVAKVRALDLKTLYLTENQEVSTGVKWENYFASTVNREMMCSPELKNLIRAGIPHEHRSKVWKWCVDRHTRKFKDNTEPGHFQTLLQKALEKQNPASKQIELDLLRTLPNNKHYSCPTSEGIQKLRNVLLAFSWRNPDIGYCQGLNRLVAVALLYLEQEDAFWCLVTIVEVFMPRDYYTKTLLGSQVVLKILCFSHHF

SEQ ID NO: 868405 - protein, 699 aa, Homo sapiens
QGAAAEPGAGPAREPARLCGYLQKLSGKGPLRGYRSRWFVFDARRCYLYYFKSPQDALPLGHLDIADACFSYQGPDEAAEPGTEPPAHFQVHSAGAVTVLKAPNRQLMTYWLQELQQKRWEYCNSLDMVKWDSRTSPTPGDFPKGLVARDNTDLIYPHPNASAEKARNVLAVETVPGELVGEQAANQPAPGHPNSINFYSLKQWGNELKNSMSSFRPGRGHNDSRRTVFYTNEEWELLDPTPKDLEESIVQEEKKKLTPEGNKGVTGSGFPFDFGRNPYKGKRPLKDIIGSYKNRHSSGDPSSEGTSGSGSVSIRKPASEMQLQVQSQQEELEQLKKDLSSQKELVRLLQQTVRSSQYDKYFTSSRLCEGVPKDTLELLHQKDDQILGLTSQLERFSLEKESLQQEVRTLKSKVGELNEQLGMLMETIQAKDEVIIKLSEGEGNGPPPTVAPSSPSVVPVARDQLELDRLKDNLQGYKTQNKFLNKEILELSALRRNAERRERDLMAKYSSLEAKLCQIESKYLILLQEMKTPVCSEDQGPTREVIAQLLEDALQVESQEQPEQAFVKPHLVSEYDIYGFRTVPEDDEEEKLVAKVRALDLKTLYLTENQEVSTGVKWENYFASTVNREMMCSPELKNLIRAGIPHEHRSKVWKWCVDRHTSKHKDLRTKGFRLESCRSMVNLMDRDGHGKLGLVEFNI

SEQ ID NO: 868406 - protein, 1121 aa, Homo sapiens
TFTGQADCEPGSALGEPRPSHPFLGPLEGRYGFPVSPAASAPPSPHSETVKADAPGHSWAAFAQWMMGDYRLPDHPQPMEILNLYLGDSLEPHPGECPRETCSHEDPPEPFEEQTWATDPPEPTRQNVPPWGSGVELTHLGSWVHQDGLEPCQEQTRATDPPESTRQDAPPWGSGVELTHLGSPSAQREHRQNTASPGSPVNSHLPGSPKQNRSTSTQVVFWAGILQAQMCVLDLEEELEKTEGLKAGLKCCLPTPPVDLPGDTGLHSSPPENEDSGEDSSEPEGEGQAWLREGTPDSSPQWGAEEESMFFSNPLFLASPCSENSASGECFSWGASDSHAGVRTGPESPATLEPPLPEDTVLWELESEPDLGDGAAISGHCTPPFPVPIYKPHSICWASVAAAEGAPAAPPGHGESEGDRLGPAPSAAPCVDEALTWESGCVGSDLGPAAHPVQPWASLSPEGWQRGGPFWPQVTLNSQDRDEREGGHPQESLPCTLAPCPWRSPASSPEPSSPESESRGPGPRPSPASSQEGSPQLQHHSSGILPKWTLDASQSSLLETDGEQPSSLKKKEAGEAPKPGEEVKSEGTARPAETGDVQPDIHLTSAEHENLRTPMNSSWLPGSPMPQAQSPEEGQRPPAGDKLANGVRNNKVAWNLASRLYRLEGFRKSEVAAYLQKNNDFSRAVAEEYLSFFQFGGQSLDRALRSFLQALVLSGETQERERILYQFSRRFHHCNPGIFPSVDSVHTLTCAIMLLNTDLHGQNIGKSMSCQEFITNLNGLRDGGNFPKELLKALYWSIRSEKLEWAVDEEDTARPEKAQPSLPAGKMSKPFLQLAQDPTVPTYKQGILARKMHQDADGKKTPWGKRGWKMFHTLLRGMVLYFLKQGEDHCLEGESLVGQMVDEPVGVHHSLATPATHYTKKPHVFQLRTADWRLYLFQAPTAKEMSSWIARINLAAATHSAPPFPAAVGSQRRFVRPILPVGPAQSSLEEQHRSHENCLDAAADDLLDLQRNLPERRGRGRELEEHRLRKEYLEYEKTRYETYVQLLVARLHCPSDALDLWEEQLGREAGGTREPKLSLKKSHSSPSLHQDEAPTTAKVKRNISERRTYRKIIPKRNRNQL

SEQ ID NO: 868407 - protein, 1082 aa, Homo sapiens
AVLPGLGTRLGVYRQNVPPWGSGVELTHLGSWVHQDGLEPCQEQTRATDPPESTRQDAPPWGSGVELTHLGSPSAQREHRQNTASPGSPVNSHLPGSPKQNRSTSTQVVFWAGILQAQMCVLDLEEELEKTEGLKAGLKCCLPTPPVDLPGDTGLHSSPPENEDSGEDSSEPEGEGQAWLREGTPDSSPQWGAEEESMFFSNPLFLASPCSENSASGECFSWGASDSHAGVRTGPESPATLEPPLPEDTVLWELESEPDLGDGAAISGHCTPPFPVPIYKPHSICWASVAAAEGAPAAPPGHGESEGDRLGPAPSAAPCVDEALTWESGCVGSDLGPAAHPVQPWASLSPEGWQRGGPFWPQVTLNSQDRAKVLSPSVAWRLESWEPAVCCLCKWERSLPEGGQGMLPGSRGGAPGREPLEVVPRPFSCLLPCARLTSCSSSDEREGGHPQESLPCTLAPCPWRSPASSPEPSSPESESRGPGPRPSPASSQEGSPQLQHHSSGILPKWTLDASQSSLLETDGEQPSSLKKKEAGEAPKPGEEVKSEGTARPAETGDVQPDIHLTSAEHENLRTPMNSSWLPGSPMPQAQSPEEGQRPPAGDKLANGVRNNKVAWNLASRLYRLEGFRKSEVAAYLQKNNDFSRAVAEEYLSFFQFGGQSLDRALRSFLQALVLSGETQERERILYQFSRRFHHCNPGIFPSVDSVHTLTCAIMLLNTDLHGQNIGKSMSCQEFITNLNGLRDGGNFPKELLKALYWSIRSEKLEWAVDEEDTARPEKAQPSLPAGKMSKPFLQLAQDPTVPTYKQGILARKMHQDADGKKTPWGKRGWKMFHTLLRGMVLYFLKQGEDHCLEGESLVGQMVDEPVGVHHSLATPATHYTKKPHVFQLRTADWRLYLFQAPTAKEMSSWIARINLAAATHSAPPFPAAVGSQRRFVRPILPVGPAQSSLEEQHRSHENCLDAAADDLLDLQRNLPERRGRGRELEEHRLRKEYLEYEKTRYETYVQLLVARLHCPSDALDLWEEQLGREAGGTREPKLSLKKSHSSPSLHQDEAPTTAKVKRNISERRTYRKIIPKRNRNQL

SEQ ID NO: 868408 - protein, 1082 aa, Homo sapiens; identical to SEQ ID NO: 868407

SEQ ID NO: 868409 - protein, 287 aa, Homo sapiens
MHTCVCLSVSGCWCPHLQHLCSVPGTAPWGKRGWKMFHTLLRGMVLYFLKQGEDHCLEGESLVGQMVDEPVGVHHSLATPATHYTKKPHVFQLRTADWRLYLFQAPTAKEMSSWIARINLAAATHSAPPFPAAVGSQRRFVRPILPVGPAQSSLEEQHRSHENCLDAAADDLLDLQRNLPERRGRGRELEEHRLRKEYLEYEKTRYETYVQLLVARLHCPSDALDLWEEQLGREAGGTREPKLSLKKSHSSPSLHQDEAPTTAKVKRNISERRTYRKIIPKRNRNQL

SEQ ID NO: 868410 - protein, 172 aa, Homo sapiens
RRAAHLAWEPRRPGGRRARARKAAEGTPGTAPLTARCSQEEQHRSHENCLDAAADDLLDLQRNLPERRGRGRELEEHRLRKEYLEYEKTRYETYVQLLVARLHCPSDALDLWEEQLGREAGGTREPKLSLKKSHSSPSLHQDEAPTTAKVKRNISERRTYRKIIPKRNRNQL

SEQ ID NO: 868411 - protein, 373 aa, Homo sapiens
AVLPGLGTRLGVYRQNVPPWGSGVELTHLGSWVHQDGLEPCQEQTRATDPPESTRQDAPPWGSGVELTHLGSPSAQREHRQNTASPGSPVNSHLPGSPKQNRSTSTQVVFWAGILQAQMCVLDLEEELEKTEGLKAGLKCCLPTPPVDLPGDTGLHSSPPENEDSGEDSSEPEGEGQAWLREGTPDSSPQWGAEEESMFFSNPLFLASPCSENSASGECFSWGASDSHAGVRTGPESPATLEPPLPEDTVLWELESEPDLGDGAAISGHCTPPFPVPIYKPHSICWASVAAAEGAPAAPPGHGESEGDRLGPAPSAAPCVDEALTWESGCVGSDLGPAAHPVQPWASLSPEGWQRGGPFWPQVTLNSQDRGEP

SEQ ID NO: 868412 - protein, 130 aa, Homo sapiens
IGKSMSCQEFITNLNGLRDGGNFPKELLKVCATGSSYEPHVGPGALVLCSKGDAELGTGFAKISLREQDLFIEGLVKVYSLAGSIRSILEFVIHANLQAPCAGLIESDSLRLGPLKYFLKFSSHSYPFKV

SEQ ID NO: 868413 - protein, 1082 aa, Homo sapiens; identical to SEQ ID NO: 868407

SEQ ID NO: 868414 - protein, 435 aa, Homo sapiens
WLSRGSLPGCASESGRALRSFLQALVLSGETQERERILYQFSRRFHHCNPGIFPSVDSVHTLTCAIMLLNTDLHGQNIGKSMSCQEFITNLNGLRDGGNFPKELLKALYWSIRSEKLEWAVDEEDTARPEKAQPSLPAGKMSKPFLQLAQDPTVPTYKQGILARKMHQDADGKKTPWGKRGWKMFHTLLRGMVLYFLKQGEDHCLEGESLVGQMVDEPVGVHHSLATPATHYTKKPHVFQLRTADWRLYLFQAPTAKEMSSWIARINLAAATHSAPPFPAAVGSQRRFVRPILPVGPAQSSLEEQHRSHENCLDAAADDLLDLQRNLPERRGRGRELEEHRLRKEYLEYEKTRYETYVQLLVARLHCPSDALDLWEEQLGREAGGTREPKLSLKKSHSSPSLHQDEAPTTAKVKRNISERRTYRKIIPKRNRNQL

SEQ ID NO: 868415 - protein, 1082 aa, Homo sapiens; identical to SEQ ID NO: 868407

SEQ ID NO: 868416 - protein, 567 aa, Homo sapiens
AVLPGLGTRLGVYRQNVPPWGSGVELTHLGSWVHQDGLEPCQEQTRATDPPESTRQDAPPWGSGVELTHLGSPSAQREHRQNTASPGSPVNSHLPGSPKQNRSTSTQVVFWAGILQAQMCVLDLEEELEKTEGLKAGLKCCLPTPPVDLPGDTGLHSSPPENEDSGEDSSEPEGEGQAWLREGTPDSSPQWGAEEESMFFSNPLFLASPCSENSASGECFSWGASDSHAGVRTGPESPATLEPPLPEDTVLWELESEPDLGDGAAISGHCTPPFPVPIYKPHSICWASVAAAEGAPAAPPGHGESEGDRLGPAPSAAPCVDEALTWESGCVGSDLGPAAHPVQPWASLSPEGWQRGGPFWPQVTLNSQDRDEREGGHPQESLPCTLAPCPWRSPASSPEPSSPESESRGPGPRPSPASSQEGSPQLQHHSSGILPKWTLDASQSSLLETDGEQPSSLKKKEAGEAPKPGEEVKSEGTARPAETGDVQPDIHLTSAEHENLRTPMNSSWLPGSPMPQAQSPEEGQRPPAGDKLANGVRNNKVAWNLASRLYRLEGFRKSEVAAYLQKK

SEQ ID NO: 868417 - protein, 111 aa, Homo sapiens
RRNGRGGGAGRQPQAVRDAPRQPRRVRPAEAALRAVRCVRGAPAAIREAIQLPGLISSRGVRLGAGSQRARPRGLSRRQRGGDGGVPGQPSALASLLNIYALLNLLWTNHQ

SEQ ID NO: 868418 - protein, 749 aa, Homo sapiens
MAHRKLESVGSGMLDHRVRPGPVPHSQEPESEDMELPLEGYVPEGLELAALRPESPAPEEQECHNHSPDGDSSSDYVNNTSEEEDYDEGLPEEEEGITYYIRYCPEDDSYLEGMDCNGEEYLAHSAHPVDTDECQEAVEEWTDSAGPHPHGHEAEGSQDYPDGQLPIPEDEPSVLEAHDQEEDGHYCASKEGYQDYYPEEANGNTGASPYRLRRGDGDLEDQEEDIDQIVAEIKMSLSMTSITSASEASPEHGPEPGPEDSVEACPPIKASCSPSRHEARPKSLNLLPEAKHPGDPQRGFKPKTRTPEERLKWPHEQVCNGLEQPRKQQRSDLNGPVDNNNIPETKKVASFPSFVAVPGPCEPEDLIDGIIFAANYLGSTQLLSERNPSKNIRMMQAQEAVSRVKRMQKAAKIKKKANSEGDAQTLTEVDLFISTQRIKVLNADTQETMMDHALRTISYIADIGNIVVLMARRRMPRSASQDCIETTPGAQEGKKQYKMICHVFESEDAQLIAQSIGQAFSVAYQEFLRANGINPEDLSQKEYSDIINTQEMYNDDLIHFSNSENCKELQLEKHKGEILGVVVVESGWGSILPTVILANMMNGGPAARSGKLSIGDQIMSINGTSLVGLPLATCQGIIKGLKNQTQVKLNIVSCPPVTTVLIKRPDLKYQLGFSVQNGIICSLMRGGIAERGGVRVGHRIIEINGQSVVATAHEKIVQALSNSVGEIHMKTMPAAMFRLLTGQETPLYI

SEQ ID NO: 868419 - protein, 749 aa, Homo sapiens; identical to SEQ ID NO: 868418

SEQ ID NO: 868420 - protein, 749 aa, Homo sapiens; identical to SEQ ID NO: 868418

SEQ ID NO: 868421 - protein, 749 aa, Homo sapiens; identical to SEQ ID NO: 868418

SEQ ID NO: 868422 - protein, 151 aa, Homo sapiens [sequence omitted]

SEQ ID NO: 868423 - protein, 116 aa, Homo sapiens
MCPRAWSWLPCGQRAPRQRNRSATTTVLIKRPDLKYQLGFSVQNGIICSLMRGGIAERGGVRVGHRIIEINGQSVVATAHEKIVQALSNSVGEIHMKTMPAAMFRLLTGQETPLYI

SEQ ID NO: 868424 - protein, 107 aa, Homo sapiens
MSITETNLQLATIIAMMKIMNYSHLYFCSIENKSFKAAELGNVVESLRWVASFPSFVAVPGPCEPEDLIDGIIFAANYLGSTQLLLKLLKLGLVLEVSSSTKKEREK

SEQ ID NO: 868425 - protein, 749 aa, Homo sapiens; identical to SEQ ID NO: 868418

SEQ ID NO: 868426 - protein, 749 aa, Homo sapiens; identical to SEQ ID NO: 868418

SEQ ID NO: 868427 - protein, 737 aa, Homo sapiens
MAHRKLESVGSGMLDHRVRPGPVPHSQEPESEDMELPLEGYVPEGLELAALRPESPAPEEQECHNHSPDGDSSSDYVNNTSEEEDYDEGLPEEEEGITYYIRYCPEDDSYLEGMDCNGEEYLAHSAHPVDTDECQEAVEEWTDSAGPHPHGHEAEGSQDYPDGQLPIPEDEPSVLEAHDQEEDGHYCASKEGYQDYYPEEANGNTGASPYRLRRGDGDLEDQEEDIDQIVAEIKMSLSMTSITSASEASPEHGPEPGPEDSVEACPPIKASCSPSRHEARPKSLNLLPEAKHPGDPQRGFKPKTRTPEERLKWPHEQVCNGLEQPRKQQRSDLNGPVDNNNIPETKKVASFPSFVAVPGPCEPEDLIDGIIFAANYLGSTQLLSERNPSKNIRMMQAQEAVSRVKNSEGDAQTLTEVDLFISTQRIKVLNADTQETMMDHALRTISYIADIGNIVVLMARRRMPRSASQDCIETTPGAQEGKKQYKMICHVFESEDAQLIAQSIGQAFSVAYQEFLRANGINPEDLSQKEYSDIINTQEMYNDDLIHFSNSENCKELQLEKHKGEILGVVVVESGWGSILPTVILANMMNGGPAARSGKLSIGDQIMSINGTSLVGLPLATCQGIIKGLKNQTQVKLNIVSCPPVTTVLIKRPDLKYQLGFSVQNGIICSLMRGGIAERGGVRVGHRIIEINGQSVVATAHEKIVQALSNSVGEIHMKTMPAAMFRLLTGQETPLYI

SEQ ID NO: 868428 - protein, 129 aa, Homo sapiens
GSLQPLPLRFKQFSCLSLRVAGTTGMCHHAQLIFLFLVEMGFHHVGQAGLELVTSSDSPTLASQSTGITGMSHRAWQKSFFSSSEECEGRRARIQFSHFPTQYLERECLAGHWGVIGSGCPPSSSSFSF

SEQ ID NO: 868429 - protein, 118 aa, Homo sapiens
RRPAPRALPTMVNLGLSRVDDAVAAKHPGLGEYAACQSHAFMKGVFTFVTGTGMAFGLQMFIQRKFPYPLQWSLLVAVVAGSVVSYGVTRVESEKCNNLWLFLETGQLPKDRSTDQRS

SEQ ID NO: 868430 - protein, 88 aa, Homo sapiens
QCRCELPVLQTHHKPPPQRKHIRLAELLSLEQLPGDSFQLGHMSGGHPKVAGGRVRQEALQFQGCPGTENPGCHHNGLRFWGQSEWRL

SEQ ID NO: 868431 - protein, 151 aa, Homo sapiens
EAGGTLLLRGSGRPGGHRGGGTCPSAQGLTPPQPGCAQRRDRRGGEGRGQGIEPSPASATPGLGEYAACQSHAFMKGVFTFVTGTGMAFGLQMFIQRKFPYPLQWSLLVAVVAGSVVSYGVTRVESEKCNNLWLFLETGQLPKDRSTDQRS

SEQ ID NO: 868432 - protein, 90 aa, Homo sapiens
RRPAPRALPTMVNLGLSRVDDAVAAKHPGLGEYAACQSHAFMKGVFTFVTVAGSVVSYGVTRVESEKCNNLWLFLETGQLPKDRSTDQRS

SEQ ID NO: 868433 - protein, 185 aa, Homo sapiens
AQARSPSPANHGELGSVPGGRRRGCQAPGRLRPGVLRLGENAPSRPALTPQQGAPSHLPAGAGGLARWALAIPGYRLMGTSALCRHRHGLWLADVHSEEVSIPFAVEPPSGRGCRLCGQLRGDESGVGEMQQPLALPGDRAAPQRQEHRSEKLGELQQGHRGLGAGGVWNTAFMPPDPRPTLPTP

SEQ ID NO: 868434 - protein, 146 aa, Homo sapiens
RRPAPRALPTMVNLGLSRVDDAVAAKHPPGCAQRRDRRGGEGRGQGIEPSPASATPGLGEYAACQSHAFMKGVFTFVTGTGMAFGLQMFIQRKFPYPLQWSLLVAVVAGSVVSYGVTRVESEKCNNLWLFLETGQLPKDRSTDQRS

SEQ ID NO: 868435 - protein, 89 aa, Homo sapiens
RRPAPRALPTMVNLGLSRVDDAVAAKHPGLGEYAACQSHAFMKGVFTFVTGTGMAFGLQMFIQRKFPYPLQWSLLVAVGGYSRAPAWAL

SEQ ID NO: 868436 - protein, 219 aa, Homo sapiens
MLRSRRGTEQVPSPRFPVGLPRASTRPPAGGLHGGPLRNHEWAVPFPTQVVREKLRKYVFDRVNMHNLLIHLVRRRGQKLESMQLELDSLRSQPDASKEELRLLQIIRQLENNIEKTMIKIITSQNIHLLYLDLLDYLKTVSPAAREGRGSGAGIWEGRERPGAEPPRTRQGEGALPDHRLRRTPRHVENVFLNFIFGYSKKAYRGVYQNSSDFLARIK

SEQ ID NO: 868437 - protein, 303 aa, Homo sapiens
AQARSPSPANHGELGSVPGGRRRGCQAPGTGMAFGLQMFIQRKFPYPLQWSLLVAVVAGSVVSYGVTRVESEKCNNLWLFLETGQLPKDRSTEQCRALQIQGVKENMDQNKATLALLRSNIRRGAQDWALAKKVVREKLRKYVFDRVNMHNLLIHLVRRRGQKLESMQLELDSLRSQPDASKEELRLLQIIRQLENNIEKTMIKIITSQNIHLLYLDLLDYLKTVSPAAREGRGSGAGIWEGRERPGAEPPRTRQGEGALPDHRLRRTPRHVENVFLNFIFGYSKKAYRGVYQNSSDFLARIK

SEQ ID NO: 868438 - protein, 118 aa, Homo sapiens; identical to SEQ ID NO: 868429

SEQ ID NO: 868439 - protein, 118 aa, Homo sapiens; identical to SEQ ID NO: 868429

SEQ ID NO: 868440 - protein, 96 aa, Homo sapiens
AQARSPSPANHGELGSVPGGRRRGCQAPGTGMAFGLQMFIQRKFPYPLQWSLLVAVVAGSVVSYGVTRVESEKCNNLWLFLETGQLPKDRSTDQRS

SEQ ID NO: 868441 - protein, 285 aa, Homo sapiens
MRRHSETDVEEQTQELKTITQLQEQCRALQIQGVKENMDQNKATLALLRSNIRRGAQDWALAKKVVREKLRKYVFDRVNMHNLLIHLVRRRGQKLESMQLELDSLRSQPDASKEELRLLQIIRQLENNIEKTMIKIITSQNIHLLYLDLLDYLKTVLAGYPIELDKLQNLVVNYCSELSDMKIMSQDAMMITDEVHEEHEAKGRLLHRGARQGNGQQRKVSTDPRGTAEYAGEGGFLDRGRTDGGKAPRMDPGKRGGGKGGPGTPAKEETKAGPREEARPSEKNR

SEQ ID NO: 868442 - protein, 96 aa, Homo sapiens; identical to SEQ ID NO: 868440

SEQ ID NO: 868443 - protein, 90 aa, Homo sapiens; identical to SEQ ID NO: 868432

SEQ ID NO: 868444 - protein, 234 aa, Homo sapiens
MRRHSETDVEEQTQELKTITQLQEQCRALQIQGVKENMDQNKATLALLRSNIRRGAQDWALAKKVVREKLRKYVFDRVNMHNLLIHLVRRRGQKLESMQLELDSLRSQPDASKEELRLLQIIRQLENNIEKTMIKIITSQNIHLLYLDLLDYLKTVSPAAREGRGSGAGIWEGRERPGAEPPRTRQGEGALPDHRLRRTPRHVENVFLNFIFGYSKKAYRGVYQNSSDFLARIK

SEQ ID NO: 868445 - protein, 118 aa, Homo sapiens; identical to SEQ ID NO: 868429

SEQ ID NO: 868446 - protein, 854 aa, Homo sapiens
MERPYTFKDFLLRPRSHKSRVKGFLRLKMAYMPKNGGQDEENSDQRDDMEHGWEVVDSNDSASQHQEELPPPPLPPGWEEKVDNLGRTYYVNHNNRTTQWHRPSLMDVSSESDNNIRQINQEAAHRRFRSRRHISEDLEPEPSEGGDVPEPWETISEEVNIAGDSLGLALPPPPASPGSRTSPQELSEELSRRLQITPDSNGEQFSSLIQREPSSRLRSCSVTDAVAEQGHLPPPSAPAGRARSSTVTGGEEPTPSVAYVHTTPGLPSGWEERKDAKGRTYYVNHNNRTTTWTRPIMQLAEDGASGSATNSNNHLIEPQIRRPRSLSSPTVTLSAPLEGAKDSPVRRAVKDTLSNPQSPQPSPYNSPKPQHKVTQSFLPPGWEMRIAPNGRPFFIDHNTKTTTWEDPRLKFPVHMRSKTSLNPNDLGPLPPGWEERIHLDGRTFYIDHNSKITQWEDPRLQNPAITGPAVPYSREFKQKYDYFRKKLKKPADIPNRFEMKLHRNNIFEESYRRIMSVKRPDVLKARLWIEFESEKGLDYGGVAREWFFLLSKEMFNPYYGLFEYSATDNYTLQINPNSGLCNEDHLSYFTFIGRVAGLAVFHGKLLDGFFIRPFYKMMLGKQITLNDMESVDSEYYNSLKWILENDPTELDLMFCIDEENFGQTYQVDLKPNGSEIMVTNENKREYIDLVIQWRFVNRVQKQMNAFLEGFTELLPIDLIKIFDENELELLMCGLGDVDVNDWRQHSIYKNGYCPNHPVIQWFWKAVLLMDAEKRIRLLQFVTGTSRVPMNGFAELYGSNGPQLFTIEQWGSPEKLPRAHTCFNRLDLPPYETFEDLREKLLMAVENAQGFEGVD

SEQ ID NO: 868447 - protein, 1051 aa, Homo sapiens
AGRRERRRGCRPVLGALSGAARPLVPQPSGRKRCRQRPGRALGHPHLPAPGRLPGRAVRRVGCWDRGDLEAEGRTGRPRRSTAAGSASDPARGAGSMADRARGAGLWTFRRRGESRILRVKVVSGIDLAKKDIFGASDPYVKLSLYVADENRELALVQTKTIKKTLNPKWNEEFYFRVNPSNHRLLFEVFDENRLTRDDFLGQVDVPLSHLPTEDPTMERPYTFKDFLLRPRSHKSRVKGFLRLKMAYMPKNGGQDEENSDQRDDMEHGWEVVDSNDSASQHQEELPPPPLPPGWEEKVDNLGRTYYVNHNNRTTQWHRPSLMDVSSESDNNIRQINQEAAHRRFRSRRHISEDLEPEPSEGGDVPEPWETISEEVNIAGDSLGLALPPPPASPGSRTSPQELSEELSRRLQITPDSNGEQFSSLIQREPSSRLRSCSVTDAVAEQGHLPPPSVAYVHTTPGLPSGWEERKDAKGRTYYVNHNNRTTTWTRPIMQLAEDGASGSATNSNNHLIEPQIRRPRSLSSPTVTLSAPLEGAKDSPVRRAVKDTLSNPQSPQPSPYNSPKPQHKVTQSFLPPGWEMRIAPNGRPFFIDHNTKTTTWEDPRLKFPVHMRSKTSLNPNDLGPLPPGWEERIHLDGRTFYIDHNSKITQWEDPRLQNPAITGPAVPYSREFKQKYDYFRKKLKKPADIPNRFEMKLHRNNIFEESYRRIMSVKRPDVLKARLWIEFESEKGLDYGGVAREWFFLLSKEMFNPYYGLFEYSATDNYTLQINPNSGLCNEDHLSYFTFIGRVAGLAVFHGKLLDGFFIRPFYKMMLGKQITLNDMESVDSEYYNSLKWILENDPTELDLMFCIDEENFGQTYQVDLKPNGSEIMVTNENKREYIDLVIQWRFVNRVQKQMNAFLEGFTELLPIDLIKIFDENELELLMCGLGDVDVNDWRQHSIYKNGYCPNHPVIQWFWKAVLLMDAEKRIRLLQFVTGTSRVPMNGFAELYGSNGPQLFTIEQWGSPEKLPRAHTCFNRLDLPPYETFEDLREKLLMAVENAQGFEGVD

SEQ ID NO: 868448 - protein, 834 aa, Homo sapiens
MERPYTFKDFLLRPRSHKSRVKGFLRLKMAYMPKNGGQDEENSDQRDDMEHGWEVVDSNDSASQHQEELPPPPLPPGWEEKVDNLGRTYYVNHNNRTTQWHRPSLMDVSSESDNNIRQINQEAAHRRFRSRRHISEDLEPEPSEGGDVPEPWETISEEVNIAGDSLGLALPPPPASPGSRTSPQELSEELSRRLQITPDSNGEQFSSLIQREPSSRLRSCSVTDAVAEQGHLPPPSVAYVHTTPGLPSGWEERKDAKGRTYYVNHNNRTTTWTRPIMQLAEDGASGSATNSNNHLIEPQIRRPRSLSSPTVTLSAPLEGAKDSPVRRAVKDTLSNPQSPQPSPYNSPKPQHKVTQSFLPPGWEMRIAPNGRPFFIDHNTKTTTWEDPRLKFPVHMRSKTSLNPNDLGPLPPGWEERIHLDGRTFYIDHNSKITQWEDPRLQNPAITGPAVPYSREFKQKYDYFRKKLKKPADIPNRFEMKLHRNNIFEESYRRIMSVKRPDVLKARLWIEFESEKGLDYGGVAREWFFLLSKEMFNPYYGLFEYSATDNYTLQINPNSGLCNEDHLSYFTFIGRVAGLAVFHGKLLDGFFIRPFYKMMLGKQITLNDMESVDSEYYNSLKWILENDPTELDLMFCIDEENFGQTYQVDLKPNGSEIMVTNENKREYIDLVIQWRFVNRVQKQMNAFLEGFTELLPIDLIKIFDENELELLMCGLGDVDVNDWRQHSIYKNGYCPNHPVIQWFWKAVLLMDAEKRIRLLQFVTGTSRVPMNGFAELYGSNGPQLFTIEQWGSPEKLPRAHTCFNRLDLPPYETFEDLREKLLMAVENAQGFEGVD

SEQ ID NO: 868449 - protein, 834 aa, Homo sapiens; identical to SEQ ID NO: 868448

SEQ ID NO: 868450 - protein, 834 aa, Homo sapiens; identical to SEQ ID NO: 868448

SEQ ID NO: 868451 - protein, 782 aa, Homo sapiens
MERPYTFKDFLLRPRSHKSRVKGFLRLKMAYMPKNGGQDEENSDQRDDMEHGWEVVDSNDSASQHQEELPPPPLPPGWEEKVDNLGRTYYVNHNNRTTQWHRPSLMDVSSESDNNIRQINQEAAHRRFRSRRHISEDLEPEPSEGGDVPEPWETISEEVNIAGDSLGLALPPPPASPGSRTSPQELSEELSRRLQITPDSNGEQFSSLIQREPSSRLRSCSVTDAVAEQGHLPPPSVAYVHTTPGLPSGWEERKDAKGRTYYVNHNNRTTTWTRPIMQLAEDGASGSATNSNNHLIEPQIRRPRSLSSPTVTLSAPLEGAKDSPVRRAVKDTLSNPQSPQPSPYNSPKPQHKVTQSFLPPGWEMRIAPNGRPFFIDHNTKTTTWEDPRLKFPVHMRSKTSLNPNDLGPLPPGWEERIHLDGRTFYIDHNSKITQWEDPRLQNPAITGPAVPYSREFKQKYDYFRKKLKKPADIPNRFEMKLHRNNIFEESYRRIMSVKRPDVLKARLWIEFESEKGLDYGGVAREWFFLLSKEMFNPYYGLFEYSATDNYTLQINPNSGLCNEDHLSYFTFIGRVAGLAVFHGKLLDGFFIRPFYKMMLGKQITLNDMESVDSEYYNSLKWILENDPTELDLMFCIDEENFGQTYQVDLKPNGSEIMVTNENKREYIDLVIQWRFVNRVQKQMNAFLEGFTELLPIDLIKIFDENELELLMCGLGDVDVNDWRQHSIYKNGYCPNHPVIQWFWKVTPGPSPSRCPPPEAGLRAVWRPPLWSDFRTDAGFGVC

SEQ ID NO: 868452 - protein, 263 aa, Homo sapiens
MERPYTFKDFLLRPRSHKSRVKGFLRLKMAYMPKNGGQDEENSDQRDDMEHGWEVVDSNDSASQHQEELPPPPLPPGWEEKVDNLGRTYYVNHNNRTTQWHRPSLMDVSSESDNNIRQINQEAAHRRFRSRRHISEDLEPEPSEGGDVPEPWETISEEVNIAGDSLGLALPPPPASPGSRTSPQELSEELSRRLQITPDSNGEQFSSLIQREPSSRLRSCSVTDAVAEQGHLPPPSAPAGRARSSTVTGGEEPTVMIHFIRHQ

SEQ ID NO: 868453 - protein, 1051 aa, Homo sapiens; identical to SEQ ID NO: 868447

SEQ ID NO: 868454 - protein, 834 aa, Homo sapiens; identical to SEQ ID NO: 868448

SEQ ID NO: 868455 - protein, 834 aa, Homo sapiens; identical to SEQ ID NO: 868448

SEQ ID NO: 868456 - protein, 750 aa, Homo sapiens
MERPYTFKDFLLRPRSHKSRVKGFLRLKMAYMPKNGGQDEENSDQRDDMEHGWEVVDSNDSASQHQEELPPPPLPPGWEEKVDNLGRTYYVNHNNRTTQWHRPSLMDVSSESDNNIRQINQEAAHRRFRSRRHISEDLEPEPSEGGDVPEPWETISEEVNIAGDSLGLALPPPPASPGSRTSPQELSEELSRRLQITPDSNGEQFSSLIQREPSSRLRSCSVTDAVAEQGHLPPGAKDSPVRRAVKDTLSNPQSPQPSPYNSPKPQHKVTQSFLPPGWEMRIAPNGRPFFIDHNTKTTTWEDPRLKFPVHMRSKTSLNPNDLGPLPPGWEERIHLDGRTFYIDHNSKITQWEDPRLQNPAITGPAVPYSREFKQKYDYFRKKLKKPADIPNRFEMKLHRNNIFEESYRRIMSVKRPDVLKARLWIEFESEKGLDYGGVAREWFFLLSKEMFNPYYGLFEYSATDNYTLQINPNSGLCNEDHLSYFTFIGRVAGLAVFHGKLLDGFFIRPFYKMMLGKQITLNDMESVDSEYYNSLKWILENDPTELDLMFCIDEENFGQTYQVDLKPNGSEIMVTNENKREYIDLVIQWRFVNRVQKQMNAFLEGFTELLPIDLIKIFDENELELLMCGLGDVDVNDWRQHSIYKNGYCPNHPVIQWFWKAVLLMDAEKRIRLLQFVTGTSRVPMNGFAELYGSNGPQLFTIEQWGSPEKLPRAHTCFNRLDLPPYETFEDLREKLLMAVENAQGFEGVD

SEQ ID NO: 868457 - protein, 653 aa, Homo sapiens
MERPYTFKDFLLRPRSHKSRVKGFLRLKMAYMPKNGGQDEENSDQRDDMEHGWEVVDSNDSASQHQEELPPPPLPPGWEEKVDNLGRTYYVNHNNRTTQWHRPSLMDVSSESDNNIRQINQEAAHRRFRSRRHISEDLEPEPSEGGDVPEPWETISEEVNIAGDSLGLALPPPPASPGSRTSPQELSEELSRRLQITPDSNGEQFSSLIQREPSSRLRSCSVTDAVAEQGHLPPPSVAYVHTTPGLPSGWEERKDAKGRTYYVNHNNRTTTWTRPIMQLAEDGASGSATNSNNHLIEPQIRRPRSLSSPTVTLSAPLEGAKDSPVRRAVKDTLSNPQSPQPSPYNSPKPQHKVTQSFLPPGWEMRIAPNGRPFFIDHNTKTTTWEDPRLKFPVHMRSKTSLNPNDLGPLPPGWEERIHLDGRTFYIDHNSKITQWEDPRLQNPAITGPAVPYSREFKQKYDYFRKKLKKPADIPNRFEMKLHRNNIFEESYRRIMSVKRPDVLKARLWIEFESEKGLDYGGVAREWFFLLSKEMFNPYYGLFEYSATDNYTLQINPNSGLCNEDHLSYFTFIGRVAGLAVFHGKLLDGFFIRPFYKMMLGKQITLNDMESVDSEYYNSLKWILENDPTELDLMFCIDEENFGQTSTGRYFSSS

SEQ ID NO: 868458 - protein, 955 aa, Homo sapiens
MATGLGEPVYGLSEDEGESRILRVKVVSGIDLAKKDIFGASDPYVKLSLYVADENRELALVQTKTIKKTLNPKWNEEFYFRVNPSNHRLLFEVFDENRLTRDDFLGQVDVPLSHLPTEDPTMERPYTFKDFLLRPRSHKSRVKGFLRLKMAYMPKNGGQDEENSDQRDDMEHGWEVVDSNDSASQHQEELPPPPLPPGWEEKVDNLGRTYYVNHNNRTTQWHRPSLMDVSSESDNNIRQINQEAAHRRFRSRRHISEDLEPEPSEGGDVPEPWETISEEVNIAGDSLGLALPPPPASPGSRTSPQELSEELSRRLQITPDSNGEQFSSLIQREPSSRLRSCSVTDAVAEQGHLPPPSVAYVHTTPGLPSGWEERKDAKGRTYYVNHNNRTTTWTRPIMQLAEDGASGSATNSNNHLIEPQIRRPRSLSSPTVTLSAPLEGAKDSPVRRAVKDTLSNPQSPQPSPYNSPKPQHKVTQSFLPPGWEMRIAPNGRPFFIDHNTKTTTWEDPRLKFPVHMRSKTSLNPNDLGPLPPGWEERIHLDGRTFYIDHNSKITQWEDPRLQNPAITGPAVPYSREFKQKYDYFRKKLKKPADIPNRFEMKLHRNNIFEESYRRIMSVKRPDVLKARLWIEFESEKGLDYGGVAREWFFLLSKEMFNPYYGLFEYSATDNYTLQINPNSGLCNEDHLSYFTFIGRVAGLAVFHGKLLDGFFIRPFYKMMLGKQITLNDMESVDSEYYNSLKWILENDPTELDLMFCIDEENFGQTYQVDLKPNGSEIMVTNENKREYIDLVIQWRFVNRVQKQMNAFLEGFTELLPIDLIKIFDENELELLMCGLGDVDVNDWRQHSIYKNGYCPNHPVIQWFWKAVLLMDAEKRIRLLQFVTGTSRVPMNGFAELYGSNGPQLFTIEQWGSPEKLPRAHTCFNRLDLPPYETFEDLREKLLMAVENAQGFEGVD

SEQ ID NO: 868459 - protein, 237 aa, Homo sapiens
MLTLLGANKAAHSLSHSLITPTLLGSLAFKKMQFRLWSQRGLGWKGINAWHSSALPTLLPTCSQVYQTQDIHKAKTPITSPPPECNTNALSALGTQAIPRGSSRQQPQAYSPDPEPFLFLFVPNLTQSAHPCCTAPEGAPRQAWKAPCRQGNRTYLHPRSTHLHLHHHSAASVPSVAVSTAPRAILLLLIDFFGLGHLDLTLKVKRTVVRPVGQTQGSDCPNTFTATNIKWWIRSIC

SEQ ID NO: 868460 - protein, 450 aa, Homo sapiens
MAADQRPKADTLALRQRLISSSCRLFFPEDPVKIVRAQGQYMYDEQGAEYIDCISNVAHVGHCHPLVVQAAHEQNQVLNTNSRYLHDNIVDYAQRLSETLPEQLCVFYFLNSGSEANDLALRLARHYTGHQDVVVLDHAYHGHLSSLIDISPYKFRNLDGQKEWVHVAPLPDTYRGPYREDHPNPAMAYANEVKRVVSSAQEKGRKIAAFFAESLPSVGGQIIPPAGYFSQVAEHIRKAGGVFVADEIQVGFGRVGKHFWAFQLQGKDFVPDIVTMGKSIGNGHPVACVAATQPVARAFEATGVEYFNTFGGSPVSCAVGLAVLNVLEKEQLQDHATSVGSFLMQLLGQQKIKHPIVGDVRGVGLFIGVDLIKDEATRTPATEEAAYLVSRLKENYVLLSTDGPGRNILKFKPPMCFSLDNARQVVAKLDAILTDMEEKVRSCETLRLQP

SEQ ID NO: 868461 - protein, 409 aa, Homo sapiens
MYDEQGAEYIDCISNVAHVGHCHPLVVQAAHEQNQVLNTNSRYLHDNIVDYAQRLSETLPEQLCVFYFLNSGSEANDLALRLARHYTGHQDVVVLDHAYHGHLSSLIDISPYKFRNLDGQKEWVHVAPLPDTYRGPYREDHPNPAMAYANEVKRVVSSAQEKGRKIAAFFAESLPSVGGQIIPPAGYFSQVAEHIRKAGGVFVADEIQVGFGRVGKHFWAFQLQGKDFVPDIVTMGKSIGNGHPVACVAATQPVARAFEATGVEYFNTFGGSPVSCAVGLAVLNVLEKEQLQDHATSVGSFLMQLLGQQKIKHPIVGDVRGVGLFIGVDLIKDEATRTPATEEAAYLVSRLKENYVLLSTDGPGRNILKFKPPMCFSLDNARQVVAKLDAILTDMEEKVRSCETLRLQP

SEQ ID NO: 868462 - protein, 264 aa, Homo sapiens
MAYANEVKRVVSSAQEKGRKIAAFFAESLPSVGGQIIPPAGYFSQVAEHIRKAGGVFVADEIQVGFGRVGKHFWAFQLQGKDFVPDIVTMGKSIGNGHPVACVAATQPVARAFEATGVEYFNTFGGSPVSCAVGLAVLNVLEKEQLQDHATSVGSFLMQLLGQQKIKHPIVGDVRGVGLFIGVDLIKDEATRTPATEEAAYLVSRLKENYVLLSTDGPGRNILKFKPPMCFSLDNARQVVAKLDAILTDMEEKVRSCETLRLQP

SEQ ID NO: 868463 - protein, 357 aa, Homo sapiens
MAADQRPKADTLALRQRLIRSEANDLALRLARHYTGHQDVVVLDHAYHGHLSSLIDISPYKFRNLDGQKEWVHVAPLPDTYRGPYREDHPNPAMAYANEVKRVVSSAQEKGRKIAAFFAESLPSVGGQIIPPAGYFSQVAEHIRKAGGVFVADEIQVGFGRVGKHFWAFQLQGKDFVPDIVTMGKSIGNGHPVACVAATQPVARAFEATGVEYFNTFGGSPVSCAVGLAVLNVLEKEQLQDHATSVGSFLMQLLGQQKIKHPIVGDVRGVGLFIGVDLIKDEATRTPATEEAAYLVSRLKENYVLLSTDGPGRNILKFKPPMCFSLDNARQVVAKLDAILTDMEEKVRSCETLRLQP

SEQ ID NO: 868464 - protein, 397 aa, Homo sapiens
MYDEQGAEYIDCISNVAHVGHCHPLVVQAAHEQNQVLNTNSRYLHDNIVDYAQRLSETLPEQLCVFYFLNSGSEANDLALRLARHYTGHQDVVVLDHAYHGHLSSLIDISPYKFRNLDGQKEWVHVAPLPDTYRGPYREDHPNPAMAYANEVKRVVSSAQEKGRRLQPSSLSLCPVWEGRSFPLLATSPKWQNEIQVGFGRVGKHFWAFQLQGKDFVPDIVTMGKSIGNGHPVACVAATQPVARAFEATGVEYFNTFGGSPVSCAVGLAVLNVLEKEQLQDHATSVGSFLMQLLGQQKIKHPIVGDVRGVGLFIGVDLIKDEATRTPATEEAAYLVSRLKENYVLLSTDGPGRNILKFKPPMCFSLDNARQVVAKLDAILTDMEEKVRSCETLRLQP

SEQ ID NO: 868465 - protein, 464 aa, Homo sapiens
MAADQRPKADTLALRQRLISHLFSGSGRLTRTHAEMSKEATEAENAFRNNPKFQRLVTPSASCFATTCGVERQVGHCHPLVVQAAHEQNQVLNTNSRYLHDNIVDYAQRLSETLPEQLCVFYFLNSGSEANDLALRLARHYTGHQDVVVLDHAYHGHLSSLIDISPYKFRNLDGQKEWVHVAPLPDTYRGPYREDHPNPAMAYANEVKRVVSSAQEKGRKIAAFFAESLPSVGGQIIPPAGYFSQVAEHIRKAGGVFVADEIQVGFGRVGKHFWAFQLQGKDFVPDIVTMGKSIGNGHPVACVAATQPVARAFEATGVEYFNTFGGSPVSCAVGLAVLNVLEKEQLQDHATSVGSFLMQLLGQQKIKHPIVGDVRGVGLFIGVDLIKDEATRTPATEEAAYLVSRLKENYVLLSTDGPGRNILKFKPPMCFSLDNARQVVAKLDAILTDMEEKVRSCETLRLQP

SEQ ID NO: 868466 - protein, 420 aa, Homo sapiens
MAADQRPKADTLALRQRLISSSCRLFFPEDPVKIVRAQGQYMYDEQGAEYIDCISNVAHVGHCHPLVVQAAHEQNQVLNTNSRYLHDNIVDYAQRLSETLPEQLCVFYFLNSGSEANDLALRLARHYTGHQDVVVLDHAYHGHLSSLIDISPYKFRNLDGQKEWVHVVCTAQLNNQIAAFFAESLPSVGGQIIPPAGYFSQVAEHIRKAGGVFVADEIQVGFGRVGKHFWAFQLQGKDFVPDIVTMGKSIGNGHPVACVAATQPVARAFEATGVEYFNTFGGSPVSCAVGLAVLNVLEKEQLQDHATSVGSFLMQLLGQQKIKHPIVGDVRGVGLFIGVDLIKDEATRTPATEEAAYLVSRLKENYVLLSTDGPGRNILKFKPPMCFSLDNARQVVAKLDAILTDMEEKVRSCETLRLQP

SEQ ID NO: 868467 - protein, 175 aa, Homo sapiens
MGKSIGNGHPVACVAATQPVARAFEATGVEYFNTFGGSPVSCAVGLAVLNVLEKEQLQDHATSVGSFLMQLLGQQKIKHPIVGDVRGVGLFIGVDLIKDEATRTPATEEAAYLVSRLKENYVLLSTDGPGRNILKFKPPMCFSLDNARQVVAKLDAILTDMEEKVRSCETLRLQP

SEQ ID NO: 868468 - protein, 399 aa, Homo sapiens
MAADQRPKADTLALRQRLISSSCRLFFPEDPVKIVRAQGQYMYDEQGAEYIDCISNVAHVGHCHPLVVQAAHEQNQVLNTNSRYLHDNIVDYAQRLSETLPEQLCVFYFLNSGSEANDLALRLARHYTGHQDVVVLDHAYHGHLSSLIDISPYKFRNLDGQKEWVHVAPLPDTYRGPYREDHPNPAMAYANEVKRVVSSAQEKGRKIAAFFAESLPSVGGQIIPPAGYFSQVAEHIRKAGGVFVADEIQVGFGRVGKHFWAFQLQGKDFVPDIVTMGKSIGNGHPVACVAATQPVARAFEATGVEYFNTFGGSPVSCAVGLAVLNVLEKEQLQDHATSVGSFLMQLLGQQKIKHPIVGDVRGVGLFIGVDLIKDEATRTPATEEAAYLVSRHGREGEKL

SEQ ID NO: 868469 - protein, 109 aa, Homo sapiens
MVPSTLEEPKEVHEGKAEAVSCWEASRAHHLGPSPPSGESCLYPKSIGKLSEALIRKRCLKGNGVQEWTLLGASSVARCKVMVAHTRIGSGDKQAGDYSVSGREHSNKS

SEQ ID NO: 868470 - protein, 450 aa, Homo sapiens; identical to SEQ ID NO: 868460

SEQ ID NO: 868471 - protein, 237 aa, Homo sapiens; identical to SEQ ID NO: 868459

SEQ ID NO: 868472 - protein, 102 aa, Homo sapiens
MPCDGGGPLPVGHCHPLVVQAAHEQNQVLNTNSRYLHDNIVDYAQRLSETLPEQLCVFYFLNSGGVGLFIGVDLIKDEATRTPATEEAAYLVSRHGREGEKL

SEQ ID NO: 868473 - protein, 118 aa, Homo sapiens
MYDEQGAEYIDCISNVAHVGHCHPLVVQAAHEQNQVLNTNSRYLHDNIVDYAQRLSETLPEQLCVFYFLNSGSEANDLALRLARHYTGHQDVVVLDQYSATHSPTVPRSLAHRLLGDP

SEQ ID NO: 868474 - protein, 132 aa, Homo sapiens
NHSKHTTTWILNNVLLSDFWVNNKIKAEIKKLFGTNENKETMYQNLWEATKAVLRGKFIALNAHIIKEHVTHIHPRSSCLVKGITTYICSRQKPHAPQSCINPASSISMMPLNSLHLSISMATTCLEGMLLS

SEQ ID NO: 868475 - protein, 175 aa, Homo sapiens; identical to SEQ ID NO: 868467

SEQ ID NO: 868476 - protein, 409 aa, Homo sapiens; identical to SEQ ID NO: 868461

SEQ ID NO: 868477 - protein, 423 aa, Homo sapiens
MYDEQGAEYIDCISNVAHVGHCHPLVVQAAHEQNQVLNTNSRYLHDNIVDYAQRLSETLPEQLCVFYFLNSGSEANDLALRLARHYTGHQDVVVLDHAYHGHLSSLIDISPYKFRNLDGQKEWVHVVCTAQLNNSDMLSSLGGGIITLVAMWRMDWKRHSVRRPLQESKEETGKSAGEQIAAFFAESLPSVGGQIIPPAGYFSQVAEHIRKAGGVFVADEIQVGFGRVGKHFWAFQLQGKDFVPDIVTMGKSIGNGHPVACVAATQPVARAFEATGVEYFNTFGGSPVSCAVGLAVLNVLEKEQLQDHATSVGSFLMQLLGQQKIKHPIVGDVRGVGLFIGVDLIKDEATRTPATEEAAYLVSRLKENYVLLSTDGPGRNILKFKPPMCFSLDNARQVVAKLDAILTDMEEKVRSCETLRLQP

SEQ ID NO: 868478 - protein, 175 aa, Homo sapiens; identical to SEQ ID NO: 868467

SEQ ID NO: 868479 - protein, 322 aa, Homo sapiens
MAADQRPKADTLALRQRLISSSCRLFFPEDPVKIVRAQGQYMYDEQGAEYIDCISNVAHVGHCHPLVVQAAHEQNQVLNTNSRYLHDNIVDYAQRLSETLPEQLCVFYFLNSGSEANDLALRLARHYTGHQDVVVLDHAYHGHLSSLIDISPYKFRNLDGQKEWVHVAPLPDTYRGPYREDHPNPAMAYANEVKRVVSSAQEKGRKIAAFFAESLPSVGGQIIPPAGYFSQVAEHIRKAGGVFVADEIQVGFGRVGKHFWAFQLQGKDFVPDIVTMGKSIGNGHPVACVAATQPVARAFEATGVEYFNTGCWALHWCGSDQR

SEQ ID NO: 868480 - protein, 109 aa, Homo sapiens; identical to SEQ ID NO: 868469

SEQ ID NO: 868481 - protein, 109 aa, Homo sapiens; identical to SEQ ID NO: 868469

SEQ ID NO: 868482 - protein, 450 aa, Homo sapiens; identical to SEQ ID NO: 868460

SEQ ID NO: 868483 - protein, 37 aa, Homo sapiens
MSKEATEAENCFQKQSEVSATCYPICFLLCNHLWSGE

SEQ ID NO: 868484 - protein, 131 aa, Homo sapiens
MAADQRPKADTLALRQRLISSSCRLFFPEDPVKIVRAQGQYMYDEQGAEYIDCISNVAHVGHCHPLVVQAAHEQNQVLNTNSRYLHDNIVDYAQRLSETLPEQLCVFYFLNSGDGPTPYPARRNAAVMKLP

SEQ ID NO: 868485 - protein, 102 aa, Homo sapiens
ARASDMFFVPGSVWGQPSVLRCGAGRPECLGEGAAPGSCHQCRQLPDAAPRAAKNQTSHRRGCQVRLWGQQSPPTCQGPVWYHFLHLLTTWDGGVMSALKRN

SEQ ID NO: 868486 - protein, 143 aa, Homo sapiens [sequence omitted]

SEQ ID NO: 868487 - protein, 306 aa, Homo sapiens
MGERLLESKKDHQHGEILTQVPDDMLKKKTPRVKSCGEVSVGHASLNRHHRADTGHKPYEYQEYGQKPYKCTYCKKAFSDLPYFRTHEWAHTGGKPYDCEECGKSFISRSSIRRHRIMHSGDGPYKCNFCGKALMCLSLYLIHKRTHTGEKPYECKQCGKAFSHSGSLRIHERTHTGEKPYECSECGKAFHSSTCLHAHKITHTGEKPYECKQCGKAFVSFNSVRYHERTHTGEKPYECKQCGKAFRSASHLRTHGRTHTGEKPYECKQCGKAFGCASSVKIHERTHTGEKPCSSNTSKGQGEKIA

SEQ ID NO: 868488 - protein, 238 aa, Homo sapiens
MALTVDVAGPAPWGFRITGGRDFHTPIMVTKVAERGKAKDADLRPGDIIVAINGESAEGMLHAEAQSKIRQSPSPLRLQLDRSQATSPGQTNGDSSLEVLATRFQGSVRTYTESQSSLRSSYSSPTSLSPRAGSPFSPPPSSSSLTGEAAISRRPASAALATRRCWCCRLPRALVPPGPAWTRKGEASSWTRTRKSSRCCRKIARDGRPPDSPAPFGSCRKPWRLRREVARQPSCPAH

SEQ ID NO: 868489 - protein, 104 aa, Homo sapiens
RLQALEAGREDWGLSELGKKAGVPASRALATPPKLHTCEKCSTSIANQAVRIQEGRYRHPGCYTCADCGLNLKMRGHFWVGDELYCEKHARQRYSAPATLSSRA

SEQ ID NO: 868490 - protein, 739 aa, Homo sapiens
ESGRRQRERWRLPAFPPSRAWAPSRTGERQPGERAHLRLSARPALPGAGLLSAPLSARNPGLVRGPAPWSLASAGAPPRAALSPAGALLLQPPARRVLCPRSEGGSRTGRAGPSGWAPPRGARSAESTDRLKGMALTVDVAGPAPWGFRITGGRDFHTPIMVTKVAERGKAKDADLRPGDIIVAINGESAEGMLHAEAQSKIRQSPSPLRLQLDRSQATSPGQTNGDSSLEVLATRFQGSVRTYTESQSSLRSSYSSPTSLSPRAGSPFSPPPSSSSLTGEAAISRSFQSLACSPGLPAADRLSYSGRPGSRQAGLGRAGDSAVLVLPPSPGPRSSRPSMDSEGGSLLLDEDSEVFKMLQENREGRAAPRQSSSFRLLQEALEAEERDGAGEGLARGCIVPGVTSTYRRIPDAAHGCSSWERGDKFRGVGREALFLKLASRDSGVEMAVGDSPLAALPGLSQDSLDFESSGSSEPPAQVGRLLASQKLGEVLERSRRLPTAPTSLSGQHRSLRLASKPEREVPLGAGQQESMEADTDLEAGLEEEAVGGLGPGAWACLPGQGLRYLEHLCLVLEQMARLQQLYLQLRIQRPPGDPGEEESTRAPLPSPLHTPGNRGQGPWELLSQTEHTGAKAASPPKVEVPSANPPRLPETPVEPTYHLPSSQGHKRDISHWDKVKVLLNRICRRSHHHPEPPAPPDGSDPRIESRDLPERPQCRPHRKTFMPSLVVKKQRAKNLSVG

SEQ ID NO: 868491 - protein, 329 aa, Homo sapiens
MALTVDVAGPAPWGFRITGGRDFHTPIMVTKVAERGKAKDADLRPGDIIVAINGESAEGMLHAEAQSKIRQSPSPLRLQLDRSQATSPGQTNGDSSLEVLATRFQGSVRTYTESQSSLRSSYSSPTSLSPRAGSPFSPPPSSSSLTGEAAISRSFQSLACSPGLPAADRLSYSGRPGSRQAGLGRAGDSAVLVLPPSPGPRSSRPSMDSEGGSLLLDEDSEVFKMLQENREGRAAPRQSSSFRLLQEALEAEERGGTPAFLPSSLSPQSSLPASRALATPPKLHTCEKCSTSIAWGWRGPGTGLHSAWSHQHLQTDPRRCPRVLILGER

SEQ ID NO: 868492 - protein, 346 aa, Homo sapiens
TRGGSMALRSPERGLPGMALTVDVAGPAPWGFRITGGRDFHTPIMVTKVAERGKAKDADLRPGDIIVAINGESAEGMLHAEAQSKIRQSPSPLRLQLDRSQATSPGQTNGDSSLEVLATRFQGSVRTYTESQSSLRSSYSSPTSLSPRAGSPFSPPPSSSSLTGEAAISRSFQSLACSPGLPAADRLSYSGRPGSRQAGLGRAGDSAVLVLPPSPGPRSSRPSMDSEGGSLLLDEDSEVFKMLQENREGRAAPRQSSSFRLLQEALEAEERGGTPAFLPSSLSPQSSLPASRALATPPKLHTCEKCSTSIAWGWRGPGTGLHSAWSHQHLQTDPRRCPRVLILGER

SEQ ID NO: 868493 - protein, 411 aa, Homo sapiens
ESGRRQRERWRLPAFPPSRAWAPSRTGERQPGERAHLRLSARPALPGAGLLSAPLSARNPGLVRGPAPWSLASAGAPPRAALSPAGALLLQPPARRVLCPRSEGGSRTGRAGPSGWAPPRGARSAESTDRLKGMALTVDVAGPAPWGFRITGGRDFHTPIMVTKVAERGKAKDADLRPGDIIVAINGESAEGMLHAEAQSKIRQSPSPLRLQLDRSQATSPGQTNGDSSLEVLATRFQGSVRTYTESQSSLRSSYSSPTSLSPRAGSPFSPPPSSSSLTGEAAISRSFQSLACSPGLPAADRLSYSGRPGSRQAGLGRAGDSAVLVLPPSPGPRSSRPSMDSEGGSLLLDEDSEVFKMLQENREGRAAPRQSSSFRLLQEALEAEERGTRLCASRRAGTATPAATPVPTVG

SEQ ID NO: 868494 - protein, 462 aa, Homo sapiens
ESGRRQRERWRLPAFPPSRAWAPSRTGERQPGERAHLRLSARPALPGAGLLSAPLSARNPGLVRGPAPWSLASAGAPPRAALSPAGALLLQPPARRVLCPRSEGGSRTGRAGPSGWAPPRGARSAESTDRLKGMALTVDVAGPAPWGFRITGGRDFHTPIMVTKVAERGKAKDADLRPGDIIVAINGESAEGMLHAEAQSKIRQSPSPLRLQLDRSQATSPGQTNGDSSLEVLATRFQGSVRTYTESQSSLRSSYSSPTSLSPRAGSPFSPPPSSSSLTGEAAISRSFQSLACSPGLPAADRLSYSGRPGSRQAGLGRAGDSAVLVLPPSPGPRSSRPSMDSEGGSLLLDEDSEVFKMLQENREGRAAPRQSSSFRLLQEALEAEERGGTPAFLPSSLSPQSSLPASRALATPPKLHTCEKCSTSIAWGWRGPGTGLHSAWSHQHLQTDPRRCPRVLILGER

SEQ ID NO: 868495 - protein, 462 aa, Homo sapiens; identical to SEQ ID NO: 868494

SEQ ID NO: 868496 - protein, 462 aa, Homo sapiens; identical to SEQ ID NO: 868494

SEQ ID NO: 868497 - protein, 444 aa, Homo sapiens
ESGRRQRERWRLPAFPPSRAWAPSRTGERQPGERAHLRLSARPALPGAGLLSAPLSARNPGLVRGPAPWSLASAGAPPRAALSPAGALLLQPPARRVLCPRSEGGSRTGRAGPSGWAPPRGARSAESTDRLKGMALTVDVAGPAPWGFRITGGRDFHTPIMVTKVAERGKAKDADLRPGDIIVAINGESAEGMLHAEAQSKIRQSPSPLRLQLDRSQATSPGQTNGDSSLEVLATRFQGSVRTYTESQSSLRSSYSSPTSLSPRAGSPFSPPPSSSSLTGEAAISRSFQSLACSPGLPAADRLSYSGRPGSRQAGLGRAGDSAVLVLPPSPGPRSSRPSMDSEGGSLLLDEDSEVFKMLQENREGRAAPRQSSSFRLLQEALEAEERGGTPAFLPSSLSPQSSLPASRALATPSPCQASPLQDWHCTSLRWPLPLINLCVRGSK

SEQ ID NO: 868498 - protein, 485 aa, Homo sapiens
ESGRRQRERWRLPAFPPSRAWAPSRTGERQPGERAHLRLSARPALPGAGLLSAPLSARNPGLVRGPAPWSLASAGAPPRAALSPAGALLLQPPARRVLCPRSEGGSRTGRAGPSGWAPPRGARSAESTDRLKGMALTVDVAGPAPWGFRITGGRDFHTPIMVTKVAERGKAKDADLRPGDIIVAINGESAEGMLHAEAQSKIRQSPSPLRLQLDRSQATSPGQTNGDSSLEVLATRFQGSVRTYTESQSSLRSSYSSPTSLSPRAGSPFSPPPSSSSLTGEAAISRSFQSLACSPGLPAADRLSYSGRPGSRQAGLGRAGDSAVLVLPPSPGPRSSRPSMDSEGGSLLLDEDSEVFKMLQENREGRAAPRQSSSFRLLQEALEAEERGGTPAFLPSSLSPQSSLPASRALATPPKLHTCEKCSTSIANQAVRIQEGRYRHPGCYTCADCGLNLKMRGHFWVGDELYCEKHARQRYSAPATLSSRA

SEQ ID NO: 868499 - protein, 462 aa, Homo sapiens; identical to SEQ ID NO: 868494

SEQ ID NO: 868500 - protein, 365 aa, Homo sapiens
MMGRRRAFAVDGRDGAGEGLARGCIVPGVTSTYRRIPDAAHGCSSWERGDKFRGVGREALFLKLASRDSGVEMAVGDSPLAALPGLSQDSLDFESSGSSEPPAQVGRLLASQKLGEVLERSRRLPTAPTSLSGQHRSLRLASKPEREVPLGAGQQESMEADTDLEAGLEEEAVGGLGPGAWACLPGQGLRYLEHLCLVLEQMARLQQLYLQLRIQRPPGDPGEEESTRAPLPSPLHTPGNRGQGPWELLSQTEHTGAKAASPPKVEVPSANPPRLPETPVEPTYHLPSSQGHKRDISHWDKVKVLLNRICRRSHHHPEPPAPPDGSDPRIESRDLPERPQCRPHRKTFMPSLVVKKQRAKNLSVG

SEQ ID NO: 868501 - protein, 449 aa, Homo sapiens
GKSGRRPSKGLMDVACQGFAYHTAQSTGSLSLTTVAKGIPSTHLPDSWGHIRAARGCPVTALPHCSGTLLPGAVLPAFRNAGGVGGGLPSLTLTLHADGAGEGLARGCIVPGVTSTYRRIPDAAHGCSSWERGDKFRGVGREALFLKLASRDSGVEMAVGDSPLAALPGLSQDSLDFESSGSSEPPAQVGRLLASQKLGEVLERSRRLPTAPTSLSGQHRSLRLASKPEREVPLGAGQQESMEADTDLEAGLEEEAVGGLGPGAWACLPGQGLRYLEHLCLVLEQMARLQQLYLQLRIQRPPGDPGEEESTRAPLPSPLHTPGNRGQGPWELLSQTEHTGAKAASPPKVEVPSANPPRLPETPVEPTYHLPSSQGHKRDISHWDKVKVLLNRICRRSHHHPEPPAPPDGSDPRIESRDLPERPQCRPHRKTFMPSLVVKKQRAKNLSVG

SEQ ID NO: 868502 - protein, 366 aa, Homo sapiens
MALTVDVAGPAPWGFRITGGRDFHTPIMVTKVAERGKAKDADLRPGDIIVAINGESAEGMLHAEAQSKIRQSPSPLRLQLDRSQATSPGQTNGDSSLEVLATRFQGSVRTYTESQSSLRSSYSSPTSLSPRAGSPFSPPPSSSSLTGEAAISRSFQSLACSPGLPAADRLSYSGRPGSRQAGLGRAGDSAVLVLPPSPGPRSSRPSMDSEGGSLLLDEDSEVFKMLQENREGRAAPRQSSSFRLLQEALEAEERGGTPAFLPSSLSPQSSLPASRALATPPKLHTCEKCSTSIANQAVRIQEGRYRHPGCYTCADCGLNLKMRGHFWEDACAMEGMRLSLEALEGMVEGAKRRDRRKTRRPIQPSW

SEQ ID NO: 868503 - protein, 462 aa, Homo sapiens; identical to SEQ ID NO: 868494

SEQ ID NO: 868504 - protein, 485 aa, Homo sapiens; identical to SEQ ID NO: 868498

SEQ ID NO: 868505 - protein, 459 aa, Homo sapiens
ESGRRQRERWRLPAFPPSRAWAPSRTGERQPGERAHLRLSARPALPGAGLLSAPLSARNPGLVRGPAPWSLASAGAPPRAALSPAGALLLQPPARRVLCPRSEGGSRTGRAGPSGWAPPRGARSAESTDRLKGMALTVDVAGPAPWGFRITGGRDFHTPIMVTKVAERGKAKDADLRPGDIIVAINGESAEGMLHAEAQSKIRQSPSPLRLQLDRSQATSPGQTNGDSSLEVLATRFQGSVRTYTESQSSLRSSYSSPTSLSPRAGSPFSPPPSSSSLTGEAAISRSFQSLACSPGLPAADRCPTQAALEADSMDSEGGSLLLDEDSEVFKMLQENREGRAAPRQSSSFRLLQEALEAEERGGTPAFLPSSLSPQSSLPASRALATPPKLHTCEKCSTSIANQAVRIQEGRYRHPGCYTCADCGLNLKMRGHFWVGDELYCEKHARQRYSAPATLSSRA

SEQ ID NO: 868506 - protein, 78 aa, Homo sapiens
MENTPKMQPPLLSMQALCLTAAGNTVTWRSHSPGLSEDGHMLCILPLHGLPQLSPQISLHKPSLPLYTSSPSVVPRRT

SEQ ID NO: 868507 - protein, 117 aa, Homo sapiens
KLAAAAPISPWTMAATIQAMERKIESQAAHLLSLEGQTGMAEKKLADCEKTAVEFGNQLEGKWAVLGTLLQEYGLLQRRLENVENLLHNRNFWILRLPPGSKGESPKVPMTFDDVAV

SEQ ID NO: 868508 - protein, 117 aa, Homo sapiens; identical to SEQ ID NO: 868507

SEQ ID NO: 868509 - protein, 117 aa, Homo sapiens; identical to SEQ ID NO: 868507

SEQ ID NO: 868510 - protein, 117 aa, Homo sapiens; identical to SEQ ID NO: 868507

SEQ ID NO: 868511 - protein, 117 aa, Homo sapiens; identical to SEQ ID NO: 868507

SEQ ID NO: 868512 - protein, 117 aa, Homo sapiens; identical to SEQ ID NO: 868507

SEQ ID NO: 868513 - protein, 117 aa, Homo sapiens; identical to SEQ ID NO: 868507

SEQ ID NO: 868514 - protein, 117 aa, Homo sapiens; identical to SEQ ID NO: 868507

SEQ ID NO: 868515 - protein, 209 aa, Homo sapiens
NCGRRRAGAVREQRRQRQGRAGAACGEHREAGPAWGRAQQRRRLYLGRGGQRRAMEEAAAAPISPWTMAATIQAMERKIESQAAHLLSLEGQTGMAEKKLADCEKTAVEFGNQLEGKWAVLGTLLQEYGLLQRRLENVENLLHNRNFWILRLPPGSKGESPKTTPSPSPRSSPRLNKGRSPATGAALTPRFQMFLWTPVQMQKLRPSRD

SEQ ID NO: 868516 - protein, 117 aa, Homo sapiens; identical to SEQ ID NO: 868507

SEQ ID NO: 868517 - protein, 117 aa, Homo sapiens; identical to SEQ ID NO: 868507

SEQ ID NO: 868518 - protein, 117 aa, Homo sapiens; identical to SEQ ID NO: 868507

SEQ ID NO: 868519 - protein, 74 aa, Homo sapiens
KLAAAAPISPWTMAATIQAMERKIESQAAHLLSLEGQTGMAEKKLADCEKTAVEFGNQLEGKWAVLGTLNALAQ

SEQ ID NO: 868520 - protein, 371 aa, Homo sapiens
  misc_feature (1)..(3): Xaa can be any naturally occurring amino acid
  misc_feature (131)..(131): Xaa can be any naturally occurring amino acid
  misc_feature (134)..(134): Xaa can be any naturally occurring amino acid
XXXRRRQRPRPPPRTLLFPGVRRALPPSHLKRTIAGKSFAFCDSLKRSSKSGEKFPAERATALDPGVAAGGMGLQAGAGRPGAGALRGRAGASCCRCRCRCRCRCSCCCCYARAPAGLRLQGEAEAPTLYXWKXGPWGRCMGDECGPGGIQTRAVWCAHVEGWTTLHTNCKQAERPNNQQNCFKVCDWHKELYDWRLGPWNQCQPVISKSLEKPLECIKGEEGIQVREIACIQKDKDIPAEDIICEYFEPKPLLEQACLIPCQQDCIVSEFSAWSECSKTCGSGLQHRTRHVVAPPQFGGSGCPNLTEFQVCQSSPCEAEELRYSLHVGPWSTCSMPHSRQVRQARRRGKNKEREKDRSKGVKDPEARELI

SEQ ID NO: 868521 - protein, 269 aa, Homo sapiens
MTTIRLTARGAPAAAQNQFLMYLAVIGKASGESPWGRCMGDECGPGGIQTRAVWCAHVEGWTTLHTNCKQAERPNNQQNCFKVCDWHKELYDWRLGPWNQCQPVISKSLEKPLECIKGEEGIQVREIACIQKDKDIPAEDIICEYFEPKPLLEQACLIPCQQDCIVSEFSAWSECSKTCGSGLQHRTRHVVAPPQFGGSGCPNLTEFQVCQSSPCEAEELRYSLHVGPWSTCSMPHSRQVRQARRRGKNKEREKDRSKGVKDPEARELI

SEQ ID NO: 868522 - protein, 104 aa, Homo sapiens
MTTIRLTARGAPAAAQNQFLMYLAVIGKASEKVHGADVWEMNVVPEASKRGLCGVLMWRDGLHCILTVSRPRDPITSSSRGTYQDRVHIHVKGQPPVQEHLGVI

SEQ ID NO: 868523 - protein, 114 aa, Homo sapiens
PGAVCVCVSVYLARRYGPHQTGAPQSRLESGSVTQAGVQSRESQLTATYASQVKRFSCLGLPRNWNHRRAPLRPRIFTFNCTVKHRLLSQTAWSELWCHHLVSSGLNVLTEWSS

SEQ ID NO: 868524 - protein, 133 aa, Homo sapiens
MNHTVQTFFSPVNSGQPPNYEMLKEEHEVAVLGAPHNPAPPTSTVIHIRSETSVPDHVVWSLFNTLFMNPCCLGFIAFAYSVKSRDRKMVGDVTGAQAYASTAKCLNIWALILGILMTILLIVIPVLIFQAHR

SEQ ID NO: 868525 - protein, 133 aa, Homo sapiens; identical to SEQ ID NO: 868524

SEQ ID NO: 868526 - protein, 133 aa, Homo sapiens; identical to SEQ ID NO: 868524

SEQ ID NO: 868527 - protein, 129 aa, Homo sapiens
ASGSCQVLLTFKHVQFWGPFLCFWIQMVVPKGALSLLIKWEAKKQVSFCAEIPGVGRLCCRRHGATASHRPRAVCLCLMNVLHGLCGHFSLRTLSCALADGRFAFGHETEHSAGTITLFLETYLGNKNL

SEQ ID NO: 868528 - protein, 867 aa, Homo sapiens
LKVRGKRVNARLQRAATYAWCLLSPAIGDQSRPLCSRKGLSGGGSGGGPPWRARSQPGHCGSLKPKSSCCFCTPPVPPSCAGPLRGIISPKTGMERPLCSHLCSCLAMLALLSPLSLAQYDSWPHYPEYFQQPAPEYHQPQAPANVAKIQLRLAGQKRKHSEGRVEVYYDGQWGTVCDDDFSIHAAHVVCRELGYVEAKSWTASSSYGKGEGPIWLDNLHCTGNEATLAACTSNGWGVTDCKHTEDVGVVCSDKRIPGFKFDNSLINQIENLNIQVEDIRIRAILSTYRKRTPVMEGYVEVKEGKTWKQICDKHWTAKNSRVVCGMFGFPGERTYNTKVYKMFASRRKQRYWPFSMDCTGTEAHISSCKLGPQVSLDPMKNVTCENGLPAVVSCVPGQVFSPDGPSRFRKAYKPEQPLVRLRGGAYIGEGRVEVLKNGEWGTVCDDKWDLVSASVVCRELGFGSAKEAVTGSRLGQGIGPIHLNEIQCTGNEKSIIDCKFNAESQGCNHEEDAGVRCNTPAMGLQKKLRLNGGRNPYEGRVEVLVERNGSLVWGMVCGQNWGIVEAMVVCRQLGLGFASNAFQETWYWHGDVNSNKVVMSGVKCSGTELSLAHCRHDGEDVACPQGGVQYGAGVACSETAPDLVLNAEMVQQTTYLEDRPMFLLQCAMEENCLSASAAQTDPTTGYRRLLRFSSQIHNNGQSDFRPKNGRHAWIWHDCHRHYHSMEVFTHYDLLNLNGTKVAEGHKASFCLEDTECEGDIQKNYECANFGDQGITMGCWDMYRHDIDCQWVDITDVPPGDYLFQVVINPNFEVAESDYSNNIMKCRSRYDGHRIWMYNCHIGGSFSEETEKKFEHFSGLLNNQLSPQ

SEQ ID NO: 868529 - protein, 867 aa, Homo sapiens; identical to SEQ ID NO: 868528

SEQ ID NO: 868530 - protein, 815 aa, Homo sapiens
MEASKVLDKSKAAESSCCFCTPPVPPSCAGPLRGIISPKTGMERPLCSHLCSCLAMLALLSPLSLAQYDSWPHYPEYFQQPAPEYHQPQAPANVAKIQLRLAGQKRKHSEGRVEVYYDGQWGTVCDDDFSIHAAHVVCRELGYVEAKSWTASSSYGKGEGPIWLDNLHCTGNEATLAACTSNGWGVTDCKHTEDVGVVCSDKRIPGFKFDNSLINQIENLNIQVEDIRIRAILSTYRKRTPVMEGYVEVKEGKTWKQICDKHWTAKNSRVVCGMFGFPGERTYNTKVYKMFASRRKQRYWPFSMDCTGTEAHISSCKLGPQVSLDPMKNVTCENGLPAVVSCVPGQVFSPDGPSRFRKAYKPEQPLVRLRGGAYIGEGRVEVLKNGEWGTVCDDKWDLVSASVVCRELGFGSAKEAVTGSRLGQGIGPIHLNEIQCTGNEKSIIDCKFNAESQGCNHEEDAGVRCNTPAMGLQKKLRLNGGRNPYEGRVEVLVERNGSLVWGMVCGQNWGIVEAMVVCRQLGLGFASNAFQETWYWHGDVNSNKVVMSGVKCSGTELSLAHCRHDGEDVACPQGGVQYGAGVACSETAPDLVLNAEMVQQTTYLEDRPMFLLQCAMEENCLSASAAQTDPTTGYRRLLRFSSQIHNNGQSDFRPKNGRHAWIWHDCHRHYHSMEVFTHYDLLNLNGTKVAEGHKASFCLEDTECEGDIQKNYECANFGDQGITMGCWDMYRHDIDCQWVDITDVPPGDYLFQVVINPNFEVAESDYSNNIMKCRSRYDGHRIWMYNCHIGGSFSEETEKKFEHFSGLLNNQLSPQ

SEQ ID NO: 868531 - protein, 907 aa, Homo sapiens
LKVRGKRVNARLQRAATYAWCLLSPAIGDQSRPLCSRKGLSGGGSGGGPPWRARSQPGHCGSLKPSSELPVSPVPGGCLQLCLASQPVDHCRGIGEYLPGESRDKKSSCCFCTPPVPPSCAGPLRGIISPKTGMERPLCSHLCSCLAMLALLSPLSLAQYDSWPHYPEYFQQPAPEYHQPQAPANVAKIQLRLAGQKRKHSEGRVEVYYDGQWGTVCDDDFSIHAAHVVCRELGYVEAKSWTASSSYGKGEGPIWLDNLHCTGNEATLAACTSNGWGVTDCKHTEDVGVVCSDKRIPGFKFDNSLINQIENLNIQVEDIRIRAILSTYRKRTPVMEGYVEVKEGKTWKQICDKHWTAKNSRVVCGMFGFPGERTYNTKVYKMFASRRKQRYWPFSMDCTGTEAHISSCKLGPQVSLDPMKNVTCENGLPAVVSCVPGQVFSPDGPSRFRKAYKPEQPLVRLRGGAYIGEGRVEVLKNGEWGTVCDDKWDLVSASVVCRELGFGSAKEAVTGSRLGQGIGPIHLNEIQCTGNEKSIIDCKFNAESQGCNHEEDAGVRCNTPAMGLQKKLRLNGGRNPYEGRVEVLVERNGSLVWGMVCGQNWGIVEAMVVCRQLGLGFASNAFQETWYWHGDVNSNKVVMSGVKCSGTELSLAHCRHDGEDVACPQGGVQYGAGVACSETAPDLVLNAEMVQQTTYLEDRPMFLLQCAMEENCLSASAAQTDPTTGYRRLLRFSSQIHNNGQSDFRPKNGRHAWIWHDCHRHYHSMEVFTHYDLLNLNGTKVAEGHKASFCLEDTECEGDIQKNYECANFGDQGITMGCWDMYRHDIDCQWVDITDVPPGDYLFQVVINPNFEVAESDYSNNIMKCRSRYDGHRIWMYNCHIGGSFSEETEKKFEHFSGLLNNQLSPQ

SEQ ID NO: 868532 - protein, 867 aa, Homo sapiens; identical to SEQ ID NO: 868528

SEQ ID NO: 868533 - protein, 867 aa, Homo sapiens; identical to SEQ ID NO: 868528

SEQ ID NO: 868534 - protein, 874 aa, Homo sapiens
LKVRGKRVNARLQRAATYAWCLLSPAIGDQSRPLCSRKGLSGGGSGGGPPWRARSQPGHCGSLKPKSSCCFCTPPVPPSCAGPLRGIISPKTGMERPLCSHLCSCLAMLALLSPLSLAQYDSWPHYPEYFQQPAPEYHQPQAPANVAKIQLRLAGQKRKHSEGRVEVYYDGQWGTVCDDDFSIHAAHVVCRELGYVEAKSWTASSSYGKGEGPIWLDNLHCTGNEATLAACTSNGWGVTDCKHTEDVGVVCSDKRIPGFKFDNSLINQIENLNIQVEDIRIRAILSTYRKRTPVMEGYVEVKEGKTWKQICDKHWTAKNSRVVCGMFGFPGERTYNTKVYKMFASRRKQRYWPFSMDCTGTEAHISSCKLGPQVSLDPMKNVTCENGLPAVVSCVPGQVFSPDGPSRFRKAYKPEQDRVSLQQPLVRLRGGAYIGEGRVEVLKNGEWGTVCDDKWDLVSASVVCRELGFGSAKEAVTGSRLGQGIGPIHLNEIQCTGNEKSIIDCKFNAESQGCNHEEDAGVRCNTPAMGLQKKLRLNGGRNPYEGRVEVLVERNGSLVWGMVCGQNWGIVEAMVVCRQLGLGFASNAFQETWYWHGDVNSNKVVMSGVKCSGTELSLAHCRHDGEDVACPQGGVQYGAGVACSETAPDLVLNAEMVQQTTYLEDRPMFLLQCAMEENCLSASAAQTDPTTGYRRLLRFSSQIHNNGQSDFRPKNGRHAWIWHDCHRHYHSMEVFTHYDLLNLNGTKVAEGHKASFCLEDTECEGDIQKNYECANFGDQGITMGCWDMYRHDIDCQWVDITDVPPGDYLFQVVINPNFEVAESDYSNNIMKCRSRYDGHRIWMYNCHIGGSFSEETEKKFEHFSGLLNNQLSPQ

SEQ ID NO: 868535 - protein, 771 aa, Homo sapiens
LKVRGKRVNARLQRAATYAWCLLSPAIGDQSRPLCSRKGLSGGGSGGGPPWRARSQPGHCGSLKPKSSCCFCTPPVPPSCAGPLRGIISPKTGMERPLCSHLCSCLAMLALLSPLSLAQYDSWPHYPEYFQQPAPEYHQPQAPANVAKIQLRLAGQKRKHSEGRVEVYYDGQWGTVCDDDFSIHAAHVVCRELGYVEAKSWTASSSYGKGEGPIWLDNLHCTGNEATLAACTSNGWGVTDCKHTEDVGVVCSDKRIPGFKFDNSLINQIENLNIQVEDIRIRAILSTYRKRTPVMEGYVEVKEGKTWKQICDKHWTAKNSRVVCGMFGFPGERTYNTKVYKMFASRRKQRYWPFSMDCTGTEAHISSCKLGPQVSLDPMKNVTCENGLPAVVSCVPGQVFSPDGPSRFRKAYKPEDAGVRCNTPAMGLQKKLRLNGGRNPYEGRVEVLVERNGSLVWGMVCGQNWGIVEAMVVCRQLGLGFASNAFQETWYWHGDVNSNKVVMSGVKCSGTELSLAHCRHDGEDVACPQGGVQYGAGVACSETAPDLVLNAEMVQQTTYLEDRPMFLLQCAMEENCLSASAAQTDPTTGYRRLLRFSSQIHNNGQSDFRPKNGRHAWIWHDCHRHYHSMEVFTHYDLLNLNGTKVAEGHKASFCLEDTECEGDIQKNYECANFGDQGITMGCWDMYRHDIDCQWVDITDVPPGDYLFQVVINPNFEVAESDYSNNIMKCRSRYDGHRIWMYNCHIGGSFSEETEKKFEHFSGLLNNQLSPQ

SEQ ID NO: 868536 - protein, 346 aa, Homo sapiens
MGLQKKLRLNGGRNPYEGRVEVLVERNGSLVWGMVCGQNWGIVEAMVVCRQLGLGFASNAFQETWYWHGDVNSNKVVMSGVKCSGTELSLAHCRHDGEDVACPQGGVQYGAGVACSETAPDLVLNAEMVQQTTYLEDRPMFLLQCAMEENCLSASAAQTDPTTGYRRLLRFSSQIHNNGQSDFRPKNGRHAWIWHDCHRHYHSMEVFTHYDLLNLNGTKVAEGHKASFCLEDTECEGDIQKNYECANFGDQGITMGCWDMYRHDIDCQWVDITDVPPGDYLFQVVINPNFEVAESDYSNNIMKCRSRYDGHRIWMYNCHIGGSFSEETEKKFEHFSGLLNNQLSPQ

SEQ ID NO: 868537 - protein, 754 aa, Homo sapiens
LKVRGKRVNARLQRAATYAWCLLSPAIGDQSRPLCSRKGLSGGGSGGGPPWRARSQPGHCGSLKPKSSCCFCTPPVPPSCAGPLRGIISPKTGMERPLCSHLCSCLAMLALLSPLSLAQYDSWPHYPEYFQQPAPEYHQPQAPANVAKIQLRLAGQKRKHSEGRVEVYYDGQWGTVCDDDFSIHAAHVVCRELGYVEAKSWTASSSYGKGEGPIWLDNLHCTGNEATLAACTSNGWGVTDCKHTEDVGVVCSDKRIPGFKFDNSLINQIENLNIQVEDIRIRAILSTYRKRTPVMEGYVEVKEGKTWKQICDKHWTAKNSRVVCGMFGFPGERTYNTKVYKMFASRRKQRYWPFSMDCTGTEAHISSCKLGPQVSLDPMKNVTCENGLPAVVSCVPGQVFSPDGPSRFRKAYKPEQPLVRLRGGAYIGEGRVEVLKNGEWGTVCDDKWDLVSASVVCRELGFGSAKEAVTGSRLGQGIGPIHLNEIQCTGNEKSIIDCKFNAESQGCNHEEDAGVRCNTPAMGLQKKLRLNGGRNPYEGRVEVLVERNGSLVWGMVCGQNWGIVEAMVVCRQLGLGFASNAFQETWYWHGDVNSNKVVMSGVKCSGTELSLAHCRHDGEDVACPQGGVQYGAGVACSETAPDLVLNAEMVQQTTYLEDRPMFLLQCAMEENCLSASAAQTDPTTGYRRLLRFSSQIHNNGQSDWGKGSGPIHLNEIQCTGNEKSIIDCKFNAESQGCNHEEDAGVRCNTPPWAC

SEQ ID NO: 868538 - protein, 533 aa, Homo sapiens
LKVRGKRVNARLQRAATYAWCLLSPAIGDQSRPLCSRKGLSGGGSGGGPPWRARSQPGHCGSLKPKSSCCFCTPPVPPSCAGPLRGIISPKTGMERPLCSHLCSCLAMLALLSPLSLAQYDSWPHYPEYFQQPAPEYHQPQAPANVAKIQLRLAGQKRKHSEGRVEVYYDGQWGTVCDDDFSIHAAHVVCRELGYVEAKSWTASSSYGKGEGPIWLDNLHCTGNEATLAACTSNGWGVTDCKHTEDVGVVCSDKRIPGFKFDNSLINQIENLNIQVEDIRIRAILSTYRKRTPVMEGYVEVKEGKTWKQICDKHWTAKNSRVVCGMFGFPGERTYNTKVYKMFASRRKQRYWPFSMDCTGTEAHISSCKLGPQVSLDPMKNVTCENGLPAVVSCVPGQVFSPDGPSRFRKAYKPEQPLVRLRGGAYIGEGRVEVLKNGEWGTVCDDKWDLVSASVVCRELGFGSAKEAVTGSRLGQGIGPIHLNEIQCTGNEKSIIDCKFNAESQGCNHEEDAGVRCNTPAMGLQKKVMGLDT

SEQ ID NO: 868539 - protein, 444 aa, Homo sapiens
LKVRGKRVNARLQRAATYAWCLLSPAIGDQSRPLCSRKGLSGGGSGGGPPWRARSQPGHCGSLKPKSSCCFCTPPVPPSCAGPLRGIISPKTGMERPLCSHLCSCLAMLALLSPLSLAQYDSWPHYPEYFQQPAPEYHQPQAPANVAKIQLRLAGQKRKHSEGRVEVYYDGQWGTVCDDDFSIHAAHVVCRELGYVEAKSWTASSSYGKGEGPIWLDNLHCTGNEATLAACTSNGWGVTDCKHTEDVGVVCSDKRIPGFKFDNSLINQIENLNIQVEDIRIRAILSTYRKRTPVMEGYVEVKEGKTWKQICDKHWTAKNSRVVCGMFGFPGERTYNTKVYKMFASRRKQRYWPFSMDCTGTEAHISSCKLGPQVSLDPMKNVTCENGLPAVVSCVPGQVFSPDGPSRFRKAYKPEAGVQWHDLGSLQPPAPGFTRFSCLGLPSS

SEQ ID NO: 868540 - protein, 855 aa, Homo sapiens [sequence omitted]

SEQ ID NO: 868541 - protein, 774 aa, Homo sapiens [sequence omitted]

SEQ ID NO: 868542 - protein, 822 aa, Homo sapiens
LKVRGKRVNARLQRAATYAWCLLSPAIGDQSRPLCSRKGLSGGGSGGGPPWRARSQPGHCGSLKPKSSCCFCTPPVPPSCAGPLRGIISPKTGMERPLCSHLCSCLAMLALLSPLSLAQYDSWPHYPEYFQQPAPEYHQPQAPANVAKIQLRLAGQKRKHSEGRVEVYYDGQWGTVCDDDFSIHAAHVVCRELGYVEAKSWTASSSYGKGEGPIWLDNLHCTGNEATLAACTSNGWGVTDCKHTEDVGVVCSDKRIPGFKFDNSLINQIENLNIQVEDIRIRAILSTYRKRTPVMEGYVEVKEGKTWKQICDKHWTAKNSRVVCGMFGFPGERTYNTKVYKMFASRRKQRYWPFSMDCTGTEAHISSCKLGPQVSLDPMKNVTCENGLPAVVSCVPGQVFSPDGPSRFRKAYKPEQPLVRLRGGAYIGEGRVEVLKNGEWGTVCDDKWDLVSASVVCRELGFGSAKEAVTGSRLGQGIGPIHLNEIQCTGNEKSIIDCKFNAESQGCNHEEDAGVRCNTPAMGLQKKLRLNGGRNPYEGRVEVLVERNGSLVWGMVCGQNWGIVEAMVVCRQLGLGFASNAFQETWYWHGDVNSNKVVMSGVKCSGTELSLAHCRHDGEDVACPQGGVQYGAGVACSETAPDLVLNAEMVQQTTYLEDRPMFLLQCAMEENCLSASAAQTDPTTGYRRLLRFSSQIHNNGQSDFRPKNGRHAWIWHDCHRHYHSMEVFTHYDLLNLNGTKVAEGHKASFCLEDTECEGDIQKNYECANFGDQGITMGCWDMYRHDIDCQWVDITDVPPGDYLFQVVPSAKRRKKSLSTSAGS

SEQ ID NO: 868543 - protein, 867 aa, Homo sapiens; identical to SEQ ID NO: 868528

SEQ ID NO: 868544 - protein, 867 aa, Homo sapiens; identical to SEQ ID NO: 868528

SEQ ID NO: 868545 - protein, 520 aa, Homo sapiens
LPHPNTPTTHTHTHTHTHTHIHTSSIVAAPRLSAWPGNRVAGKGGGGDSGHPLNVLSVCTQQDRVSLQQPLVRLRGGAYIGEGRVEVLKNGEWGTVCDDKWDLVSASVVCRELGFGSAKEAVTGSRLGQGIGPIHLNEIQCTGNEKSIIDCKFNAESQGCNHEEDAGVRCNTPAMGLQKKLRLNGGRNPYEGRVEVLVERNGSLVWGMVCGQNWGIVEAMVVCRQLGLGFASNAFQETWYWHGDVNSNKVVMSGVKCSGTELSLAHCRHDGEDVACPQGGVQYGAGVACSETAPDLVLNAEMVQQTTYLEDRPMFLLQCAMEENCLSASAAQTDPTTGYRRLLRFSSQIHNNGQSDFRPKNGRHAWIWHDCHRHYHSMEVFTHYDLLNLNGTKVAEGHKASFCLEDTECEGDIQKNYECANFGDQGITMGCWDMYRHDIDCQWVDITDVPPGDYLFQVVINPNFEVAESDYSNNIMKCRSRYDGHRIWMYNCHIGGSFSEETEKKFEHFSGLLNNQLSPQ

SEQ ID NO: 868546 - protein, 668 aa, Homo sapiens
LKVRGKRVNARLQRAATYAWCLLSPAIGDQSRPLCSRKGLSGGGSGGGPPWRARSQPGHCGSLKPKSSCCFCTPPVPPSCAGPLRGIISPKTGMERPLCSHLCSCLAMLALLSPLSLAQYDSWPHYPEYFQQPAPEYHQPQAPANVAKIQLRLAGQKRKHSEGRVEVYYDGQWGTVCDDDFSIHAAHVVCRELGYVEAKSWTASSSYGKGEGPIWLDNLHCTGNEATLAACTSNGWGVTDCKHTEDVGVVCSDKRIPGFKFDNSLINQIENLNIQVEDIRIRAILSTYRKRTPVMEGYVEVKEGKTWKQICDKHWTAKNSRVVCGMFGFPGERTYNTKVYKMFASRRKQRYWPFSMDCTGTEAHISSCKLGPQVSLDPMKNVTCENGLPAVVSCVPGQVFSPDGPSRFRKAYKPEQPLVRLRGGAYIGEGRVEVLKNGEWGTVCDDKWDLVSASVVCRELGFGSAKEAVTGSRLGQGIGPIHLNEIQCTGNEKSIIDCKFNAESQGCNHEEDAGVRCNTPAMGLQKKLRLNGGRNPYEGRVEVLVERNGSLVWGMVCGQNWGIVEAMVVCRQLGLGFASNAFQETWYWHGDVNSNKVVMSGVKCSGTELSLAHCRHDGEDVACPQGGVQYGAGVACSESESSSPPSPPGSRGDQSPTSYSSRDSEALP

SEQ ID NO: 868547 - protein, 381 aa, Homo sapiens
MPSGCRCLHLVCLLCILGAPGQPVRADDCSSHCDLAHGCCAPDGSCRCDPGWEGLHCERCVRMPGCQHGTCHQPWQCICHSGWAGKFCDKDEHICTTQSPCQNGGQCMYDGGGEYHCVCLPGFHGRDCERKAGPWNSSPCRNGGQCQDDQGFALNFTCRCLVGFVGARCEVNVDDCLMRPCANGATCLDGINRFSCLCPEGFAGRFCTINLDDCASRPCQRGARCRDRVHDFDCLCPSGYGGKTCELVLPVPDPPTTVDTPLGPTSAVVVPATGPAPHSAGAGLLRISVKEVVRRQEAGLGEPSLVALVVFGALTAALVLATVLLTLRAWRRGVCPPGPCCYPAPHYAPACQDQECQVSMLPAGLPLPRDLPPEPGKTTAL

SEQ ID NO: 868548 - protein, 381 aa, Homo sapiens; identical to SEQ ID NO: 868547

SEQ ID NO: 868549 - protein, 342 aa, Homo sapiens
MPSGCRCLHLVCLLCILGAPGQPVRADDCSSHCDLAHGCCAPDGSCRCDPGWEGLHCERCVRMPGCQHGTCHQPWQCICHSGWAGKFCDKDEHICTTQSPCQNGGQCMYDGGGEYHCVCLPGFHGRDCERKAGPCEQLMRPCANGATCLDGINRFSCLCPEGFAGRFCTINLDDCASRPCQRGARCRDRVHDFDCLCPSGYGGKTCELVLPVPDPPTTVDTPLGPTSAVVVPATGPAPHSAGAGLLRISVKEVVRRQEAGLGEPSLVALVVFGALTAALVLATVLLTLRAWRRGVCPPGPCCYPAPHYAPACQDQECQVSMLPAGLPLPRDLPPEPGKTTAL

SEQ ID NO: 868550 - protein, 350 aa, Homo sapiens
MPSGCRCLHLVCLLCILGAPGQPVRADDCSSHCDLAHGCCAPDGSCRCDPGWEGLHCERCVRMPGCQHGTCHQPWQCICHSGWAGKFCDKGFHGRDCERKAGPWNSSPCRNGGQCQDDQGFALNFTCRCLVGFVGARCEVNVDDCLMRPCANGATCLDGINRFSCLCPEGFAGRFCTINLDDCASRPCQRGARCRDRVHDFDCLCPSGYGGKTCELVLPVPDPPTTVDTPLGPTSAVVVPATGPAPHSAGAGLLRISVKEVVRRQEAGLGEPSLVALVVFGALTAALVLATVLLTLRAWRRGVCPPGPCCYPAPHYAPACQDQECQVSMLPAGLPLPRDLPPEPGKTTAL

SEQ ID NO: 868551 - protein, 102 aa, Homo sapiens
STWEFLTGILRDLSSETSITYYSLHSLLHFTLLSHLRIHDPLIQAQAEELTHLRQKIQEGRGVCYLFTQHVKNTVKSFEGLLRNTGIAYYQRQRFCEQMVQG

SEQ ID NO: 868552 - protein, 1037 aa, Homo sapiens [sequence omitted]

SEQ ID NO: 868553 - protein, 444 aa, Homo sapiens
MILKGREEWVSRNFFFSFFHSPCFEEEEHFKVLVKMTAQELANGIPDSGHLYASIRAGRTLTPAGDLQETFSGMDQVRLMKRIAEMTDIKPILRKLPRIKKHLLNGDNMRCSVNATPQQMPQTEKAVEDFLRSIGRSKKERRPVRPHTVEKPVPSSSGGDAHVPHGSQVIRKLVMFYSEKLCGVTELQCLALAPQHLAAECHGDGTPEMAPVPVPWECVGAQPPLTPEWVQSQCRGRCMAAQPPLTIRVPQEPTFKPWQMKTHFLMPFPVNYVGECIRTVPYTDPDHASLKILARLMTAKFLHTEIREKGGAYGGGAKLSHNGIFTLYSYRDPNTIETLQSFGKAVDWAKSGKFTQQDIDEAKLSVFSTVDAPVAPSDKGMDHFLYGLSDEMKQAHREQLFAVSHDKLLAVSDRYLGTGKSTHGLAILGPENPKIAKDPSWIIR

SEQ ID NO: 868554 - protein, 1128 aa, Homo sapiens
MWRCGGRQGLCVLRRLSGGHAHHRAWRWNSNRACERALQYKLGDKIHGFTVNQVTSVPELFLTAVKLTHDDTGARYLHLAREDTNNLFSVQFRTTPMDSTGVPHILEHTVLCGSQKYPCRDPFFKMLNRSLSTFMNAFTASDYTLYPFSTQNPKDFQNLLSVYLDATFFPCLRELDFWQEGWRLEHENPSDPQTPLVFKGVVFNEMKGAFTDNERIFSQHLQNRLLPDHTYSVVSGGDPLCIPELTWEQLKQFHATHYHPSNARFFTYGNFPLEQHLKQIHEEALSKFQKIEPSTVVPAQTPWDKPREFQITCGPDSFATDPSKQTTVSVSFLLPDITDTFEAFTLSLLSSLLTSGPNSPFYKALIESGLGTDFSPDVGYNGYTREAYFSVGLQGIVEKDIETVRSLIDRTIDEVVEKGFEDDRIEALLHKIEIQMKHQSTSFGLMLTSYIASCWNHDGDPVELLKLGNQLAKFRQCLQENPKFLQEKVKQYFKNNQHKLTLSMRPDDKYHEKQAQVEATKLKQKVEALSPGDRQQIYEKGLELRSQQSKPQDASCLPALKVSDIEPTIPVTELDVVLTAGDIPVQYCAQPTNGMVYFRAFSSLNTLPEELRPYVPLFCSVLTKLGCGLLDYREQAQQIELKTGGMSASPHVLPDDSHMDTYEQGVLFSSLCLDRNLPDMMQLWSEIFNNPCFEEEEHFKVLVKMTAQELANGIPDSGHLYASIRAGRTLTPAGDLQETFSGMDQVRLMKRIAEMTDIKPILRKLPRIKKHLLNGDNMRCSVNATPQQMPQTEKAVEDFLRSIGRSKKERRPVRPHTVEKPVPSSSGGDAHVPHGSQVIRKLVMYTLRHHVKIGGLHVSFTVRNCVECRNCSALLSRPSTWLQSVTEMGPLRWLQSQCRGQCVGAQPPLTPEWVQSQCRGRCMAAQPPLTIRVPQEPTFKPWQMKTHFLMPFPVNYVGECIRTVPYTDPDHASLKILARLMTAKFLHTEIREKGGAYGGGAKLSHNGIFTLYSYRDPNTIETLQSFGKAVDWAKSGKFTQQDIDEAKLSVFSTVDAPVAPSDKGMDHFLYGLSDEMKQAHREQLFAVSHDKLLAVSDRYLGTGKSTHGLAILGPENPKIAKDPSWIIR

SEQ ID NO: 868555 - protein, 602 aa, Homo sapiens [sequence omitted]

SEQ ID NO: 868556 - protein, 992 aa, Homo sapiens
MWRCGGRQGLCVLRRLSGGHAHHRAWRWNSNRACERALQYKLGDKIHGFTVNQVTSVPELFLTAVKLTHDDTGARYLHLAREDTNNLFSVQFRTTPMDSTGVPHILEHTVLCGSQKYPCRDPFFKMLNRSLSTFMNAFTASDYTLYPFSTQNPKDFQNLLSVYLDATFFPCLRELDFWQEGWRLEHENPSDPQTPLVFKGVVFNEMKGAFTDNERIFSQHLQNRLLPDHTYSVVSGGDPLCIPELTWEQLKQFHATHYHPSNARFFTYGNFPLEQHLKQIHEEALSKFQKIEPSTVVPAQTPWDKPREFQITCGPDSFATDPSKQTTVSVSFLLPDITDTFEAFTLSLLSSLLTSGPNSPFYKALIESGLGTDFSPDVGYNGYTREAYFSVGLQGIVEKDIETVRSLIDRTIDEVVEKGFEDDRIEALLHKIEIQMKHQSTSFGLMLTSYIASCWNHDGDPVELLKLGNQLAKFRQCLQENPKFLQEKVKQYFKNNQHKLTLSMRPDDKYHEKQAQVEATKLKQKVEALSPGDRQQIYEKGLELRSQQSKPQDASCLPALKVSDIEPTIPVTELDVVLTAGDIPVQYCAQPTNGMVYFRAFSSLNTLPEELRPYVPLFCSVLTKLGCGLLDYREQAQQIELKTGGMSASPHVLPDDSHMDTYEQGVLFSSLCLDRNLPDMMQLWSEIFNNPCFEEEEHFKVLVKMTAQELANGIPDSGHLYASIRAGRTLTPAGDLQETFSGMDQVRLMKRIAEMTDIKPILRKLPRIKKHLLNGDNMRCSVNATPQQMPQTEKAVEDFLRSIGRSKKERRPVRPHTVEKPVPSSSGGDAHVPHGSQVIRKLVMEPTFKPWQMKTHFLMPFPVNYVGECIRTVPYTDPDHASLKILARLMTAKFLHTEIREKGGAYGGGAKLSHNGIFTLYSYRDPNTIETLQSFGKAVDWAKSGKFTQQDIDEAKLSVFSTVDAPVAPSDKAGPQRAALCCQPRQAPGRER

SEQ ID NO: 868557 - protein, 497 aa, Homo sapiens
NYSSVDRCSISQRCSCLPALKVSDIEPTIPVTELDVVLTAGDIPVQYCAQPTNGMVYFRAFSSLNTLPEELRPYVPLFCSVLTKLGCGLLDYREQAQQIELKTGGMSASPHVLPDDSHMDTYEQGVLFSSLCLDRNLPDMMQLWSEIFNNPCFEEEEHFKVLVKMTAQELANGIPDSGHLYASIRAGRTLTPAGDLQETFSGMDQVRLMKRIAEMTDIKPILRKLPRIKKHLLNGDNMRCSVNATPQQMPQTEKAVEDFLRSIGRSKKERRPVRPHTVEKPVPSSSGGDAHVPHGSQVIRKLVMEPTFKPWQMKTHFLMPFPVNYVGECIRTVPYTDPDHASLKILARLMTAKFLHTEIREKGGAYGGGAKLSHNGIFTLYSYRDPNTIETLQSFGKAVDWAKSGKFTQQDIDEAKLSVFSTVDAPVAPSDKGMDHFLYGLSDEMKQAHREQLFAVSHDKLLAVSDRYLGTGKSTHGLAILGPENPKIAKDPSWIIR

SEQ ID NO: 868558 - protein, 736 aa, Homo sapiens
MWRCGGRQGLCVLRRLSGGHAHHRAWRWNSNRACERALQYKLGDKIHGFTVNQVTSVPELFLTAVKLTHDDTGARYLHLAREDTNNLFSVQFRTTPMDSTGVPHILEHTVLCGSQKYPCRDPFFKMLNRSLSTFMNAFTASDYTLYPFSTQNPKDFQNLLSVYLDATFFPCLRELDFWQEGWRLEHENPSDPQTPLVFKGVVFNEMKGAFTDNERIFSQHLQNRLLPDHTYSVVSGGDPLCIPELTWEQLKQFHATHYHPSNARFFTYGNFPLEQHLKQIHEEALSKFQKIEPSTVVPAQTPWDKPREFQITCGPDSFATDPSKQTTVSVSFLLPDITDTFEAFTLSLLSSLLTSGPNSPFYKALIESGLGTDFSPDVGYNGYTREAYFSVGLQGIVEKDIETVRSLIDRTIDEVVEKGFEDDRIEALLHKIEIQMKHQSTSFGLMLTSYIASCWNHDGDPVELLKLGNQLAKFRQCLQENPKFLQEKVKQYFKNNQHKLTLSMRPDDKYHEKQAQVEATKLKQKVEALSPGDRQQIYEKGLELRSQQSKPQDASCLPALKVSDIEPTIPVTELDVVLTAGDIPVQYCAQPTNGMVYFRAFSSLNTLPEELRPYVPLFCSVLTKLGCGLLDYREQAQQIELKTGGMSASPHVLPDDSHMDTYEQGVLFSSLCLDRNLPDMMQLWSEIFNNPCFEEEEHFKVLVKMTAQELANGIPDSGHLYASIRAGRTLTTSSWP

SEQ ID NO: 868559 - protein, 708 aa, Homo sapiens
MWRCGGRQGLCVLRRLSGGHAHHRAWRWNSNRACERALQYKLGDKIHGFTVNQVTSVPELFLTAVKLTHDDTGARYLHLAREDTNNLFSVQFRTTPMDSTGVPHILEHTVLCGSQKYPCRDPFFKMLNRSLSTFMNAFTASDYTLYPFSTQNPKDFQNLLSVYLDATFFPCLRELDFWQEGWRLEHENPSDPQTPLVFKGVVFNEMKGAFTDNERIFSQHLQNRLLPDHTYSVVSGGDPLCIPELTWEQLKQFHATHYHPSNARFFTYGNFPLEQHLKQIHEEALSKFQKIEPSTVVPAQTPWDKPREFQITCGPDSFATDPSKQTTVSVSFLLPDITDTFEAFTLSLLSSLLTSGPNSPFYKALIESGLGTDFSPDVGYNGYTREAYFSVGLQGIVEKDIETVRSLIDRTIDEVVEKGFEDDRIEALLHKIEIQMKHQSTSFGLMLTSYIASCWNHDGDPVELLKLGNQLAKFRQCLQENPKFLQEKVKQYFKNNQHKLTLSMRPDDKYHEKQAQVEATKLKQKVEALSPGDRQQIYEKGLELRSQQSKPQDASCLPALKVSDIEPTIPVTELDVVLTAGDIPVQYCAQPTNGMVYFRAFSSLNTLPEELRPYVPLFCSVLTKLGCGLLDYREQAQQIELKTGGMSASPHVLPDDSHMDTYEQVLLFSSLCLAVSDRYLGTGKSTHGLAILGPENPKIAKDPSWIIR

SEQ ID NO: 868560 - protein, 644 aa, Homo sapiens
MWRCGGRQGLCVLRRLSGGHAHHRAWRWNSNRACERALQYKLGDKIHGFTVNQVTSVPELFLTAVKLTHDDTGARYLHLAREDTNNLFSVQFRTTPMDSTGVPHILEHTVLCGSQKYPCRDPFFKMLNRSLSTFMNAFTASDYTLYPFSTQNPKDFQNLLSVYLDATFFPCLRELDFWQEGWRLEHENPSDPQTPLVFKGVVFNEMKGAFTDNERIFSQHLQNRLLPDHTYSVVSGGDPLCIPELTWEQLKQFHATHYHPSNARFFTYGNFPLEQHLKQIHEEALSKFQKIEPSTVVPAQTPWDKPREFQITCGPDSFATDPSKQTTVSVSFLLPDITDTFEAFTLSLLSSLLTSGPNSPFYKALIESGLGTDFSPDVGYNGYTREAYFSVGLQGIVEKDIETVRSLIDRTIDEVVEKGFEDDRIEALLHKIEIQMKHQSTSFGLMLTSYIASCWNHDGDPVELLKLGNQLAKFRQCLQENPKFLQEKVKQYFKNNQHKLTLSMRPDDKYHEKQAQVEATKLKQKVEALSPGDRQQIYEKGLELRSQQSKPQDASCLPALKVSDIEPTIPVTELDVVLTGHCERYAFPSWRYPCSVLRPAHQWHGVFPGLLQPEHTPRGAEALCAPLLQRPHQVRVATYPCVSY

SEQ ID NO: 868561 - protein, 596 aa, Homo sapiens
MWRCGGRQGLCVLRRLSGGHAHHRAWRWNSNRACERALQYKLGDKIHGFTVNQVTSVPELFLTAVKLTHDDTGARYLHLAREDTNNLFSVQFRTTPMDSTGVPHILEHTVLCGSQKYPCRDPFFKMLNRSLSTFMNAFTASDYTLYPFSTQNPKDFQNLLSVYLDATFFPCLRELDFWQEGWRLEHENPSDPQTPLVFKGVVFNEMKGAFTDNERIFSQHLQNRLLPDHTYSVVSGGDPLCIPELTWEQLKQFHATHYHPSNARFFTYGNFPLEQHLKQIHEEALSKFQKIEPSTVVPAQTPWDKPREFQITCGPDSFATDPSKQTTVSVSFLLPDITDTFEAFTLSLLSSLLTSGPNSPFYKALIESGLGTDFSPDVGYNGYTREAYFSVGLQGIVEKDIETVRSLIDRTIDEVVEKGFEDDRIEALLHKIEIQMKHQSTSFGLMLTSYIASCWNHDGDPVELLKLGNQLAKFRQCLQENPKFLQEKVKQYFKNNQHKLTLSMRPDDKYHEKQAQVEATKLKQKVEALSPGDRQQIYEKGLELRSQQSKPQDASCLPALKVSDIEPTIPVTELDVVLTGHCERYAFPRSRVPWGN

SEQ ID NO: 868562 - protein, 1161 aa, Homo sapiens
MWRCGGRQGLCVLRRLSGGHAHHRAWRWNSNRACERALQYKLGDKIHGFTVNQVTSVPELFLTAVKLTHDDTGARYLHLAREDTNNLFSVQFRTTPMDSTGVPHILEHTVLCGSQKYPCRDPFFKMLNRSLSTFMNAFTASDYTLYPFSTQNPKDFQNLLSVYLDATFFPCLRELDFWQEGWRLEHENPSDPQTPLVFKGVVFNEMKGAFTDNERIFSQHLQNRLLPDHTYSVVSGGDPLCIPELTWEQLKQFHATHYHPSNARFFTYGNFPLEQHLKQIHEEALSKFQKIEPSTVVPAQTPWDKPREFQITCGPDSFATDPSKQTTVSVSFLLPDITDTFEAFTLSLLSSLLTSGPNSPFYKALIESGLGTDFSPDVGYNGYTREAYFSVGLQGIVEKDIETVRSLIDRTIDEVVEKGFEDDRIEALLHKIEIQMKHQSTSFGLMLTSVSDLSTILFLFYNRHFVLLLSLTGILIFLCEIDYFKWVRVYNYVICWLFPKHYFSLLLFILLEQNRAKVSFFVSPSKELHDFCYKQSSVVYLNTETRILYQVWAVGGGCTVVPAALWMWKSSFQYIASCWNHDGDPVELLKLGNQLAKFRQCLQENPKFLQEKVKQYFKNNQHKLTLSMRPDDKYHEKQAQVEATKLKQKVEALSPGDRQQIYEKGLELRSQQSKPQDASCLPALKVSDIEPTIPVTELDVVLTAGDIPVQYCAQPTNGMVYFRAFSSLNTLPEELRPYVPLFCSVLTKLGCGLLDYREQAQQIELKTGGMSASPHVLPDDSHMDTYEQGVLFSSLCLDRNLPDMMQLWSEIFNNPCFEEEEHFKVLVKMTAQELANGIPDSGHLYASIRAGRTLTPAGDLQETFSGMDQVRLMKRIAEMTDIKPILRKLPRIKKHLLNGDNMRCSVNATPQQMPQTEKAVEDFLRSIGRSKKERRPVRPHTVEKPVPSSSGGDAHVPHGSQVIRKLVMEPTFKPWQMKTHFLMPFPVNYVGECIRTVPYTDPDHASLKILARLMTAKFLHTEIREKGGAYGGGAKLSHNGIFTLYSYRDPNTIETLQSFGKAVDWAKSGKFTQQDIDEAKLSVFSTVDAPVAPSDKGMDHFLYGLSDEMKQAHREQLFAVSHDKLLAVSDRYLGTGKSTHGLAILGPENPKIAKDPSWIIR

SEQ ID NO: 868563 - protein, 1113 aa, Homo sapiens
MWRCGGRQGLCVLRRLSGGHAHHRAWRWNSNRACERALQYKLGDKIHGFTVNQVTSVPELFLTAVKLTHDDTGARYLHLAREDTNNLFSVQFRTTPMDSTGVPHILEHTVLCGSQKYPCRDPFFKMLNRSLSTFMNAFTASDYTLYPFSTQNPKDFQNLLSVYLDATFFPCLRELDFWQEGWRLEHENPSDPQTPLVFKGVVFNEMKGAFTDNERIFSQHLQNRLLPDHTYSVVSGGDPLCIPELTWEQLKQFHATHYHPSNARFFTYGNFPLEQHLKQIHEEALSKFQKIEPSTVVPAQTPWDKPREFQITCGPDSFATDPSKQTTVSVSFLLPDITDTFEAFTLSLLSSLLTSGPNSPFYKALIESGLGTDFSPDVGYNGYTREAYFSVGLQGIVEKDIETVRSLIDRTIDEVVEKGFEDDRIEALLHKIEIQMKHQSTSFGLMLTSYIASCWNHDGDPVELLKLGNQLAKFRQCLQENPKFLQEKVKQYFKNNQHKLTLSMRPDDKYHEKQAQVEATKLKQKVEALSPGDRQQIYEKGLELRSQQSKPQDASCLPALKVSDIEPTIPVTELDVVLTAGDIPVQYCAQPTNGMVYFRAFSSLNTLPEELRPYVPLFCSVLTKLGCGLLDYREQAQQIELKTGGMSASPHVLPDDSHMDTYEQGVLFSSLCLDRNLPDMMQLWSEIFNNPCFEEEEHFKVLVKMTAQELANGIPDSGHLYASIRAGRTLTPAGDLQETFSGMDQVRLMKRIAEMTDIKPILRKLPRIKKHLLNGDNMRCSVNATPQQMPQTEKAVEDFLRSIGRSKKERRPVRPHTVEKPVPSSSGGDAHVPHGSQVIRKLVMFYSEKLCGVTELQCLALAPQHLAAECHGDGTPEMAPVPVPWECVGAQPPLTPEWVQSQCRGRCMAAQPPLTNRVPQEPTFKPWQMKTHFLMPFPVNYVGECIRTVPYTDPDHASLKILARLMTAKFLHTEIREKGGAYGGGAKLSHNGIFTLYSYRDPNTIETLQSFGKAVDWAKSGKFTQQDIDEAKLSVFSTVDAPVAPSDKGMDHFLYGLSDEMKQAHREQLFAVSHDKLLAVSDRYLGTGKSTHGLAILGPENPKIAKDPSWIIR

SEQ ID NO: 868564 - protein, 1021 aa, Homo sapiens
MWRCGGRQGLCVLRRLSGGHAHHRAWRWNSNRACERALQYKLGDKIHGFTVNQVTSVPELFLTAVKLTHDDTGARYLHLAREDTNNLFSVQFRTTPMDSTGVPHILEHTVLCGSQKYPCRDPFFKMLNRSLSTFMNAFTASDYTLYPFSTQNPKDFQNLLSVYLDATFFPCLRELDFWQEGWRLEHENPSDPQTPLVFKGVVFNEMKGAFTDNERIFSQHLQNRLLPDHTYSVVSGGDPLCIPELTWEQLKQFHATHYHPSNARFFTYGNFPLEQHLKQIHEEALSKFQKIEPSTVVPAQTPWDKPREFQITCGPDSFATDPSKQTTVSVSFLLPDITDTFEAFTLSLLSSLLTSGPNSPFYKALIESGLGTDFSPDVGYNGYTREAYFSVGLQGIVEKDIETVRSLIDRTIDEVVEKGFEDDRIEALLHKIEIQMKHQSTSFGLMLTSYIASCWNHDGDPVELLKLGNQLAKFRQCLQENPKFLQEKVKQYFKNNQHKLTLSMRPDDKYHEKQAQVEATKLKQKVEALSPGDRQQIYEKGLELRSQQSKPQDASCLPALKVSDIEPTIPVTELDVVLTAGDIPVQYCAQPTNGMVYFRAFSSLNTLPEELRPYVPLFCSVLTKLGCGLLDYREQAQQIELKTGGMSASPHVLPDDSHMDTYEQGVLFSSLCLDRNLPDMMQLWSEIFNNPCFEEEEHFKVLVKMTAQELANGIPDSGHLYASIRAGRTLTPAGDLQETFSGMDQVRLMKRIAEMTDIKPILRKLPRIKKHLLNGDNMRCSVNATPQQMPQTEKAVEDFLRSIGRSKKERRPVRPHTVEKPVPSSSGGDAHVPHGSQVIRKLVMEPTFKPWQMKTHFLMPFPVNYVGECIRTVPYTDPDHASLKILARLMTAKFLHTEIREKGGAYGGGAKLSHNGIFTLYSYRDPNTIETLQSFGKAVDWAKSGKFTQQDIDEAKLSVFSTVDAPVAPSDKGILSITVRISTHSLTDDVAVFQVPGMHGQEHQLLVPPSLLVIRFPRLTP

SEQ ID NO: 868565 - protein, 1021 aa, Homo sapiens; identical to SEQ ID NO: 868564

SEQ ID NO: 868566 - protein, 181 aa, Homo sapiens
GRVLIGRGYVGECIRTVPYTDPDHASLKILARLMTAKFLHTEIREKGGAYGGGAKLSHNGIFTLYSYRDPNTIETLQSFGKAVDWAKSGKFTQQDIDEAKLSVFSTVDAPVAPSDKGMDHFLYGLSDEMKQAHREQLFAVSHDKLLAVSDRYLGTGKSTHGLAILGPENPKIAKDPSWIIR

SEQ ID NO: 868567 - protein, 664 aa, Homo sapiens
MWRCGGRQGLCVLRRLSGGHAHHRAWRWNSNRACERALQYKLGDKIHGFTVNQVTSVPELFLTAVKLTHDDTGARYLHLAREDTNNLFSVQFRTTPMDSTGVPHILEHTVLCGSQKYPCRDPFFKMLNRSLSTFMNAFTASDYTLYPFSTQNPKDFQNLLSVYLDATFFPCLRELDFWQEGWRLEHENPSDPQTPLVFKGVVFNEMKGAFTDNERIFSQHLQNRLLPDHTYSVVSGGDPLCIPELTWEQLKQFHATHYHPSNARFFTYGNFPLEQHLKQIHEEALSKFQKIEPSTVVPAQTPWDKPREFQITCGPDSFATDPSKQTTVSVSFLLPDITDTFEAFTLSLLSSLLTSGPNSPFYKALIESGLGTDFSPDVGYNGYTREAYFSVGLQGIVEKDIETVRSLIDRTIDEVVEKGFEDDRIEALLHKIEIQMKHQSTSFGLMLTSYIASCWNHDGDPVELLKLGNQLAKFRQCLQENPKFLQEKVKQYFKNNQHKLTLSMRPDDKYHEKQAQVEATKLKQKVEALSPGDRQQIYEKGLELRSQQSKPQDASCLPALKVSDIEPTIPVTELDVVLTAGDIPVQYCAQPTNGMVYFRAFSSLNTLPEELRPYVPLFCSVLTKLGCGLLDYREQAQQIELKTGGMSASPHVLPDDLSDPDEFK

SEQ ID NO: 868568 - protein, 67 aa, Homo sapiens
LPGLVQEGEPFSEEATLFTKELVLQRELLCLLSDSCFICCLIFVGLTFPICSCMSIFLYLMFLKRQI

SEQ ID NO: 868569 - protein, 278 aa, Homo sapiens
RLFSVVAFKCPCSTENMTYGLVFLFAPAWVLLILGFFLNNRSWRLFTGCCVNPRKIFPRGHSCRFFYVLGQITLSSLVAPVMWLSVALLNGTFYECAMSGTRSSGLLELICKGKPKECWEELHKVSCGKTSMLPTVNEELKLSLQAQSQILGWCLICSASFFSLLTTCYARCRSKVSYLQLSFWKTYAQKEKEQLENTFLDYANKLSERNLKCFFENKRPDPFPMPTFAAWEAASELHSFHQSQQHYSTLHRVVDNGLQLSPEDDETTMVLVGTAHNM

SEQ ID NO: 868570 - protein, 278 aa, Homo sapiens; identical to SEQ ID NO: 868569

SEQ ID NO: 868571 - protein, 34 aa, Homo sapiens
MSEELLSLLPPGLCQMCPGLHLQRRLRQVQLLPM

SEQ ID NO: 868572 - protein, 468 aa, Homo sapiens
MAKRNAEKELTDRNWDQEDEAEEVGTFSMASEEVLKNRAIKKAKRRNVGFESDTGGAFKGFKGLVVPSGGGRFSGFGSGAGGKPLEGLSNGNNITSAPPFASAKAAADPKVAFGSLAANGPTTLVDKVSNPKTNGDSQQPSSSGLASSKACVGNAYHKQLAALNCSVRDWIVKHVNTNPLCDLTPIFKDYEKYLANIEQQHGNSGRNSESESNKVAAETQSPSLFGSTKLQQESTFLFHGNKTEDTPDKKMEVASEKKTDPSSLGATSASFNFGKKVDSSVLGSLSSVPLTGFSFSPGNSSLFGKDTTQSKPVSSPFPTKPLEGQAEGDSGECKGGDEEENDEPPKVVVTEVKEEDAFYSKKCKLFYKKDNEFKEKGIGTLHLKPTANQKTQLLVRADTNLGNILLNVLIPPNMPCTRTGKNNVLIVCVPNPPIDEKNATMPVTMLIRVKTSEDADELHKILLEKKDA

SEQ ID NO: 868573 - protein, 168 aa, Homo sapiens
SQPRAGFQGAGRMRRVRGPAGGRRCYCRKRRRACAVAERGRFFPPFFSNGFGGRFELQNGRPECVRRGSPSCLWLNRRSRLPAEHSVRSPPRDMVFESLGLPSTKSSEFRSAAPEAAERAQPGDPCGLQTPAPLRPGFRRNQDPASAAAAAEEVRKHGQKKCREGTDR

SEQ ID NO: 868574 - protein, 440 aa, Homo sapiens
MASEEVLKNRAIKKAKRRNVGFESDTGGAFKGFKGLVVPSGGGRFSGFGSGAGGKPLEGLSNGNNITSAPPFASAKAAADPKVAFGSLAANGPTTLVDKVSNPKTNGDSQQPSSSGLASSKACVGNAYHKQLAALNCSVRDWIVKHVNTNPLCDLTPIFKDYEKYLANIEQQHGNSGRNSESESNKVAAETQSPSLFGSTKLQQESTFLFHGNKTEDTPDKKMEVASEKKTDPSSLGATSASFNFGKKVDSSVLGSLSSVPLTGFSFSPGNSSLFGKDTTQSKPVSSPFPTKPLEGQAEGDSGECKGGDEEENDEPPKVVVTEVKEEDAFYSKKCKLFYKKDNEFKEKGIGTLHLKPTANQKTQLLVRADTNLGNILLNVLIPPNMPCTRTGKNNVLIVCVPNPPIDEKNATMPVTMLIRVKTSEDADELHKILLEKKDA

SEQ ID NO: 868575 - protein, 218 aa, Homo sapiens
MEVASEKKTDPSSLGATSASFNFGKKVDSSVLGSLSSVPLTGFSFSPGNSSLFGKDTTQSKPVSSPFPTKPLEGQAEGDSGECKGGDEEENDEPPKVVVTEVKEEDAFYSKKCKLFYKKDNEFKEKGIGTLHLKPTANQKTQLLVRADTNLGNILLNVLIPPNMPCTRTGKNNVLIVCVPNPPIDEKNATMPVTMLIRVKTSEDADELHKILLEKKDA

SEQ ID NO: 868576 - protein, 157 aa, Homo sapiens
ARYPLPSLTILPLSREGDSGECRGGDEEENDEPPKVVVTEVKEEDAFYSKKCKLFYKKDNEFKEKGIGTLHLKPTANQKTQLLVRADTNLGNILLNVLIPPNMPCTRTGKNNVLIVCVPNPPIDEKNATMPVTMLIRVKTSEDADELHKILLEKKDA

SEQ ID NO: 868577 - protein, 118 aa, Homo sapiens
MAKRNAEKELTDRNWDQEDEAEEVGTFSMASEEVLKNRAIKKAKRRNVGFEVSAPLQLLLLNTHLISGLHSNPSAGSNDINKCFLKILILCCRSWEIEKNKKRQVWTLKRAYPVEEIR

SEQ ID NO: 868578 - protein, 468 aa, Homo sapiens; identical to SEQ ID NO: 868572

SEQ ID NO: 868579 - protein, 440 aa, Homo sapiens; identical to SEQ ID NO: 868574

SEQ ID NO: 868580 - protein, 247 aa, Homo sapiens [sequence omitted]

SEQ ID NO: 868581 - protein, 215 aa, Homo sapiens
KRVSEYYYLDSNDKKKEEHHYKAVDSSVLGSLSSVPLTGFSFSPGNSSLFGKDTTQSKPVSSPFPTKPLEGQAEGDSGECKGGDEEENDEPPKVVVTEVKEEDAFYSKKCKLFYKKDNEFKEKGIGTLHLKPTANQKTQLLVRADTNLGNILLNVLIPPNMPCTRTGKNNVLIVCVPNPPIDEKNATMPVTMLIRVKTSEDADELHKILLEKKDA

SEQ ID NO: 868582 - protein, 1066 aa, Homo sapiens
MVVQAAVAPNRSQRLLLKIPYGSLRRRSVERMTEGRRCQVHLLDDRKLELLVQPKLLAKELLDLVASHFNLKEKEYFGIAFTDETGHLNWLQLDRRVLEHDFPKKSGPVVLYFCVRFYIESISYLKDNATIELFFLNAKSCIYKELIDVDSEVVFELASYILQEAKGDFSSNEVVRSDLKKLPALPTQALKEHPSLAYCEDRVIEHYKKLNGQTRGQAIVNYMSIVESLPTYGVHYYAVKDKQGIPWWLGLSYKGIFQYDYHDKVKPRKIFQWRQLENLYFREKKFSVEVHDPRRASVTRRTFGHSGIAVHTWYACPALIKSIWAMAISQHQFYLDRKQSKSKIHAARSLSEIAIDLTETGTLKTSKLANMGSKGKIISGSSGSLLSSGSQESDSSQSAKKDMLAALKSRQEALEETLRQRLEELKKLCLREAELTGKLPVEYPLDPGEEPPIVRRRIGTAFKLDEQKILPKGEEAELERLEREFAIQSQITEAARRLASDPNVSKKLKKQRKTSYLNALKKLQEIENAINENRIKSGKKPTQRASLIIDDGNIASEDSSLSDALVLEDEDSQVTSTISPLHSPHKGLPPRPPSHNRPPPPQSLEGLRQMHYHRNDYDKSPIKPKMWSESSLDEPYEKVKKRSSHSHSSSHKRFPSTGSCAEAGGGSNSLQNSPIRGLPHWNSQSSMPSTPDLRVRSPHYVHSTRSVDISPTRLHSLALHFRHRSSSLESQGKLLGSENDTGSPDFYTPRTRSSNGSDPMDDCSSCTSHSSSEHYYPAQMNANYSTLAEDSPSKARQRQRQRQRAAGALGSASSGSMPNLAARGGAGGAGGAGGGVYLHSQSQPSSQYRIKEYPLYIEGGATPVVVRSLESDQEGHYSVKAQFKTSNSYTAGGLFKESWRGGGGDEGDTGRLTPSRSQILRTPSLGREGAHDKGAGRAAVSDELRQWYQRSTASHKEHSRLSHTSSTSSDSGSQYSTSSQSTFVAHSRVTRMPQMCKATSAALPQSQRSSTPSSEIGATPPSSPHHILTWQTGSYNDSCFLDSSLYPELADVQWYGQEKAKPGTLV

SEQ ID NO: 868583 - protein, 741 aa, Homo sapiens
MAISQHQFYLDRKQSKSKIHAARSLSEIAIDLTETGTLKTSKLANMGSKGKIISGSSGSLLSSGSQESDSSQSAKKDMLAALKSRQEALEETLRQRLEELKKLCLREAELTGKLPVEYPLDPGEEPPIVRRRIGTAFKLDEQKILPKGEEAELERLEREFAIQSQITEAARRLASDPNVSKKLKKQRKTSYLNALKKLQEIENAINENRIKSGKKPTQRASLIIDDGNIASEDSSLSDALVLEDEDSQVTSTISPLHSPHKGLPPRPPSHNRPPPPQSLEGLRQMHYHRNDYDKSPIKPKMWSESSLDEPYEKVKKRSSHSHSSSHKRFPSTGSCAEAGGGSNSLQNSPIRGLPHWNSQSSMPSTPDLRVRSPHYVHSTRSVDISPTRLHSLALHFRHRSSSLESQGKLLGSENDTGSPDFYTPRTRSSNGSDPMDDCSSCTSHSSSEHYYPAQMNANYSTLAEDSPSKARQRQRQRQRAAGALGSASSGSMPNLAARGGAGGAGGAGGGVYLHSQSQPSSQYRIKEYPLYIEGGATPVVVRSLESDQEGHYSVKAQFKTSNSYTAGGLFKESWRGGGGDEGDTGRLTPSRSQILRTPSLGREGAHDKGAGRAAVSDELRQWYQRSTASHKEHSRLSHTSSTSSDSGSQYSTSSQSTFVAHSRVTRMPQMCKATSAALPQSQRSSTPSSEIGATPPSSPHHILTWQTGSYNDSCFLDSSLYPELADVQWYGQEKAKPGTLV

SEQ ID NO: 868584 - protein, 874 aa, Homo sapiens
RKLSSALHADGYRSLLSARSSRSSPLTRRLPCWVPLPGLHLSSLSWKGKVCQAGDCHDQTNKGRPKAENLKRTCFVPIFQWRQLENLYFREKKFSVEVHDPRRASVTRRTFGHSGIAVHTWYACPALIKSIWAMAISQHQFYLDRKQSKSKIHAARSLSEIAIDLTETGTLKTSKLANMGSKGKIISGSSGSLLSSGSQESDSSQSAKKDMLAALKSRQEALEETLRQRLEELKKLCLREAELTGKLPVEYPLDPGEEPPIVRRRIGTAFKLDEQKILPKGEEAELERLEREFAIQSQITEAARRLASDPNVSKKLKKQRKTSYLNALKKLQEIENAINENRIKSGKKPTQRASLIIDDGNIASEDSSLSDALVLEDEDSQVTSTISPLHSPHKGLPPRPPSHNRPPPPQSLEGLRQMHYHRNDYDKSPIKPKMWSESSLDEPYEKVKKRSSHSHSSSHKRFPSTGSCAEAGGGSNSLQNSPIRGLPHWNSQSSMPSTPDLRVRSPHYVHSTRSVDISPTRLHSLALHFRHRSSSLESQGKLLGSENDTGSPDFYTPRTRSSNGSDPMDDCSSCTSHSSSEHYYPAQMNANYSTLAEDSPSKARQRQRQRQRAAGALGSASSGSMPNLAARGGAGGAGGAGGGVYLHSQSQPSSQYRIKEYPLYIEGGATPVVVRSLESDQEGHYSVKAQFKTSNSYTAGGLFKESWRGGGGDEGDTGRLTPSRSQILRTPSLGREGAHDKGAGRAAVSDELRQWYQRSTASHKEHSRLSHTSSTSSDSGSQYSTSSQSTFVAHSRVTRMPQMCKATSAALPQSQRSSTPSSEIGATPPSSPHHILTWQTGSYNDSCFLDSSLYPELADVQWYGQEKAKPGTLV

SEQ ID NO: 868585 - protein, 1066 aa, Homo sapiens; identical to SEQ ID NO: 868582

SEQ ID NO: 868586 - protein, 437 aa, Homo sapiens
MVVQAAVAPNRSQRLLLKIPYGSLRRRSVERMTEGRRCQVHLLDDRKLELLVQPKLLAKELLDLVASHFNLKEKEYFGIAFTDETGHLNWLQLDRRVLEHDFPKKSGPVVLYFCVRFYIESISYLKDNATIELFFLNAKSCIYKELIDVDSEVVFELASYILQEAKGDFSSNEVVRSDLKKLPALPTQALKEHPSLAYCEDRVIEHYKKLNGQTRGQAIVNYMSIVESLPTYGVHYYAVKDKQGIPWWLGLSYKGIFQYDYHDKVKPRKIFQWRQLENLYFREKKFSVEVHDPRRASVTRRTFGHSGIAVHTWYACPALIKSIWAMAISQHQFYLDRKQSKSKIHAARSLSEIAIDLTETGTLKTSKLANMGSKGKIISGSSGSLLSSGSQESDSSQSAKKDMLAALKSRQEALEETLRQRLEELKKLCLREAVSLS

SEQ ID NO: 868587 - protein, 1039 aa, Homo sapiens
MAVQLVPDSALGLLMMTEGRRCQVHLLDDRKLELLVQPKLLAKELLDLVASHFNLKEKEYFGIAFTDETGHLNWLQLDRRVLEHDFPKKSGPVVLYFCVRFYIESISYLKDNATIELFFLNAKSCIYKELIDVDSEVVFELASYILQEAKGDFSSNEVVRSDLKKLPALPTQALKEHPSLAYCEDRVIEHYKKLNGQTRGQAIVNYMSIVESLPTYGVHYYAVKDKQGIPWWLGLSYKGIFQYDYHDKVKPRKIFQWRQLENLYFREKKFSVEVHDPRRASVTRRTFGHSGIAVHTWYACPALIKSIWAMAISQHQFYLDRKQSKSKIHAARSLSEIAIDLTETGTLKTSKLANMGSKGKIISGSSGSLLSSGSQESDSSQSAKKDMLAALKSRQEALEETLRQRLEELKKLCLREAELTGKLPVEYPLDPGEEPPIVRRRIGTAFKLDEQKILPKGEEAELERLEREFAIQSQITEAARRLASDPNVSKKLKKQRKTSYLNALKKLQEIENAINENRIKSGKKPTQRASLIIDDGNIASEDSSLSDALVLEDEDSQVTSTISPLHSPHKGLPPRPPSHNRPPPPQSLEGLRQMHYHRNDYDKSPIKPKMWSESSLDEPYEKVKKRSSHSHSSSHKRFPSTGSCAEAGGGSNSLQNSPIRGLPHWNSQSSMPSTPDLRVRSPHYVHSTRSVDISPTRLHSLALHFRHRSSSLESQGKLLGSENDTGSPDFYTPRTRSSNGSDPMDDCSSCTSHSSSEHYYPAQMNANYSTLAEDSPSKARQRQRQRQRAAGALGSASSGSMPNLAARGGAGGAGGAGGGVYLHSQSQPSSQYRIKEYPLYIEGGATPVVVRSLESDQEGHYSVKAQFKTSNSYTAGGLFKESWRGGGGDEGDTGRLTPSRSQILRTPSLGREGAHDKGAGRAAVSDELRQWYQRSTASHKEHSRLSHTSSTSSDSGSQYSTSSQSTFVAHSRVTRMPQMCKATSAALPQSQRSSTPSSEIGATPPSSPHHILTWQTGEATENSPILDGSESPPHQSTDE

SEQ ID NO: 868588 - protein, 450 aa, Homo sapiens
MVVQAAVAPNRSQRLLLKIPYGSLRRRSVERMTEGRRCQVHLLDDRKLELLVQPKLLAKELLDLVASHFNLKEKEYFGIAFTDETGHLNWLQLDRRVLEHDFPKKSGPVVLYFCVRFYIESISYLKDNATIELFFLNAKSCIYKELIDVDSEVVFELASYILQEAKGDFSSNEVVRSDLKKLPALPTQALKEHPSLAYCEDRVIEHYKKLNGQTRGQAIVNYMSIVESLPTYGVHYYAVKDKQGIPWWLGLSYKGIFQYDYHDKVKPRKIFQWRQLENLYFREKKFSVEVHDPRRASVTRRTFGHSGIAVHTWYACPALIKSIWAMAISQHQFYLDRKQSKSKIHAARSLSEIAIDLTETGTLKTSKLANMGSKGKIISGSSGSLLSSGRQRPAGGTPPEHGWDPRGDPGRWGELQLGRLQGKLLQSWLCFPDQGWDPNANLRKLLPGIK

SEQ ID NO: 868589 - protein, 933 aa, Homo sapiens
RYHKALYCVYKELIDVDSEVVFELASYILQEAKGDFSSNEVVRSDLKKLPALPTQALKEHPSLAYCEDRVIEHYKKLNGQTRGQAIVNYMSIVESLPTYGVHYYAVKDKQGIPWWLGLSYKGIFQYDYHDKVKPRKIFQWRQLENLYFREKKFSVEVHDPRRASVTRRTFGHSGIAVHTWYACPALIKSIWAMAISQHQFYLDRKQSKSKIHAARSLSEIAIDLTETGTLKTSKLANMGSKGKIISGSSGSLLSSGSQESDSSQSAKKDMLAALKSRQEALEETLRQRLEELKKLCLREAELTGKLPVEYPLDPGEEPPIVRRRIGTAFKLDEQKILPKGEEAELERLEREFAIQSQITEAARRLASDPNVSKKLKKQRKTSYLNALKKLQEIENAINENRIKSGKKPTQRASLIIDDGNIASEDSSLSDALVLEDEDSQVTSTISPLHSPHKGLPPRPPSHNRPPPPQSLEGLRQMHYHRNDYDKSPIKPKMWSESSLDEPYEKVKKRSSHSHSSSHKRFPSTGSCAEAGGGSNSLQNSPIRGLPHWNSQSSMPSTPDLRVRSPHYVHSTRSVDISPTRLHSLALHFRHRSSSLESQGKLLGSENDTGSPDFYTPRTRSSNGSDPMDDCSSCTSHSSSEHYYPAQMNANYSTLAEDSPSKARQRQRQRQRAAGALGSASSGSMPNLAARGGAGGAGGAGGGVYLHSQSQPSSQYRIKEYPLYIEGGATPVVVRSLESDQEGHYSVKAQFKTSNSYTAGGLFKESWRGGGGDEGDTGRLTPSRSQILRTPSLGREGAHDKGAGRAAVSDELRQWYQRSTASHKEHSRLSHTSSTSSDSGSQYSTSSQSTFVAHSRVTRMPQMCKATSAALPQSQRSSTPSSEIGATPPSSPHHILTWQTGSYNDSCFLDSSLYPELADVQWYGQEKAKPGTLV

SEQ ID NO: 868590 - protein, 664 aa, Homo sapiens
MLAALKSRQEALEETLRQRLEELKKLCLREAELTGKLPVEYPLDPGEEPPIVRRRIGTAFKLDEQKILPKGEEAELERLEREFAIQSQITEAARRLASDPNVSKKLKKQRKTSYLNALKKLQEIENAINENRIKSGKKPTQRASLIIDDGNIASEDSSLSDALVLEDEDSQVTSTISPLHSPHKGLPPRPPSHNRPPPPQSLEGLRQMHYHRNDYDKSPIKPKMWSESSLDEPYEKVKKRSSHSHSSSHKRFPSTGSCAEAGGGSNSLQNSPIRGLPHWNSQSSMPSTPDLRVRSPHYVHSTRSVDISPTRLHSLALHFRHRSSSLESQGKLLGSENDTGSPDFYTPRTRSSNGSDPMDDCSSCTSHSSSEHYYPAQMNANYSTLAEDSPSKARQRQRQRQRAAGALGSASSGSMPNLAARGGAGGAGGAGGGVYLHSQSQPSSQYRIKEYPLYIEGGATPVVVRSLESDQEGHYSVKAQFKTSNSYTAGGLFKESWRGGGGDEGDTGRLTPSRSQILRTPSLGREGAHDKGAGRAAVSDELRQWYQRSTASHKEHSRLSHTSSTSSDSGSQYSTSSQSTFVAHSRVTRMPQMCKATSAALPQSQRSSTPSSEIGATPPSSPHHILTWQTGSYNDSCFLDSSLYPELADVQWYGQEKAKPGTLV

SEQ ID NO: 868591 - protein, 1066 aa, Homo sapiens; identical to SEQ ID NO: 868582

SEQ ID NO: 868592 - protein, 155 aa, Homo sapiens
MVVQAAVAPNRSQRLLLKIPYGSLRRRSVERMTEGRRCQVHLLDDRKLELLVQPKLLAKELLDLVASHFNLKEKEYFGIAFTDETGHLNWLQLDRRVLEHDFPKKSGPVVLYFCVRFYIESISYLKDNATIELFFLNAKSCIYKMESHSVAQAVV

SEQ ID NO: 868593 - protein, 505 aa, Homo sapiens
EARPMGTRAARPAGLPCGAENPARRRLALGARQQIHSWSPRTPSTRLTAPAGPARGVARPAMAPDPVAAETAAQGPTPRYFTWDEVAQRSGCEERWLVIDRKVYNISEFTRRHPGGSRVISHYAGQDATDPFVAFHINKGLVKKYMNSLLIGELSPEQPSFEPTKNKELTDEFRELRATVERMGLMKANHVFFLLYLLHILLLDGAAWLTLWVFGTSFLPFLLCAVLLSAVQAQAGWLQHDFGHLSVFSTSKWNHLLHHFVIGHLKGAPASWWNHMHFQHHAKPNCFRKDPDINMHPFFFALGKILSVELGKQKKKYMPYNHQHKYFFLIGPPALLPLYFQWYIFYFVIQRKKWVDLAWMITFYVRFFLTYVPLLGLKAFLGLFFIVRFLESNWFVWVTQMNHIPMHIDHDRNMDWVSTQLQATCNVHKSAFNDWFSGHLNFQIEHHLFPTMPRHNYHKVAPLVQSLCAKHGIEYQSKPLLSAFADIIHSLKESGQLWLDAYLHQ

SEQ ID NO: 868594 - protein, 104 aa, Homo sapiens
MPSPTASAKTQTSTCIPSSLPWGRSSLWRCVEVSVERSWGIGGSQHRGVGEDAHDVVSVGKTLGLGWLGLLPFWKFWKATGNRWGLPRRESPSSLESSVSKPLL

SEQ ID NO: 868595 - protein, 505 aa, Homo sapiens; identical to SEQ ID NO: 868593

SEQ ID NO: 868596 - protein, 505 aa, Homo sapiens; identical to SEQ ID NO: 868593

SEQ ID NO: 868597 - protein, 493 aa, Homo sapiens
EARPMGTRAARPAGLPCGAENPARRRLALGARQQIHSWSPRTPSTRLTAPAGPARGVARPAMAPDPVAAETAAQGPTPRYFTWDEVAQRSGCEERWLVIDRKVYNISEFTRRHPGGSRVISHYAGQDATDPFVAFHINKGLVKKYMNSLLIGELSPEQPSFEPTKNKELTDEFRELRATVERMGLMKANHVFFLLYLLHILLLDGAAWLTLWVFGTSFLPFLLCAVLLSAVQAQAGWLQHDFGHLSVFSTSKWNHLLHHFVIGHLKGAPASWWNHMHFQHHAKPNCFRKDPDINMHPFFFALGKILSVEVRGGISEKVGPPALLPLYFQWYIFYFVIQRKKWVDLAWMITFYVRFFLTYVPLLGLKAFLGLFFIVRFLESNWFVWVTQMNHIPMHIDHDRNMDWVSTQLQATCNVHKSAFNDWFSGHLNFQIEHHLFPTMPRHNYHKVAPLVQSLCAKHGIEYQSKPLLSAFADIIHSLKESGQLWLDAYLHQ

SEQ ID NO: 868598 - protein, 360 aa, Homo sapiens
MNSLLIGELSPEQPSFEPTKNKELTDEFRELRATVERMGLMKANHVFFLLYLLHILLLDGAAWLTLWVFGTSFLPFLLCAVLLSAVQAQAGWLQHDFGHLSVFSTSKWNHLLHHFVIGHLKGAPASWWNHMHFQHHAKPNCFRKDPDINMHPFFFALGKILSVELGKQKKKYMPYNHQHKYFFLIGPPALLPLYFQWYIFYFVIQRKKWVDLAWMITFYVRFFLTYVPLLGLKAFLGLFFIVRFLESNWFVWVTQMNHIPMHIDHDRNMDWVSTQLQATCNVHKSAFNDWFSGHLNFQIEHHLFPTMPRHNYHKVAPLVQSLCAKHGIEYQSKPLLSAFADIIHSLKESGQLWLDAYLHQ

SEQ ID NO: 868599 - protein, 432 aa, Homo sapiens
EKFSKSALDPGSPSGFTSHFNLGTAFWRAGGWPLVRTLPESRGLAPSPFIFSRHLQDPFVAFHINKGLVKKYMNSLLIGELSPEQPSFEPTKNKELTDEFRELRATVERMGLMKANHVFFLLYLLHILLLDGAAWLTLWVFGTSFLPFLLCAVLLSAVQAQAGWLQHDFGHLSVFSTSKWNHLLHHFVIGHLKGAPASWWNHMHFQHHAKPNCFRKDPDINMHPFFFALGKILSVELGKQKKKYMPYNHQHKYFFLIGPPALLPLYFQWYIFYFVIQRKKWVDLAWMITFYVRFFLTYVPLLGLKAFLGLFFIVRFLESNWFVWVTQMNHIPMHIDHDRNMDWVSTQLQATCNVHKSAFNDWFSGHLNFQIEHHLFPTMPRHNYHKVAPLVQSLCAKHGIEYQSKPLLSAFADIIHSLKESGQLWLDAYLHQ

SEQ ID NO: 868600 - protein, 214 aa, Homo sapiens
  misc_feature (6)..(6): Xaa can be any naturally occurring amino acid
AGLYAXEVKDIGKILSVELGKQKKKYMPYNHQHKYFFLIGPPALLPLYFQWYIFYFVIQRKKWVDLAWMITFYVRFFLTYVPLLGLKAFLGLFFIVRFLESNWFVWVTQMNHIPMHIDHDRNMDWVSTQLQATCNVHKSAFNDWFSGHLNFQIEHHLFPTMPRHNYHKVAPLVQSLCAKHGIEYQSKPLLSAFADIIHSLKESGQLWLDAYLHQ

SEQ ID NO: 868601 - protein, 505 aa, Homo sapiens; identical to SEQ ID NO: 868593

SEQ ID NO: 868602 - protein, 378 aa, Homo sapiens
EARPMGTRAARPAGLPCGAENPARRRLALGARQQIHSWSPRTPSTRLTAPAGPARGVARPAMAPDPVAAETAAQGPTPRYFTWDEVAQRSGCEERWLVIDRKVYNISEFTRRHPGGSRVISHYAGQDATDPFVAFHINKGLVKKYMNSLLIGELSPEQPSFEPTKNKELTDEFRELRATVERMGLMKANHVFFLLYLLHILLLDGAAWLTLWVFGTSFLPFLLCAVLLSAVQAQAGWLQHDFGHLSVFSTSKWNHLLHHFVIGHLKGAPASWWNHMHFQHHAKPNCFRKDPDINMHPFFFALGKILSVELGKQKKKYMPYNHQHKYFFLIGPPALLPLYFQWYIFYFVIQRKKWVDLAWISKQEYDEAGPSIVHRKCF

SEQ ID NO: 868603 - protein, 335 aa, Homo sapiens
EARPMGTRAARPAGLPCGAENPARRRLALGARQQIHSWSPRTPSTRLTAPAGPARGVARPAMAPDPVAAETAAQGPTPRYFTWDEVAQRSGCEERWLVIDRKVYNISEFTRRHPGGSRVISHYAGQDATDPFVAFHINKGLVKKYMNSLLIGELSPEQPSFEPTKNKELTDEFRELRATVERMGLMKANHVFFLLYLLHILLLDGAAWLTLWVFGTSFLPFLLCAVLLSAVQAQAGWLQHDFGHLSVFSTSKWNHLLHHFVIGHLKGAPASWWNHMHFQHHAKPNCFRKDPDINMHPFFFALGKILSVELGTEEKYTCRKRLAKGPIKQMVPNSS

SEQ ID NO: 868604 - protein, 122 aa, Homo sapiens
MSVLRHVGIGSDAPPMERFVNTKTWKVRGLSTKRHGRLGLSTQRHGRLEVCQHKDTGRMGCRRFRCFPFGHILLSWRTRFKTAWVGKLEASWMQWLMPVIPTLLGGPGRRITWAQEVKPAAS

SEQ ID NO: 868605 - protein, 505 aa, Homo sapiens; identical to SEQ ID NO: 868593

SEQ ID NO: 868606 - protein, 471 aa, Homo sapiens
MKHNYSGAIHKHLSLDRARAKPLPARVRHCGPTVREDAAQGPTPRYFTWDEVAQRSGCEERWLVIDRKVYNISEFTRRHPGGSRVISHYAGQDATDPFVAFHINKGLVKKYMNSLLIGELSPEQPSFEPTKNKELTDEFRELRATVERMGLMKANHVFFLLYLLHILLLDGAAWLTLWVFGTSFLPFLLCAVLLSAVQAQAGWLQHDFGHLSVFSTSKWNHLLHHFVIGHLKGAPASWWNHMHFQHHAKPNCFRKDPDINMHPFFFALGKILSVELGKQKKKYMPYNHQHKYFFLIGPPALLPLYFQWYIFYFVIQRKKWVDLAWMITFYVRFFLTYVPLLGLKAFLGLFFIVRFLESNWFVWVTQMNHIPMHIDHDRNMDWVSTQLQATCNVHKSAFNDWFSGHLNFQIEHHLFPTMPRHNYHKVAPLVQSLCAKHGIEYQSKPLLSAFADIIHSLKESGQLWLDAYLHQ

SEQ ID NO: 868607 - protein, 419 aa, Homo sapiens
MKRRERGLEKWSLGSGDGGQQHAHTNKGSRLPAVHSICSPEPQDPFVAFHINKGLVKKYMNSLLIGELSPEQPSFEPTKNKELTDEFRELRATVERMGLMKANHVFFLLYLLHILLLDGAAWLTLWVFGTSFLPFLLCAVLLSAVQAQAGWLQHDFGHLSVFSTSKWNHLLHHFVIGHLKGAPASWWNHMHFQHHAKPNCFRKDPDINMHPFFFALGKILSVELGKQKKKYMPYNHQHKYFFLIGPPALLPLYFQWYIFYFVIQRKKWVDLAWMITFYVRFFLTYVPLLGLKAFLGLFFIVRFLESNWFVWVTQMNHIPMHIDHDRNMDWVSTQLQATCNVHKSAFNDWFSGHLNFQIEHHLFPTMPRHNYHKVAPLVQSLCAKHGIEYQSKPLLSAFADIIHSLKESGQLWLDAYLHQ

SEQ ID NO: 868608 - protein, 505 aa, Homo sapiens; identical to SEQ ID NO: 868593

SEQ ID NO: 868609 - protein, 135 aa, Homo sapiens
EARPMGTRAARPAGLPCGAENPARRRLALGARQQIHSWSPRTPSTRLTAPAGPARGVARPAMAPDPVAAETAAQGPTPRYFTWDEVAQRSGCEERWLVIDRKVYNITLTPASPSNPQPLLPGGRITTLPLQQHLL

SEQ ID NO: 868610 - protein, 252 aa, Homo sapiens
GEQRRGVTQERQGTVAACGACYWLLGLMAVRASFENNCEIGCFAKLTNTYCLVAIGGSENFYSVFEGELSDTIPVVHASIAGCRIIGRMCVGNRHGLLVPNNTTDQELQHIRNSLPDTVQIRRVEERLSALGNVTTCNDYVALVHPDLDRETEEILADVLKVEVFRQTVADQVLVGSYCVFSNQGGLVHPKTSIEDQDELSSLLQVPLVAGTVNRGSEVIAAGMVVNDWCAFCGLEHNQHRAVSGGECLQAE

SEQ ID NO: 868611 - protein, 100 aa, Homo sapiens
HLEDYADRLGASLQQTVADQVLVGSYCVFSNQGGLVHPKTSIEDQDELSSLLQVPLVAGTVNRGSEVIAAGMVVNDWCAFCGLEHNQHRAVSGGECLQAE

SEQ ID NO: 868612 - protein, 163 aa, Homo sapiens
  misc_feature (157)..(157): Xaa can be any naturally occurring amino acid
  misc_feature (163)..(163): Xaa can be any naturally occurring amino acid
MAVRASFENNCEIGCFAKLTNTYCLVAIGGSENFYSVFEGELSDTIPVVHASIAGCRIIGRMCVGNRHGLLVPNNTTDQELQHIRNSLPDTVQIRRVEERLSALGNVTTCNDYVALVHPDLDRETEEILADVLKVEVFRQTWRQCYRARASHQEVSXSSFRSX

SEQ ID NO: 868613 - protein, 168 aa, Homo sapiens
MAVRASFENNCEIGCFAKLTNTYCLVAIGGSENFYSVFEGELSDTIPVVHASIAGCRIIGRMCVDRETEEILADVLKVEVFRQTVADQVLVGSYCVFSNQGGLVHPKTSIEDQDELSSLLQVPLVAGTVNRGSEVIAAGMVVNDWCAFCGLEHNQHRAVSGGECLQAE

SEQ ID NO: 868614 - protein, 149 aa, Homo sapiens [sequence omitted]

SEQ ID NO: 868615 - protein, 252 aa, Homo sapiens; identical to SEQ ID NO: 868610

SEQ ID NO: 868616 - protein, 225 aa, Homo sapiens
MAVRASFENNCEIGCFAKLTNTYCLVAIGGSENFYSVFEGELSDTIPVVHASIAGCRIIGRMCVGNRHGLLVPNNTTDQELQHIRNSLPDTVQIRRVEERLSALGNVTTCNDYVALVHPDLDRETEEILADVLKVEVFRQTVADQVLVGSYCVFSNQGGLVHPKTSIEDQDELSSLLQVPLVAGTVNRGSEVIAAGMVVNDWCAFCGLEHNQHRAVSGGECLQAE

SEQ ID NO: 868617 - protein, 225 aa, Homo sapiens; identical to SEQ ID NO: 868616

SEQ ID NO: 868618 - protein, 225 aa, Homo sapiens; identical to SEQ ID NO: 868616

SEQ ID NO: 868619 - protein, 225 aa, Homo sapiens; identical to SEQ ID NO: 868616

SEQ ID NO: 868620 - protein, 225 aa, Homo sapiens; identical to SEQ ID NO: 868616

SEQ ID NO: 868621 - protein, 236 aa, Homo sapiens
  misc_feature (5)..(5): Xaa can be any naturally occurring amino acid
RGECXYWLLGLMAVRASFENNCEIGCFAKLTNTYCLVAIGGSENFYSVFEGELSDTIPVVHASIAGCRIIGRMCVGNRHGLLVPNNTTDQELQHIRNSLPDTVQIRRVEERLSALGNVTTCNDYVALVHPDLDRETEEILADVLKVEVFRQTVADQVLVGSYCVFSNQGGLVHPKTSIEDQDELSSLLQVPLVAGTVNRGSEVIAAGMVVNDWCAFCGLEHNQHRAVSGGECLQAE

SEQ ID NO: 868622 - protein, 225 aa, Homo sapiens; identical to SEQ ID NO: 868616

SEQ ID NO: 868623 - protein, 225 aa, Homo sapiens; identical to SEQ ID NO: 868616

SEQ ID NO: 868624 - protein, 225 aa, Homo sapiens; identical to SEQ ID NO: 868616

SEQ ID NO: 868625 - protein, 225 aa, Homo sapiens; identical to SEQ ID NO: 868616

SEQ ID NO: 868626 - protein, 225 aa, Homo sapiens; identical to SEQ ID NO: 868616

SEQ ID NO: 868627 - protein, 225 aa, Homo sapiens; identical to SEQ ID NO: 868616

SEQ ID NO: 868628 - protein, 164 aa, Homo sapiens
MCVGNRHGLLVPNNTTDQELQHIRNSLPDTVQIRRVEERLSALGNVTTCNDYVALVHPDLDRETEEILADVLKVEVFRQTVADQVLVGSYCVFSNQGGLVHPKTSIEDQDELSSLLQVPLVAGTVNRGSEVIAAGMVVNDWCAFCGLEHNQHRAVSGGECLQAE

SEQ ID NO: 868629 - protein, 156 aa, Homo sapiens
GEQRRGVTQERQGTVAACGACYWLLGLMAVRASFENNCEIGCFAKLTNTYCLVAIGGSENFYRCGGSPGAYGGGEACAGVKSSGSGRVPAPLPRHHRVHVPTVCSRASSPIPSPWCTRLSPAAASSGACVWTGRQKKFWQMCSRWKSSDRQWPTRC

SEQ ID NO: 868630 - protein, 88 aa, Homo sapiens
GEQRRGVTQERQGTVAACGACYWLLGLMAVRASFENNCEIGCFAKLTNTYCLVAIGGSENFYRTGRQKKFWQMCSRWKSSDRQWPTRC

SEQ ID NO: 868631 - protein, 168 aa, Homo sapiens; identical to SEQ ID NO: 868613

SEQ ID NO: 868632 - protein, 168 aa, Homo sapiens; identical to SEQ ID NO: 868613

SEQ ID NO: 868633 - protein, 134 aa, Homo sapiens
MAVRASFENNCEIGCFAKLTNTYCLVAIGGSENFYSVFEGELSDTIPVVHASIAGCRIIGRMCVGNRHGLLVPNNTTDQELQHIRNSLPDTVQIRRVEERLSALGNVTTCNDYVALVHPDLDTNVQVPARVYHV

SEQ ID NO: 868634 - protein, 194 aa, Homo sapiens
MAVRASFENNCEIGCFAKLTNTYCLVAIGGSENFYSVFEGELSDTIPVVHASIAGCRIIGRMCVGNRHGLLVPNNTTDQELQHIRNSLPDDRETEEILADVLKVEVFRQTVADQVLVGSYCVFSNQGGLVHPKTSIEDQDELSSLLQVPLVAGTVNRGSEVIAAGMVVNDWCAFCGLEHNQHRAVSGGECLQAE

SEQ ID NO: 868635 - protein, 117 aa, Homo sapiens
MSNDYVALVHPDLDRETEEILADVLKVEVFRQTVADQVLVGSYCVFSNQGGLVHPKTSIEDQDELSSLLQVPLVAGTVNRGSEVIAAGMVVNDWCAFCGLEHNQHRAVSGGECLQAE

SEQ ID NO: 868636 - protein, 225 aa, Homo sapiens; identical to SEQ ID NO: 868616

SEQ ID NO: 868637 - protein, 285 aa, Homo sapiens
MEGGVGSLPNLAPLGQFHVVGTVKHSGATGTTPKLETALIESGAEPRAEIRHEGYWLLGLMAVRASFENNCEIGCFAKLTNTYCLVAIGGSENFYSVFEGELSDTIPVVHASIAGCRIIGRMCVGNRHGLLVPNNTTDQELQHIRNSLPDTVQIRRVEERLSALGNVTTCNDYVALVHPDLDRETEEILADVLKVEVFRQTVADQVLVGSYCVFSNQGGLVHPKTSIEDQDELSSLLQVPLVAGTVNRGSEVIAAGMVVNDWCAFCGLEHNQHRAVSGGECLQAE

SEQ ID NO: 868638 - protein, 225 aa, Homo sapiens; identical to SEQ ID NO: 868616

SEQ ID NO: 868639 - protein, 133 aa, Homo sapiens
VTLRIQSPRQGACYWLLGLMAVRASFENNCEIGCFAKLTNTYCLVAIGGSENFYSVFEGELSDTIPVVHASIAGCRIIGRMCVGNRHGLLVPNNTTDQELQHIRNSLPDTVQIRRVEERSLSCDWEILKSDPS

SEQ ID NO: 868640 - protein, 225 aa, Homo sapiens; identical to SEQ ID NO: 868616

SEQ ID NO: 868641 - protein, 225 aa, Homo sapiens; identical to SEQ ID NO: 868616

SEQ ID NO: 868642 - protein, 225 aa, Homo sapiens; identical to SEQ ID NO: 868616

SEQ ID NO: 868643 - protein, 244 aa, Homo sapiens
VTLRIQSPRQGACYWLLGLMAVRASFENNCEIGCFAKLTNTYCLVAIGGSENFYSVFEGELSDTIPVVHASIAGCRIIGRMCVGNRHGLLVPNNTTDQELQHIRNSLPDTVQIRRVEERLSALGNVTTCNDYVALVHPDLDRETEEILADVLKVEVFRQTVADQVLVGSYCVFSNQGGLVHPKTSIEDQDELSSLLQVPLVAGTVNRGSEVIAAGMVVNDWCAFCGLEHNQHRAVSGGECLQAE

SEQ ID NO: 868644 - protein, 225 aa, Homo sapiens; identical to SEQ ID NO: 868616

SEQ ID NO: 868645 - protein, 285 aa, Homo sapiens; identical to SEQ ID NO: 868637

SEQ ID NO: 868646 - protein, 225 aa, Homo sapiens; identical to SEQ ID NO: 868616

SEQ ID NO: 868647 - protein, 225 aa, Homo sapiens; identical to SEQ ID NO: 868616

SEQ ID NO: 868648 - protein, 225 aa, Homo sapiens; identical to SEQ ID NO: 868616

SEQ ID NO: 868649 - protein, 187 aa, Homo sapiens
MAVRASFENNCEIGCFAKLTNTYCLVAIGGSENFYSVFEGELSDTIPVVHASIAGCRIIGRMCVGNRHGLLVPNNTTDQELQHIRNSLPDTVQIRRVEERLSALGNVTTCNDYVALVHPDLDRVRQPNLTQESQGHPSQWLATVLSQQAAIRGLSCGFSIWALEFQVLIGIVITEALSSVRKKLGRV

SEQ ID NO: 868650 - protein, 147 aa, Homo sapiens
MAVRASFENNCEIGCFAKLTNTYCLVAIGGSENFYSVFEGELSDTIPVVHASIAGCRIIGRMCVGNRHGLLVPNNTTDQELQHIRNSLPDTVQIRRVEERLSALGNVTTCNDYVALVHPDLSGRPGASRKLLCLQQSGRAGASQDFN

SEQ ID NO: 868651 - protein, 194 aa, Homo sapiens; identical to SEQ ID NO: 868634

SEQ ID NO: 868652 - protein, 239 aa, Homo sapiens
MAVRASFENNCEIGCFAKLTNTYCLVAIGGSENFYSVFEGELSDTIPVVHASIAGCRIIGRMCVGNRHGLLVPNNTTDQELQHIRNSLPDTVQIRRVEERLSALGNVTTCNDYVALVHPDLDRETEEILADVLKVEVFRQTVADQVLVGSYCVFSNQGGLVHPKTSIEDQDELSSLLQVPLVAGTVNRGSEVIAAGMVVNDWCEGLGTQPFSTCAYRLDLSLLQKPALLCWLAGPVAAG

SEQ ID NO: 868653 - protein, 246 aa, Homo sapiens
WLVEAGGEIGTEARAGILEGLMAVRASFENNCEIGCFAKLTNTYCLVAIGGSENFYSVFEGELSDTIPVVHASIAGCRIIGRMCVGNRHGLLVPNNTTDQELQHIRNSLPDTVQIRRVEERLSALGNVTTCNDYVALVHPDLDRETEEILADVLKVEVFRQTVADQVLVGSYCVFSNQGGLVHPKTSIEDQDELSSLLQVPLVAGTVNRGSEVIAAGMVVNDWCAFCGLEHNQHRAVSGGECLQAE

SEQ ID NO: 868654 - protein, 194 aa, Homo sapiens; identical to SEQ ID NO: 868634

SEQ ID NO: 868655 - protein, 108 aa, Homo sapiens
MAVRASFENNCEIGCFAKLTNTYCLVAIGGSENFYSVFEGELSDTIPVVHASIAGCRIIGRMCVGNRHGLLVPNNTTDQELQHIRNSLPDTVQIRRVEERSLSCDWGS

SEQ ID NO: 868656 - protein, 106 aa, Homo sapiens
MAVRASFENNCEIGCFAKLTNTYCLVAIGGSENFYSVFEGELSDTIPVVHASIAGCRIIGRMCVGNRHGLLVPNNTTDQELQHIRNSLPDNLYRMLAGRWQRAHWD

SEQ ID NO: 868657 - protein, 421 aa, Homo sapiens
IPFSVSWGVLLLAGLCCLVPSSLVEDPQEDAAQKTDTSHHDQGDWEDLACQKISYNVTDLAFDLYKELADLSQTSNVLVTPTSVAMAFAMLSLGTKADTRTEILEGLNVNLTETPEAKIHECFQQVLQALSRPDTRLQLTTGSSLFVNKSMKLVDTFLEDTKKLYHSEASSINFRDTEEAKEQINNYVEKRTGRKVVDLVKHLKKDTSLALVDYISFHGKWKDKFKAERIMVEGFHVDDKTIIRVPMINHLGRFDIHRDRELSSWVLAQHYVGNATAFFILPDPKKMWQLEEKLTYSHLENIQRAFDIRSINLHFPKLSISGTYKLKRVPRNLGITKIFSNEADLSGVSQEAPLKLSKAVHVAVLTIDEKGTEATGAPHLEEKAWSKYQTVMFNRPFLVIIKEYITNFPLFIGKVVNPTQK

SEQ ID NO: 868658 - protein, 167 aa, Homo sapiens
MATPASAPDTRALVADFVGYKLRQKGYVCGAGPGEGPAADPLHQAMRAAGDEFETRFRRTFSDLAAQLHVTPGSAQQRFTQVSDELFQGGPNWGRLVAFFVFGAALCAESVNKEMEPLVGQVQEWMVAYLETRLADWIHSSGGWELEAIKARVREMEEEAEKLKELQ

SEQ ID NO: 868659 - protein, 121 aa, Homo sapiens
MATPASAPDTRALVADFVGYKLRQKGYVCGAGPGEGPAADPLHQAMRAAGDEFETRFRRTFSDLAAQLHVTPGSAQQRFTQVSDELFQGGPNWGRLVAFFVFGAALCAESCFQSLGPLYPN

SEQ ID NO: 868660 - protein, 193 aa, Homo sapiens
MATPASAPDTRALVADFVGYKLRQKGYVCGAGPGEGPAADPLHQAMRAAGDEFETRFRRTFSDLAAQLHVTPGSAQQRFTQVSDELFQGGPNWGRLVAFFVFGAALCAESVNKEMEPLVGQVQEWMVAYLETRLADWIHSSGGWAEFTALYGDGALEEARRLREGNWASVRTVLTGAVALGALVTVGAFFASK

SEQ ID NO: 868661 - protein, 193 aa, Homo sapiens; identical to SEQ ID NO: 868660

SEQ ID NO: 868662 - protein, 193 aa, Homo sapiens; identical to SEQ ID NO: 868660

SEQ ID NO: 868663 - protein, 123 aa, Homo sapiens
SEDPPIRARTLSPRPPLPPPSASFFCRSWCCLCARLVRTWYLFCEAAAEETPALAMADEKPKEGVKTENNDHINLKVAGQDGSVVQFKIKRHTPLSKLMKAYCERQGLSMRQIRFRFDGQPIK

SEQ ID NO: 868664 - protein, 128 aa, Homo sapiens
RARRVGGGSARRARTLSPRPPLPPPSASFFCRSWCCLCARLVRTWYLFCEAAAEETPALAMADEKPKEGVKTENNDHINLKVAGQDGSVVQFKIKRHTPLSKLMKAYCERQGLSMRQIRFRFDGQPIK

SEQ ID NO: 868665 - protein, 138 aa, Homo sapiens
SPETRHTIGDTPGRLHAQGPVRARTLSPRPPLPPPSASFFCRSWCCLCARLVRTWYLFCEAAAEETPALAMADEKPKEGVKTENNDHINLKVAGQDGSVVQFKIKRHTPLSKLMKAYCERQGLSMRQIRFRFDGQPIK

SEQ ID NO: 868666 - protein, 128 aa, Homo sapiens; identical to SEQ ID NO: 868664

SEQ ID NO: 868667 - protein, 128 aa, Homo sapiens; identical to SEQ ID NO: 868664

SEQ ID NO: 868668 - protein, 128 aa, Homo sapiens; identical to SEQ ID NO: 868664

SEQ ID NO: 868669 - protein, 123 aa, Homo sapiens
MDGSHQEVCVLVAKIMISVLAASFFCRSWCCLCARLVRTWYLFCEAAAEETPALAMADEKPKEGVKTENNDHINLKVAGQDGSVVQFKIKRHTPLSKLMKAYCERQGLSMRQIRFRFDGQPIK

SEQ ID NO: 868670 - protein, 128 aa, Homo sapiens; identical to SEQ ID NO: 868664

SEQ ID NO: 868671 - protein, 128 aa, Homo sapiens; identical to SEQ ID NO: 868664

SEQ ID NO: 868672 - protein, 114 aa, Homo sapiens
RARRVGGGSARRARTLSPRPPLPPPSASFFCRSWCCLCARLVRTWYLFCEAAAEETPALAMADEKPKVAGQDGSVVQFKIKRHTPLSKLMKAYCERQGLSMRQIRFRFDGQPIK

SEQ ID NO: 868673 - protein, 128 aa, Homo sapiens; identical to SEQ ID NO: 868664

SEQ ID NO: 868674 - protein, 123 aa, Homo sapiens; identical to SEQ ID NO: 868663

SEQ ID NO: 868675 - protein, 128 aa, Homo sapiens; identical to SEQ ID NO: 868664

SEQ ID NO: 868676 - protein, 117 aa, Homo sapiens
RARRVGGGSARRARTLSPRPPLPPPSASFFCRSWCCLCARLVRTWYLFCEAAAEETPALAMADEKPKEGVKTENNDHINLKVAGQDGSVVQFKIKRHTPLSKLMKAYCERQCGNWHG

SEQ ID NO: 868677 - protein, 511 aa, Homo sapiens
MAALRLLASVLGRGVPAGGSGLALSQGCARCFATSPRPRAKFYADPVEMVKDISDGATVMIGGFGLCGIPENLIAALLRTRVKDLQVVSSNVGVEDFGLGLLLAARQVRRIVCSYVGENTLCESQYLAGELELELTPQGTLAERIRAGGAGVPAFYTPTGYGTLVQEGGAPIRYTPDGHLALMSQPREVREFNGDHFLLERAIRADFALVKGWKADRAGNVVFRRSARNFNVPMCKAADVTAVEVGASPQKTSTFLNIYVGRVIKGQKYEKRIERLTIRKEEDGDAGKEEDARTRIIRRAALEFEDGMYANLGIGIPLLASNFISPSMTVHLHSENGILGLGPFPTEDEVDADLINAGKQTVTVLPGGCFFASDDSFAMIRGGHIQLTMLGAMQVSKYGDLANWMIPGKKVKGMGGAMDLVSSQKTRVVVTMQHCTKDNTPKIMEKCTMPLTGKRCVDRIITEKAVFDVHRKKGLTLRELWEGLTVDDIKKSTGCAFAVSPNLRPMQQVAP

SEQ ID NO: 868678 - protein, 112 aa, Homo sapiens
FPAANQMLRRDLNMRRAALCFTAAYPTQSSIPFKSQASVIPESEKKGFNSQAKRFPHKKVMTLSQGFFRFSLDFSLAGQARSVWLLCLSVDSGGQCAPRSRGTSSTEGHRLD

SEQ ID NO: 868679 - protein, 490 aa, Homo sapiens
MKKCHLGLDINNEKEAVLVSDRGAEKAPWEHGRGTSWCIVETARRPAGLVLRRTCSRTFHQTNGTRHRILLTWTTLHRKMNALANIPDVPVKYRKNDIPGPGFYNVIHQSPVSNSVSLSKKGTCMFPSMCARLDTIISKYPAANAYTIPSDFISKRDFSNSCSSMFQLPSFMKALKFETPAPNYYNASVSCCKQRNNVCTRAGFMSKTQRGSFAFADKGPPPGHYDINESLVKQSPNTLMSCFKSKTNRGLKLTSTGPGPGYYNPSDCTKVPKKTLFPKNPILNFSAQPSPLPPKPPFPGPGQYEIVDYLGPRKHFISSASFVSNTSRWTAAPPQPGLPGPATYKPELPGKQSFLYNEEQEMDPGSVGMSHKVKENSSHQPTLPSVPRTFLRRRPIMSVAADNLGGGSTTLAWHPSRTAAIAFVLSWRHCSLETSPQPHRLQWLPEQKGGVDRAPWLLPHAPIQAAFRHDSLPQTEGTPEAQTSRRISPP

SEQ ID NO: 868680 - protein, 458 aa, Homo sapiens
MDNSAQKNERTGKHPRRASEVQKGFTAAYPTQSSIPFKSQASVIPESEKKGFNSQAKRFPHKKNDIPGPGFYNVIHQSPVSNSVSLSKKGTCMFPSMCARLDTIISKYPAANAYTIPSDFISKRDFSNSCSSMFQLPSFMKALKFETPAPNYYNASVSCCKQRNNVCTRAGFMSKTQRGSFAFADKGPPPGHYDINESLVKQSPNTLMSCFKSKTNRGLKLTSTGPGPGYYNPSDCTKVPKKTLFPKNPILNFSAQPSPLPPKPPFPGPGQYEIVDYLGPRKHFISSASFVSNTSRWTAAPPQPGLPGPATYKPELPGKQSFLYNEEQEMDPGSVGMSHKVKENSSHQPTLPSVPRTFLRRRPIMSVAADNLGGGSTTLAWHPSRTAAIAFVLSWRHCSLETSPQPHRLQWLPEQKGGVDRAPWLLPHAPIQAAFRHDSLPQTEGTPEAQTSRRISPP

SEQ ID NO: 868681 - protein, 366 aa, Homo sapiens
MFPSMCARLDTIISKYPAANAYTIPSDFISKRDFSNSCSSMFQLPSFMKALKFETPAPNYYNASVSCCKQRNNVCTRAGFMSKTQRGSFAFADKGPPPGHYDINESLVKQSPNTLMSCFKSKTNRGLKLTSTGPGPGYYNPSDCTKVPKKTLFPKNPILNFSAQPSPLPPKPPFPGPGQYEIVDYLGPRKHFISSASFVSNTSRWTAAPPQPGLPGPATYKPELPGKQSFLYNEEQEMDPGSVGMSHKVKENSSHQPTLPSVPRTFLRRRPIMSVAADNLGGGSTTLAWHPSRTAAIAFVLSWRHCSLETSPQPHRLQWLPEQKGGVDRAPWLLPHAPIQAAFRHDSLPQTEGTPEAQTSRRISPP

SEQ ID NO: 868682 - protein, 321 aa, Homo sapiens
MDNSAQKNERTGKHPRRASEVQKGFTAAYPTQSSIPFKSQASVIPESEKKGFNSQAKRFPHKKNDIPGPGFYNVIHQSPVSNSVSLSKKGTCMFPSMCARLDTIISKYPAANAYTIPSDFISKRDFSNSCSSMFQLPSFMKALKFETPAPNYYNASVSCCKQRNNVCTRAGFMSKTQRGSFAFADKGPPPGHYDINESLVKQSPNTLMSCFKSKTNRGLKLTSTGPGPGYYNPSDCTKVPKKTLFPKNPILNFSAQPSPLPPKPPFPGPGQYEIVDYLGPRKHFISSASFVSNTSRWTAAPPQPGLPGPGQRIVLNDCKNQ

SEQ ID NO: 868683 - protein, 116 aa, Homo sapiens
MDNSAQKNERTGKHPRRASEVQKGFTAAYPTQSSIPFKSQASVIPESEKKGFNSQAKRFPHKKVMTLSQGFFRFSLDFSLAGQARSVWLLCLSVDSGGQCAPRSRGTSSTEGHRLD

SEQ ID NO: 868684 - protein, 458 aa, Homo sapiens; identical to SEQ ID NO: 868680

SEQ ID NO: 868685 - protein, 411 aa, Homo sapiens
MNALANIPDVPVKYRKNDIPGPGFYNVIHQSPVSNSVSLSKKGTCMFPSMCARLDTIISKYPAANAYTIPSDFISKRDFSNSCSSMFQLPSFMKALKFETPAPNYYNASVSCCKQRNNVCTRAGFMSKTQRGSFAFADKGPPPGHYDINESLVKQSPNTLMSCFKSKTNRGLKLTSTGPGPGYYNPSDCTKVPKKTLFPKNPILNFSAQPSPLPPKPPFPGPGQYEIVDYLGPRKHFISSASFVSNTSRWTAAPPQPGLPGPATYKPELPGKQSFLYNEEQEMDPGSVGMSHKVKENSSHQPTLPSVPRTFLRRRPIMSVAADNLGGGSTTLAWHPSRTAAIAFVLSWRHCSLETSPQPHRLQWLPEQKGGVDRAPWLLPHAPIQAAFRHDSLPQTEGTPEAQTSRRISPP

SEQ ID NO: 868686 - protein, 458 aa, Homo sapiens; identical to SEQ ID NO: 868680

SEQ ID NO: 868687 - protein, 218 aa, Homo sapiens
MNALANIPDVPVKYRKNDIPGPGFYNVIHQSPVSNSVSLSKKGTCMFPSMCARLDTIISKYPAANAYTIPSDFISKRDFSNSCSSMFQLPSFMKALKFETPAPNYYNASVSCCKQRNNVCTRAGFMSKTQRGSFAFADKGPPPGHYDINESLVKQSPNTLMSCFKSKTNRGLKLTSTGPGPGYYNPSDCTKVPKKTLFPGGSKASDLAGHLPKSTQPT

SEQ ID NO: 868688 - protein, 197 aa, Homo sapiens
MDNSAQKNERTGKHPRRASEVQKGFTAAYPTQSSIPFKSQASVIPESEKKGFNSQAKRFPHKKNDIPGPGFYNVIHQSPVSNSVSLSKKGTCMFPSMCARLDTIISKYPAANAYTIPSDFISKRDFSNSCSSMFQLPSFMKALKFETPAPNYYNASVSCCKQRNNVCTRAGFMSKTQRGSFAFADKGPPPGCGGTYL

SEQ ID NO: 868689 - protein, 407 aa, Homo sapiens
MDTLEEVTWANGSTALPPPLAPNISVPHRCLLLLYEDIGTSRVRYWDLLLLIPNVLFLIFLLWKLPSARAKIRITSSPIFITFYILVFVVALVGIARAVVSMTVSTSNAATVADKILWEITRFFLLAIELSVIILGLAFGHLESKSSIKRVLAITTVLSLAYSVTQGTLEILYPDAHLSAEDFNIYGHGGRQFWLVSSCFFFLVYSLVVILPKTPLKERISLPSRRSFYVYAGILALLNLLQGLGSVLLCFDIIEGLCCVDATTFLYFSFFAPLIYVAFLRGFFGGVCGRRRPRVAAGGTAPSSSMGVRIEAERLCMHTVRMRTHIHTCTWAHTYRYTCTCTQIYAHPPTCAWTRAHAHTDAQACTHAHAHTNTHIRIHTGICTQTCTCTPTCMHTHMNTCSTYTYM

SEQ ID NO: 868690 - protein, 285 aa, Homo sapiens
MDTLEEVTWANGSTALPPPLAPNISVPHRCLLLLYEDIGTSRVRYWDLLLLIPNVLFLIFLLWKLPSARAKIRITSSPIFITFYILVFVVALVGIARAVVSMTVSTSNAATVADKILWEITRFFLLAIELSVIILGLAFGHLESKSSIKRVLAITTVLSLAYSVTQGTLEILYPDAHLSAEDFNIYGHGGRQFWLVSSCFFFLVYSLVVILPKTPLKERISLPSRRSFYVYAGILALLNLLQGLGSVLLCFDIIEGLCCVDATTFLYFSFFAPLIYVAFLRGFFG

SEQ ID NO: 868691 - protein, 285 aa, Homo sapiens; identical to SEQ ID NO: 868690

SEQ ID NO: 868692 - protein, 285 aa, Homo sapiens; identical to SEQ ID NO: 868690

SEQ ID NO: 868693 - protein, 285 aa, Homo sapiens; identical to SEQ ID NO: 868690

SEQ ID NO: 868694 - protein, 43 aa, Homo sapiens
MGVRIEAERLCMHTVRMRTHIHTCTWAHTYRYTCTCTQIYAHP

SEQ ID NO: 868695 - protein, 163 aa, Homo sapiens
LKPHDLCPFFLHTVSTHPFHHEEAGTDAPRLSSHSQGEEGWGFQNKSRWALGSSSQAHSEWVSGDCWSIPSLSGGPISLERKALPESLSEASMPLFSFYQLGAQDPLLLQMPSGRDRGARCTPTPALRCGPAGGPGGCRGCWGLSCQLLEHASRLCRRGGLPG

SEQ ID NO: 868696 - protein, 350 aa, Homo sapiens
MDTLEEVTWANGSTALPPPLAPNISVPHRCLLLLYEDIGTSRVRYWDLLLLIPNVLFLIFLLWKLPSARAKIRITSSPIFITFYILVFVVALVGIARAVVSMTVSTSNAATVADKILWEITRFFLLAIELSVIILGLAFGHLESKSSIKRVLAITTVLSLAYSVTQGTLEILYPDAHLSAEDFNIYGHGGRQFWLVSSCFFFLVYSLVVILPKTPLKERISLPSRRSFYVYAGILALLNLLQGLGSVLLCFDIIEGLCCVDATTFLYFSFFAPLIYVAFLRGFFGSEPKILFSYKCQVDETEEPDVHLPQPYAVARREGLEAAGAAGASAASYSSTHLDSAGGVAYLDDI

SEQ ID NO: 868697 - protein, 216 aa, Homo sapiens
MDTLEEVTWANGSTALPPPLAPNISVPHRCLLLLYEDIGTSRVRYWDLLLLIPNVLFLIFLLWKLPSARAKIRITSSPIFITFYILVFVVALVGIARAVVSMTVSTSNAATVADKILWEITRFFLLAIELSVIILGLAFGHLESKSSIKRVLAITTVLSLAYSVTQGTLEILYPDAHLSAEDFNIYGHGGRQFWLVSSCFFFLVRFRLGQLGWLGP

SEQ ID NO: 868698 - protein, 285 aa, Homo sapiens; identical to SEQ ID NO: 868690

SEQ ID NO: 868699 - protein, 442 aa, Homo sapiens
MRPLHIQDRSKEKNGTQSHSSPAVLSQVSGLAAGGMDTLEEVTWANGSTALPPPLAPNISVPHRCLLLLYEDIGTSRVRYWDLLLLIPNVLFLIFLLWKLPSARAKIRITSSPIFITFYILVFVVALVGIARAVVSMTVSTSNAATVADKILWEITRFFLLAIELSVIILGLAFGHLESKSSIKRVLAITTVLSLAYSVTQGTLEILYPDAHLSAEDFNIYGHGGRQFWLVSSCFFFLVYSLVVILPKTPLKERISLPSRRSFYVYAGILALLNLLQGLGSVLLCFDIIEGLCCVDATTFLYFSFFAPLIYVAFLRGFFGGVCGRRRPRVAAGGTAPSSSMGVRIEAERLCMHTVRMRTHIHTCTWAHTYRYTCTCTQIYAHPPTCAWTRAHAHTDAQACTHAHAHTNTHIRIHTGICTQTCTCTPTCMHTHMNTCSTYTYM

SEQ ID NO: 868700 - protein, 328 aa, Homo sapiens
MDTLEEVTWANGSTALPPPLAPNISVPHRCLLLLYEDIGTSRVRYWDLLLLIPNVLFLIFLLWKLPSARAKIRITSSPIFITFYILVFVVALVGIARAVVSMTVSTSNAATVADKILWEITRFFLLAIELSVIILGLAFGHLESKSSIKRVLAITTVLSLAYSVTQGTLEILYPDAHLSAEDFNIYGHGGRQFWLVSSCFFFLVRFRLGQLGWLGPEGQVGIGFLGFWLWVWAGAPSTFSALPVSVVYSLVVILPKTPLKERISLPSRRSFYVYAGILALLNLLQGLGSVLLCFDIIEGLCCVDATTFLYFSFFAPLIYVAFLRGFFG

SEQ ID NO: 868701 - protein, 110 aa, Homo sapiens
MSLFAQPFLVWRQEAGSANFLFHHGDTEAYGTSQTLDPKLVPGRDSSLQPLTSTTTLLSPGPWTLTKAVTSPTPPKLVAAISTFSHGSLCVQRCNSRSWVSWLTPIIPAL

SEQ ID NO: 868702 - protein, 187 aa, Homo sapiens
DLSRIRIAESSLLPRRAPNHLLTMGNWVVNHWFSVLFLVVWLGLNVFLFVDAFLKYEKADKYYYTRKILGSTLACARASALCLNFNSTLILLPVCRNLLSFLRGTCSFCSRTLRKQLDHNLTFHKLVAYMICLHTAIHIIAHLFNFDCYSRSRQATDGSLASILSSLSHDEKKGGSWLNPIQSRIPI

SEQ ID NO: 868703 - protein, 585 aa, Homo sapiens
DLSRIRIAESSLLPRRAPNHLLTMGNWVVNHWFSVLFLVVWLGLNVFLFVDAFLKYEKADKYYYTRKILGSTLACARASALCLNFNSTLILLPVCRNLLSFLRGTCSFCSRTLRKQLDHNLTFHKLVAYMICLHTAIHIIAHLFNFDCYSRSRQATDGSLASILSSLSHDEKKGGSWLNPIQSQTVEYVTFTSIAGLTGVIMTIALILMVTSATEFIRRSYFEVFWYTHHLFIFYILGLGIHGIGGIVRGQTEESMNESHPRKCAESFEMWDDRDSHCRRPKFEGHPPESWKWILAPVILYICERILRFYRSQQKVVITKVVMHPSKVLELQMNKRGFSMEVGQYIFVNCPSISLLEWHPFTLTSAPEEDFFSIHIRAAGDWTENLIRAFEQQYSPIPRIEVDGPFGTASEDVFQYEVAVLVGAGIGVTPFASILKSIWYKFQCADHNLKTKKIYFYWICRETGAFSWFNNLLTSLEQEMEELGKVGFLNYRLFLTGWDSNIVGHAALNFDKATDIVTGLKQKTSFGRPMWDNEFSTIATSHPKSVVGVFLCGPRTLAKSLRKCCHRYSSLDPRKVQFYFNKENF

SEQ ID NO: 868704 - protein, 263 aa, Homo sapiens
MHPSKVLELQMNKRGFSMEVGQYIFVNCPSISLLEWHPFTLTSAPEEDFFSIHIRAAGDWTENLIRAFEQQYSPIPRIEVDGPFGTASEDVFQYEVAVLVGAGIGVTPFASILKSIWYKFQCADHNLKTKKIYFYWICRETGAFSWFNNLLTSLEQEMEELGKVGFLNYRLFLTGWDSNIVGHAALNFDKATDIVTGLKQKTSFGRPMWDNEFSTIATSHPKSVVGVFLCGPRTLAKSLRKCCHRYSSLDPRKVQFYFNKENF

SEQ ID NO: 868705 - protein, 244 aa, Homo sapiens
MWRSRGPPVDWTSRKIGPLRKMASAPEEDFFSIHIRAAGDWTENLIRAFEQQYSPIPRIEVDGPFGTASEDVFQYEVAVLVGAGIGVTPFASILKSIWYKFQCADHNLKTKKIYFYWICRETGAFSWFNNLLTSLEQEMEELGKVGFLNYRLFLTGWDSNIVGHAALNFDKATDIVTGLKQKTSFGRPMWDNEFSTIATSHPKSVVGVFLCGPRTLAKSLRKCCHRYSSLDPRKVQFYFNKENF

SEQ ID NO: 868706 - protein, 536 aa, Homo sapiens
DLSRIRIAESSLLPRRAPNHLLTMGNWVVNHWFSVLFLVVWLGLNVFLFVDAFLKYEKADKYYYTRKILGSTLACARASALCLNFNSTLILLPVCRNLLSFLRGTCSFCSRTLRKQLDHNLTFHKLVAYMICLHTAIHIIAHLFNFDCYSRSRQATDGSLASILSSLSHDEKKGGSWLNPIQSQTVEYVTFTSIAGLTGVIMTIALILMVTSATEFIRRSYFEVFWYTHHLFIFYILGLGIHGIGGIVRGQTEESMNESHPRKCAESFEMWDDRDSHCRRPKFEGHPPESWKWILAPVILYICERILRFYRSQQKVVITKVVMHPSKVLELQMNKRGFSMEVGQYIFVNCPSISLLEWHPFTLTSAPEEDFFSIHIRAAGDWTENLIRAFEQQYSPIPRIEVDGPFGTASEDVFQYEVAVLVGAGIGVTPFASILKSIWYKFQCADHNLKTKKVGHAALNFDKATDIVTGLKQKTSFGRPMWDNEFSTIATSHPKSVVGVFLCGPRTLAKSLRKCCHRYSSLDPRKVQFYFNKENF

SEQ ID NO: 868707 - protein, 585 aa, Homo sapiens; identical to SEQ ID NO: 868703

SEQ ID NO: 868708 - protein, 482 aa, Homo sapiens
DLSRIRIAESSLLPRRAPNHLLTMGNWVVNHWFSVLFLVVWLGLNVFLFVDAFLKYEKADKYYYTRKILGSTLACARASALCLNFNSTLILLPVCRNLLSFLRGTCSFCSRTLRKQLDHNLTFHKLVAYMICLHTAIHIIAHLFNFDCYSRSRQATDGSLASILSSLSHDEKKGGSWLNPIQSQTVEYVTFTSIAGLTGVIMTIALILMVTSATEFIRRSYFEVFWYTHHLFIFYILGLGIHGIGGIVRGQTEESMNESHPRKCAESFEMWDDRDSHCRRPKFEGHPPESWKWILAPVILYICERILRFYRSQQKVVITKVVMHPSKVLELQMNKRGFSMEVGQYIFVNCPSISLLEWHPFTLTSAPEEDFFSIHIRAAGDWTENLIRAFEQQYSPIPRIEVDGPFGTASEDVFQYEVAVLVGAGIGVTPFASILKSIWYKFQCADHNLKTKKVCSGSFLMWPSDFGKEPAQMLSPIFQSGS

SEQ ID NO: 868709 - protein, 36 aa, Homo sapiens
MKSDSLLEKSRGKSKGHLVLDLICDQISHRELEHHV

SEQ ID NO: 868710 - protein, 178 aa, Homo sapiens
MADAVYVIFILHWKKLPIQGTYSRHNGSCLKSLLADCASKPQTETHSLSTGQKSEVRPVLERLRSLWPQIPPLQSEQAAWVSGIWPSVSVPEALCQVPGKGTGEERSEEMHDCEYPHPCSGYDSHPGMRELGKGFYPPLYFALDSGQDPAPALPSVLSDLKNLWAQSIPFESIMCLQH

SEQ ID NO: 868711 - protein, 333 aa, Homo sapiens
MPANYTCTRPDGDNTDFRYFIYAVTYTVILVPGLIGNILALWVFYGYMKETKRAVIFMINLAIADLLQVLSLPLRIFYYLNHDWPFGPGLCMFCFYLKYVNMYASIYFLVCISVRRFWFLMYPFRFHDCKQKYDLYISIAGWLIICLACVLFPLLRTSDDTSGNRTKCFVDLPTRNVNLAQSVVMMTIGELIGFVTPLLIVLYCTWKTVLSLQDKYPMAQDLGEKQKALKMILTCAGVFLICFAPYHFSFPLDFLVKSNEIKSCLARRVILIFHSVALCLASLNSCLDPVIYYFSTNEFRRRLSRQDLHDSIQLHAKSFVSNHTASTMTPELC

SEQ ID NO: 868712 - protein, 158 aa, Homo sapiens
DPTSEQPQLGGAVRRAEREWAGRGHPGRCRSGGPRLTPLPPQGCICYRPEEHQVCFLRLMEDSDRETLRLLVDTSKVQEAWVPSQDTHHTQELLAVQGSLEVDPAQAGALVQRLCMRTPIYWARRAEGPRRQRLIYLCIDICFPSNICVSVCFYYLPD

SEQ ID NO: 868713 - protein, 133 aa, Homo sapiens
TPPQSNHSWAVLFDGQSGCICYRPEEHQVCFLRLMEDSDRETLRLLVDTSKVQEAWVPSQDTHHTQELLAVQGSLEVDPAQAGALVQRLCMRTPIYWARRAEGPRRQRLIYLCIDICFPSNICVSVCFYYLPD

SEQ ID NO: 868714 - protein, 518 aa, Homo sapiens
MAGYKPVAIQTYPILGEKITQDTLYWNNYKTPVQIKEFGAVSKVDFSPQPPYNYAVTASSRIHIYGRYSQEPIKTFSRFKDTAYCATFRQDGRLLVAGSEDGGVQLFDISGRAPLRQFEGHTKAVHTVDFTADKYHVVSGADDYTVKLWDIPNSKEILTFKEHSDYVRCGCASKLNPDLFITGSYDHTVKMFDARTSESVLSVEHGQPVESVLLFPSGGLLVSAGGRYVKVWDMLKGGQLLVSLKNHHKTVTCLCLSSSGQRLLSGSLDRKVKVYSTTSYKVVHSFDYAASILSLALAHEDETIVVGMTNGILSVKHRKSEAKKESLPRRRRPAYRTFIKGKNYMKQRDDILINRPAKKHLELYDRDLKHFRISKALDRVLDPTCTIKTPEITVSIIKELNRRGVLANALAGRDEKEISHVLNFLIRNLSQPRFAPVLINAAEIIIDIYLPVIGQSPVVDKKFLLLQGLVEKEIDYQRELLETLGMMDMLFATMRRKEGTSVLEHTSDGFPENKKIES

SEQ ID NO: 868715 - protein, 518 aa, Homo sapiens; identical to SEQ ID NO: 868714

SEQ ID NO: 868716 - protein, 518 aa, Homo sapiens; identical to SEQ ID NO: 868714

SEQ ID NO: 868717 - protein, 477 aa, Homo sapiens
MDGFYDQQVPYMVTNSQRGRNCNEKPTNVRKRKFINRDLAHDSEELFQDLSQLQETWLAEAQVPDNDEQFVPDYQAESLAFHGLPLKIKKEPHSPCSEISSACSQEQPFKFSYGEKCLYNVSAYDQKPQVGMRPSNPPTPSSTPVSPLHHASPNSTHTPKPDRAFPAHLPPSQSIPDSSYPMDHRFRRQLSEPCNSFPPLPTMPREGRPMYQRQMSEPNIPFPPQGFKQEYHDPVYEHNTMVGSAASQSFPPPLMIKQEPRDFAYDSEVPSCHSIYMRQEGFLAHPSRTEGCMFEKGPRQFYDDTCVVPEKFDGDIKQEPGMYREGPTYQRRGSLQLWQFLVALLDDPSNSHFIAWTGRGMEFKLIEPEEVARRWGIQKNRPAMNYDKLSRSLRYYYEKGIMQKVAGERYVYKFVCDPEALFSMAFPDNQRPLLKTDMERHINEEDTVPLSHFDESMAYMPEGGCCNPHPYNEGYVY

SEQ ID NO: 868718 - protein, 477 aa, Homo sapiens; identical to SEQ ID NO: 868717

SEQ ID NO: 868719 - protein, 459 aa, Homo sapiens
MDGFYDQQVPYMVTNSQRGRNCNEKPTNVRKRKFINRDLAHDSEELFQDLSQLQETWLAEVAFHGLPLKIKKEPHSPCSEISSACSQEQPFKFSYGEKCLYNVSAYDQKPQVGMRPSNPPTPSSTPVSPLHHASPNSTHTPKPDRAFPAHLPPSQSIPDSSYPMDHRFRRQLSEPCNSFPPLPTMPREGRPMYQRQMSEPNIPFPPQGFKQEYHDPVYEHNTMVGSAASQSFPPPLMIKQEPRDFAYDSEVPSCHSIYMRQEGFLAHPSRTEGCMFEKGPRQFYDDTCVVPEKFDGDIKQEPGMYREGPTYQRRGSLQLWQFLVALLDDPSNSHFIAWTGRGMEFKLIEPEEVARRWGIQKNRPAMNYDKLSRSLRYYYEKGIMQKVAGERYVYKFVCDPEALFSMAFPDNQRPLLKTDMERHINEEDTVPLSHFDESMAYMPEGGCCNPHPYNEGYVY

SEQ ID NO: 868720 - protein, 123 aa, Homo sapiens
MDGFYDQQVPYMVTNSQRGRNCNEKPTNVRKRKFINRDLAHDSEELFQDLSQLQETWLAEAQVPDNDEQFVPDYQAESYMSGYWLLATVLVSTALNSDVFHIVVSSLVLPSEAVHWTSSPDPC

SEQ ID NO: 868721 - protein, 477 aa, Homo sapiens; identical to SEQ ID NO: 868717

SEQ ID NO: 868722 - protein, 459 aa, Homo sapiens; identical to SEQ ID NO: 868719

SEQ ID NO: 868723 - protein, 407 aa, Homo sapiens
MDGFYDQQVPYMVTNSQRGRNCNEKPTNVRKRKFINRDLAHDSEELFQDLSQLQETWLAEAQVPDNDEQFVPDYQAESLAFHGLPLKIKKEPHSPCSEISSACSQEQPFKFSYGEKCLYNVSAYDQKPQVGMRPSNPPTPSSTPVSPLHHASPNSTHTPKPDRAFPAHLPPSQSIPDSSYPMDHRFRRQLSEPCNSFPPLPTMPREGRPMYQRQMSEPNIPFPPQGFKQEYHDPVYEHNTMVGSAASQSFPPPLMIKQEPRDFAYDSEVPSCHSIYMRQEGFLAHPSRTEGCMFEKGPRQFYDDTCVVPEKFDGDIKQEPGMYREGPTYQRRGSLQLWQFLVALLDDPSNSHFIAWTGRGMEFKLIEPEEVARRWGIQKNRPAMNYDKLSRSLRYYYEKGIMQKVSS

SEQ ID NO: 868724 - protein, 261 aa, Homo sapiens
MASQLQNRLRSALALVTGAGSGIGRAVSVRLAGEGATVAACDLDRAAAQETVRLLGGPGSKEGPPRGNHAAFQADVSEARAARCLLEQVQACFSRPPSVVVSCAGITQDEFLLHMSEDDWDKVIAVNLKGTFLVTQAAAQALVSNGCRGSIINISSIVGKVGNVGQTNYAASKAGVIGLTQTAARELGRHGIRCNSVLPGFIATPMTQKVPQKVVDKITEMIPMGHLGDPEDVADVVAFLASEDSGYITGTSVEVTGGLFM

SEQ ID NO: 868725 - protein, 110 aa, Homo sapiens
MQSLSFWGEWGPLSSPHPGPLSSSVGPRPLGGRSACAGGRRWPKAGGPLIGPGFALATPLCAGIGLVLGFPPTHSPPWRLSSRTDSAPHWPWSQVEGVLSPGGLGYWSEV

SEQ ID NO: 868726 - protein, 261 aa, Homo sapiens; identical to SEQ ID NO: 868724

SEQ ID NO: 868727 - protein, 147 aa, Homo sapiens [sequence omitted]

SEQ ID NO: 868728 - protein, 147 aa, Homo sapiens
MSEDDWDKVIAVNLKGTFLVTQAAAQALVSNGCRGSIINISSIVGKVGNVGQTNYAASKAGVIGLTQTAARELGRHGIRCNSVLPGFIATPMTQKVPQKVVDKVGGCGWRAESFRDSISLGFTEREREREREYWAQFLANIKYSMNV

SEQ ID NO: 868729 - protein, 172 aa, Homo sapiens
SPLNRSPPSIPDTMTHCCSPCCQPTCCRTTCWQPTTVTTCSSTPCCQPSCCVSSCCQPCCHPTCCQNTCCRTTCCQPICVTSCCQPSCCSTPCCQPTCCGSSCGQSSSCAPVYCRRTCYHPTSVCLPGCLNQSCGSNCCQPCCRPACCETTCCRTTCFQPTCVYSCCQPSCC

SEQ ID NO: 868730 - protein, 1256 aa, Homo sapiens
PSLSVNLTLCCPPCKHPRSFVALNYLTILFYCDSSHSLWQEVPFSPPNQQGTPPPGSVPCPALGAESLNVASGAPVLTVASGGGEGRAAVAKVFSPRTPWAAAMALKMVKGSIDRMFDKNLQDLVRGIRNHKEDEAKYISQCIDEIKQELKQDNIAVKANAVCKLTYLQMLGYDISWAAFNIIEVMSASKFTFKRIGYLAASQSFHEGTDVIMLTTNQIRKDLSSPSQYDTGVALTGLSCFVTPDLARDLANDIMTLMSHTKPYIRKKAVLIMYKVFLKYPESLRPAFPRLKEKLEDPDPGVQSAAVNVICELARRNPKNYLSLAPLFFKLMTSSTNNWVLIKIIKLFGALTPLEPRLGKKLIEPLTNLIHSTSAMSLLYECVNTVIAVLISLSSGMPNHSASIQLCVQKLRILIEDSDQNLKYLGLLAMSKILKTHPKSVQSHKDLILQCLDDKDESIRLRALDLLYGMVSKKNLMEIVKKLMTHVDKAEGTTYRDELLTKIIDICSQSNYQYITNFEWYISILVELTRLEGTRHGHLIAAQMLDVAIRVKAIRKFAVSQMSALLDSAHLLASSTQRNGICEVLYAAAWICGEFSEHLQEPHHTLEAMLRPRVTTLPGHIQAVYVQNVVKLYASILQQKEQAGEAEGAQAVTQLMVDRLPQFVQSADLEVQERASCILQLVKHIQKLQAKDVPVAEEVSALFAGELNPVAPKAQKKVPVPEGLDLDAWINEPLSDSESEDERPRAVFHEEEQRRPKHRPSEADEEELARRREARKQEQANNPFYIKSSPSPQKRYQDTPGVEHIPVVQIDLSVPLKVPGLPMSDQYVKLEEERRHRQKLEKDKRRKKRKEKEKKGKRRHSSLPTESDEDIAPAQQVDIVTEEMPENALPSDEDDKDPNDPYRALDIDLDKPLADSEKLPIQKHRNTETSKSPEKDVPMVEKKSKKPKKKEKKHKEKERDKEKKKEKEKKKSPKPKKKKHRKEKEERTKGKKKSKKQPPGSEEAAGEPVQNGAPEEEQLPPESSYSLLAENSYVKMTCDIRGSLQEDSQVTVAIVLENRSSSILKGMELSVLDSLNARMARPQGSSVHDGVPVPFQLPPGVSNEAQYVFTIQSIVMAQKLKGTLSFIAKNDEGATHEKLDFRLHFSCSSYLITTPCYSDAFAKLLESGDLSMSSIKVDGIRMSFQNLLAKICFHHHFSVVERVDSCASMYSRSIQGHHVCLLVKKGENSVSVDGKCSDSTLLSNLLEEMKATLAKC

SEQ ID NO: 868731 - protein, 200 aa, Homo sapiens
PSCPPFARGPERDRGTCRAGRRLCRGPWTPPPPWPGSLPRRSGRQRGAPRAAGTGPGPPHGAQPRASRGKSPWAAAMALKMVKGSIDRMFDKNLQDLVRGIRNHKEDEVRGRAVGLGECFVASRVGQHPQPAGPGPLYRSPGEQAVTKMSNPFLKQVFNKDKTFRPKRKFEPGTQRFELHKKAQASLNAGLDLRLAVQLP

SEQ ID NO: 868732 - protein, 931 aa, Homo sapiens
MSLLYECVNTVIAVLISLSSGMPNHSASIQLCVQKLRILIEDSDQNLKYLGLLAMSKILKTHPKSVQSHKDLILQCLDDKDESIRLRALDLLYGMVSKKNLMEIVKKLMTHVDKAEGTTYRDELLTKIIDICSQSNYQYITNFEWYISILVELTRLEGTRHGHLIAAQMLDVAIRVKAIRKFAVSQMSALLDSAHLLASSTQRNGICEVLYAAAWICGEFSEHLQEPHHTLEAMLRPRVTTLPGHIQAVYVQNVVKLYASILQQKEQAGEAEGAQAVTQLMVDRLPQFVQSADLEVQERASCILQLVKHIQKLQAKDVPVAEEVSALFAGELNPVAPKAQKKVPVPEGLDLDAWINEPLSDSESEDERPRAVFHEEEQRRPKHRPSEADEEELARRREARKQEQANNPFYIKSSPSPQKRYQDTPGVEHIPVVQIDLSVPLKVPGLPMSDQYVKLEEERRHRQKLEKDKRRKKRKEKEKKGKRRHSSLPTESDEDIAPAQQVDIVTEEMPENALPSDEDDKDPNDPYRALDIDLDKPLADSEKLPIQKHRNTETSKSPEKDVPMVEKKSKKPKKKEKKHKEKERDKEKKKEKEKKAEDLDFWLSTTPPPAPAPAPAPVPSTDECEDAKTEAQGEEDDAEGQDQDKKSPKPKKKKHRKEKEERTKGKKKSKKQPPGSEEAAGEPVQNGAPEEEQLPPESSYSLLAENSYVKMTCDIRGSLQEDSQVTVAIVLENRSSSILKGMELSVLDSLNARMARPQGSSVHDGVPVPFQLPPGVSNEAQYVFTIQSIVMAQKLKGTLSFIAKNDEGATHEKLDFRLHFSCSSYLITTPCYSDAFAKLLESGDLSMSSIKVDGIRMSFQNLLAKICFHHHFSVVERVDSCASMYSRSIQGHHVCLLVKKGENSVSVDGKCSDSTLLSNLLEEMKATLAKC

SEQ ID NO: 868733 - protein, 1306 aa, Homo sapiens
PSLSVNLTLCCPPCKHPRSFVALNYLTILFYCDSSHSLWQEVPFSPPNQQGTPPPGSVPCPALGAESLNVASGAPVLTVASGGGEGRAAVAKVFSPRTPWAAAMALKMVKGSIDRMFDKNLQDLVRGIRNHKEDEAKYISQCIDEIKQELKQDNIAVKANAVCKLTYLQMLGYDISWAAFNIIEVMSASKFTFKRIGYLAASQSFHEGTDVIMLTTNQIRKDLSSPSQYDTGVALTGLSCFVTPDLARDLANDIMTLMSHTKPYIRKKAVLIMYKVFLKYPESLRPAFPRLKEKLEDPDPGVQSAAVNVICELARRNPKNYLSLAPLFFKLMTSSTNNWVLIKIIKLFGALTPLEPRLGKKLIEPLTNLIHSTSAMSLLYECVNTVIAVLISLSSGMPNHSASIQLCVQKLRILIEDSDQNLKYLGLLAMSKILKTHPKSVQSHKDLILQCLDDKDESIRLRALDLLYGMVSKKNLMEIVKKLMTHVDKAEGTTYRDELLTKIIDICSQSNYQYITNFEWYISILVELTRLEGTRHGHLIAAQMLDVAIRVKAIRKFAVSQMSALLDSAHLLASSTQRNGICEVLYAAAWICGEFSEHLQEPHHTLEAMLRPRVTTLPGHIQAVYVQNVVKLYASILQQKEQAGEAEGAQAVTQLMVDRLPQFVQSADLEVQERASCILQLVKHIQKLQAKDVPVAEEVSALFAGELNPVAPKAQKKVPVPEGLDLDAWINEPLSDSESEDERPRAVFHEEEQRRPKHRPSEADEEELARRREARKQEQANNPFYIKSSPSPQKRYQDTPGVEHIPVVQIDLSVPLKVPGLPMSDQYVKLEEERRHRQKLEKDKRRKKRKEKEKKGKRRHSSLPTESDEDIAPAQQVDIVTEEMPENALPSDEDDKDPNDPYRALDIDLDKPLADSEKLPIQKHRNTETSKSPEKDVPMVEKKSKKPKKKEKKHKEKERDKEKKKEKEKKAEDLDFWLSTTPPPAPAPAPAPVPSTDECEDAKTEAQGEEDDAEGQDQDKKSPKPKKKKHRKEKEERTKGKKKSKKQPPGSEEAAGEPVQNGAPEEEQLPPESSYSLLAENSYVKMTCDIRGSLQEDSQVTVAIVLENRSSSILKGMELSVLDSLNARMARPQGSSVHDGVPVPFQLPPGVSNEAQYVFTIQSIVMAQKLKGTLSFIAKNDEGATHEKLDFRLHFSCSSYLITTPCYSDAFAKLLESGDLSMSSIKVDGIRMSFQNLLAKICFHHHFSVVERVDSCASMYSRSIQGHHVCLLVKKGENSVSVDGKCSDSTLLSNLLEEMKATLAKC

SEQ ID NO: 868734 - protein, 1318 aa, Homo sapiens
PSLSVNLTLCCPPCKHPRSFVALNYLTILFYCDSSHSLWQEVPFSPPNQQGTPPPGSVPCPALGAESLNVASGAPVLTVASGGGEGRAAVAKVFSPRTPWAAAMALKMVKGSIDRMFDKNLQDLVRGIRNHKEDEAKYISQCIDEIKQELKQDNIAVKANAVCKLTYLQMLGYDISWAAFNIIEVMSASKFTFKRIGYLAASQSFHEGTDVIMLTTNQIRKDLSSPSQYDTGVALTGLSCFVTPDLARDLANDIMTLMSHTKPYIRKKAVLIMYKVFLKYPESLRPAFPRLKEKLEDPDPGVQSAAVNVICELARRNPKNYLSLAPLFFKLMTSSTNNWVLIKIIKLFGALTPLEPRLGKKLIEPLTNLIHSTSAMSLLYECVNTVIAVLISLSSGMPNHSASIQLCVQKLRILIEDSDQNLKYLGLLAMSKILKTHPKSVQSHKDLILQCLDDKDESIRLRALDLLYGMVSKKNLMEIVKKLMTHVDKAEGTTYRDELLTKIIDICSQSNYQYITNFEWYISILVELTRLEGTRHGHLIAAQMLDVAIRVKAIRKFAVSQMSALLDSAHLLASSTQRNGICEVLYAAAWICGEFSEHLQEPHHTLEAMLRPRVTTLPGHIQAVYVQNVVKLYASILQQKEQAGEAEGAQAVTQLMVDRLPQFVQSADLEVQERASCILQLVKHIQKLQAKDVPVAEEVSALFAGELNPVAPKAQKKVPVPEGLDLDAWINEPLSDSESEDERPRAVFHEEEQRRPKHRPSEADEEELARRREARKQEQANNPFYIKSSPSPQKRYQDTPGVEHIPVVQIDLSVPLKVPGLPMSDQYVKLEEERRHRQKLEKDKRRKKRKEKEKKGKRRHSSLPTESDEDIAPAQQVDIVTEEMPENALPSDEDDKDPNDPYRALDIDLDKPLADSEKLPIQKHRNTETSKSPEKDVPMVEKKSKKPKKKEKKHKEKERDKEKKKEKEKKAEDLDFWLSTTPPPAPAPAPAPVPSTGELSVNTVTTPKDECEDAKTEAQGEEDDAEGQDQDKKSPKPKKKKHRKEKEERTKGKKKSKKQPPGSEEAAGEPVQNGAPEEEQLPPESSYSLLAENSYVKMTCDIRGSLQEDSQVTVAIVLENRSSSILKGMELSVLDSLNARMARPQGSSVHDGVPVPFQLPPGVSNEAQYVFTIQSIVMAQKLKGTLSFIAKNDEGATHEKLDFRLHFSCSSYLITTPCYSDAFAKLLESGDLSMSSIKVDGIRMSFQNLLAKICFHHHFSVVERVDSCASMYSRSIQGHHVCLLVKKGENSVSVDGKCSDSTLLSNLLEEMKATLAKC

SEQ ID NO: 868735 - protein, 1323 aa, Homo sapiens
PSLSVNLTLCCPPCKHPRSFVALNYLTILFYCDSSHSLWQEVPFSPPNQQGTPPPGSVPCPALGAESLNVASGAPVLTVASGGGEGRAAVAKVFSPRTPWAAAMALKMVKGSIDRMFDKNLQDLVRGIRNHKEDEAKYISQCIDEIKQELKQDNIAVKANAVCKLTYLQMLGYDISWAAFNIIEVMSASKFTFKRIGYLAASQSFHEGTDVIMLTTNQIRKDLSSPSQYDTGVALTGLSCFVTPDLARDLANDIMTLMSHTKPYIRKKAVLIMYKVFLKYPESLRPAFPRLKEKLEDPDPGVQSAAVNVICELARRNPKNYLSLAPLFFKLMTSSTNNWVLIKIIKLFGALTPLEPRLGKKLIEPLTNLIHSTSAMSLLYECVNTVIAVLISLSSGMPNHSASIQLCVQKLRILIEDSDQNLKYLGLLAMSKILKTHPKSVQSHKDLILQCLDDKDESIRLRALDLLYGMVSKKNLMEIVKKLMTHVDKAEGTTYRDELLTKIIDICSQSNYQYITNFEWYISILVELTRLEGTRHGHLIAAQMLDVAIRVKAIRKFAVSQMSALLDSAHLLASSTQRNGICEVLYAAAWICGEFSEHLQEPHHTLEAMLRPRVTTLPGHIQAVYVQNVVKLYASILQQKEQAGEAEGAQAVTQLMVDRLPQFVQSADLEVQERASCILQLVKHIQKLQAKDVPVAEEVSALFAGELNPVAPKAQKKVPVPEGRVLGHTLPCVALLSGCSLDLDAWINEPLSDSESEDERPRAVFHEEEQRRPKHRPSEADEEELARRREARKQEQANNPFYIKSSPSPQKRYQDTPGVEHIPVVQIDLSVPLKVPGLPMSDQYVKLEEERRHRQKLEKDKRRKKRKEKEKKGKRRHSSLPTESDEDIAPAQQVDIVTEEMPENALPSDEDDKDPNDPYRALDIDLDKPLADSEKLPIQKHRNTETSKSPEKDVPMVEKKSKKPKKKEKKHKEKERDKEKKKEKEKKAEDLDFWLSTTPPPAPAPAPAPVPSTDECEDAKTEAQGEEDDAEGQDQDKKSPKPKKKKHRKEKEERTKGKKKSKKQPPGSEEAAGEPVQNGAPEEEQLPPESSYSLLAENSYVKMTCDIRGSLQEDSQVTVAIVLENRSSSILKGMELSVLDSLNARMARPQGSSVHDGVPVPFQLPPGVSNEAQYVFTIQSIVMAQKLKGTLSFIAKNDEGATHEKLDFRLHFSCSSYLITTPCYSDAFAKLLESGDLSMSSIKVDGIRMSFQNLLAKICFHHHFSVVERVDSCASMYSRSIQGHHVCLLVKKGENSVSVDGKCSDSTLLSNLLEEMKATLAKC

SEQ ID NO: 868736 - protein, 910 aa, Homo sapiens
MPNHSASIQLCVQKLRILIEDSDQNLKYLGLLAMSKILKTHPKSVQSHKDLILQCLDDKDESIRLRALDLLYGMVSKKNLMEIVKKLMTHVDKAEGTTYRDELLTKIIDICSQSNYQYITNFEWYISILVELTRLEGTRHGHLIAAQMLDVAIRVKAIRKFAVSQMSALLDSAHLLASSTQRNGICEVLYAAAWICGEFSEHLQEPHHTLEAMLRPRVTTLPGHIQAVYVQNVVKLYASILQQKEQAGEAEGAQAVTQLMVDRLPQFVQSADLEVQERASCILQLVKHIQKLQAKDVPVAEEVSALFAGELNPVAPKAQKKVPVPEGLDLDAWINEPLSDSESEDERPRAVFHEEEQRRPKHRPSEADEEELARRREARKQEQANNPFYIKSSPSPQKRYQDTPGVEHIPVVQIDLSVPLKVPGLPMSDQYVKLEEERRHRQKLEKDKRRKKRKEKEKKGKRRHSSLPTESDEDIAPAQQVDIVTEEMPENALPSDEDDKDPNDPYRALDIDLDKPLADSEKLPIQKHRNTETSKSPEKDVPMVEKKSKKPKKKEKKHKEKERDKEKKKEKEKKAEDLDFWLSTTPPPAPAPAPAPVPSTDECEDAKTEAQGEEDDAEGQDQDKKSPKPKKKKHRKEKEERTKGKKKSKKQPPGSEEAAGEPVQNGAPEEEQLPPESSYSLLAENSYVKMTCDIRGSLQEDSQVTVAIVLENRSSSILKGMELSVLDSLNARMARPQGSSVHDGVPVPFQLPPGVSNEAQYVFTIQSIVMAQKLKGTLSFIAKNDEGATHEKLDFRLHFSCSSYLITTPCYSDAFAKLLESGDLSMSSIKVDGIRMSFQNLLAKICFHHHFSVVERVDSCASMYSRSIQGHHVCLLVKKGENSVSVDGKCSDSTLLSNLLEEMKATLAKC

SEQ ID NO: 868737 - protein, 1306 aa, Homo sapiens; identical to SEQ ID NO: 868733

SEQ ID NO: 868738 - protein, 930 aa, Homo sapiens
PSLSVNLTLCCPPCKHPRSFVALNYLTILFYCDSSHSLWQEVPFSPPNQQGTPPPGSVPCPALGAESLNVASGAPVLTVASGGGEGRAAVAKVFSPRTPWAAAMALKMVKGSIDRMFDKNLQDLVRGIRNHKEDEAKYISQCIDEIKQELKQDNIAVKANAVCKLTYLQMLGYDISWAAFNIIEVMSASKFTFKRIGYLAASQSFHEGTDVIMLTTNQIRKDLSSPSQYDTGVALTGLSCFVTPDLARDLANDIMTLMSHTKPYIRKKAVLIMYKVFLKYPESLRPAFPRLKEKLEDPDPGVQSAAVNVICELARRNPKNYLSLAPLFFKLMTSSTNNWVLIKIIKLFGALTPLEPRLGKKLIEPLTNLIHSTSAMSLLYECVNTVIAVLISLSSGMPNHSASIQLCVQKLRILIEDSDQNLKYLGLLAMSKILKTHPKSVQSHKDLILQCLDDKDESIRLRALDLLYGMVSKKNLMEIVKKLMTHVDKAEGTTYRDELLTKIIDICSQSNYQYITNFEWYISILVELTRLEGTRHGHLIAAQMLDVAIRVKAIRKFAVSQMSALLDSAHLLASSTQRNGICEVLYAAAWICGEFSEHLQEPHHTLEAMLRPRVTTLPGHIQAVYVQNVVKLYASILQQKEQAGEAEGAQAVTQLMVDRLPQFVQSADLEVQERASCILQLVKHIQKLQAKDVPVAEEVSALFAGELNPVAPKAQKKVPVPEGLDLDAWINEPLSDSESEDERPRAVFHEEEQRRPKHRPSEADEEELARRREARKQEQANNPFYIKSSPSPQKRYQDTPGVEHIPVVQIDLSVPLKVPGLPMSDQYVKLEEERRHRQKLEKDKRRKKRKEKEKKGKRRHSSLPTESDEDIAPAQQVDIASPTKPSMCSPSRASSWRRSSRGPCPSLPRMTRVRPTRSWTSGCTSAAAPT

SEQ ID NO: 868739 - protein, 1306 aa, Homo sapiens; identical to SEQ ID NO: 868733

SEQ ID NO: 868740 - protein, 845 aa, Homo sapiens
PSLSVNLTLCCPPCKHPRSFVALNYLTILFYCDSSHSLWQEVPFSPPNQQGTPPPGSVPCPALGAESLNVASGAPVLTVASGGGEGRAAVAKVFSPRTPWAAAMALKMVKGSIDRMFDKNLQDLVRGIRNHKEDEAKYISQCIDEIKQELKQDNIAVKANAVCKLTYLQMLGYDISWAAFNIIEVMSASKFTFKRIGYLAASQSFHEGTDVIMLTTNQIRKDLSSPSQYDTGVALTGLSCFVTPDLARDLANDIMTLMSHTKPYIRKKAVLIMYKVFLKYPESLRPAFPRLKEKLEDPDPGVQSAAVNVICELARRNPKNYLSLAPLFFKLMTSSTNNWVLIKIIKLFGALTPLEPRLGKKLIEPLTNLIHSTSAMSLLYECVNTVIAVLISLSSGMPNHSASIQLCVQKLRILIEDSDQNLKYLGLLAMSKILKTHPKSVQSHKDLILQCLDDKDESIRLRALDLLYGMVSKKNLMEIVKKLMTHVDKAEGTTYRDELLTKIIDICSQSNYQYITNFEWYISILVELTRLEGTRHGHLIAAQMLDVAIRVKAIRKFAVSQMSALLDSAHLLASSTQRNGICEVLYAAAWICGEFSEHLQEPHHTLEAMLRPRVTTLPGHIQAVYVQNVVKLYASILQQKEQAGEAEGAQAVTQLMVDRLPQFVQSADLEVQERASCILQLVKHIQKLQAKDVPVAEEVSALFAGELNPVAPKAQKKVPVPEGLDLDAWINEPLSDSESEDERPRAVFHEEEQRRPKHRPSEADEEELARRREARKQEQANNPFYIKSSPSPQKRYQDTPGVEHIPVVQIDLSVPLKVPGLPMSDQYVKLEEERRHRQKLEKDKR

SEQ ID NO: 868741 - protein, 487 aa, Homo sapiens
AQSFPAAEAGGGAEAGSRKRQKQEDRRKKRKEKEKKGKRRHSSLPTESDEDIAPAQQVDIVTEEMPENALPSDEDDKDPNDPYRALDIDLDKPLADSEKLPIQKHRNTETSKSPEKDVPMVEKKSKKPKKKEKKHKEKERDKEKKKEKEKKAEDLDFWLSTTPPPAPAPAPAPVPSTDECEDAKTEAQGEEDDAEGQDQDKKSPKPKKKKHRKEKEERTKGKKKSKKQPPGSEEAAGEPVQNGAPEEEQLPPESSYSLLAENSYVKMTCDIRGSLQEDSQVTVAIVLENRSSSILKGMELSVLDSLNARMARPQGSSVHDGVPVPFQLPPGVSNEAQYVFTIQSIVMAQKLKGTLSFIAKNDEGATHEKLDFRLHFSCSSYLITTPCYSDAFAKLLESGDLSMSSIKVDGIRMSFQNLLAKICFHHHFSVVERVDSCASMYSRSIQGHHVCLLVKKGENSVSVDGKCSDSTLLSNLLEEMKATLAKC

SEQ ID NO: 868742 - protein, 1306 aa, Homo sapiens; identical to SEQ ID NO: 868733

SEQ ID NO: 868743 - protein, 92 aa, Homo sapiens
AKALGVGRTSGPTDENDIPFLRRIRIPVFHHHFSVVERVDSCASMYSRSIQGHHVCLLVKKGENSVSVDGKCSDSTLLSNLLEEMKATLAKC

SEQ ID NO: 868744 - protein, 1313 aa, Homo sapiens
PSLSVNLTLCCPPCKHPRSFVALNYLTILFYCDSSHSLWQEVPFSPPNQQGTPPPGSVPCPALGAESLNVASGAPVLTVASGGGEGRAAVAKVFSPRTPWAAAMALKMVKGSIDRMFDKNLQDLVRGIRNHKEDEAKYISQCIDEIKQELKQDNIAVKANAVCKLTYLQMLGYDISWAAFNIIEVMSASKFTFKRIGYLAASQSFHEGTDVIMLTTNQIRKDLSSPSQYDTGVALTGLSCFVTPDLARDLANDIMTLMSHTKPYIRKKAVLIMYKVFLKYPESLRPAFPRLKEKLEDPDPGVQSAAVNVICELARRNPKNYLSLAPLFFKLMTSSTNNWVLIKIIKLFGALTPLEPRLGKKLIEPLTNLIHSTSAMSLLYECVNTVIAVLISLSSGMPNHSASIQLCVQKLRILIEDSDQNLKYLGLLAMSKILKTHPKSVQSHKDLILQCLDDKDESIRLRALDLLYGMVSKKNLMEIVKKLMTHVDKAEGTTYRDELLTKIIDICSQSNYQYITNFEWYISILVELTRLEGTRHGHLIAAQMLDVAIRVKAIRKFAVSQMSALLDSAHLLASSTQRNGICEVLYAAAWICGEFSEHLQEPHHTLEAMLRPRVTTLPGHIQAVYVQNVVKLYASILQQKEQAGEAEGAQAVTQLMVDRLPQFVQSADLEVQERASCILQLVKHIQKLQAKDVPVAEEVSALFAGELNPVAPKAQKKVPVPEGLDLDAWINEPLSDSESEDERPRAVFHEEEQRRPKHRPSEADEEELARRREARKQEQANNPFYIKSSPSPQKRYQDTPGVEHIPVVQIDLSVPLKVPGLPMSDQYVKLEEERRHRQKLEKDKRRKKRKEKEKKGKRRHSSLPTESDEDIAPAQQVDIVTEEMPENALPSDEDDKDPNDPYRALDIDLDKPLADSEKLPIQKHRNTETSKSPEKDVPMVEKKSKKPKKKEKKHKEKERDKEKKKEKEKKAEDLDFWLSTTPPPAPAPAPAPVPSTDECEDAKTEAQGEEDDAEGQDQDKKSPKPKKKKHRKEKEERTKGKKKSKKQPPGSEEAAGEPVQNGAPEEEQLPPESSYSLLAENSYVKMVSGSRSQGQGGPAHTLWHGIARNPGSPHSSRMLVYPGPVIPGRGVAWAAPLAWGKVGDMALRLGLAGGSPPCTQRAAIGGAWPAAEGAPLSVPSCACGTPAASVVIKRQVAVPVPCGGPACPANTGHALQTCDIRGSLQEDSQVTVAIVLENRSSSILKGMELSVLDSLNARMARPQGSSVHDGVPVPFQLPPGVSNEAQYVFTIQSIVMAQKLKGTLSFIAKVCRA

SEQ ID NO: 868745 - protein, 372 aa, Homo sapiens
PSLSVNLTLCCPPCKHPRSFVALNYLTILFYCDSSHSLWQEVPFSPPNQQGTPPPGSVPCPALGAESLNVASGAPVLTVASGGGEGRAAVAKVFSPRTPWAAAMALKMVKGSIDRMFDKNLQDLVRGIRNHKEDEAKYISQCIDEIKQELKQDNIAVKANAVCKLTYLQMLGYDISWAAFNIIEVMSASKFTFKRIGYLAASQSFHEGTDVIMLTTNQIRKDLSSPSQYDTGVALTGLSCFVTPDLARDLANDIMTLMSHTKPYIRKKAVLIMYKVFLKYPESLRPAFPRLKEKLEDPDPGVQSAAVNVICELARTPKRGCSQNRGRGGLRPLCHPSSWSAEVHLGLGLGRGPHPLLATMRTKVSPHPSQHP

SEQ ID NO: 868746 - protein, 707 aa, Homo sapiens
PSLSVNLTLCCPPCKHPRSFVALNYLTILFYCDSSHSLWQEVPFSPPNQQGTPPPGSVPCPALGAESLNVASGAPVLTVASGGGEGRAAVAKVFSPRTPWAAAMALKMVKGSIDRMFDKNLQDLVRGIRNHKEDEAKYISQCIDEIKQELKQDNIAVKANAVCKLTYLQMLGYDISWAAFNIIEVMSASKFTFKRIGYLAASQSFHEGTDVIMLTTNQIRKDLSSPSQYDTGVALTGLSCFVTPDLARDLANDIMTLMSHTKPYIRKKAVLIMYKVFLKYPESLRPAFPRLKEKLEDPDPGVQSAAVNVICELARRNPKNYLSLAPLFFKLMTSSTNNWVLIKIIKLFGALTPLEPRLGKKLIEPLTNLIHSTSAMSLLYECVNTVIAVLISLSSGMPNHSASIQLCVQKLRILIEDSDQNLKYLGLLAMSKILKTHPKSVQSHKDLILQCLDDKDESIRLRALDLLYGMVSKKNLMEIVKKLMTHVDKAEGTTYRDELLTKIIDICSQSNYQYITNFEWYISILVELTRLEGTRHGHLIAAQMLDVAIRVKAIRKFAVSQMSALLDSAHLLASSTQRNGICEVLYAAAWICGEFSEHLQEPHHTLEAMLRPRVTTLPGHIQAVYVQNVVKLYASILQQKEQAGEAEGAQAVTQLMVDRLPQFVQSADLEVQERASCILQLVKHIQKLQAKDVPVAEEVFVHCCYEL

SEQ ID NO: 868747 - protein, 828 aa, Homo sapiens
PSLSVNLTLCCPPCKHPRSFVALNYLTILFYCDSSHSLWQEVPFSPPNQQGTPPPGSVPCPALGAESLNVASGAPVLTVASGGGEGRAAVAKVFSPRTPWAAAMALKMVKGSIDRMFDKNLQDLVRGIRNHKEDEAKYISQCIDEIKQELKQDNIAVKANAVCKLTYLQMLGYDISWAAFNIIEVMSASKFTFKRIGYLAASQSFHEGTDVIMLTTNQIRKDLSSPSQYDTGVALTGLSCFVTPDLARDLANDIMTLMSHTKPYIRKKAVLIMYKVFLKYPESLRPAFPRLKEKLEDPDPGVQSAAVNVICELARRNPKNYLSLAPLFFKLMTSSTNNWVLIKIIKLFGALTPLEPRLGKKLIEPLTNLIHSTSAMSLLYECVNTVIAVLISLSSGMPNHSASIQLCVQKLRILIEDSDQNLKYLGLLAMSKILKTHPKSVQSHKDLILQCLDDKDESIRLRALDLLYGMVSKKNLMEIVKKLMTHVDKAEGTTYRDELLTKIIDICSQSNYQYITNFEWYISILVELTRLEGTRHGHLIAAQMLDVAIRVKAIRKFAVSQMSALLDSAHLLASSTQRNGICEVLYAAAWICGEFSEHLQEPHHTLEAMLRPRVTTLPGHIQAVYVQNVVKLYASILQQKEQAGEAEGAQAVTQLMVDRLPQFVQSADLEVQERASCILQLVKHIQKLQAKDVPVAEEVSALFAGELNPVAPKAQKKVPVPEGLDLDAWINEPLSDSESEDERPRAVFHEEEQRRPKHRPSEADEEELARRREARKQEQANNPFYIKSSPSPQKRYQDTPGVEHIPVVQIDLSVPLKVPGLPMSDLCT

SEQ ID NO: 868748 - protein, 220 aa, Homo sapiens
PSLSVNLTLCCPPCKHPRSFVALNYLTILFYCDSSHSLWQEVPFSPPNQQGTPPPGSVPCPALGAESLNVASGAPVLTVASGGGEGRAAVAKVFSPRTPWAAAMALKMVKGSIDRMFDKNLQDLVRGIRNHKEDEAKYISQCIDEIKQELKQDNIAVKANAVCKLTYLQMLGYDISWAAFNIIEVMSASKFTFKRIGYLAASQSFHEGRAWKQRTWAVLC

SEQ ID NO: 868749 - protein, 113 aa, Homo sapiens
MGLLPGLGHAALQDWSLCTSAHGPLGGGLGPQHHPGLGLGQSQARESPTPWWPRSPASPPKAVQGSRCLLSLPFPRSPRGRGRSRIENRGRAATPPLGEFASFTPALHLEDGS

SEQ ID NO: 868750 - protein, 1150 aa, Homo sapiens
FNIIEGGQLMSYPNICKYISWAAFNIIEVMSASKFTFKRIGYLAASQSFHEGTDVIMLTTNQIRKDLSSPSQYDTGVALTGLSCFVTPDLARDLANDIMTLMSHTKPYIRKKAVLIMYKVFLKYPESLRPAFPRLKEKLEDPDPGVQSAAVNVICELARRNPKNYLSLAPLFFKLMTSSTNNWVLIKIIKLFGALTPLEPRLGKKLIEPLTNLIHSTSAMSLLYECVNTVIAVLISLSSGMPNHSASIQLCVQKLRILIEDSDQNLKYLGLLAMSKILKTHPKSVQSHKDLILQCLDDKDESIRLRALDLLYGMVSKKNLMEIVKKLMTHVDKAEGTTYRDELLTKIIDICSQSNYQYITNFEWYISILVELTRLEGTRHGHLIAAQMLDVAIRVKAIRKFAVSQMSALLDSAHLLASSTQRNGICEVLYAAAWICGEFSEHLQEPHHTLEAMLRPRVTTLPGHIQAVYVQNVVKLYASILQQKEQAGEAEGAQAVTQLMVDRLPQFVQSADLEVQERASCILQLVKHIQKLQAKDVPVAEEVSALFAGELNPVAPKAQKKVPVPEGLDLDAWINEPLSDSESEDERPRAVFHEEEQRRPKHRPSEADEEELARRREARKQEQANNPFYIKSSPSPQKRYQDTPGVEHIPVVQIDLSVPLKVPGLPMSDQYVKLEEERRHRQKLEKDKRRKKRKEKEKKGKRRHSSLPTESDEDIAPAQQVDIVTEEMPENALPSDEDDKDPNDPYRALDIDLDKPLADSEKLPIQKHRNTETSKSPEKDVPMVEKKSKKPKKKEKKHKEKERDKEKKKEKEKKAEDLDFWLSTTPPPAPAPAPAPVPSTDECEDAKTEAQGEEDDAEGQDQDKKSPKPKKKKHRKEKEERTKGKKKSKKQPPGSEEAAGEPVQNGAPEEEQLPPESSYSLLAENSYVKMTCDIRGSLQEDSQVTVAIVLENRSSSILKGMELSVLDSLNARMARPQGSSVHDGVPVPFQLPPGVSNEAQYVFTIQSIVMAQKLKGTLSFIAKNDEGATHEKLDFRLHFSCSSYLITTPCYSDAFAKLLESGDLSMSSIKVDGIRMSFQNLLAKICFHHHFSVVERVDSCASMYSRSIQGHHVCLLVKKGENSVSVDGKCSDSTLLSNLLEEMKATLAKC

SEQ ID NO: 868751 - protein, 1343 aa, Homo sapiens
PSLSVNLTLCCPPCKHPRSFVALNYLTILFYCDSSHSLWQEVPFSPPNQQGTPPPGSVPCPALGAESLNVASGAPVLTVASGGGEGRAAVAKVFSPRTPWAAAMALKMVKGSIDRMFDKNLQDLVRGIRNHKEDEAKYISQCIDEIKQELKQDNIAVKANAVCKLTYLQMLGYDISWAAFNIIEVMSASKFTFKRIGYLAASQSFHEGTDVIMLTTNQIRKDLSSPSQYDTGVALTGLSCFVTPDLARDLANDIMTLMSHTKPYIRKKAVLIMYKVFLKYPESLRPAFPRLKEKLEDPDPGVQSAAVNVICELARRNPKNYLSLAPLFFKLMTSSTNNWVLIKIIKLFGALTPLEPRLGKKLIEPLTNLIHSTSAMSLLYECVNTVIAVLISLSSGMPNHSASIQLCVQKLRILIEDSDQNLKYLGLLAMSKILKTHPKSVQSHKDLILQCLDDKDESIRLRALDLLYGMVSKKNLMEIVKKLMTHVDKAEGTTYRDELLTKIIDICSQSNYQYITNFEWYISILVELTRLEGTRHGHLIAAQMLDVAIRVKAIRKFAVSQMSALLDSAHLLASSTQRNGICEVLYAAAWICGEFSEHLQEPHHTLEAMLRPRVTTLPGHIQAVYVQNVVKLYASILQQKEQAGEAEGAQAVTQLMVDRLPQFVQSADLEVQERASCILQLVKHIQKLQAKDVPVAEEVSALFAGELNPVAPKAQKKVPVPEGLDLDAWINEPLSDSESEDERPRAVFHEEEQRRPKHRPSEADEEELARRREARKQEQANNPFYIKSSPSPQKRYQDTPGVEHIPVVQIDLSVPLKVPGLPMSDQYVKLEEERRHRQKLEKDKRRKKRKEKEKKGKRRHSSLPTESDEDIAPAQQVDIVTEEMPENALPSDEDDKDPNDPYRALDIDLDKPLADSEKLPIQKHRNTETSKSPEKDVPMVEKKSKKPKKKEKKHKEKERDKEKKKEKEKKAEDLDFWLSTTPPPAPAPAPAPVPSTDECEDAKTEAQGEEDDAEGQDQDKKSPKPKKKKHRKEKEERTKGKKKSKKQPPGSEEAAGEPVQNGAPEEEQLPPESSYSLLAENSYVKMTCDIRGSLQEDSQVTVAIVLENRSSSILKGMELSVLDSLNARMARPQGSSVHDGVPVPFQLPPGVSNEAQYVFTIQSIVMAQKLKGTLSFIAKNDEGATHEKLDFRLHFSCSSYLITTPCYSDAFAKLLESGDLSMSSIKVDGIRMSFQNLLAKICFHHHFSGLLKLWPRAAQEGGPCSGGGAAAMQCPGSLNTARSVAVVERVDSCASMYSRSIQGHHVCLLVKKGENSVSVDGKCSDSTLLSNLLEEMKATLAKC

SEQ ID NO: 868752 - protein, 1306 aa, Homo sapiens; identical to SEQ ID NO: 868733

SEQ ID NO: 868753 - protein, 1306 aa, Homo sapiens; identical to SEQ ID NO: 868733

SEQ ID NO: 868754 - protein, 1306 aa, Homo sapiens; identical to SEQ ID NO: 868733

SEQ ID NO: 868755 - protein, 587 aa, Homo sapiens
CVYYKDAGANRANGECNVHIVRAVAASDYEVCILNDRAQAEVPGRYKLGSHRREARKQEQANNPFYIKSSPSPQKRYQDTPGVEHIPVVQIDLSVPLKVPGLPMSDQYVKLEEERRHRQKLEKDKRRKKRKEKEKKGKRRHSSLPTESDEDIAPAQQVDIVTEEMPENALPSDEDDKDPNDPYRALDIDLDKPLADSEKLPIQKHRNTETSKSPEKDVPMVEKKSKKPKKKEKKHKEKERDKEKKKEKEKKAEDLDFWLSTTPPPAPAPAPAPVPSTDECEDAKTEAQGEEDDAEGQDQDKKSPKPKKKKHRKEKEERTKGKKKSKKQPPGSEEAAGEPVQNGAPEEEQLPPESSYSLLAENSYVKMTCDIRGSLQEDSQVTVAIVLENRSSSILKGMELSVLDSLNARMARPQGSSVHDGVPVPFQLPPGVSNEAQYVFTIQSIVMAQKLKGTLSFIAKNDEGATHEKLDFRLHFSCSSYLITTPCYSDAFAKLLESGDLSMSSIKVDGIRMSFQNLLAKICFHHHFSVVERVDSCASMYSRSIQGHHVCLLVKKGENSVSVDGKCSDSTLLSNLLEEMKATLAKC

SEQ ID NO: 868756 - protein, 486 aa, Homo sapiens
LTRWRPKRKLEWERRHRQKLEKDKRRKKRKEKEKKGKRRHSSLPTESDEDIAPAQQVDIVTEEMPENALPSDEDDKDPNDPYRALDIDLDKPLADSEKLPIQKHRNTETSKSPEKDVPMVEKKSKKPKKKEKKHKEKERDKEKKKEKEKKAEDLDFWLSTTPPPAPAPAPAPVPSTDECEDAKTEAQGEEDDAEGQDQDKKSPKPKKKKHRKEKEERTKGKKKSKKQPPGSEEAAGEPVQNGAPEEEQLPPESSYSLLAENSYVKMTCDIRGSLQEDSQVTVAIVLENRSSSILKGMELSVLDSLNARMARPQGSSVHDGVPVPFQLPPGVSNEAQYVFTIQSIVMAQKLKGTLSFIAKNDEGATHEKLDFRLHFSCSSYLITTPCYSDAFAKLLESGDLSMSSIKVDGIRMSFQNLLAKICFHHHFSVVERVDSCASMYSRSIQGHHVCLLVKKGENSVSVDGKCSDSTLLSNLLEEMKATLAKC

SEQ ID NO: 868757 - protein, 1306 aa, Homo sapiens; identical to SEQ ID NO: 868733

SEQ ID NO: 868758 - protein, 478 aa, Homo sapiens
PSLSVNLTLCCPPCKHPRSFVALNYLTILFYCDSSHSLWQEVPFSPPNQQGTPPPGSVPCPALGAESLNVASGAPVLTVASGGGEGRAAVAKVFSPRTPWAAAMALKMVKGSIDRMFDKNLQDLVRGIRNHKEDEAKYISQCIDEIKQELKQDNIAVKANAVCKLTYLQMLGYDISWAAFNIIEVMSASKFTFKRIGYLAASQSFHEGTDVIMLTTNQIRKDLSSPSQYDTGVALTGLSCFVTPDLARDLANDIMTLMSHTKPYIRKKAVLIMYKVFLKYPESLRPAFPRLKEKLEDPDPGVQSAAVNVICELARRNPKNYLSLAPLFFKLMTSSTNNWVLIKIIKLFGALTPLEPRLGKKLIEPLTNLIHSTSAMSLLYECVNTVIAVLISLSSGMPNHSASIQLCVQKLRILIEDSDQNLKYLGLLAMSKILKTHPKSVQSHKDLILQCLDDKDRDRSPDVSRLSSVVCTVPKPEC

SEQ ID NO: 868759 - protein, 1197 aa, Homo sapiens
PSLSVNLTLCCPPCKHPRSFVALNYLTILFYCDSSHSLWQEVPFSPPNQQGTPPPGSVPCPALGAESLNVASGAPVLTVASGGGEGRAAVAKVFSPRTPWAAAMALKMVKGSIDRMFDKNLQDLVRGIRNHKEDEAKYISQCIDEIKQELKQDNIAVKANAVCKLTYLQMLGYDISWAAFNIIEVMSASKFTFKRIGYLAASQSFHEGTDVIMLTTNQIRKDLSSPSQYDTGVALTGLSCFVTPDLARDLANDIMTLMSHTKPYIRKKAVLIMYKVFLKYPESLRPAFPRLKEKLEDPDPGVQSAAVNVICELARRNPKNYLSLAPLFFKLMTSSTNNWVLIKIIKLFGALTPLEPRLGKKLIEPLTNLIHSTSAMSLLYECVNTVIAVLISLSSGMPNHSASIQLCVQKLRILIEDSDQNLKYLGLLAMSKILKTHPKSVQSHKDLILQCLDDKDESIRLRALDLLYGMVSKKNLMEIVKKLMTHVDKAEGTTYRDELLTKIIDICSQSNYQYITNFEWYISILVELTRLEGTRHGHLIAAQMLDVAIRVKAIRKFAVSQMSALLDSAHLLASSTQRNGICEVLYAAAWICGEFSEHLQEPHHTLEAMLRPRVTTLPGHIQAVYVQNVVKLYASILQQKEQAGEAEGAQAVTQLMVDRLPQFVQSADLEVQERASCILQLVKHIQKLQAKDVPVAEEVSALFAGELNPVAPKAQKKVPVPEGLDLDAWINEPLSDSESEDERPRAVFHEEEQRRPKHRPSEADEEELARRREARKQEQANNPFYIKSSPSPQKRYQDTPGVEHIPVVQIDLSVPLKVPGLPMSDQYVKLEEERRHRQKLEKDKRRKKRKEKEKKGKRRHSSLPTESDEDIAPAQQVDIVTEEMPENALPSDEDDKDPNDPYRALDIDLDKPLADSEKLPIQKHRNTETSKSPEKDVPMVEKKSKKPKKKEKKHKEKERDKEKKKEKEKKLRTWTSGFYHPGIPEARWTRDLKDGKEIDALDKSTEREHGVRNEGSHGSRRPLNDLDVSELGQHRRYDNDDIIEWKPKPHNKEPNGWGTHTGSGNMPTRQPSCRRREQPTTQERERQKREANKKRQAQARPEQRRPHTHMPEIGENRKHQDPEKTQASRRKEGSTTRQTRGQLTRYIIPKRDKGGASSMIEHERPHEEYAATPGTVAAEYAIRVEAGQRYSRETSEG

SEQ ID NO: 868760 - protein, 876 aa, Homo sapiens
PSLSVNLTLCCPPCKHPRSFVALNYLTILFYCDSSHSLWQEVPFSPPNQQGTPPPGSVPCPALGAESLNVASGAPVLTVASGGGEGRAAVAKVFSPRTPWAAAMALKMVKGSIDRMFDKNLQDLVRGIRNHKEDEAKYISQCIDEIKQELKQDNIAVKANAVCKLTYLQMLGYDISWAAFNIIEVMSASKFTFKRIGYLAASQSFHEGTDVIMLTTNQIRKDLSSPSQYDTGVALTGLSCFVTPDLARDLANDIMTLMSHTKPYIRKKAVLIMYKVFLKYPESLRPAFPRLKEKLEDPDPGVQSAAVNVICELARRNPKNYLSLAPLFFKLMTSSTNNWVLIKIIKLFGALTPLEPRLGKKLIEPLTNLIHSTSAMSLLYECVNTVIAVLISLSSGMPNHSASIQLCVQKLRILIEDSDQNLKYLGLLAMSKILKTHPKSVQSHKDLILQCLDDKDESIRLRALDLLYGMVSKKNLMEIVKKLMTHVDKAEGTTYRDELLTKIIDICSQSNYQYITNFEWYISILVELTRLEGTRHGHLIAAQMLDVAIRVKAIRKFAVSQMSALLDSAHLLASSTQRNGICEVLYAAAWICGEFSEHLQEPHHTLEAMLRPRVTTLPGHIQAVYVQNVVKLYASILQQKEQAGEAEGAQAVTQLMVDRLPQFVQSADLEVQERASCILQLVKHIQKLQAKDVPVAEEVSALFAGELNPVAPKAQKKVPVPEGLDLDAWINEPLSDSESEDERPRAVFHEEEQRRPKHRPSEADEEELARRREARKQEQANNPFYIKSSPSPQKRYQDTPGVEHIPVVQIDLSVPLKVPGLPMSDQYVKLEEERRHRQKLEKDKRRKKRKEKEKNTNYPFLLGPAACHAPRISASA

SEQ ID NO: 868761 - protein, 422 aa, Homo sapiens
PSLSVNLTLCCPPCKHPRSFVALNYLTILFYCDSSHSLWQEVPFSPPNQQGTPPPGSVPCPALGAESLNVASGAPVLTVASGGGEGRAAVAKVFSPRTPWAAAMALKMVKGSIDRMFDKNLQDLVRGIRNHKEDEAKYISQCIDEIKQELKQDNIAVKANAVCKLTYLQMLGYDISWAAFNIIEVMSASKFTFKRIGYLAASQSFHEGTDVIMLTTNQIRKDLSSPSQYDTGVALTGLSCFVTPDLARDLANDIMTLMSHTKPYIRKKAVLIMYKVFLKYPESLRPAFPRLKEKLEDPDPGVQSAAVNVICELARRNPKNYLSLAPLFFKLMTSSTNNWVLIKIIKLFGALTPLEPRLGKKLIEPLTNLIHSTSAMSLLYECVNTVIAVLISLSSGMPNHSASIQLGVQKLRIWMLDDGYRA

SEQ ID NO: 868762 - protein, 102 aa, Homo sapiens
NYLSLAPLFFKLMTSSTNNWVLIKIIKLASTARECGLLTLCGASLTLCGAFPAGDRGPPCPSPCVGHSLRVTEALLSPQFGALTPLEPRLGKKLIEPLTNLI

SEQ ID NO: 868763 - protein, 68 aa, Homo sapiens
ISLLLLLVTQASDVPPRASWPRPLSLTFQDLSSPSQYDTGVALTGLSCFVTPDLARDLANDIMTLVSL

SEQ ID NO: 868764 - protein, 600 aa, Homo sapiens
MSRVAKYRRQVSEDPDIDSLLETLSPEEMEELEKELDVVDPDGSVPVGLRQRNQTEKQSTGVYNREAMLNFCEKETKKLMQREMSMDESKQVETKTDAKNGEERGRDASKKALGPRRDSDLGKEPKRGGLKKSFSRDRDEAGGKSGEKPKEEKIIRGIDKGRVRAAVDKKEAGKDGRGEERAVATKKEEEKKGSDRNTGLSRDKDKKREEMKEVAKKEDDEKVKGERRNTDTRKEGEKMKRAGGNTDMKKEDEKVKRGTGNTDTKKDDEKVKKNEPLHEKEAKDDSKTKTPEKQTPSGPTKPSEGPAKVEEEAAPSIFDEPLERVKNNDPEMTEVNVNNSDCITNEILVRFTEALEFNTVVKLFALANTRADDHVAFAIAIMLKANKTITSLNLDSNHITGKGILAIFRALLQNNTLTELRFHNQRHICGGKTEMEIAKLLKENTTLLKLGYHFELAGPRMTVTNLLSRNMDKQRQKRLQEQRQAQEAKGEKKDLLEVPKAGAVAKGSPKPSPQPSPKPSPKNSPKKGGAPAAPPPPPPPLAPPLIMENLKNSLSPATQRKMGDKVLPAQEKNSRDQLLAAIRSSNLKQLKKVEVPKLLQ

SEQ ID NO: 868765 - protein, 108 aa, Homo sapiens
MSRVAKYRRQVSEDPDIDSLLETLSPEEMEELEKELDVVDPDGSVPVGLRQRNQTEKQSTGVYNREAMLNFCEKETKKLMQREMSMDVSTALEGRRETGEGWRPWLHD

SEQ ID NO: 868766 - protein, 522 aa, Homo sapiens
MTYPRSHSSRKAEQVQTTDAKNGEERGRDASKKALGPRRDSDLGKEPKRGGLKKSFSRDRDEAGGKSGEKPKEEKIIRGIDKGRVRAAVDKKEAGKDGRGEERAVATKKEEEKKGSDRNTGLSRDKDKKREEMKEVAKKEDDEKVKGERRNTDTRKEGEKMKRAGGNTDMKKEDEKVKRGTGNTDTKKDDEKVKKNEPLHEKEAKDDSKTKTPEKQTPSGPTKPSEGPAKVEEEAAPSIFDEPLERVKNNDPEMTEVNVNNSDCITNEILVRFTEALEFNTVVKLFALANTRADDHVAFAIAIMLKANKTITSLNLDSNHITGKGILAIFRALLQNNTLTELRFHNQRHICGGKTEMEIAKLLKENTTLLKLGYHFELAGPRMTVTNLLSRNMDKQRQKRLQEQRQAQEAKGEKKDLLEVPKAGAVAKGSPKPSPQPSPKPSPKNSPKKGGAPAAPPPPPPPLAPPLIMENLKNSLSPATQRKMGDKVLPAQEKNSRDQLLAAIRSSNLKQLKKVEVPKLLQ

SEQ ID NO: 868767 - protein, 600 aa, Homo sapiens; identical to SEQ ID NO: 868764

SEQ ID NO: 868768 - protein, 600 aa, Homo sapiens; identical to SEQ ID NO: 868764

SEQ ID NO: 868769 - protein, 297 aa, Homo sapiens
MSRVAKYRRQVSEDPDIDSLLETLSPEEMEELEKELDVVDPDGSVPVGLRQRNQTEKQSTGVYNREAMLNFCEKETKKLMQREMSMDESKQVETKTDAKNGEERGRDASKKALGPRRDSDLGKEPKRGGLKKSFSRDRDEAGGKSGEKPKEEKIIRGIDKGRVRAAVDKKEAGKDGRGEERAVATKKEEEKKGSDRNTGLSRDKDKKREEMKEVAKKEDDEKVKGGAPAAPPPPPPPLAPPLIMENLKNSLSPATQRKMGDKVLPAQEKNSRDQLLAAIRSSNLKQLKKVEVPKLLQ

SEQ ID NO: 868770 - protein, 514 aa, Homo sapiens
MESKQVETKTDAKNGEERGRDASKKALGPRRDSDLGKEPKRGGLKKSFSRDRDEAGGKSGEKPKEEKIIRGIDKGRVRAAVDKKEAGKDGRGEERAVATKKEEEKKGSDRNTGLSRDKDKKREEMKEVAKKEDDEKVKGERRNTDTRKEGEKMKRAGGNTDMKKEDEKVKRGTGNTDTKKDDEKVKKNEPLHEKEAKDDSKTKTPEKQTPSGPTKPSEGPAKVEEEAAPSIFDEPLERVKNNDPEMTEVNVNNSDCITNEILVRFTEALEFNTVVKLFALANTRADDHVAFAIAIMLKANKTITSLNLDSNHITGKGILAIFRALLQNNTLTELRFHNQRHICGGKTEMEIAKLLKENTTLLKLGYHFELAGPRMTVTNLLSRNMDKQRQKRLQEQRQAQEAKGEKKDLLEVPKAGAVAKGSPKPSPQPSPKPSPKNSPKKGGAPAAPPPPPPPLAPPLIMENLKNSLSPATQRKMGDKVLPAQEKNSRDQLLAAIRSSNLKQLKKVEVPKLLQ

SEQ ID NO: 868771 - protein, 82 aa, Homo sapiens
LGPCKHRCMNTYGSYKCYCLNGYMLMPDGSCSSALTCSMANCQYGCDVVKGQIRCQCPSPGLHLAPDGRTCVDVDECATGRA

SEQ ID NO: 868772 - protein, 600 aa, Homo sapiens
MSRVAKYRRQVSEDPDIDSLLETLSPEEMEELEKELDVVDPDGSVPVGLRQRNQTEKQSTGVYNREAMLNFCEKETKKLMQREMSMDESKQVETKTDAKNGEERGRDASKKALGPRRDSDLGKEPKRGGLKKSFSRDRDEAGGKSGEKPKEEKIIRGIDKGRVRAAVDKKEAGKDGRGEERAVATKKEEEKKGSDRNTGLSRDKDKKREEMKEVAKKEDDEKVKGERRNTDTRKEGEKMKRAGGNTDMKKEDEKVKRGTGNTDTKKDDEKVKKNEPLHEKEAKDDSKTKTPEKQTPSGPTKPSEGPAKVEEEAAPSIFDEPLERVKNNDPEMTEVNVNNSDCITNEILVRFTEALEFNTVVKLFALANTRADDHVAFAIAIMLKANKTITSLNLDSNHITGKGILAIFRALLQNNTLTELRFHNQRHICGGKTEMEIAKLLKENTTLLKLGYHFELAGPRMTVTNLLSRNMDKQRQKRLQEQRQAQEAKGEKKDLLEVPKAGAVAKGSPKPSPQPSPKPSPKNSPKKGGAPAAPPPPPPPLAPPLIMENLKNSLSPATQRKMGDKVLPAQEKNSRDQLLAAIRSSNLKQLKTLCLLGTGH

SEQ ID NO: 868773 - protein, 78 aa, Homo sapiens
LKNSLSPATQRKMGDKVLPAQEKNSRDQLLAAIRSSNLKQLKISSCGHEPTGRGWVGPGGEGRTAKGKACRGAYVGCR

SEQ ID NO: 868774 - protein, 73 aa, Homo sapiens
  misc_feature (3)..(3): Xaa can be any naturally occurring amino acid
  misc_feature (7)..(7): Xaa can be any naturally occurring amino acid
RAXSAEXVAMEESGYESVLCVKPDVHVYRIPPRATNLATGELFAARIQISPSQGLQVSHDHSSAGGFPYPHWL

SEQ ID NO: 868775 - protein, 82 aa, Homo sapiens
MCFLSLVVYVMNHIYCFACVEPTLHPRDKAYLIMMGKLFDVLVGLFCQYFIEDFCIDVHQGYWPYFFIVSLPGFGIRRMLAS

SEQ ID NO: 868776 - protein, 1076 aa, Homo sapiens
MKSRFSTIDLRAVLAELNASLLGMRVNNVYDVDNKTYLIRLQKPDFKATLLLESGIRIHTTEFEWPKNMMPSSFAMKCRKHLKSRRLVSAKQLGVDRIVDFQFGSDEAAYHLIIELYDRGNIVLTDYEYVILNILRFRTDEADDVKFAVRERYPLDHARAAEPLLTLERLTEIVASAPKGELLKRVLNPLLPYGPALIEHCLLENGFSGNVKVDEKLETKDIEKVLVSLQKAEDYMKTTSNFSGKGYIIQKREIKPCLEADKPVEDILTYEEFHPFLFSQHSQCPYIEFESFDKAVDEFYSKIEGQKIDLKALQQEKQALKKLDNVRKDHENRLEALQQAQEIDKLKGELIEMNLQIVDRAIQVVRSALANQIDWTEIGLIVKEAQAQGDPVASAIKELKLQTNHVTMLLRNPYLLSEEEDDDVDGDVNVEKNETEPPKGKKKKQKNKQLQKPQKNKPLLVDVDLSLSAYANAKKYYDHKRYAAKKTQKTVEAAEKAFKSAEKKTKQTLKEVQTVTSIQKARKVYWFEKFLWFISSENYLIIGGRDQQQNEIIVKRYLTPGDIYVHADLHGATSCVIKNPTGEPIPPRTLTEAGTMALCYSAAWDARVITSAWWVYHHQVSKTAPTGEYLTTGSFMIRGKKNFLPPSYLMMGFSFLFKVDESCVWRHQGERKVRVQDEDMETLASCTSELISEEMEQLDGGDTSSDEDKEEHETPVEVELMTQVDQEDITLQSGRDELNEELIQEESSEDEGEYEEVRKDQDSVGEMKDEGEETLNYPDTTIDLSHLQPQRSIQKLASKEESSNSSDSKSQSRRHLSAKERREMKKKKLPSDSGDLEALEGKDKEKESTVHIETHQNTSKNVAAVQPMKRGQKSKMKKMKEKYKDQDEEDRELIMKLLGSAGSNKEEKGKKGKKGKTKDEPVKKQPQKPRGGQRVSDNIKKETPFLEVITHELQDFAVDDPHDDKEEQDLDQQGNEENLFDSLTGQPHPEDVLLFAIPICAPYTTMTNYKYKVKLTPGVQKKGKAAKTALNSFMHSKEATAREKDLFRSVKDTDLSRNIPGKVKVSAPNLLNVKRK

SEQ ID NO: 868777 - protein, 828 aa, Homo sapiens [sequence omitted]

SEQ ID NO: 868778 - protein, 356 aa, Homo sapiens
MTQVDQEDITLQSGRDELNEELIQEESSEDEGEYEEVRKDQDSVGEMKDEGEETLNYPDTTIDLSHLQPQRSIQKLASKEESSNSSDSKSQSRRHLSAKERREMKKKKLPSDSGDLEALEGKDKEKESTVHIETHQNTSKNVAAVQPMKRGQKSKMKKMKEKYKDQDEEDRELIMKLLGSAGSNKEEKGKKGKKGKTKDEPVKKQPQKPRGGQRVSDNIKKETPFLEVITHELQDFAVDDPHDDKEEQDLDQQGNEENLFDSLTGQPHPEDVLLFAIPICAPYTTMTNYKYKVKLTPGVQKKGKAAKTALNSFMHSKEATAREKDLFRSVKDTDLSRNIPGKVKVSAPNLLNVKRK

SEQ ID NO: 868779 - protein, 356 aa, Homo sapiens; identical to SEQ ID NO: 868778

SEQ ID NO: 868780 - protein, 977 aa, Homo sapiens
MKSRFSTIDLRAVLAELNASLLGMRVNNVYDVDNKTYLIRLQKPDFKATLLLESGIRIHTTEFEWPKNMMPSSFAMKCRKHLKSRRLVSAKQLGVDRIVDFQFGSDEAAYHLIIELYDRGNIVLTDYEYVILNILRFRTDEADDVKFAVRERYPLDHARAAEPLLTLERLTEIVASAPKGELLKRVLNPLLPYGPALIEHCLLENGFSGNVKVDEKLETKDIEKVLVSLQKAEDYMKTTSNFSGKGYIIQKREIKPCLEADKPVEDILTYEEFHPFLFSQHSQCPYIEFESFDKAVDEFYSKIEGQKIDLKALQQEKQALKKLDNVRKDHENRLEALQQAQEIDKLKGELIEMNLQIVDRAIQVVRSALANQIDWTEIGLIVKEAQAQGDPVASAIKELKLQTNHVTMLLRNPYLLSEEEDDDVDGDVNVEKNETEPPKGKKKKQKNKQLQKPQKNKPLLVDVDLSLSAYANAKKYYDHKRYAAKKTQKTVEAAEKAFKSAEKKTKQTLKEVQTVTSIQKARKVYWFEKFLWFISSENYLIIGGRDQQQNEIIVKRYLTPGDIYVHADLHGATSCVIKNPTGEPIPPRTLTEAGTMALCYSAAWDARVITSAWWVYHHQVSKTAPTGEYLTTGSFMIRGKKNFLPPSYLMMGFSFLFKVDESCVWRHQGERKVRVQDEDMETLASCTSELISEEMEQLDGGDTSSDEDKEEHETPVEVELMTQVDQEDITLQSGRDELNEELIQEESSEDEGEYEEVRKDQDSVGEMKDEGEETLNYPDTTIDLSHLQPQRSIQKLASKEESSNSSDSKSQSRRHLSAKERREMKKKKLPSDSGDLEALEGKDKEKESTVHIETHQNTSKNVAAVQPMKRGQKSKMKKMKEKYKDQDEEDRELIMKLLGSAGSNKEEKGKKGKKGKTKDEPVKKQPQKPRGGQRVSDNIKKETPFLEVITHELQDFAVDDPHDDKEEQDLDQQGNEV

SEQ ID NO: 868781 - protein, 1005 aa, Homo sapiens
MKSRFSTIDLRAVLAELNASLLGMRVNNVYDVDNKTYLIRLQKPDFKATLLLESGIRIHTTEFEWPKNMMPSSFAMKCRKHLKSRRLVSAKQLGVDRIVDFQFGSDEAAYHLIIELYDRGNIVLTDYEYVILNILRFRTDEADDVKFAVRERYPLDHARAAEPLLTLERLTEIVASAPKGELLKRVLNPLLPYGPALIEHCLLENGFSGNVKVDEKLETKDIEKVLVSLQKAEDYMKTTSNFSGKGYIIQKREIKPCLEADKPVEDILTYEEFHPFLFSQHSQCPYIEFESFDKAVDEFYSKIEGQKIDLKALQQEKQALKKLDNVRKDHENRLEALQQAQEIDKLKGELIEMNLQIVDRAIQVVRSALANQIDWTEIGLIVKEAQAQGDPVASAIKELKLQTNHVTMLLRNPYLLSEEEDDDVDGDVNVEKNETEPPKGKKKKQKNKQLQKPQKNKPLLVDVDLSLSAYANAKKYYDHKRYAAKKTQKTVEAAEKAFKSAEKKTKQTLKEVQTVTSIQKARKVYWFEKFLWFISSENYLIIGGRDQQQNEIIVKRYLTPGDIYVHADLHGATSCVIKNPTGEPIPPRTLTEAGTMALCYSAAWDARVITSAWWVYHHQVSKTAPTGEYLTTGSFMIRGKKNFLPPSYLMMGFSFLFKVDESCVWRHQGERKVRVQDEDMETLASCTSELISEEMEQLDGGDTSSDEDKEEHETPVEVELMTQVDQEDITLQSGRDELNEELIQEESSEDEGEYEEVRKDQDSVGEMKDEGEETLNYPDTTIDLSHLQPQRSIQKLASKEESSNSSDSKSQSRRHLSAKERREMKKKKLPSDSGDLEALEGKDKEKESTVHIETHQNTSKNVAAVQPMKRGQKSTTDHTHAYEHIPQTRMKKTVNLIHESCGVGGSNTRTNRTSGTHDNQANCEETGRTKGAEGSHTKKKSAVVTIATTVVRSMGRNVGTRQETCVEADLKAGGPGPHRTMETAGRYTRVTELGSAGEQRCAHKE

SEQ ID NO: 868782 - protein, 724 aa, Homo sapiens
MNLQIVDRAIQVVRSALANQIDWTEIGLIVKEAQAQGDPVASAIKELKLQTNHVTMLLRNPYLLSEEEDDDVDGDVNVEKNETEPPKGKKKKQKNKQLQKPQKNKPLLVDVDLSLSAYANAKKYYDHKRYAAKKTQKTVEAAEKAFKSAEKKTKQTLKEVQTVTSIQKARKVYWFEKFLWFISSENYLIIGGRDQQQNEIIVKRYLTPGDIYVHADLHGATSCVIKNPTGEPIPPRTLTEAGTMALCYSAAWDARVITSAWWVYHHQVSKTAPTGEYLTTGSFMIRGKKNFLPPSYLMMGFSFLFKVDESCVWRHQGERKVRVQDEDMETLASCTSELISEEMEQLDGGDTSSDEDKEEHETPVEVELMTQVDQEDITLQSGRDELNEELIQEESSEDEGEYEEVRKDQDSVGEMKDEGEETLNYPDTTIDLSHLQPQRSIQKLASKEESSNSSDSKSQSRRHLSAKERREMKKKKLPSDSGDLEALEGKDKEKESTVHIETHQNTSKNVAAVQPMKRGQKSKMKKMKEKYKDQDEEDRELIMKLLGSAGSNKEEKGKKGKKGKTKDEPVKKQPQKPRGGQRVSDNIKKETPFLEVITHELQDFAVDDPHDDKEEQDLDQQGNEENLFDSLTGQPHPEDVLLFAIPICAPYTTMTNYKYKVKLTPGVQKKGKAAKTALNSFMHSKEATAREKDLFRSVKDTDLSRNIPGKVKVSAPNLLNVKRK

SEQ ID NO: 868783 - protein, 724 aa, Homo sapiens; identical to SEQ ID NO: 868782

SEQ ID NO: 868784 - protein, 481 aa, Homo sapiens
MALCYSAAWDARVITSAWWVYHHQVSKTAPTGEYLTTGSFMIRGKKNFLPPSYLMMGFSFLFKVDESCVWRHQGERKVRVQDEDMETLASCTSELISEEMEQLDGGDTSSDEDKEEHETPVEVELMTQVDQEDITLQSGRDELNEELIQEESSEDEGEYEEVRKDQDSVGEMKDEGEETLNYPDTTIDLSHLQPQRSIQKLASKEESSNSSDSKSQSRRHLSAKERREMKKKKLPSDSGDLEALEGKDKEKESTVHIETHQNTSKNVAAVQPMKRGQKSKMKKMKEKYKDQDEEDRELIMKLLGSAGSNKEEKGKKGKKGKTKDEPVKKQPQKPRGGQRVSDNIKKETPFLEVITHELQDFAVDDPHDDKEEQDLDQQGNEENLFDSLTGQPHPEDVLLFAIPICAPYTTMTNYKYKVKLTPGVQKKGKAAKTALNSFMHSKEATAREKDLFRSVKDTDLSRNIPGKVKVSAPNLLNVKRK

SEQ ID NO: 868785 - protein, 481 aa, Homo sapiens; identical to SEQ ID NO: 868784

SEQ ID NO: 868786 - protein, 654 aa, Homo sapiens
EDPQCRLLPDEESEYRMKTWRHWQVVQVNSYQKNKPLLVDVDLSLSAYANAKKYYDHKRYAAKKTQKTVEAAEKAFKSAEKKTKQTLKEVQTVTSIQKARKVYWFEKFLWFISSENYLIIGGRDQQQNEIIVKRYLTPGDIYVHADLHGATSCVIKNPTGEPIPPRTLTEAGTMALCYSAAWDARVITSAWWVYHHQVSKTAPTGEYLTTGSFMIRGKKNFLPPSYLMMGFSFLFKVDESCVWRHQGERKVRVQDEDMETLASCTSELISEEMEQLDGGDTSSDEDKEEHETPVEVELMTQVDQEDITLQSGRDELNEELIQEESSEDEGEYEEVRKDQDSVGEMKDEGEETLNYPDTTIDLSHLQPQRSIQKLASKEESSNSSDSKSQSRRHLSAKERREMKKKKLPSDSGDLEALEGKDKEKESTVHIETHQNTSKNVAAVQPMKRGQKSKMKKMKEKYKDQDEEDRELIMKLLGSAGSNKEEKGKKGKKGKTKDEPVKKQPQKPRGGQRVSDNIKKETPFLEVITHELQDFAVDDPHDDKEEQDLDQQGNEENLFDSLTGQPHPEDVLLFAIPICAPYTTMTNYKYKVKLTPGVQKKGKAAKTALNSFMHSKEATAREKDLFRSVKDTDLSRNIPGKVKVSAPNLLNVKRK

SEQ ID NO: 868787 - protein, 528 aa, Homo sapiens
MKSRFSTIDLRAVLAELNASLLGMRVNNVYDVDNKTYLIRLQKPDFKATLLLESGIRIHTTEFEWPKNMMPSSFAMKCRKHLKSRRLVSAKQLGVDRIVDFQFGSDEAAYHLIIELYDRGNIVLTDYEYVILNILRFRTDEADDVKFAVRERYPLDHARAAEPLLTLERLTEIVASAPKGELLKRVLNPLLPYGPALIEHCLLENGFSGNVKVDEKLETKDIEKVLVSLQKAEDYMKTTSNFSGKGYIIQKREIKPCLEADKPVEDILTYEEFHPFLFSQHSQCPYIEFESFDKAVDEFYSKIEGQKIDLKALQQEKQALKKLDNVRKDHENRLEALQQAQEIDKLKGELIEMNLQIVDRAIQVVRSALANQIDWTEIGLIVKEAQAQGDPVASAIKELKLQTNHVTMLLRNPYLLSEEEDDDVDGDVNVEKNETEPPKGKKKKQKNKQLQKPQKNKPLLVDVDLSLSAYANAKKYYDHKRYAAKKTQKTVEAAEKAFKSAEKKTKQTLKEVQTVTSIQKARKVYWLT

SEQ ID NO: 868788 - protein, 386 aa, Homo sapiens
AANETRTKDGGDTSSDEDKEEHETPVEVELMTQVDQEDITLQSGRDELNEELIQEESSEDEGEYEEVRKDQDSVGEMKDEGEETLNYPDTTIDLSHLQPQRSIQKLASKEESSNSSDSKSQSRRHLSAKERREMKKKKLPSDSGDLEALEGKDKEKESTVHIETHQNTSKNVAAVQPMKRGQKSKMKKMKEKYKDQDEEDRELIMKLLGSAGSNKEEKGKKGKKGKTKDEPVKKQPQKPRGGQRVSDNIKKETPFLEVITHELQDFAVDDPHDDKEEQDLDQQGNEENLFDSLTGQPHPEDVLLFAIPICAPYTTMTNYKYKVKLTPGVQKKGKAAKTALNSFMHSKEATAREKDLFRSVKDTDLSRNIPGKVKVSAPNLLNVKRK

SEQ ID NO: 868789 - protein, 276 aa, Homo sapiens
MPKTCQCYVGTKTTNPSAWPSREMKKKKLPSDSGDLEALEGKDKEKESTVHIETHQNTSKNVAAVQPMKRGQKSKMKKMKEKYKDQDEEDRELIMKLLGSAGSNKEEKGKKGKKGKTKDEPVKKQPQKPRGGQRVSDNIKKETPFLEVITHELQDFAVDDPHDDKEEQDLDQQGNEENLFDSLTGQPHPEDVLLFAIPICAPYTTMTNYKYKVKLTPGVQKKGKAAKTALNSFMHSKEATAREKDLFRSVKDTDLSRNIPGKVKVSAPNLLNVKRK

SEQ ID NO: 868790 - protein, 138 aa, Homo sapiens
  misc_feature (2)..(2): Xaa can be any naturally occurring amino acid
  misc_feature (115)..(115): Xaa can be any naturally occurring amino acid
MXRRKSKIWIKQGNEENLFDSLTGQPHPEDVTTVAIPICAPYTTMTNYKYKVKLTETESRMVAARGWGEKTIEELLIGSEFQFYKMKIILWIRVAKMAQQCKCTQYHRTVHLKSXKGGQAQWLTPVIPALWEAEAGGS

SEQ ID NO: 868791 - protein, 1076 aa, Homo sapiens; identical to SEQ ID NO: 868776

SEQ ID NO: 868792 - protein, 1108 aa, Homo sapiens
MKSRFSTIDLRAVLAELNASLLGMRVNNVYDVDNKTYLIRLQKPDFKATLLLESGIRIHTTEFEWPKNMMPSSFAMKCRKHLKSRRLVSAKQLGVDRIVDFQFGSDEAAYHLIIELYDRGNIVLTDYEYVILNILRFRTDEADDVKFAVRERYPLDHARAAEPLLTLERLTEIVASAPKGELLKRVLNPLLPYGPALIEHCLLENGFSGNVKVDEKLETKDIEKVLVSLQKAEDYMKTTSNFSGKGYIIQKREIKPCLEADKPVEDILTYEEFHPFLFSQHSQCPYIEFESFDKAVDEFYSKIEGQKIDLKALQQEKQALKKLDNVRKDHENRLEALQQAQEIDKLKGELIEMNLQIVDRAIQVVRSALANQIDWTEIGLIVKEAQAQGDPVASAIKELKLQTNHVTMLLRNPYLLSEEEDDDVDGDVNVEKNETEPPKGKKKKQKNKQLQKPQKNKPLLVDVDLSLSAYANAKKYYDHKRYAAKKTQKTVEAAEKAFKSAEKKTKQTLKEVQTVTSIQKARKVYWFEKFLWFISSENYLIIGGRDQQQNEIIVKRYLTPGDIYVHADLHGATSCVIKNPTGEPIPPRTLTEAGTMALCYSAAWDARVITSAWWVYHHQVSKTAPTGEYLTTGSFMIRGKKNFLPPSYLMMGFSFLFKVLFNFLVIYLFFSCFSLVLSEAPSLKNNCFFEVDESCVWRHQGERKVRVQDEDMETLASCTSELISEEMEQLDGGDTSSDEDKEEHETPVEVELMTQVDQEDITLQSGRDELNEELIQEESSEDEGEYEEVRKDQDSVGEMKDEGEETLNYPDTTIDLSHLQPQRSIQKLASKEESSNSSDSKSQSRRHLSAKERREMKKKKLPSDSGDLEALEGKDKEKESTVHIETHQNTSKNVAAVQPMKRGQKSKMKKMKEKYKDQDEEDRELIMKLLGSAGSNKEEKGKKGKKGKTKDEPVKKQPQKPRGGQRVSDNIKKETPFLEVITHELQDFAVDDPHDDKEEQDLDQQGNEENLFDSLTGQPHPEDVLLFAIPICAPYTTMTNYKYKVKLTPGVQKKGKAAKTALNSFMHSKEATAREKDLFRSVKDTDLSRNIPGKVKVSAPNLLNVKRK

SEQ ID NO: 868793 - protein, 1010 aa, Homo sapiens [sequence omitted]

SEQ ID NO: 868794 - protein, 1105 aa, Homo sapiens
MKSRFSTIDLRAVLAELNASLLGMRVNNVYDVDNKTYLIRLQKPDFKATLLLESGIRIHTTEFEWPKNMMPSSFAMKCRKHLKSRRLVSAKQLGVDRIVDFQFGSDEAAYHLIIELYDRGNIVLTDYEYVILNILRFRTDEADDVKFAVRERYPLDHARAAEPLLTLERLTEIVASAPKGELLKRVLNPLLPYGPALIEHCLLENGFSGNVKVDEKLETKDIEKVLVSLQKAEDYMKTTSNFSGKGYIIQKREIKPCLEADKPVEDILTYEEFHPFLFSQHSQCPYIEFESFDKAVDEFYSKIEGQKIDLKALQQEKQALKKLDNVRKDHENRLEALQQAQVIMFGFLSAFSKMLTLTGNVVNVCGLFFKEIDKLKGELIEMNLQIVDRAIQVVRSALANQIDWTEIGLIVKEAQAQGDPVASAIKELKLQTNHVTMLLRNPYLLSEEEDDDVDGDVNVEKNETEPPKGKKKKQKNKQLQKPQKNKPLLVDVDLSLSAYANAKKYYDHKRYAAKKTQKTVEAAEKAFKSAEKKTKQTLKEVQTVTSIQKARKVYWFEKFLWFISSENYLIIGGRDQQQNEIIVKRYLTPGDIYVHADLHGATSCVIKNPTGEPIPPRTLTEAGTMALCYSAAWDARVITSAWWVYHHQVSKTAPTGEYLTTGSFMIRGKKNFLPPSYLMMGFSFLFKVDESCVWRHQGERKVRVQDEDMETLASCTSELISEEMEQLDGGDTSSDEDKEEHETPVEVELMTQVDQEDITLQSGRDELNEELIQEESSEDEGEYEEVRKDQDSVGEMKDEGEETLNYPDTTIDLSHLQPQRSIQKLASKEESSNSSDSKSQSRRHLSAKERREMKKKKLPSDSGDLEALEGKDKEKESTVHIETHQNTSKNVAAVQPMKRGQKSKMKKMKEKYKDQDEEDRELIMKLLGSAGSNKEEKGKKGKKGKTKDEPVKKQPQKPRGGQRVSDNIKKETPFLEVITHELQDFAVDDPHDDKEEQDLDQQGNEENLFDSLTGQPHPEDVLLFAIPICAPYTTMTNYKYKVKLTPGVQKKGKAAKTALNSFMHSKEATAREKDLFRSVKDTDLSRNIPGKVKVSAPNLLNVKRK

SEQ ID NO: 868795 - protein, 1034 aa, Homo sapiens
MKSRFSTIDLRAVLAELNASLLGMRVNNVYDVDNKTYLIRLQKPDFKATLLLESGIRIHTTEFEWPKNMMPSSFAMKGNIVLTDYEYVILNILRFRTDEADDVKFAVRERYPLDHARAAEPLLTLERLTEIVASAPKGELLKRVLNPLLPYGPALIEHCLLENGFSGNVKVDEKLETKDIEKVLVSLQKAEDYMKTTSNFSGKGYIIQKREIKPCLEADKPVEDILTYEEFHPFLFSQHSQCPYIEFESFDKAVDEFYSKIEGQKIDLKALQQEKQALKKLDNVRKDHENRLEALQQAQEIDKLKGELIEMNLQIVDRAIQVVRSALANQIDWTEIGLIVKEAQAQGDPVASAIKELKLQTNHVTMLLRNPYLLSEEEDDDVDGDVNVEKNETEPPKGKKKKQKNKQLQKPQKNKPLLVDVDLSLSAYANAKKYYDHKRYAAKKTQKTVEAAEKAFKSAEKKTKQTLKEVQTVTSIQKARKVYWFEKFLWFISSENYLIIGGRDQQQNEIIVKRYLTPGDIYVHADLHGATSCVIKNPTGEPIPPRTLTEAGTMALCYSAAWDARVITSAWWVYHHQVSKTAPTGEYLTTGSFMIRGKKNFLPPSYLMMGFSFLFKVDESCVWRHQGERKVRVQDEDMETLASCTSELISEEMEQLDGGDTSSDEDKEEHETPVEVELMTQVDQEDITLQSGRDELNEELIQEESSEDEGEYEEVRKDQDSVGEMKDEGEETLNYPDTTIDLSHLQPQRSIQKLASKEESSNSSDSKSQSRRHLSAKERREMKKKKLPSDSGDLEALEGKDKEKESTVHIETHQNTSKNVAAVQPMKRGQKSKMKKMKEKYKDQDEEDRELIMKLLGSAGSNKEEKGKKGKKGKTKDEPVKKQPQKPRGGQRVSDNIKKETPFLEVITHELQDFAVDDPHDDKEEQDLDQQGNEENLFDSLTGQPHPEDVLLFAIPICAPYTTMTNYKYKVKLTPGVQKKGKAAKTALNSFMHSKEATAREKDLFRSVKDTDLSRNIPGKVKVSAPNLLNVKRK

SEQ ID NO: 868796 - protein, 1012 aa, Homo sapiens
MKSRFSTIDLRAVLAELNASLLGMRVNNVYDVDNKTYLIRLQKPDFKATLLLESGIRIHTTEFEWPKNMMPSSFAMKCRKHLKSRRLVSAKQLGVDRIVDFQFGSDEAAYHLIIELYDRGNIVLTDYEYVILNILRFRTDEADDVKFAVRERYPLDHARAAEPLLTLERLTEIVASAPKGELLKRVLNPLLPYGPALIEHCLLENGFSGNVKVDEKLETKDIEKVLVSLQKAEDYMKTTSNFSGKGYIIQKREIKPCLEADKPVEDILTYEEFHPFLFSQHSQCPYIEFESFDKAVDEFYSKIEGQKIDLKALQQEKQALKKLDNVRKDHENRLEALQQAQEIDKLKGELIEMNLQIVDRAIQVVRSALANQIDWTEIGLIVKEAQAQGDPVASAIKELKLQTNHVTMLLRNPYLLSEEEDDDVDGDVNVEKNETEPPKGKKKKQKNKQLQKPQKNKPLLVDVDLSLSAYANAKKYYDHKRYAAKKTQKTVEAAEKAFKSAEKKTKQTLKEVQTVTSIQKARKVYWFEKFLWFISSENYLIIGGRDQQQNEIIVKRYLTPGDIYVHADLHGATSCVIKNPTGEPIPPRTLTEAGTMALCYSAAWDARVITSAWWVYHHQVSKTAPTGEYLTTGSFMIRGKKNFLPPSYLMMGFSFLFKVDESCVWRHQGERKVRVQDEDMETLASCTSELISEEMEQLDGGDTSSDEDKEEHETPVEVELMTQVDQEDITLQSGRDELNEELIQEESSEDEGEYEEVRKDQDSVGEMKDEGEETLNYPDTTIDLSHLQPQRSIQKLASKEESSNSSDSKSQSRRHLSAKERREMKKKKLPSDSGDLEALEGKDKEKESTVHIETHQNTSKNVAAVQPMKRGQKSKMKKMKEKYKDQDEEDRELIMKLLGSAGSNKEEKGKKGKKGKTKDEPVKKQPQKPRGGQRVSDNIKKETPFLEVITHELQDFAVDDPHDDKEEQDLDQQGNEENLFDSLTGQPHPEDVLLFAIPICAPYTTMTNYKYK

SEQ ID NO: 868797 - protein, 828 aa, Homo sapiens [sequence omitted]

SEQ ID NO: 868798 - protein, 874 aa, Homo sapiens
MKSRFSTIDLRAVLAELNASLLGMRVNNVYDVDNKTYLIRLQKPDFKATLLLESGIRIHTTEFEWPKNMMPSSFAMKCRKHLKSRRLVSAKQLGVDRIVDFQFGSDEAAYHLIIELYDRGNIVLTDYEYVILNILRFRTDEADDVKFAVRERYPLDHARAAEPLLTLERLTEIVASAPKGELLKRVLNPLLPYGPALIEHCLLENGFSGNVKVDEKLETKDIEKVLVSLQKAEDYMKTTSNFSGKGYIIQKREIKPCLEADKPVEDILTYEEFHPFLFSQHSQCPYIEFESFDKAVDEFYSKIEGQKIDLKALQQEKQALKKLDNVRKDHENRLEALQQAQEIDKLKGELIEMNLQIVDRAIQVVRSALANQIDWTEIGLIVKEAQAQGDPVASAIKELKLQTNHVTMLLRNPYLLSEEEDDDVDGDVNVEKNETEPPKGKKKKQKNKQLQKPQKNKPLLVDVDLSLSAYANAKKYYDHKRYAAKKTQKTVEAAEKAFKSAEKKTKQTLKEVQTVTSIQKARKVYWFEKFLWFISSENYLIIGGRDQQQNEIIVKRYLTPGDIYVHADLHGATSCVIKNPTGEPIPPRTLTEAGTMALCYSAAWDARVITSAWWVYHHQVSKTAPTGEYLTTGSFMIRGKKNFLPPSYLMMGFSFLFKVDESCVWRHQGERKVRVQDEDMETLASCTSELISEEMEQLDGGDTSSDEDKEEHETPVEVELMTQVDQEDITLQSGRDELNEELIQEESSEDEGEYEEVRKDQDSVGEMKDEGEETLNYPDTTIDLSHLQPQRSIQKLASKEESSNSSDSKSQSRRHLSAKERREMKKKKLPSDSGDLEALEGKDKEKESTVHIETHQNTSKNVAAVQPMKRGQKM

SEQ ID NO: 868799 - protein, 671 aa, Homo sapiens
MKSRFSTIDLRAVLAELNASLLGMRVNNVYDVDNKTYLIRLQKPDFKATLLLESGIRIHTTEFEWPKNMMPSSFAMKCRKHLKSRRLVSAKQLGVDRIVDFQFGSDEAAYHLIIELYDRGNIVLTDYEYVILNILRFRTDEADDVKFAVRERYPLDHARAAEPLLTLERLTEIVASAPKGELLKRVLNPLLPYGPALIEHCLLENGFSGNVKVDEKLETKDIEKVLVSLQKAEDYMKTTSNFSGKGYIIQKREIKPCLEADKPVEDILTYEEFHPFLFSQHSQCPYIEFESFDKAVDEFYSKIEGQKIDLKALQQEKQALKKLDNVRKDHENRLEALQQAQEIDKLKGELIEMNLQIVDRAIQVVRSALANQIDWTEIGLIVKEAQAQGDPVASAIKELKLQTNHVTMLLRNPYLLSEEEDDDVDGDVNVEKNETEPPKGKKKKQKNKQLQKPQKNKPLLVDVDLSLSAYANAKKYYDHKRYAAKKTQKTVEAAEKAFKSAEKKTKQTLKEVQTVTSIQKARKVYWFEKFLWFISSENYLIIGGRDQQQNEIIVKRYLTPGDIYVHADLHGATSCVIKNPTGEPIPPRTLTEAGTMALCYSAAWDARVITSAWWVYHHQVSKTAPTGEYLTTGSFMIRGKKNFLPPSYLMMGFSFLFKVLFNFLVIYLFFS

SEQ ID NO: 868800 - protein, 678 aa, Homo sapiens
MKSRFSTIDLRAVLAELNASLLGMRVNNVYDVDNKTYLIRLQKPDFKATLLLESGIRIHTTEFEWPKNMMPSSFAMKCRKHLKSRRLVSAKQLGVDRIVDFQFGSDEAAYHLIIELYDRGNIVLTDYEYVILNILRFRTDEADDVKFAVRERYPLDHARAAEPLLTLERLTEIVASAPKGELLKRVLNPLLPYGPALIEHCLLENGFSGNVKVDEKLETKDIEKVLVSLQKAEDYMKTTSNFSGKGYIIQKREIKPCLEADKPVEDILTYEEFHPFLFSQHSQCPYIEFESFDKAVDEFYSKIEGQKIDLKALQQEKQALKKLDNVRKDHENRLEALQQAQEIDKLKGELIEMNLQIVDRAIQVVRSALANQIDWTEIGLIVKEAQAQGDPVASAIKELKLQTNHVTMLLRNPYLLSEEEDDDVDGDVNVEKNETEPPKGKKKKQKNKQLQKPQKNKPLLVDVDLSLSAYANAKKYYDHKRYAAKKTQKTVEAAEKAFKSAEKKTKQTLKEVQTVTSIQKARKVYWFEKFLWFISSENYLIIGGRDQQQNEIIVKRYLTPGDIYVHADLHGATSCVIKNPTGEPIPPRTLTEAGTMALCYSAAWDARVITSAWWVYHHQVSKTAPTGEYLTTGSFMIRGKKNFLPPSYLMMGFSFLFKVDEFVFGDIYLKKEAKPARP

SEQ ID NO: 868801 - protein, 397 aa, Homo sapiens
METLASCTSELISEEMEQLDGGDTSSDEDKEEHETPVEVELMTQVDQEDITLQSGRDELNEELIQEESSEDEGEYEEVRKDQDSVGEMKDEGEETLNYPDTTIDLSHLQPQRSIQKLASKEESSNSSDSKSQSRRHLSAKERREMKKKKLPSDSGDLEALEGKDKEKESTVHIETHQNTSKNVAAVQPMKRGQKSKMKKMKEKYKDQDEEDRELIMKLLGSAGSNKEEKGKKGKKGKTKDEPVKKQPQKPRGGQRVSDNIKKETPFLEVITHELQDFAVDDPHDDKEEQDLDQQGNEENLFDSLTGQPHPEDVLLFAIPICAPYTTMTNYKYKVKLTPGVQKKGKAAKTALNSFMHSKEATAREKDLFRSVKDTDLSRNIPGKVKVSAPNLLNVKRK

SEQ ID NO: 868802 - protein, 253 aa, Homo sapiens [sequence omitted]

SEQ ID NO: 868803 - protein, 323 aa, Homo sapiens [sequence omitted]

SEQ ID NO: 868804 - protein, 104 aa, Homo sapiens
EGVCCQLEKLRPNYDHPIFNWSRIGLCKNYVLSFSVNPDWRNLPRSWLVWKREVSTKVKSLTKPVARETPRAGQKRPFRWKTGPSPTCCRSPDPPSCASTTGAA

SEQ ID NO: 868805 - protein, 177 aa, Homo sapiens
MPQAFLLGSIHEPAGALMEPQPCPGSLAESFLEEELRLNAELSQLQFSEPVGIIYNPVEYAWEPHRNYVTRYCQGPKEVLFLGMNPGPFGMAQTGVPFGEVSMVRDWLGIVGPVLTPPQEHPKRPVLGLECPQSEGPRQSMGHEIKSELLMGGCSWIRGKIQCDRVQVRRPGFSSQL

SEQ ID NO: 868806 - protein, 126 aa, Homo sapiens
MPQAFLLGSIHEPAGALMEPQPCPGSLAESFLEEELRLNAELSQLQFSEPVGIIYNPVEYAWEPHRNYVTRYCQGPKEVLFLGMNPGPFGMAQTGVKGLASPVGGVGGSRWMLGWVCCGEGACAWL

SEQ ID NO: 868807 - protein, 177 aa, Homo sapiens; identical to SEQ ID NO: 868805

SEQ ID NO: 868808 - protein, 177 aa, Homo sapiens; identical to SEQ ID NO: 868805

SEQ ID NO: 868809 - protein, 270 aa, Homo sapiens
MPQAFLLGSIHEPAGALMEPQPCPGSLAESFLEEELRLNAELSQLQFSEPVGIIYNPVEYAWEPHRNYVTRYCQGPKEVLFLGMNPGPFGMAQTGVPFGEVSMVRDWLGIVGPVLTPPQEHPKRPVLGLECPQSEVSGARFWGFFRNLCGQPEVFFHHCFVHNLCPLLFLAPSGRNLTPAELPAKQREQLLGICDAALCRQVQLLGVRLVVGVGRLAEQRARRALAGLMPEVQVEGLLHPSPRNPQANKGWEAVAKERLNELGLLPLLLK

SEQ ID NO: 868810 - protein, 270 aa, Homo sapiens; identical to SEQ ID NO: 868809

SEQ ID NO: 868811 - protein, 270 aa, Homo sapiens; identical to SEQ ID NO: 868809

SEQ ID NO: 868812 - protein, 270 aa, Homo sapiens; identical to SEQ ID NO: 868809

SEQ ID NO: 868813 - protein, 270 aa, Homo sapiens; identical to SEQ ID NO: 868809

SEQ ID NO: 868814 - protein, 270 aa, Homo sapiens; identical to SEQ ID NO: 868809

SEQ ID NO: 868815 - protein, 177 aa, Homo sapiens; identical to SEQ ID NO: 868805

SEQ ID NO: 868816 - protein, 177 aa, Homo sapiens; identical to SEQ ID NO: 868805

SEQ ID NO: 868817 - protein, 126 aa, Homo sapiens; identical to SEQ ID NO: 868806

SEQ ID NO: 868818 - protein, 270 aa, Homo sapiens; identical to SEQ ID NO: 868809

SEQ ID NO: 868819 - protein, 177 aa, Homo sapiens; identical to SEQ ID NO: 868805

SEQ ID NO: 868820 - protein, 270 aa, Homo sapiens; identical to SEQ ID NO: 868809

SEQ ID NO: 868821 - protein, 270 aa, Homo sapiens; identical to SEQ ID NO: 868809

SEQ ID NO: 868822 - protein, 270 aa, Homo sapiens; identical to SEQ ID NO: 868809

SEQ ID NO: 868823 - protein, 270 aa, Homo sapiens; identical to SEQ ID NO: 868809

SEQ ID NO: 868824 - protein, 179 aa, Homo sapiens
GSRGLGIRDCGGKLTAPRVVGAEPRGWLEFLYFGVPPSVWGKTQCRESPAYETAWEVCRIKAFQSAGASGRPRRLECNGAISAHCSLRLPGSSDSSASASRVADYELTESLAYILLFLDFFLIKRLLRCLSCDSGMDICPRLSCWGPSMSLQVPSWSPSPALEAWLRASWRRSFGSMLS

SEQ ID NO: 868825 - protein, 226 aa, Homo sapiens
MPQAFLLGSIHEPAGALMEPQPCPGSLAESFLEEELRLNAELSQLQFSEPVGIIYNPVEYAWEPHRNYVTRYCQGPKEVLFLGMNPGPFGMAQTGVPFGEVSMVRDWLGIVGPVLTPPQEHPKRPVLGLECPQSEVSGARFWGFFRNLCGQPEVFFHHCFVHNLCPLLFLAPSGRNLTPAELPAKQREQLLGICDAALCRQVQLLGVRLVVGVSRLIQRRTTNGCF

SEQ ID NO: 868826 - protein, 218 aa, Homo sapiens
MKPPGRSAGSRLSSRPEPAGAPGADYELTESLAYILLFLDFFLIKRLLRCLSCDSGMDICPRLSCWGPSMSLQVPSWSPSPALEAWLRAEPVGIIYNPVEYAWEPHRNYVTRYCQGPKEVLFLGMNPGPFGMAQTGVPFGEVSMVRDWLGIVGPVLTPPQEHPKRPVLGLECPQSEGPRQSMGHEIKSELLMGGCSWIRGKIQCDRVQVRRPGFSSQL

SEQ ID NO: 868827 - protein, 1025 aa, Homo sapiens
MSNGYSTDENFRYLISCFRARVKMYIQVEPVLDYLTFLPAEVKEQIQRTVATSGNMQAVELLLSTLEKGVWHLGWTREFVEALRRTGSPLAARYMNPELTDLPSPSFENAHDEYLQLLNLLQPTLVDKLLVRDVLDKCMEEELLTIEDRNRIAAAENNGNESGVRELLKRIVQKENWFSAFLNVLRQTGNNELVQELTGSDCSESNAEIENLSQVDGPQVEEQLLSTTVQPNLEKEVWGMENNSSESSFADSSVVSESDTSLAEGSVSCLDESLGHNSNMGSDSGTMGSDSDEENVAARASPEPELQLRPYQMEVAQPALEGKNIIICLPTGSGKTRVAVYIAKDHLDKKKKASEPGKVIVLVNKVLLVEQLFRKEFQPFLKKWYRVIGLSGDTQLKISFPEVVKSCDIIISTAQILENSLLNLENGEDAGVQLSDFSLIIIDECHHTNKEAVYNNIMRHYLMQKLKNNRLKKENKPVIPLPQILGLTASPGVGGATKQAKAEEHILKLCANLDAFTIKTVKENLDQLKNQIQEPCKKFAIADATREDPFKEKLLEIMTRIQTYCQMSPMSDFGTQPYEQWAIQMEKKAAKEGNRKERVCAEHLRKYNEALQINDTIRMIDAYTHLETFYNEEKDKKFAVIEDDSDEGGDDEYCDGDEDEDDLKKPLKLDETDRFLMTLFFENNKMLKRLAENPEYENEKLTKLRNTIMEQYTRTEESARGIIFTKTRQSAYALSQWITENEKFAEVGVKAHHLIGAGHSSEFKPMTQNEQKEVISKFRTGKINLLIATTVAEEGLDIKECNIVIRYGLVTNEIAMVQARGRARADESTYVLVAHSGSGVIEHETVNDFREKMMYKAIHCVQNMKPEEYAHKILELQMQSIMEKKMKTKRNIAKHYKNNPSLITFLCKNCSVLACSGEDIHVIEKMHHVNMTPEFKELYIVRENKALQKKCADYQINGEIICKCGQAWGTMMVHKGLDLPCLKIRNFVVVFKNNSTKKQYKKWVELPITFPNLDYSECCLFSDED

SEQ ID NO: 868828 - protein, 1026 aa, Homo sapiens
LQIRYPSTDSGSAPSPLQAERSGQSSTGSTWMYIFTLALKHEVKEQIQRTVATSGNMQAVELLLSTLEKGVWHLGWTREFVEALRRTGSPLAARYMNPELTDLPSPSFENAHDEYLQLLNLLQPTLVDKLLVRDVLDKCMEEELLTIEDRNRIAAAENNGNESGVRELLKRIVQKENWFSAFLNVLRQTGNNELVQELTGSDCSESNAEIENLSQVDGPQVEEQLLSTTVQPNLEKEVWGMENNSSESSFADSSVVSESDTSLAEGSVSCLDESLGHNSNMGSDSGTMGSDSDEENVAARASPEPELQLRPYQMEVAQPALEGKNIIICLPTGSGKTRVAVYIAKDHLDKKKKASEPGKVIVLVNKVLLVEQLFRKEFQPFLKKWYRVIGLSGDTQLKISFPEVVKSCDIIISTAQILENSLLNLENGEDAGVQLSDFSLIIIDECHHTNKEAVYNNIMRHYLMQKLKNNRLKKENKPVIPLPQILGLTASPGVGGATKQAKAEEHILKLCANLDAFTIKTVKENLDQLKNQIQEPCKKFAIADATREDPFKEKLLEIMTRIQTYCQMSPMSDFGTQPYEQWAIQMEKKAAKEGNRKERVCAEHLRKYNEALQINDTIRMIDAYTHLETFYNEEKDKKFAVIEDDSDEGGDDEYCDGDEDEDDLKKPLKLDETDRFLMTLFFENNKMLKRLAENPEYENEKLTKLRNTIMEQYTRTEESARGIIFTKTRQSAYALSQWITENEKFAEVGVKAHHLIGAGHSSEFKPMTQNEQKEVISKFRTGKINLLIATTVAEEGLDIKECNIVIRYGLVTNEIAMVQARGRARADESTYVLVAHSGSGVIEHETVNDFREKMMYKAIHCVQNMKPEEYAHKILELQMQSIMEKKMKTKRNIAKHYKNNPSLITFLCKNCSVLACSGEDIHVIEKMHHVNMTPEFKELYIVRENKALQKKCADYQINGEIICKCGQAWGTMMVHKGLDLPCLKIRNFVVVFKNNSTKKQYKKWVELPITFPNLDYSECCLFSDED

SEQ ID NO: 868829 - protein, 221 aa, Homo sapiens
LQIRYPSTDSGSAPSPLQAERSGQSSTGSTWMYIFTLALKHEVKEQIQRTVATSGNMQAVELLLSTLEKGVWHLGWTREFVEALRRTGSPLAARYMNPELTDLPSPSFENAHDEYLQLLNLLQPTLVDKLLVRDVLDKCMEEELLTIEDRNRIAAAENNGNESGVRELLKRIVQKENWFSAFLNVLRQTGNNELVQELTGSDCSESNAGICNFTEEDSSNS

SEQ ID NO: 868830 - protein, 1026 aa, Homo sapiens; identical to SEQ ID NO: 868828

SEQ ID NO: 868831 - protein, 230 aa, Homo sapiens
SGGVQRRPGQQRLEFQMPWKEESEFTKQDKAARVIQQAWKSFLNVAIFQHFKSLIDLRRQGEPRQIVKYINPKEAELLDAAAGIHVRFRLGGVKFPPDIYYKIFTHRPIEDLCANSPRNYAKLPAKHTSHNKNDHLQEEDHSGWYHRIENNGWRPVSDTFWLSTDGMVVEDKKESEFHFSKLKRRQDLEKKRKLRKIEWMRQMYYSGSLEAKSTHHETLGLISHCNKGAD

SEQ ID NO: 868832 - protein, 252 aa, Homo sapiens
MPWKEESEFTKQDKAARVIQQAWKSFLNVAIFQHFKSLIDLRRQGEPRQIVKYINPKEAELLDAAAGIHVRFRLGGVKFPPDIYYKIFTHRPIEDLCANSPRNYAKLPAKHTSHNKNDHLQEEDHSGWYHRIENNGWRPVSDTEWLSTDGMDGGQTKKATGDPISIINRHEKARLRQTEHGQTLRKKNRSRLKAHRYTTGQGKTGQAYRTTTKLSEKAVGNSDPRTGKPHEGDADTSRTTTAAGLNREDGTR

SEQ ID NO: 868833 - protein, 208 aa, Homo sapiens
SAQAGQQRLEFQMPWKEESEFTKQDKAARVIQQAWKSFLNVAIFQHFKSLIDLRRQGEPRQIVKYINPKEVKFPPDIYYKIFTHRPIEDLCANSPRNYAKLPAKHTSHNKNDHLQEEDHSGWYHRIENNGWRPVSDTFWLSTDGMVVEDKKESEFHFSKLKRRQDLEKKRKLRKIEWMRQMYYSGSLEAKSTHHETLGLISHCNKGAD

SEQ ID NO: 868834 - protein, 946 aa, Homo sapiens
DHPREHSVCTSKTQTQSAPALQGLSSLLQSVTGNPVPASEAASQSTSASPANTTVSTIKGRNLPSSAQPFIPKSFNYSPNSSTSEVSSTSASKASIGQSPGLPSTTFKLPSNSLGFTATHNTSPAAPPTEVTICQSSEVSKPKLESESTSPSLEMKIHNFLKGNPGFSGLNLNIPILSSLGSSAPSESHPSDFQRGPTSTSIDNIDGTPVRDERSGTPTQDEMMDKPTSSSVDTMSLLSKIISPGSSTPSSTRSPPPGRDESYPRELSNSVSTYRPFGLGSESPYKQPSDGMERPSSLMDSSQEKFYPDTSFQEDEDYRDFEYSGPPPSAMMNLEKKPAKSILKSSKLSDTTEYQPILSSYSHRAQEFGVKSAFPPSVRALLDSSENCDRLSSSPGLFGAFSVRGNEPGSDRSPSPSKNDSFFTPDSNHNSLSQSTTGHLSLPQKQYPDSPHPVPHRSLFSPQNTLAAPTGHPPTSGVEKVLASTISTTSTIEFKNMLKNASRKPSDDKHFGQAPSKGTPSDGVSLSNLTQPSLTATDQQQQEEHYRIETRVSSSCLDLPDSTEEKGAPIETLGYHSASNRRMSGEPIQTVESIRVPGKGNRGHGREASRVGWFDLSTSGSSFDNGPSSASELASLGGGGSGGLTGFKTAPYKERAPQFQESVGSFRSNSFNSTFEHHLPPSPLEHGTPFQREPVGPSSAPPVPPKDHGGIFSRDAPTHLPSVDLSNPFTKEAALAHAAPPPPPGEHSGIPFPTPPPPPPPGEHSSSGGSGVPFSTPPPPPPPVDHSGVVPFPAPPLAEHGVAGAVAVFPKDHSSLLQGTLAEHFGVLPGPRDHGGPTQRDLNGPGLSRVRESLTLPSHSLEHLGPPHGGGGGGGSNSSSGPPLGPSHRDTISRSGIILRSPRPDFRPREPFLSRDPFHSLKRPRPPFARGPPFFAPKRPFFPPRY

SEQ ID NO: 868835 - protein, 946 aa, Homo sapiens; identical to SEQ ID NO: 868834

SEQ ID NO: 868836 - protein, 888 aa, Homo sapiens
  misc_feature (875)..(875): Xaa can be any naturally occurring amino acid
DHPREHSVCTSKTQTQSAPALQGLSSLLQSVTGNPVPASEAASQSTSASPANTTVSTIKGRNLPSSAQPFIPKSFNYSPNSSTSEVSSTSASKASIGQSPGLPSTTFKLPSNSLGFTATHNTSPAAPPTEVTICQSSEVSKPKLESESTSPSLEMKIHNFLKGNPGFSGLNLNIPILSSLGSSAPSESHPSDFQRGPTSTSIDNIDGTPVRDERSGTPTQDEMMDKPTSSSVDTMSLLSKIISPGSSTPSSTRSPPPGRDESYPRELSNSVSTYRPFGLGSESPYKQPSDGMERPSSLMDSSQEKFYPDTSFQEDEDYRDFEYSGPPPSAMMNLEKKPAKSILKSSKLSDTTEYQPILSSYSHRAQEFGVKSAFPPSVRALLDSSENCDRLSSSPGLFGAFSVRGNEPGSDRSPSPSKNDSFFTPDSNHNSLSQSTTGHLSLPQKQYPDSPHPVPHRSLFSPQNTLAAPTGHPPTSGVEKVLASTISTTSTIEFKNMLKNASRKPSDDKHFGQAPSKGTPSDGVSLSNLTQPSLTATDQQQQEEHYRIETRVSSSCLDLPDSTEEKGAPIETLGYHSASNRRMSGEPIQTVESIRVPGKGNRGHGREASRVGWFDLSTSGSSFDNGPSSASELASLGGGGSGGLTGFKTAPYKERAPQFQESVGSFRSNSFNSTFEHHLPPSPLEHGTPFQREPVGPSSAPPVPPKDHGGIFSRDAPTHLPSVDLSNPFTKEAALAHAAPPPPPGEHSGIPFPTPPPPPPPGEHSSSGGSGVPFSTPPPPPPPVDHSGVVPFPAPPLAEHGVAGAVAVFPKDHSSLLQGTLAEHFGVLPGPRDHGGPTQRDLNGPGLSRVRESLTLPSHSLEHLGPPHGGGGGGXYFFLLDYTFLKLF

SEQ ID NO: 868837 - protein, 946 aa, Homo sapiens; identical to SEQ ID NO: 868834

SEQ ID NO: 868838 - protein, 321 aa, Homo sapiens
DHPREHSVCTSKTQTQSAPALQGLSSLLQSVTGNPVPASEAASQSTSASPANTTVSTIKGRNLPSSAQPFIPKSFNHSSLPGTDGNRGKGILNSLENIGSRSLVYCCCFYLFSLSRFFFYYNKGPLFQSKKSHTLTFYYSIQSSLPLHLSTFPKLFVLKKKKKKKKKRVKQNKTKGPFFGGGGFGGVGGDKTLFFCPLFLLAHSYFSYLSVNVYDFFPSHAPTVDHPRVCVHPVWGLCTSSGGAVRPFLWRSIAHGRRDISGSRSLCLARIEPDTVSVVTPRRRRHHAFPPGGRLISGEPRRNKPTPRVNICSQGGDETLA

SEQ ID NO: 868839 - protein, 107 aa, Homo sapiens
MSCLFRTKLVWRRFFVQTLAGQGGGSNTAPIPHVAAPSPSPGRLRGVDRPLKGTGCGLCEAPRAAALRGRRSWREVRQVLGRAGSSAGPASPRDCRPGGSASSQRQK

SEQ ID NO: 868840 - protein, 508 aa, Homo sapiens
MPPKRNEKYKLPIPFPEGKVLDDMEGNQWVLGKKIGSGGFGLIYLAFPTNKPEKDARHVVKVEYQENGPLFSELKFYQRVAKKDCIKKWIERKQLDYLGIPLFYGSGLTEFKGRSYRFMVMERLGIDLQKISGQNGTFKKSTVLQLGIRMLDVLEYIHENEYVHGDIKAANLLLGYKNPDQVYLADYGLSYRYCPNGNHKQYQENPRKGHNGTIEFTSLDAHKGVALSRRSDVEILGYCMLRWLCGKLPWEQNLKDPVAVQTAKTNLLDELPQSVLKWAPSGSSCCEIAQFLVCAHSLAYDEKPNYQALKKILNPHGIPLGPLDFSTKGQSINVHTPNSQKVDSQKAATKQVNKAHNRLIEKKVHSERSAESCATWKVQKEEKLIGLMNNEAAQESTRRRQKYQESQEPLNEVNSFPQKISYTQFPNSFYEPHQDFTSPDIFKKSRSPSWYKYTSTVSTGITDLESSTGLWPTISQFTLSEETNADVYYYRIIIPVLLMLVFLALFFL

SEQ ID NO: 868841 - protein, 508 aa, Homo sapiens; identical to SEQ ID NO: 868840

SEQ ID NO: 868842 - protein, 390 aa, Homo sapiens
MVMERLGIDLQKISGQNGTFKKSTVLQLGIRMLDVLEYIHENEYVHGDIKAANLLLGYKNPDQVYLADYGLSYRYCPNGNHKQYQENPRKGHNGTIEFTSLDAHKGVALSRRSDVEILGYCMLRWLCGKLPWEQNLKDPVAVQTAKTNLLDELPQSVLKWAPSGSSCCEIAQFLVCAHSLAYDEKPNYQALKKILNPHGIPLGPLDFSTKGQSINVHTPNSQKVDSQKAATKQVNKAHNRLIEKKVHSERSAESCATWKVQKEEKLIGLMNNEAAQESTRRRQKYQESQEPLNEVNSFPQKISYTQFPNSFYEPHQDFTSPDIFKKSRSPSWYKYTSTVSTGITDLESSTGLWPTISQFTLSEETNADVYYYRIIIPVLLMLVFLALFFL

SEQ ID NO: 868843 - protein, 389 aa, Homo sapiens
MPPKRNEKYKLPIPFPEGKVLDDMEGNQWVLGKKIGSGGFGLIYLAFPTNKPEKDARHVVKVVYLADYGLSYRYCPNGNHKQYQENPRKGHNGTIEFTSLDAHKGVALSRRSDVEILGYCMLRWLCGKLPWEQNLKDPVAVQTAKTNLLDELPQSVLKWAPSGSSCCEIAQFLVCAHSLAYDEKPNYQALKKILNPHGIPLGPLDFSTKGQSINVHTPNSQKVDSQKAATKQVNKAHNRLIEKKVHSERSAESCATWKVQKEEKLIGLMNNEAAQESTRRRQKYQESQEPLNEVNSFPQKISYTQFPNSFYEPHQDFTSPDIFKKSRSPSWYKYTSTVSTGITDLESSTGLWPTISQFTLSEETNADVYYYRIIIPVLLMLVFLALFFL

SEQ ID NO: 868844 - protein, 397 aa, Homo sapiens
MPPKRNEKYKLPIPFPEGKVLDDMEGNQWVLGKKIGSGGFGLIYLAFPTNKPEKDARHVVKVEYQENGPLFSELKFYQRVAKKDCIKKWIERKQLDYLGIPLFYGSGLTEFKGRSYRFMVMERLGIDLQKISGQNGTFKKSTVLQLGIRMLDVLEYIHENEYVHGDIKAANLLLGYKNPDQVYLADYGLSYRYCPNGNHKQYQENPRKGHNGTIEFTSLDAHKGVALSRRSDVEILGYCMLRWLCGKLPWEQNLKDPVAVQTAKTNLLDELPQSVLKWAPSGSSCCEIAQFLVCAHSLAYDEKPNYQALKKILNPHGIPLGPLDFSTKGQSINVHTPNSQKVDSQKAATKQVNKAHNRLIEKKVHSERSAESCATWKVQKEEKLIGLMNNEAAQVEA

SEQ ID NO: 868845 - protein, 130 aa, Homo sapiens
MPGTPGRPSPRASAPARAESLLPRLVLFSPLGVRTRRPLLLTFAKSGSDVLAEKWVEFLFLPVQRELVAGSWGAGLAVGPRRAKGGRTRRLGRAASRYLPQGQGPRRGWRSAQAHVNPWVPVCSETRVED

SEQ ID NO: 868846 - protein, 508 aa, Homo sapiens; identical to SEQ ID NO: 868840

SEQ ID NO: 868847 - protein, 508 aa, Homo sapiens; identical to SEQ ID NO: 868840

SEQ ID NO: 868848 - protein, 390 aa, Homo sapiens; identical to SEQ ID NO: 868842

SEQ ID NO: 868849 - protein, 339 aa, Homo sapiens
EAEEELGPELGLVYLADYGLSYRYCPNGNHKQYQENPRKGHNGTIEFTSLDAHKGVALSRRSDVEILGYCMLRWLCGKLPWEQNLKDPVAVQTAKTNLLDELPQSVLKWAPSGSSCCEIAQFLVCAHSLAYDEKPNYQALKKILNPHGIPLGPLDFSTKGQSINVHTPNSQKVDSQKAATKQVNKAHNRLIEKKVHSERSAESCATWKVQKEEKLIGLMNNEAAQESTRRRQKYQESQEPLNEVNSFPQKISYTQFPNSFYEPHQDFTSPDIFKKSRSPSWYKYTSTVSTGITDLESSTGLWPTISQFTLSEETNADVYYYRIIIPVLLMLVFLALFFL

SEQ ID NO: 868850 - protein, 109 aa, Homo sapiens
VPRLCQLVHVEAPGKTVNLCTFKTAIYLLLKSHQSCEQNFFMVEIVPRETRLAIQTFHGDRFQTLIPFPLPRSHGGCGSLSLCRLQIVIPISKNDTENFNVWLNLNREK

SEQ ID NO: 868851 - protein, 525 aa, Homo sapiens
MGWLFLKVLLAGVSFSGFLYPLVDFCISGKTRGQKPNFVIILADDMGWGDLGANWAETKDTANLDKMASEGMRFVDFHAAASTCSPSRASLLTGRLGLRNGVTRNFAVTSVGGLPLNETTLAEVLQQAGYVTGIIGKWHLGHHGSYHPNFRGFDYYFGIPYSHDMGCTDTPGYNHPPCPACPQGDGPSRNLQRDCYTDVALPLYENLNIVEQPVNLSSLAQKYAEKATQFIQRASTSGRPFLLYVALAHMHVPLPVTQLPAAPRGRSLYGAGLWEMDSLVGQIKDKVDHTVKENTFLWFTGDNGPWAQKCELAGSVGPFTGFWQTRQGGSPAKQTTWEGGHRVPALAYWPGRVPVNVTSTALLSVLDIFPTVVALAQASLPQGRRFDGVDVSEVLFGRSQPGHRVLFHPNSGAAGEFGALQTVRLERYKAFYITGGARACDGSTGPELQHKFPLIFNLEDDTAEAVPLERGGAEYQAVLPEVRKVLADVLQDIANDNISSADYTQDPSVTPCCNPYQIACRCQAA

SEQ ID NO: 868852 - protein, 153 aa, Homo sapiens
ESWNIDLMLKKPFFKDSWGSPASEPLEILVKQVLFHPNSGAAGEFGALQTVRLERYKAFYITGGARACDGSTGPELQHKFPLIFNLEDDTAEAVPLERGGAEYQAVLPEVRKVLADVLQDIANDNISSADYTQDPSVTPCCNPYQIACRCQAA

SEQ ID NO: 868853 - protein, 525 aa, Homo sapiens; identical to SEQ ID NO: 868851

SEQ ID NO: 868854 - protein, 525 aa, Homo sapiens; identical to SEQ ID NO: 868851

SEQ ID NO: 868855 - protein, 262 aa, Homo sapiens
MGWLFLKVLLAGVSFSGFLYPLVDFCISGKTRGQKPNFVIILADDMGWGDLGANWAETKDTANLDKMASEGMRFVDFHAAASTCSPSRASLLTGRLGLRNGVTRNFAVTSVGGLPLNETTLAEVLQQAGYVTGIIGKWHLGHHGSYHPNFRGFDYYFGIPYSHDMGCTDTPGYNHPPCPACPQGDGPSRNLQRDCYTDVALPLYENLNIVEQPVNLSSLAQKYAEKATQFIQRARGKSSQADDLGRRAPGPSTGLLAWQSSS

SEQ ID NO: 868856 - protein, 525 aa, Homo sapiens; identical to SEQ ID NO: 868851

SEQ ID NO: 868857 - protein, 525 aa, Homo sapiens; identical to SEQ ID NO: 868851

SEQ ID NO: 868858 - protein, 525 aa, Homo sapiens; identical to SEQ ID NO: 868851

SEQ ID NO: 868859 - protein, 436 aa, Homo sapiens
MGWLFLKVLLAGVSFSGFLYPLVDFCISGKTRGQKPNFVIILADDMGWGDLGANWAETKDTANLDKMASEGMRFVDFHAAASTCSPSRASLLTGRLGLRNGVTRNFAVTSVGGLPLNETTLAEVLQQAGYVTGIIGKWHLGHHGSYHPNFRGFDYYFGIPYSHDMGCTDTPGYNHPPCPACPQGDGPSRNLQRDCYTDVALPLYENLNIVEQPVNLSSLAQKYAEKATQFIQRASTSGRPFLLYVALAHMHVPLPVTQLPAAPRGRSLYGAGLWEMDSLVGQIKDKVDHTVKENTFLWFTGDNGPWAQKCELAGSVGPFTGFWQTRQGGSPAKQTTWEGGHRVPALAYWPGRVPVNVTSTALLSVLDIFPTVVALAQASLPQGRRFDGVDVSEVLFGRSQPGHRVLFHPNSGAAGEFGALQTVRLERYKAFYITDP

SEQ ID NO: 868860 - protein, 334 aa, Homo sapiens
MGWLFLKVLLAGVSFSGFLYPLVDFCISGKTRGQKPNFVIILADDMGWGDLGANWAETKDTANLDKMASEGMRFVDFHAAASTCSPSRASLLTGRLGLRNGVTRNFAVTSVGGLPLNETTLAEVLQQAGYVTGIIGKWHLGHHGSYHPNFRGFDYYFGIPYSHDMGCTDTPGYNHPPCPACPQGDGPSRNLQRDCYTDVALPLYENLNIVEQPVNLSSLAQKYAEKATQFIQRARRFHSSRAMDSKKLGVFYSLSLSGQESTCCTAVHLGRIKKGLYLWLSDHSSPLNMQESPTPRSATLDVFRSSAGRVEAAMQEIQASCFLGNKTYLRIESQ

SEQ ID NO: 868861 - protein, 132 aa, Homo sapiens
ITQGRGCSTRLGLECEEELGPGEWLRNENVNRNFGLNDVTPEQRGWCCKERRDGKVRREVTQENRRWQSQESAAQTSLPGRRAGRSLVGGPPSTSTCTAVSHQDPELSGCSPLTSECPEAQSRAIPAQYPQW

SEQ ID NO: 868862 - protein, 266 aa, Homo sapiens
MSSSVKTPALEELVPGSEEKPKGRSPLSWGSLFGHRSEKIVFAKSDGGTDENVLTVTITETTVIESDLGVWSSRALLYLTLWFFFSFCTLFLNKYILSLLGGEPSMLGAVQMLSTTVIGCVKTLVPCCLYQHKARLSYPPNFLMTMLFVGLMRFATVVLGLVSLKNVAVSFAETVKSSAPIFTVIMSRMILGEYTGRPSDREEREELQLQPGRGAAASDRRSPVPPSERHGVRPHGENLPGDFQVPQALHRVALSMALPCPMLPAS

SEQ ID NO: 868863 - protein, 439 aa, Homo sapiens
MSEDEERENENHLLVVPESRFDRDSGESEEAEEEVGEGTPQSSALTEGDYVPDSPALSPIELKQELPKYLPALQGCRSVEEFQCLNRIEEGTYGVVYRAKDKKTDEIVALKRLKMEKEKEGFPITSLREINTILKAQHPNIVTVREIVVGSNMDKIYIVMNYVEHDLKSLMETMKQPFLPGEVKTLMIQLLRGVKHLHDNWILHRDLKTSNLLLSHAGILKVGDFGLAREYGSPLKAYTPVVVTLWYRAPELLLGAKEYSTAVDMWSVGCIFGELLTQKPLFPGKSEIDQINKVFKDLGTPSEKIWPGYSELPAVKKMTFSEHPYNNLRKRFGALLSDQGFDLMNKFLTYFPGRRISAEDGLKHEYFRETPLPIDPSMFPTWPAKSEQQRVKRGTSPRPPEGGLGYSQLGDDDLKETGFHLTTTNQGASAAGPGFSLKF

SEQ ID NO: 868864 - protein, 109 aa, Homo sapiens
MGDEKDSWKVKTLDEILQEKKRRKEQEEKAEIKRLKNSDDRDSKRDSLEEGELRDHCMEITIRNSPYRREDSMEDRGEEDDSLAIKPPQQMSRKEKVHHRKDEKRKENT

SEQ ID NO: 868865 - protein, 138 aa, Homo sapiens
  misc_feature (3)..(3): Xaa can be any naturally occurring amino acid
ALXTSPHLTQGCGHPQTIPEASQAFKLQHCTALKGYDQRRPFSRFCLEEGPLPLPHPALLSLPHPGLRELPATPGHPALLPVGVSSPEVEDKPLVFNLGGDVYVPFLFWTLSMRQAVLRSPWGEPVCPPSEPTVPIII

SEQ ID NO: 868866 - protein, 138 aa, Homo sapiens; identical to SEQ ID NO: 868865
  misc_feature (3)..(3): Xaa can be any naturally occurring amino acid

SEQ ID NO: 868867 - protein, 716 aa, Homo sapiens
MILWPSNHPSKCLGKKKFITEKMKREKRIRRHRSHSAEGGKHARVKEKEREHERRKRHREEQDKARREWERQKRREMAREHSRRERDRLEQLERKRERERKMREQQKEQREQKERERRAEERRKEREARREVSAHHRTMREDYSDKVKASHWSRSPPRPPRERFELGDGRKPGEARPARAQKPAQLKEEKMEERDLLSDLQDISDSERKTSSAESSSAESGSGSEEEEEEEEEEEEEGSTSEESEEEEEEEEEEEEETGSNSEEASEQSAEEVSEEEMSEDEERENENHLLVVPESRFDRDSGESEEAEEEVGEGTPQSSALTEGDYVPDSPALSPIELKQELPKYLPALQGCRSVEEFQCLNRIEEGTYGVVYRAKDKKTDEIVALKRLKMEKEKEGFPITSLREINTILKAQHPNIVTVREIVVGSNMDKIYIVMNYVEHDLKSLMETMKQPFLPGEVKTLMIQLLRGVKHLHDNWILHRDLKTSNLLLSHAGILKVGDFGLAREYGSPLKAYTPVVVTLWYRAPELLLGAKEYSTAVDMWSVGCIFGELLTQKPLFPGKSEIDQINKVFKDLGTPSEKIWPGYSELPAVKKMTFSEHPYNNLRKRFGALLSDQGFDLMNKFLTYFPGRRISAEDGLKHEYFRETPLPIDPSMFPTWPAKSEQQRVKRGTSPRPPEGGLGYSQLGDDDLKETGFHLTTTNQGASAAGPGFSLKF

SEQ ID NO: 868868 - protein, 703 aa, Homo sapiens
MILWPSNHPSKCLGKKKFITEKMKREKRIRRHRSHSAEGGKHARVKEKEREHERRKRHREEQDKARREWERQKRREMAREHSRRERDRLEQLERKRERERKMREQQKEQREQKERERRAEERRKEREARREVSAHHRTMREDYSDKVKASHWSRSPPRPPRERFELGDGRKPVKEEKMEERDLLSDLQDISDSERKTSSAESSSAESGSGSEEEEEEEEEEEEEGSTSEESEEEEEEEEEEEEETGSNSEEASEQSAEEVSEEEMSEDEERENENHLLVVPESRFDRDSGESEEAEEEVGEGTPQSSALTEGDYVPDSPALSPIELKQELPKYLPALQGCRSVEEFQCLNRIEEGTYGVVYRAKDKKTDEIVALKRLKMEKEKEGFPITSLREINTILKAQHPNIVTVREIVVGSNMDKIYIVMNYVEHDLKSLMETMKQPFLPGEVKTLMIQLLRGVKHLHDNWILHRDLKTSNLLLSHAGILKVGDFGLAREYGSPLKAYTPVVVTLWYRAPELLLGAKEYSTAVDMWSVGCIFGELLTQKPLFPGKSEIDQINKVFKDLGTPSEKIWPGYSELPAVKKMTFSEHPYNNLRKRFGALLSDQGFDLMNKFLTYFPGRRISAEDGLKHEYFRETPLPIDPSMFPTWPAKSEQQRVKRGTSPRPPEGGLGYSQLGDDDLKETGFHLTTTNQGASAAGPGFSLKF

SEQ ID NO: 868869 - protein, 627 aa, Homo sapiens
MAREHSRRERDRLEQLERKRERERKMREQQKEQREQKERERRAEERRKEREARREVSAHHRTMREDYSDKVKASHWSRSPPRPPRERFELGDGRKPVKEEKMEERDLLSDLQDISDSERKTSSAESSSAESGSGSEEEEEEEEEEEEEGSTSEESEEEEEEEEEEEEETGSNSEEASEQSAEEVSEEEMSEDEERENENHLLVVPESRFDRDSGESEEAEEEVGEGTPQSSALTEGDYVPDSPALSPIELKQELPKYLPALQGCRSVEEFQCLNRIEEGTYGVVYRAKDKKTDEIVALKRLKMEKEKEGFPITSLREINTILKAQHPNIVTVREIVVGSNMDKIYIVMNYVEHDLKSLMETMKQPFLPGEVKTLMIQLLRGVKHLHDNWILHRDLKTSNLLLSHAGILKVGDFGLAREYGSPLKAYTPVVVTLWYRAPELLLGAKEYSTAVDMWSVGCIFGELLTQKPLFPGKSEIDQINKVFKDLGTPSEKIWPGYSELPAVKKMTFSEHPYNNLRKRFGALLSDQGFDLMNKFLTYFPGRRISAEDGLKHEYFRETPLPIDPSMFPTWPAKSEQQRVKRGTSPRPPEGGLGYSQLGDDDLKETGFHLTTTNQGASAAGPGFSLKF

SEQ ID NO: 868870 - protein, 138 aa, Homo sapiens; identical to SEQ ID NO: 868865
  misc_feature (3)..(3): Xaa can be any naturally occurring amino acid

SEQ ID NO: 868871 - protein, 649 aa, Homo sapiens
MAREHSRRERGNDGVCLFRDRLEQLERKRERERKMREQQKEQREQKERERRAEERRKEREARREVSAHHRTMREDYSDKVKASHWSRSPPRPPRERFELGDGRKPGEARPARAQKPAQLKEEKMEERDLLSDLQDISDSERKTSSAESSSAESGSGSEEEEEEEEEEEEEGSTSEESEEEEEEEEEEEEETGSNSEEASEQSAEEVSEEEMSEDEERENENHLLVVPESRFDRDSGESEEAEEEVGEGTPQSSALTEGDYVPDSPALSPIELKQELPKYLPALQGCRSVEEFQCLNRIEEGTYGVVYRAKDKKTDEIVALKRLKMEKEKEGFPITSLREINTILKAQHPNIVTVREIVVGSNMDKIYIVMNYVEHDLKSLMETMKQPFLPGEVKTLMIQLLRGVKHLHDNWILHRDLKTSNLLLSHAGILKVGDFGLAREYGSPLKAYTPVVVTLWYRAPELLLGAKEYSTAVDMWSVGCIFGELLTQKPLFPGKSEIDQINKVFKDLGTPSEKIWPGYSELPAVKKMTFSEHPYNNLRKRFGALLSDQGFDLMNKFLTYFPGRRISAEDGLKHEYFRETPLPIDPSMFPTWPAKSEQQRVKRGTSPRPPEGGLGYSQLGDDDLKETGFHLTTTNQGASAAGPGFSLKF

SEQ ID NO: 868872 - protein, 786 aa, Homo sapiens
MILWPSNHPSKCLGKKKFITEKMKREKRIRRHRSHSAEGGKHARVKEKEREHERRKRHREEQDKARREWERQKRREMAREHSRRERDRLEQLERKRERERKMREQQKEQREQKERERRAEERRKEREARREVSAHHRTMREDYSDKVKASHWSRSPPRPPRERFELGDGRKPVKEEKMEERDLLSDLQDISDSERKTSSAESSSAESGSGSEEEEEEEEEEEEEGSTSEESEEEEEEEEEEEEETGSNSEEASEQSAEEVSEEEMSEDEERENENHLLVVPESRFDRDSGESEEAEEEVGEGTPQSSALTEGDYVPDSPALSPIELKQELPKYLPALQGCRSVEEFQCLNRIEEGTYGVVYRAKDKKTDEIVALKRLKMEKEKEGFPITSLREINTILKAQHPNIVTVRVSMAPPRLAPGGRLFRQGPVLSWGRVLPTLSCTYVEPFTDHTEASICLPGGTGGPYCPSASAPGCRGGWGPGGAQHPQSRALQEIVVGSNMDKIYIVMNYVEHDLKSLMETMKQPFLPGEVKTLMIQLLRGVKHLHDNWILHRDLKTSNLLLSHAGILKVGDFGLAREYGSPLKAYTPVVVTLWYRAPELLLGAKEYSTAVDMWSVGCIFGELLTQKPLFPGKSEIDQINKVFKDLGTPSEKIWPGYSELPAVKKMTFSEHPYNNLRKRFGALLSDQGFDLMNKFLTYFPGRRISAEDGLKHEYFRETPLPIDPSMFPTWPAKSEQQRVKRGTSPRPPEGGLGYSQLGDDDLKETGFHLTTTNQGASAAGPGFSLKF

SEQ ID NO: 868873 - protein, 771 aa, Homo sapiens
MILWPSNHPSKCLGKKKFITEKMKREKRIRRHRSHSAEGGKHARVKEKEREHERRKRHREEQDKARREWERQKRREMAREHSRRERDRLEQLERKRERERKMREQQKEQREQKERERRAEERRKEREARREVSAHHRTMREDYSDKVKASHWSRSPPRPPRERFELGDGRKPVKEEKMEERDLLSDLQDISDSERKTSSAESSSAESGSGSEEEEEEEEEEEEEGSTSEESEEEEEEEEEEEEETGSNSEEASEQSAEEVSEEEMSEDEERENENHLLVVPESRFDRDSGESEEAEEEVGEGTPQSSALTEGDYVPDSPALSPIELKQELPKYLPALQGCRSVEEFQCLNRIEEGTYGVVYRAKDKKTDEIVALKRLKMEKEKEGFPITSLREINTILKAQHPNIVTVREIVVGSNMDKIYIVMNYVEHDLKSLMETMKQPFLPGTAAPRGPVCVQVGAGPGHPRGDSAAGRASCIHRESPEKPLLLPRRAGHPECPGLGAAGSTWEPPSLPGEVKTLMIQLLRGVKHLHDNWILHRDLKTSNLLLSHAGILKVGDFGLAREYGSPLKAYTPVVVTLWYRAPELLLGAKEYSTAVDMWSVGCIFGELLTQKPLFPGKSEIDQINKVFKDLGTPSEKIWPGYSELPAVKKMTFSEHPYNNLRKRFGALLSDQGFDLMNKFLTYFPGRRISAEDGLKHEYFRETPLPIDPSMFPTWPAKSEQQRVKRGTSPRPPEGGLGYSQLGDDDLKETGFHLTTTNQGASAAGPGFSLKF

SEQ ID NO: 868874 - protein, 138 aa, Homo sapiens; identical to SEQ ID NO: 868865
  misc_feature (3)..(3): Xaa can be any naturally occurring amino acid

SEQ ID NO: 868875 - protein, 661 aa, Homo sapiens
MAREHSRRERGNDGVCLFRDRLEQLERKRERERKMREQQKEQREQKERERRAEERRKEREARREVSAHHRTMREDYSDKVKASHWSRSPPRPPRERFELGDGRKPVKEEKMEERDLLSDLQDISDSERKTSSAESSSAESGSGSEEEEEEEEEEEEEGSTSEESEEEEEEEEEEEEETGSNSEEASEQSAEEVSEEEMSEDEERENENHLLVVPESRFDRDSGESEEAEEEVGEGTPQSSALTEGDYVPDSPALSPIELKQELPKYLPALQGCRSVEEFQCLNRIEEGTYGVVYRAKDKKTDEIVALKRLKMEKEKEGFPITSLREINTILKAQHPNIVTVREIVVGSNMDKIYIVMNYVEHDLKSLMETMKQPFLPGEVKTLMIQLLRGVKHLHDNWILHRDLKTSNLLLSHAGILKVSPPPSGPSQGDPPGPPTAAHLSLQVGDFGLAREYGSPLKAYTPVVVTLWYRAPELLLGAKEYSTAVDMWSVGCIFGELLTQKPLFPGKSEIDQINKVFKDLGTPSEKIWPGYSELPAVKKMTFSEHPYNNLRKRFGALLSDQGFDLMNKFLTYFPGRRISAEDGLKHEYFRETPLPIDPSMFPTWPAKSEQQRVKRGTSPRPPEGGLGYSQLGDDDLKETGFHLTTTNQGASAAGPGFSLKF

SEQ ID NO: 868876 - protein, 816 aa, Homo sapiens
MILWPSNHPSKCLGKKKFITEKMKREKRIRRHRSHSAEGGKHARVKEKEREHERRKRHREEQDKARREWERQKRREMAREHSRRERDRLEQLERKRERERKMREQQKEQREQKERERRAEERRKEREARREVSAHHRTMREDYSDKVKASHWSRSPPRPPRERFELGDGRKPVKEEKMEERDLLSDLQDISDSERKTSSAESSSAESGSGSEEEEEEEEEEEEEGSTSEESEEEEEEEEEEEEETGSNSEEASEQSAEEVSEEEMSEDEERENENHLLVVPESRFDRDSGESEEAEEEVGGCRSVEEFQCLNRIEEGTYGVVYRAKDKKTDEIVALKRLKMEKEKEGFPITSLREINTILKAQHPNIVTVRVSMAPPRLAPGGRLFRQGPVLSWGRVLPTLSCTYVEPFTDHTEASICLPGGTGGPYCPSASAPGCRGGWGPGGAQHPQSRALQEIVVGSNMDKIYIVMNYVEHDLKSLMETMKQPFLPGTAAPRGPVCVQVGAGPGHPRGDSAAGRASCIHRESPEKPLLLPRRAGHPECPGLGAAGSTWEPPSLPGEVKTLMIQLLRGVKHLHDNWILHRDLKTSNLLLSHAGILKVGDFGLAREYGSPLKAYTPVVVTLWYRAPELLLGAKEYSTAVDMWSVGCIFGELLTQKPLFPGKSEIDQINKVFKDLGTPSEKIWPGYSELPAVKKMTFSEHPYNNLRKRFGALLSDQGFDLMNKFLTYFPGRRISAEDGLKHEYFRETPLPIDPSMFPTWPAKSEQQRVKRGTSPRPPEGGLGYSQLGDDDLKETGFHLTTTNQGASAAGPGFSLKF

SEQ ID NO: 868877 - protein, 138 aa, Homo sapiens; identical to SEQ ID NO: 868865
  misc_feature (3)..(3): Xaa can be any naturally occurring amino acid

SEQ ID NO: 868878 - protein, 685 aa, Homo sapiens
MILWPSNHPSKCLGKKKFITEKMKREKRIRRHRSHSAEGGKHARVKEKEREHERRKRHREEQDKARREWERQKRREMAREHSRRERDRLEQLERKRERERKMREQQKEQREQKERERRAEERRKEREARREVSAHHRTMREDYSDKVKASHWSRSPPRPPRERFELGDGRKPVKEEKMEERDLLSDLQDISDSERKTSSAESSSAESGSGSEEEEEEEEEEEEEGSTSEESEEEEEEEEEEEEETGSNSEEASEQSAEEVSEEEMSEDEERENENHLLVVPESRFDRDSGESEEAEEEVGEGTPQSSALTEGDYVPDSPALSPIELKQELPKYLPALQGCRSVEEFQCLNRIEEGTYGVVYRAKDKKTDEIVALKRLKMEKEKEGFPITSLREINTILKAQHPNIVTVREIVVGSNMDKIYIVMNYVEHDLKSLMETMKQPFLPGEVKTLMIQLLRGVKHLHDNWILHRDLKTSNLLLSHAGILKPPTASRALAFLNTSPGVLEYSTAVDMWSVGCIFGELLTQKPLFPGKSEIDQINKVFKDLGTPSEKIWPGYSELPAVKKMTFSEHPYNNLRKRFGALLSDQGFDLMNKFLTYFPGRRISAEDGLKHEYFRETPLPIDPSMFPTWPAKSEQQRVKRGTSPRPPEGGLGYSQLGDDDLKETGFHLTTTNQGASAAGPGFSLKF

SEQ ID NO: 868879 - protein, 753 aa, Homo sapiens
MILWPSNHPSKCLGKKKFITEKMKREKRIRRHRSHSAEGGKHARVKEKEREHERRKRHREEQDKARREWERQKRREMAREHSRRERDRLEQLERKRERERKMREQQKEQREQKERERRAEERRKEREARREVSAHHRTMREDYSDKVKASHWSRSPPRPPRERFELGDGRKPVKEEKMEERDLLSDLQDISDSERKTSSAESSSAESGSGSEEEEEEEEEEEEEGSTSEESEEEEEEEEEEEEETGSNSEEASEQSAEEVSEEEMSEDEERENENHLLVVPESRFDRDSGESEEAEEEVGEGTPQSSALTEGDYVPDSPALSPIELKQELPKYLPALQGCRSVEEFQCLNRIEEGTYGVVYRAKDKKTDEIVALKRLKMEKEKEGFPITSLREINTILKAQHPNIVTVREIVVGSNMDKIYIVMNYVEHDLKSLMETMKQPFLPGTAAPRGPVCVQVGAGPGHPRGDSAAGRASCIHRESPEKPLLLPRRAGHPECPGLGAAGSTWEPPSLPGEVKTLMIQLLRGVKHLHDNWILHRDLKTSNLLLSHAGILKPPTASRALAFLNTSPGVLEYSTAVDMWSVGCIFGELLTQKPLFPGKSEIDQINKVFKDLGTPSEKIWPGYSELPAVKKMTFSEHPYNNLRKRFGALLSDQGFDLMNKFLTYFPGRRISAEDGLKHEYFRETPLPIDPSMFPTWPAKSEQQRVKRGTSPRPPEGGLGYSQLGDDDLKETGFHLTTTNQGASAAGPGFSLKF

SEQ ID NO: 868880 - protein, 676 aa, Homo sapiens
MILWPSNHPSKCLGKKKFITEKMKREKRIRRHRSHSAEGGKHARVKEKEREHERRKRHREEQDKARREWERQKRREMAREHSRRERDRLEQLERKRERERKMREQQKEQREQKERERRAEERRKEREARREVSAHHRTMREDYSDKVKASHWSRSPPRPPRERFELGDGRKPVKEEKMEERDLLSDLQDISDSERKTSSAESSSAESGSGSEEEEEEEEEEEEEGSTSEESEEEEEEEEEEEEETGSNSEEASEQSAEEVSEEEMSEDEERENENHLLVVPESRFDRDSGESEEAEEEVGEGTPQSSALTEGDYVPDSPALSPIELKQELPKYLPALQGCRSVEEFQCLNRIEEGTYGVVYRAKDKKTDEIVALKRLKMEKEKEGFPITSLREINTILKAQHPNIVTVREIVVGSNMDKIYIVMNYVEHDLKSLMETMKQPFLPGEVKTLMIQLLRGVKHLHDNWILHRDLKTSNLLLSHAGILKVGDFGLAREYGSPLKAYTPVVVTLWYRAPELLLGAKEYSTAVDMWSVGCIFGELLTQKPLFPGKSEIDQINKVFKDLGTPSEKIWPGYSELPAVKKMTFSEHPYNNLRKRFGALLSDQGFDLMNKFLTYFPGRRISAEDGLKHEYFRETPLPIDPSMFPTWPAKSEQQRVKRGTSPRPPEGGLGYSQLVRD

SEQ ID NO: 868881 - protein, 122 aa, Homo sapiens [sequence omitted]

SEQ ID NO: 868882 - protein, 563 aa, Homo sapiens
MILWPSNHPSKCLGKKKFITEKMKREKRIRRHRSHSAEGGKHARVKEKEREHERRKRHREEQDKARREWERQKRREMAREHSRRERDRLEQLERKRERERKMREQQKEQREQKERERRAEERRKEREARREVSAHHRTMREDYSDKVKASHWSRSPPRPPRERFELGDGRKPVKEEKMEERDLLSDLQDISDSERKTSSAESSSAESGSGSEEEEEEEEEEEEEGSTSEESEEEEEEEEEEEEETGSNSEEASEQSAEEVSEEEMSEDEERENENHLLVVPESRFDRDSGESEEAEEEVGEGTPQSSALTEGDYVPDSPALSPIELKQELPKYLPALQGCRSVEEFQCLNRIEEGTYGVVYRAKDKKTDEIVALKRLKMEKEKEGFPITSLREINTILKAQHPNIVTVREIVVGSNMDKIYIVMNYVEHDLKSLMETMKQPFLPGEVKTLMIQLLRGVKHLHDNWILHRDLKTSNLLLSHAGILKVGDFGLAREYGSPLKAYTPVVVTLWYRAPELLLGAKNSSTGVALVGHGVLFGECDQKLCSGSQFVHSPGSRLGLGNCR

SEQ ID NO: 868883 - protein, 138 aa, Homo sapiens; identical to SEQ ID NO: 868865
  misc_feature (3)..(3): Xaa can be any naturally occurring amino acid

SEQ ID NO: 868884 - protein, 417 aa, Homo sapiens
MILWPSNHPSKCLGKKKFITEKMKREKRIRRHRSHSAEGGKHARVKEKEREHERRKRHREEQDKARREWERQKRREMAREHSRRERDRLEQLERKRERERKMREQQKEQREQKERERRAEERRKEREARREVSAHHRTMREDYSDKVKASHWSRSPPRPPRERFELGDGRKPVKEEKMEERDLLSDLQDISDSERKTSSAESSSAESGSGSEEEEEEEEEEEEEGSTSEESEEEEEEEEEEEEETGSNSEEASEQSAEEVSEEEMSEDEERENENHLLVVPESRFDRDSGESEEAEEEVGEGTPQSSALTEGDYVPDSPALSPIELKQELPKYLPALQVRPSPRPGPLSALAVGVTTGAERSLAPVLASVASQGCWAHWGSDGRAQPLAPHASRSRLFLMLDGTGWTGSCPQDCSAA

SEQ ID NO: 868885 - protein, 69 aa, Homo sapiens
SAHHRTMREDYSDKVKASHWSRSPPRPPRERFELGDGRKPGEARPARAQKPAQCESFLGDVWHKCVGFI

SEQ ID NO: 868886 - protein, 133 aa, Homo sapiens
MCPTPLPCRPSSSSRSCPSTCRPCRSGPPLAPGRCPHWQSELPQGLSEAWPPCWRLSPHRAAGPTGAVTGGHSHWPLMLLGPASFSCWTELGGQGAARRTALRLERQPGRAAALLSLLPELRPPPHWRAVPST

SEQ ID NO: 868887 - protein, 703 aa, Homo sapiens; identical to SEQ ID NO: 868868

SEQ ID NO: 868888 - protein, 147 aa, Homo sapiens
DAWVDGRVGRPTRRPRVRAGLELLGSSNPSHSASCSVENIGVGYYTCFSRFYKTADLCVEDRPGVCSLRCEDVLSRDFPRISISFFLLSSKTNRRLGAVAHASNRSTLGGSSWRITRPGVRDQPGQHDETLSLPKIQKLAGCDGGCL

SEQ ID NO: 868889 - protein, 115 aa, Homo sapiens
MILAHCSLDFLGSSDLPPQPPMWLEPQARATMPGYFFVELGSRFVAQAGLELLGSSNPSHSASCSVENIGVGYYTCFSRFYKTADPPLHPHKELPSCLDFLFVDQKQTFFQRISK

SEQ ID NO: 868890 - protein, 138 aa, Homo sapiens; identical to SEQ ID NO: 868865
  misc_feature (3)..(3): Xaa can be any naturally occurring amino acid

SEQ ID NO: 868891 - protein, 592 aa, Homo sapiens
IVQLPTTGFDSERTPRGCLHLPYLFSALEGFIVDQSQGPQEGDILLEVHLLVLVPVQVFHQPCNFSILQLLMCENVKSILSGDDNPGFFPFPLPGNPLCKWLLCSLITKDPCHFGIASPQLLLSYWSSFGEMETGSNSEEASEQSAEEVSEEEMSEDEERENENHLLVVPESRFDRDSGESEEAEEEVGEGTPQSSALTEGDYVPDSPALSPIELKQELPKYLPALQGCRSVEEFQCLNRIEEGTYGVVYRAKDKKTDEIVALKRLKMEKEKEGFPITSLREINTILKAQHPNIVTVREIVVGSNMDKIYIVMNYVEHDLKSLMETMKQPFLPGEVKTLMIQLLRGVKHLHDNWILHRDLKTSNLLLSHAGILKVGDFGLAREYGSPLKAYTPVVVTLWYRAPELLLGAKEYSTAVDMWSVGCIFGELLTQKPLFPGKSEIDQINKVFKDLGTPSEKIWPGYSELPAVKKMTFSEHPYNNLRKRFGALLSDQGFDLMNKFLTYFPGRRISAEDGLKHEYFRETPLPIDPSMFPTWPAKSEQQRVKRGTSPRPPEGGLGYSQLGDDDLKETGFHLTTTNQGASAAGPGFSLKF

SEQ ID NO: 868892 - protein, 138 aa, Homo sapiens; identical to SEQ ID NO: 868865
  misc_feature (3)..(3): Xaa can be any naturally occurring amino acid

SEQ ID NO: 868893 - protein, 854 aa, Homo sapiens
MILWPSNHPSKCLGKKKFITEKMKREKRIRRHRSHSAEGGKHARVKEKEREHERRKRHREEQDKARREWERQKRREMAREHSRRERDRLEQLERKRERERKMREQQKEQREQKERERRAEERRKEREARREVSAHHRTMREDYSDKVKASHWSRSPPRPPRERFELGDGRKPVKEEKMEERDLLSDLQDISDSERKTSSAESSSAESGSGSEEEEEEEEEEEEEGSTSEESEEEEEEEEEEEEETGSNSEEASEQSAEEVSEEEMSEDEERENENHLLVVPESRFDRDSGESEEAEEEVGEGTPQSSALTEGDYVPDSPALSPIELKQELPKYLPALQGCRSVEEFQCLNRIEEGTYGVVYRAKDKKTDEIVALKRLKMEKEKEGFPITSLREINTILKAQHPNIVTVRVSMAPPRLAPGGRLFRQGPVLSWGRVLPTLSCTYVEPFTDHTEASICLPGGTGGPYCPSASAPGCRGGWGPGGAQHPQSRALQEIVVGSNMDKIYIVMNYVEHDLKSLMETMKQPFLPGTAAPRGPVCVQVGAGPGHPRGDSAAGRASCIHRESPEKPLLLPRRAGHPECPGLGAAGSTWEPPSLPGEVKTLMIQLLRGVKHLHDNWILHRDLKTSNLLLSHAGILKVGDFGLAREYGSPLKAYTPVVVTLWYRAPELLLGAKEYSTAVDMWSVGCIFGELLTQKPLFPGKSEIDQINKVFKDLGTPSEKIWPGYSELPAVKKMTFSEHPYNNLRKRFGALLSDQGFDLMNKFLTYFPGRRISAEDGLKHEYFRETPLPIDPSMFPTWPAKSEQQRVKRGTSPRPPEGGLGYSQLGDDDLKETGFHLTTTNQGASAAGPGFSLKF

SEQ ID NO: 868894 - protein, 769 aa, Homo sapiens
MILWPSNHPSKCLGKKKFITEKMKREKRIRRHRSHSAEGGKHARVKEKEREHERRKRHREEQDKARREWERQKRREMAREHSRRERDRLEQLERKRERERKMREQQKEQREQKERERRAEERRKEREARREVSAHHRTMREDYSDKVKASHWSRSPPRPPRERFELGDGRKPVKEEKMEERDLLSDLQDISDSERKTSSAESSSAESGSGSEEEEEEEEEEEEEGSTSEESEEEEEEEEEEEEETGSNSEEASEQSAEEVSEEEMSEDEERENENHLLVVPESRFDRDSGESEEAEEEVGEGTPQSSALTEGDYVPDSPALSPIELKQELPKYLPALQGCRSVEEFQCLNRIEEGTYGVVYRAKDKKTDEIVALKRLKMEKEKEGFPITSLREINTILKAQHPNIVTVREIVVGSNMDKIYIVMNYVEHDLKSLMETMKQPFLPGEVKTLMIQLLRGVKHLHDNWILHRDLKTSNLLLSHAGILKVGDFGLAREYGSPLKAYTPVVVTLWYRAPELLLGAKEYSTAVDMWSVGCIFGELLTQKPLFPGKSEIDQINKVFKVGLALPQVRYGFQRSCRNGAAGRTGAGLRWGPGPLRALLVACLLSRDTGANTVGHLVWLLKHLFFQDLGTPSEKIWPGYSELPAVKKMTFSEHPYNNLRKRFGALLSDQGFDLMNKFLTYFPGRRISAEDGLKHEYFRETPLPIDPSMFPTWPAKSEQQRVKRGTSPRPPEGGLGYSQLGDDDLKETGFHLTTTNQGASAAGPGFSLKF

SEQ ID NO: 868895 - protein, 455 aa, Homo sapiens
MPLCLNQVCERTRTLRGTMIELSNIENHLLVVPESRFDRDSGESEEAEEEVGEGTPQSSALTEGDYVPDSPALSPIELKQELPKYLPALQGCRSVEEFQCLNRIEEGTYGVVYRAKDKKTDEIVALKRLKMEKEKEGFPITSLREINTILKAQHPNIVTVREIVVGSNMDKIYIVMNYVEHDLKSLMETMKQPFLPGEVKTLMIQLLRGVKHLHDNWILHRDLKTSNLLLSHAGILKVGDFGLAREYGSPLKAYTPVVVTLWYRAPELLLGAKEYSTAVDMWSVGCIFGELLTQKPLFPGKSEIDQINKVFKDLGTPSEKIWPGYSELPAVKKMTFSEHPYNNLRKRFGALLSDQGFDLMNKFLTYFPGRRISAEDGLKHEYFRETPLPIDPSMFPTWPAKSEQQRVKRGTSPRPPEGGLGYSQLGDDDLKETGFHLTTTNQGASAAGPGFSLKF

SEQ ID NO: 868896 - protein, 694 aa, Homo sapiens
MILWPSNHPSKCLGKKKFITEKMKREKRIRRHRSHSAEGGKHARVKEKEREHERRKRHREEQDKARREWERQKRREMAREHSRRERDRLEQLERKRERERKMREQQKEQREQKERERRAEERRKEREARREVSAHHRTMREDYSDKVKASHWSRSPPRPPRERFELGDGRKPVKEEKMEERDLLSDLQDISDSERKTSSAESSSAESGSGSEEEEEEEEEEEEEGSTSEESEEEEEEEEEEEEETGSNSEEASEQSAEEVSEEEMSEDEERENENHLLVVPESRFDRDSGESEEAEEEVGEGTPQSSALTEGDYVPDSPALSPIELKQELPKYLPALQGCRSVEEFQCLNRIEEGTYGVVYRAKDKKTDEIVALKRLKMEKEKEGFPITSLREINTILKAQHPNIVTVREIVVGSNMDKIYIVMNYVEHDLKSLMETMKQPFLPGEVKTLMIQLLRGVKHLHDNWILHRDLKTSNLLLSHAGILKVGDFGLAREYGSPLKAYTPVVVTLWYRAPELLLGAKEYSTAVDMWSVGCIFGELLTQKPLFPGKSEIDQINKVFKDLGTPSEKIWPGYSELPAVKKMTFSEHPYNNLRKRFGALLSDQGFDLMNKFLTYFPGRRISAEDGLKHEYFRETPLPIDPSMFPTWPAKSEQQRVKRGTSPRPPEGGLGYSQLVRGLAGGACPQVGLAWAGFSR

SEQ ID NO: 868897 - protein, 768 aa, Homo sapiens
MILWPSNHPSKCLGKKKFITEKMKREKRIRRHRSHSAEGGKHARVKEKEREHERRKRHREEQDKARREWERQKRREMAREHSRRERDRLEQLERKRERERKMREQQKEQREQKERERRAEERRKEREARREVSAHHRTMREDYSDKVKASHWSRSPPRPPRERFELGDGRKPVKEEKMEERDLLSDLQDISDSERKTSSAESSSAESGSGSEEEEEEEEEEEEEGSTSEESEEEEEEEEEEEEETGSNSEEASEQSAEEVSEEEMSEDEERENENHLLVVPESRFDRDSGESEEAEEEVGEGTPQSSALTEGDYVPDSPALSPIELKQELPKYLPALQGCRSVEEFQCLNRIEEGTYGVVYRAKDKKTDEIVALKRLKMEKEKEGFPITSLREINTILKAQHPNIVTVRVSMAPPRLAPGGRLFRQGPVLSWGRVLPTLSCTYVEPFTDHTEASICLPGGTGGPYCPSASAPGCRGGWGPGGAQHPQSRALQEIVVGSNMDKIYIVMNYVEHDLKSLMETMKQPFLPGEVKTLMIQLLRGVKHLHDNWILHRDLKTSNLLLSHAGILKPPTASRALAFLNTSPGVLEYSTAVDMWSVGCIFGELLTQKPLFPGKSEIDQINKVFKDLGTPSEKIWPGYSELPAVKKMTFSEHPYNNLRKRFGALLSDQGFDLMNKFLTYFPGRRISAEDGLKHEYFRETPLPIDPSMFPTWPAKSEQQRVKRGTSPRPPEGGLGYSQLGDDDLKETGFHLTTTNQGASAAGPGFSLKF

SEQ ID NO: 868898 - protein, 138 aa, Homo sapiens; identical to SEQ ID NO: 868865
  misc_feature (3)..(3): Xaa can be any naturally occurring amino acid

SEQ ID NO: 868899 - protein, 148 aa, Homo sapiens
GRVGRRTRGSTHASATRRSELPAVKKMTFSEHPYNNLRKRFGALLSDQGFDLMNKFLTYFPGRRISAEDGLKHEYFRETPLPIDPSMFPTWPAKSEQQRVKRGTSPRPPEGGLGYSQLGDDDLKETGFHLTTTNQGASAAGPGFSLKF

SEQ ID NO: 868900 - protein, 424 aa, Homo sapiens
MILWPSNHPSKCLGKKKFITEKMKREKRIRRHRSHSAEGGKHARVKEKEREHERRKRHREEQDKARREWERQKRREMAREHSRRERDRLEQLERKRERERKMREQQKEQREQKERERRAEERRKEREARREVSAHHRTMREDYSDKVKASHWSRSPPRPPRERFELGDGRKPVKEEKMEERDLLSDLQDISDSERKTSSAESSSAESGSGSEEEEEEEEEEEEEGSTSEESEEEEEEEEEEEEETGSNSEEASEQSAEEVSEEEMSEDEERENENHLLVVPESRFDRDSGESEEAEEEVGEGTPQSSALTEGDYVPDSPALSPIELKQELPKYLPALQGCRSVEEFQCLNRIEEGTYGVVYRAKDKKTDEIVALKRLKMEKEKEGFPITSLREINTILKAQHPNIVTVREIVVGTHYGGAVAYA

SEQ ID NO: 868901 - protein, 123 aa, Homo sapiens [sequence omitted]

SEQ ID NO: 868902 - protein, 214 aa, Homo sapiens
MEEEASSPGLGCSKPHLEKLTLGITRILESSPGVTEVTIIEKPPAERHMISSWEQKNNCVMPEDVKNFYLMTNGFHMTWSVKLDEHIIPLGSMAINSISKLTQLTQSSMYSLPNAPTLADLEDDTHEASDDQPEKPHFDSRSVIFELDSCNGSGKVCLVYKSGKPALAEDTEIWFLDRALYWHFLTDTFTGLLPPAHHPPGPAPVAICLHQLWH

SEQ ID NO: 868903 - protein, 271 aa, Homo sapiens
LVRPELRDDNPGPPSSLRRAFRRRELPFPACHEIGLGAEAGSGPPPAPAARESRSRAMEEEASSPGLGCSKPHLEKLTLGITRILESSPGVTEVTIIEKPPAERHMISSWEQKNNCVMPEDVKNFYLMTNGFHMTWSVKLDEHIIPLGSMAINSISKLTQLTQSSMYSLPNAPTLADLEDDTHEASDDQPEKPHFDSRSVIFELDSCNGSGKVCLVYKSGKPALAEDTEIWFLDRALYWHFLTDTFTGLLPPAHHPPGPAPVAICLHQLWH

SEQ ID NO: 868904 - protein, 257 aa, Homo sapiens
RTRGSGRVRRELPFPACHEIGLGAEAGSGPPPAPAARESRSRAMEEEASSPGLGCSKPHLEKLTLGITRILESSPGVTEVTIIEKPPAERHMISSWEQKNNCVMPEDVKNFYLMTNGFHMTWSVKLDEHIIPLGSMAINSISKLTQLTQSSMYSLPNAPTLADLEDDTHEASDDQPEKPHFDSRSVIFELDSCNGSGKVCLVYKSGKPALAEDTEIWFLDRALYWHFLTDTFTGLLPPAHHPPGPAPVAICLHQLWH

SEQ ID NO: 868905 - protein, 224 aa, Homo sapiens
NLYSCGRSRAMEEEASSPGLGCSKPHLEKLTLGITRILESSPGVTEVTIIEKPPAERHMISSWEQKNNCVMPEDVKNFYLMTNGFHMTWSVKLDEHIIPLGSMAINSISKLTQLTQSSMYSLPNAPTLADLEDDTHEASDDQPEKPHFDSRSVIFELDSCNGSGKVCLVYKSGKPALAEDTEIWFLDRALYWHFLTDTFTGLLPPAHHPPGPAPVAICLHQLWH

SEQ ID NO: 868906 - protein, 166 aa, Homo sapiens
MISSWEQKNNCVMPEDVKNFYLMTNGFHMTWSVKLDEHIIPLGSMAINSISKLTQLTQSSMYSLPNAPTLADLEDDTHEASDDQPEKPHFDSRSVIFELDSCNGSGKVCLVYKSGKPALAEDTEIWFLDRALYWHFLTDTFTGLLPPAHHPPGPAPVAICLHQLWH

SEQ ID NO: 868907 - protein, 166 aa, Homo sapiens; identical to SEQ ID NO: 868906

SEQ ID NO: 868908 - protein, 174 aa, Homo sapiens
MAILQLYKTIMLISQKNNCVMPEDVKNFYLMTNGFHMTWSVKLDEHIIPLGSMAINSISKLTQLTQSSMYSLPNAPTLADLEDDTHEASDDQPEKPHFDSRSVIFELDSCNGSGKVCLVYKSGKPALAEDTEIWFLDRALYWHFLTDTFTGLLPPAHHPPGPAPVAICLHQLWH

SEQ ID NO: 868909 - protein, 214 aa, Homo sapiens; identical to SEQ ID NO: 868902

SEQ ID NO: 868910 - protein, 214 aa, Homo sapiens; identical to SEQ ID NO: 868902

SEQ ID NO: 868911 - protein, 122 aa, Homo sapiens
MAINSISKLTQLTQSSMYSLPNAPTLADLEDDTHEASDDQPEKPHFDSRSVIFELDSCNGSGKVCLVYKSGKPALAEDTEIWFLDRALYWHFLTDTFTGLLPPAHHPPGPAPVAICLHQLWH

SEQ ID NO: 868912 - protein, 171 aa, Homo sapiens
MEEEASSPGLGCSKPHLEKLTLGITRILESSPGVTEVTIIEKPPAERHMISSWEQKNNCVMPEDVKNFYLMTNGFHMTWSVKLDASDDQPEKPHFDSRSVIFELDSCNGSGKVCLVYKSGKPALAEDTEIWFLDRALYWHFLTDTFTGLLPPAHHPPGPAPVAICLHQLWH

SEQ ID NO: 868913 - protein, 166 aa, Homo sapiens; identical to SEQ ID NO: 868906

SEQ ID NO: 868914 - protein, 171 aa, Homo sapiens; identical to SEQ ID NO: 868912

SEQ ID NO: 868915 - protein, 214 aa, Homo sapiens; identical to SEQ ID NO: 868902

SEQ ID NO: 868916 - protein, 170 aa, Homo sapiens
PVRRAKDTVPAPERRGTGAGGARHVRHLETTATRGVAPGPPRLGLQARSPLAAPRRGPPPPARPAPAGREGRGEGEATSRRCGVGHRAGPREPAPHGAAAVRPTPGPHHHCAALSGAENYRSRHAMKLASALRRGPALHPLPPRANRGREPWRRRHRPRGWAAASRTWRS

SEQ ID NO: 868917 - protein, 214 aa, Homo sapiens; identical to SEQ ID NO: 868902

SEQ ID NO: 868918 - protein, 214 aa, Homo sapiens; identical to SEQ ID NO: 868902

SEQ ID NO: 868919 - protein, 166 aa, Homo sapiens; identical to SEQ ID NO: 868906

SEQ ID NO: 868920 - protein, 214 aa, Homo sapiens; identical to SEQ ID NO: 868902

SEQ ID NO: 868921 - protein, 214 aa, Homo sapiens; identical to SEQ ID NO: 868902

SEQ ID NO: 868922 - protein, 214 aa, Homo sapiens; identical to SEQ ID NO: 868902

SEQ ID NO: 868923 - protein, 248 aa, Homo sapiens
MEEEASSPGLGCSKPHLEKLTLGITRILESSPGVTEVTIIEKPPAERHMISSWEQKNNCVMPEDVKNFYLMTNGFHMTWSVKLDVSANKENMELPSLYLHPNHRRLEPSKKTAKFSSLKHIIPLGSMAINSISKLTQLTQSSMYSLPNAPTLADLEDDTHEASDDQPEKPHFDSRSVIFELDSCNGSGKVCLVYKSGKPALAEDTEIWFLDRALYWHFLTDTFTGLLPPAHHPPGPAPVAICLHQLWH

SEQ ID NO: 868924 - protein, 181 aa, Homo sapiens
NLYSCGRSRAMEEEASSPGLGCSKPHLEKLTLGITRILESSPGVTEVTIIEKPPAERHMISSWEQKNNCVMPEDVKNFYLMTNGFHMTWSVKLDASDDQPEKPHFDSRSVIFELDSCNGSGKVCLVYKSGKPALAEDTEIWFLDRALYWHFLTDTFTGLLPPAHHPPGPAPVAICLHQLWH

SEQ ID NO: 868925 - protein, 168 aa, Homo sapiens
MEEEASSPGLGCSKPHLEKLTLGITRILESSPGVTEVTIIEKPPAERHMISSWEQKNNCVMPEDVKNFYLMTNGFHMTWSVKLDEHIIPLGSMAINSISKLTQLTQSSMYSLPNAPTLADLEDDTHEASDDQPEKPHFDSRSVIFELDSCNGSGKVCLVYKSGKPDNL

SEQ ID NO: 868926 - protein, 130 aa, Homo sapiens
MEEEASSPGLGCSKPHLEKLTLGITRILESSPGVTEVTIIEKPPAERHMISSWEQKNNCVMPEDVKNFYLMTNGFHMTWSVKLDEHIIPLGSMAINSISKLTQLTQSSMYSLPNAPTLADLEDDTHEDNL

SEQ ID NO: 868927 - protein, 339 aa, Homo sapiens
MKNQPFSFCFFRSFPNNYWDKFVKRKVINKYGDLYGAERIAELLGLDKNALDFSPVEETKAEAASLVSWLSSIDMKYHIWKLGVVFTDNSFLYLAWYTTMSVLGHYNNFFFAAHLLDIAMGFKTLRTILSSVTHNGKQLVLTVGLLAVVVYLYTVVAFNFFRKFYNKSEDDDEPDMKCDDMMTCYLFHMYVGVRAGGGIGDEIEDPAGDPYEMYRIVFDITFFFFVIVILLAIIQGLIIDAFGELRDQQEQVREDMETKCFICGIGNDYFDTTPHGFETHTLQEHNLANYLFFLMYLINKDETEHTGQESYVWKMYQERCWDFFPAGDCFRKQYEDQLG

SEQ ID NO: 868928 - protein, 333 aa, Homo sapiens
VIDGTVAISWHNWVEFVKRKVINKYGDLYGAERIAELLGLDKNALDFSPVEETKAEAASLVSWLSSIDMKYHIWKLGVVFTDNSFLYLAWYTTMSVLGHYNNFFFAAHLLDIAMGFKTLRTILSSVTHNGKQLVLTVGLLAVVVYLYTVVAFNFFRKFYNKSEDDDEPDMKCDDMMTCYLFHMYVGVRAGGGIGDEIEDPAGDPYEMYRIVFDITFFFFVIVILLAIIQGLIIDAFGELRDQQEQVREDMETKCFICGIGNDYFDTTPHGFETHTLQEHNLANYLFFLMYLINKDETEHTGQESYVWKMYQERCWDFFPAGDCFRKQYEDQLG

SEQ ID NO: 868929 - protein, 4365 aa, Homo sapiens
MAEGGEGGEDEIQFLRTEDEVVLQCIATIHKEQRKFCLAAEGLGNRLCFLEPTSEAKYIPPDLCVCNFVLEQSLSVRALQEMLANTGENGGEGAAQGGGHRTLLYGHAVLLRHSFSGMYLTCLTTSRSQTDKLAFDVGLREHATGEACWWTIHPASKQRSEGEKVRIGDDLILVSVSSERYLHLSVSNGNIQVDASFMQTLWNVHPTCSGSSIEEGYLLGGHVVRLFHGHDECLTIPSTDQNDSQHRRIFYEAGGAGTRARSLWRVEPLRISWSGSNIRWGQAFRLRHLTTGHYLALTEDQGLILQDRAKSDTKSTAFSFRASKELKEKLDSSHKRDIEGMGVPEIKYGDSVCFVQHIASGLWVTYKAQDAKTSRLGPLKRKVILHQEGHMDDGLTLQRCQREESQAARIIRNTTALFSQFVSGNNRTAAPITLPIEEVLQTLQDLIAYFQPPEEEMRHEDKQNKLRSLKNRQNLFKEEGMLALVLNCIDRLNVYNSVAHFAGIAREESGMAWKEILNLLYKLLAALIRGNRNNCAQFSNNLDWLISKLDRLESSSGILEVLHCILTESPEALNLIAEGHIKSIISLLDKHGRNHKVLDILCSLCLCNGVAVRANQNLICDNLLPRRNLLLQTRLINDVTSIRPNIFLGVAEGSAQYKKWYFELIIDQVDPFLTAEPTHLRVGWASSSGYAPYPGGGEGWGGNGVGDDLYSYGFDGLHLWSGRIPRAVASINQHLLRSDDVVSCCLDLGVPSISFRINGQPVQGMFENFNTDGLFFPVMSFSAGVKVRFLMGGRHGEFKFLPPSGYAPCYEALLPKEKMRLEPVKEYKRDADGIRDLLGTTQFLSQASFIPCPVDTSQVILPPHLEKIRDRLAENIHELWGMNKIELGWTFGKIRDDNKRQHPCLVEFSKLPETEKNYNLQMSTETLKTLLALGCHIAHVNPAAEEDLKKVKLPKNYMMSNGYKPAPLDLSDVKLLPPQEILVDKLAENAHNVWAKDRIKQGWTYGIQQDLKNKRNPRLVPYALLDERTKKSNRDSLREAVRTFVGYGYNIEPSDQELADSAVEKVSIDKIRFFRVERSYAVRSGKWYFEFEVVTGGDMRVGWARPGCRPDVELGADDQAFVFEGNRGQRWHQGSGYFGRTWQPGDVVGCMINLDDASMIFTLNGELLITNKGSELAFADYEIENGFVPICCLGLSQIGRMNLGTDASTFKFYTMCGLQEGFEPFAVNMNRDVAMWFSKRLPTFVNVPKDHPHIEVMRIDGTMDSPPCLKVTHKTFGTQNSNADMIYCRLSMPVECHSSFSHSPCLDSEAFQKRKQMQEILSHTTTQCYYAIRIFAGQDPSCVWVGWVTPDYHLYSEKFDLNKNCTVTVTLGDERGRVHESVKRSNCYMVWGGDIVASSQRSNRSNVDLEIGCLVDLAMGMLSFSANGKELGTCYQVEPNTKVFPAVFLQPTSTSLFQFELGKLKNAMPLSAAIFRSEEKNPVPQCPPRLDVQTIQPVLWSRMPNSFLKVETERVSERHGWVVQCLEPLQMMALHIPEENRCVDILELCEQEDLMRFHYHTLRLYSAVCALGNSRVAYALCSHVDLSQLFYAIDNKYLPGLLRSGFYDLLISIHLASAKERKLMMKNEYIIPITSTTRNICLFPDESKRHGLPGVGLRTCLKPGFRFSTPCFVVTGEDHQKQSPEIPLESLRTKALSMLTEAVQCSGAHIRDPVGGSVEFQFVPVLKLIGTLLVMGVFDDDDVRQILLLIDPSVFGEHSAGTEEGAEKEEVTQVEEKAVEAGEKAGKEAPVKGLLQTRLPESVKLQMCELLSYLCDCELQHRVEAIVAFGDIYVSKLQANQKFRYNELMQALNMSAALTARKTKEFRSPPQEQINMLLNFQLGENCPCPEEIREELYDFHEDLLLHCGVPLEEEEEEEEDTSWTGKLCALVYKIKGPPKPEKEQPTEEEERCPTTLKELISQTMICWAQEDQIQDSELVRMMFNLLRRQYDSIGELLQALRKTYTISHTSVSDTINLLAALGQIRSLLSVRMGKEEELLMINGLGDIMNNKVFYQHPNLMRVLGMHETVMEVMVNVLGTEKSQIAFPKMVASCCRFLCYFCRISRQNQKAMFEHLSYLLENSSVGLASPSMRGSTPLDVAASSVMDNNELALSLEEPDLEKVVTYLAGCGLQSCPMLLAKGYPDVGWNPIEGERYLSFLRFAVFVNSESVEENASVVVKLLIRRPECFGPALRGEGGNGLLAAMQGAIKISENPALDLPSQGYKREVSTEDDEEEEEIVHMGNAIMSFYSALIDLLGRCAPEMHLIQTGKGEAIRIRSILRSLVPTEDLVGIISIPLKLPSLNKDGSVSEPDMAANFCPDHKAPMVLFLDRVYGIKDQTFLLHLLEVGFLPDLRASASLDTVSLSTTEAALALNRYICSAVLPLLTRCAPLFAGTEHCTSLIDSTLQTIYRLSKGRSLTKAQRDTIEECLLAICNHLRPSMLQQLLRRLVFDVPQLNEYCKMPLKLLTNHYEQCWKYYCLPSGWGSYGLAVEEELHLTEKLFWGIFDSLSHKKYDPDLFRMALPCLSAIAGALPPDYLDTRITATLEKQISVDADGNFDPKPINTMNFSLPEKLEYIVTKYAEHSHDKWACDKSQSGWKYGISLDENVKTHPLIRPFKTLTEKEKEIYRWPARESLKTMLAVGWTVERTKEGEALVQQRENEKLRSVSQANQGNSYSPAPLDLSNVVLSRELQGMVEVVAENYHNIWAKKKKLELESKGGGSHPLLVPYDTLTAKEKFKDREKAQDLFKFLQVNGIIVSRGMKDMELDASSMEKRFAYKFLKKILKYVDSAQEFIAHLEAIVSSGKTEKSPRDQEIKFFAKVLLPLVDQYFTSHCLYFLSSPLKPLSSSGYASHKEKEMVAGLFCKLAALVRHRISLFGSDSTTMVSCLHILAQTLDTRTVMKSGSELVKAGLRAFFENAAEDLEKTSENLKLGKFTHSRTQIKGVSQNINYTTVALLPILTSIFEHVTQHQFGMDLLLGDVQISCYHILCSLYSLGTGKNIYVERQRPALGECLASLAAAIPVAFLEPTLNRYNPLSVFNTKTPRERSILGMPDTVEDMCPDIPQLEGLMKEINDLAESGARYTEMPHVIEVILPMLCNYLSYWWERGPENLPPSTGPCCTKVTSEHLSLILGNILKIINNNLGIDEASWMKRIAVYAQPIISKARPDLLRSHFIPTLEKLKKKAVKTVQEEEQLKADGKGDTQEAELLILDEFAVLCRDLYAFYPMLIRYVDNNRSNWLKSPDADSDQLFRMVAEVFILWCKSHNFKREEQNFVIQNEINNLAFLTGDSKSKMSKAMQVKSGGQDQERKKTKRRGDLYSIQTSLIVAALKKMLPIGLNMCTPGDQELISLAKSRYSHRDTDEEVREHLRNNLHLQEKSDDPAVKWQLNLYKDVLKSEEPFNPEKTVERVQRISAAVFHLEQVEQPLRSKKAVWHKLLSKQRKRAVVACFRMAPLYNLPRHRSINLFLHGYQRFWIETEEYSFEEKLVQDLAKSPKVEEEEEEETEKQPDPLHQIILYFSRNALTERSKLEDDPLYTSYSSMMAKSCQSGEDEEEDEDKEKTFEEKEMEKQKTLYQQARLHERGAAEMVLQMISASKGEMSPMVVETLKLGIAILNGGNAGVQQKMLDYLKEKKDAGFFQSLSGLMQSCSVLDLNAFERQNKAEGLGMVTEEGTLIVRERGEKVLQNDEFTRDLFRFLQLLCEGHNSDFQNFLRTQMGNTTTVNVIISTVDYLLRLQESISDFYWYYSGKDIIDESGQHNFSKALAVTKQIFNSLTEYIQGPCIGNQQSLAHSRLWDAVVGFLHVFANMQMKLSQDSSQIELLKELLDLLQDMVVMLLSLLEGNVVNGTIGKQMVDTLVESSTNVEMILKFFDMFLKLKDLTSSDTFKEYDPDGKGIISKKEFQKAMEGQKQYTQSEIDFLLSCAEADENDMFNYVDFVDRFHEPAKDIGFNVAVLLTNLSEHMPNDSRLKCLLDPAESVLNYFEPYLGRIEIMGGAKKIERVYFEISESSRTQWEKPQVKESKRQFIFDVVNEGGEQEKMELFVNFCEDTIFEMQLASQISESDSADRPEEEEEDEDSSYVLEIAGEEEEDGSLEPASAFAMACASVKRNVTDFLKRATLKNLRKQYRNVKKMTAKELVKVLFSFFWMLFVGLFQLLFTILGGIFQILWSTVFGGGLVEGAKNIRVTKILGDMPDPTQFGIHDDTMEAERAEVMEPGITTELVHFIKGEKGDTDIMSDLFGLHPKKEGSLKHGPEVGLGDLSEIIGKDEPPTLESTVQKKRKAQAAEMKAANEAEGKVESEKADMEDGEKEDKDKEEEQAEYL

SEQ ID NO: 868930 - protein, 1300 aa, Homo sapiens
FNLIVCLLPSLLHEIQSCQSGEDEEEDEDKEKTFEEKEMEKQKTLYQQARLHERGAAEMVLQMISASKGEMSPMVVETLKLGIAILNGGNAGVQQKMLDYLKEKKDAGFFQSLSGLMQSCSVLDLNAFERQNKAEGLGMVTEEGTLIVRERGEKVLQNDEFTRDLFRFLQLLCEGHNSDFQNFLRTQMGNTTTVNVIISTVDYLLRLQESISDFYWYYSGKDIIDESGQHNFSKALAVTKQIFNSLTEYIQGPCIGNQQSLAHSRLWDAVVGFLHVFANMQMKLSQDSSQIELLKELLDLLQDMVVMLLSLLEGNVVNGTIGKQMVDTLVESSTNVEMILKFFDMFLKLKDLTSSDTFKEYDPDGKGIISKKEFQKAMEGQKQYTQSEIDFLLSCAEADENDMFNYVDFVDRFHEPAKDIGFNVAVLLTNLSEHMPNDSRLKCLLDPAESVLNYFEPYLGRIEIMGGAKKIERVYFEISESSRTQWEKPQVKESKRQFIFDVVNEGGEQEKMELFVNFCEDTIFEMQLASQISESDSADRPEEEEEDEDSSYVLEIAGEEEEDGSLEPASAFAMACASVKRNVTDFLKRATLKNLRKQYRNVKKMTAKELVKVLFSFFWMLFVGLFQLLFTILGGIFQILWSTVFGGGLVEGAKNIRVTKILGDMPDPTQFGIHDDTMEAERAEVMEPGITTELVHFIKGEKGDTDIMSDLFGLHPKKEGSLKHGPEVGLGDLSEIIGKDEPPTLESTVQKKRKAQAAEMKAANEAEGKVESEKADMEDGEKEDKDKEEEQAEYLWTEVTKKKKRRCGQKVEKPEAFTANFFKGLEIYQTKLLHYLARNFYNLRFLALFVAFAINFILLFYKVTEEPLEEETEDVANLWNSFNDEEEEEAMVFFVLQESTGYMAPTLRALAIIHTIISLVCVVGYYCLKVPLVVFKREKEIARKLEFDGLYITEQPSEDDIKGQWDRLVINTPSFPNNYWDKFVKRKVINKYGDLYGAERIAELLGLDKNALDFSPVEETKAEAASLVSWLSSIDMKYHIWKLGVVFTDNSFLYLAWYTTMSVLGHYNNFFFAAHLLDIAMGFKTLRTILSSVTHNGKQLVLTVGLLAVVVYLYTVVAFNFFRKFYNKSEDDDEPDMKCDDMMTCYLFHMYVGVRAGGGIGDEIEDPAGDPYEMYRIVFDITFFFFVIVILLAIIQGLIIDAFGELRDQQEQVREDMETKCFICGIGNDYFDTTPHGFETHTLQEHNLANYLFFLMYLINKDETEHTGQESYVWKMYQERCWDFFPAGDCFRKQYEDQLG

SEQ ID NO: 868931 - protein, 329 aa, Homo sapiens
MDPLETPIKDGILYQQHVKFGKKCWRKVWALLYAGGPSGVARLESWEVRDGGLGAAGDRSAGPGRRGERRVIRLADCVSVLPADGESCPRDTGAFLLTTTERSHLLAAQHRQAWMGPICQLAFPGTGEASSGSTDAQSPKRGLVPMEENSIYSSWQEVGEFPVVVQRTEAATRCQLKGPALLVLGPDAIQLREAKGTQALYSWPYHFLRKFGSDKILLGTPGVSLLICKGERTDDVSGIILDESLLRAYSVPGAGGHSRVQDSLGPVLREPTFQGERSFLKTSMLRSLCSCSWRHPRSQPCTQASCLQGSDCPAPHRNSTSAAHTLGTS

SEQ ID NO: 868932 - protein, 215 aa, Homo sapiens
MGPICQLAFPGTGEASSGSTDAQSPKRGLVPMEENSIYSSWQEVGEFPVVVQRTEAATRCQLKGPALLVLGPDAIQLREAKGTQALYSWPYHFLRKFGSDKILLGTPGVSLLICKGERTDDVSGIILDESLLRAYSVPGAGGHSRVQDSLGPVLREPTFQGERSFLKTSMLRSLCSCSWRHPRSQPCTQASCLQGSDCPAPHRNSTSAAHTLGTS

SEQ ID NO: 868933 - protein, 440 aa, Homo sapiens
MDPLETPIKDGILYQQHVKFGKKCWRKVWALLYAGGPSGVARLESWEVRDGGLGAAGDRSAGPGRRGERRVIRLADCVSVLPADGESCPRDTGAFLLTTTERSHLLAAQHRQAWMGPICQLAFPGTGEASSGSTDAQSPKRGLVPMEENSIYSSWQEVGEFPVVVQRTEAATRCQLKGPALLVLGPDAIQLREAKGTQALYSWPYHFLRKFGSDKGVFSFEAGRRCHSGEGLFAFSTPCAPDLCRAVAGAIARQRERLPELTRPQPCPLPRATSLPSLDTPGELREMPPGPEPPTSRKMHLAEPGPQSLPLLLGPEPNDLASGLYASVCKRASGPPGNEHLYENLCVLEASPTLHGGEPEPHEGPGSRSPTTSPIYHNGQDLSWPGPANDSTLEAQYRRLLELDQVEGTGRPDPQAGFKAKLVTLLSRERRKGPAPCDRP

SEQ ID NO: 868934 - protein, 440 aa, Homo sapiens; identical to SEQ ID NO: 868933

SEQ ID NO: 868935 - protein, 467 aa, Homo sapiens
MDPLETPIKDGILYQQHVKFGKKCWRKVWALLYAGGPSGVARLESWEVRDGGLGAAGDRSAGPGRRGERRVIRLADCVSVLPADGESCPRDTGAFLLTTTERSHLLAAQHRQAWMGPICQLAFPGTGEASSGSTDAQSPKRGLVPMEENSIYSSWQEVGEFPVVVQRTEAATRCQLKGPALLVLGPDAIQLREAKGTQALYSWPYHFLRKFGSDKVRCKVGKGEGLTPWTLLLIPTRVPCAQGVFSFEAGRRCHSGEGLFAFSTPCAPDLCRAVAGAIARQRERLPELTRPQPCPLPRATSLPSLDTPGELREMPPGPEPPTSRKMHLAEPGPQSLPLLLGPEPNDLASGLYASVCKRASGPPGNEHLYENLCVLEASPTLHGGEPEPHEGPGSRSPTTSPIYHNGQDLSWPGPANDSTLEAQYRRLLELDQVEGTGRPDPQAGFKAKLVTLLSRERRKGPAPCDRP

SEQ ID NO: 868936 - protein, 329 aa, Homo sapiens; identical to SEQ ID NO: 868931

SEQ ID NO: 868937 - protein, 261 aa, Homo sapiens
MDPLETPIKDGILYQQHVKFGKKCWRKVWALLYAGGPSGVARLESWEVRDGGLGAAGDRSAGPGRRGERRVIRLADCVSVLPADGESCPRDTGAFLLTTTERSHLLAAQHRQAWMGPICQLAFPGTGEASSGSTDAQSPKRGLVPMEENSIYSSWQEVGEFPVVVQRTEAATRCQLKGPALLVLGPDAIQLREAKGTQALYSWPYHFLRKFGSDKGVFSFEAGRRCHSGEGLFAFSTPCAPDLCRAVAGAIARQRERLPDA

SEQ ID NO: 868938 - protein, 496 aa, Homo sapiens
MTRGARLRSDARAQLNQLSLDGGTGSGQKGKCEEFPSSLSSVSPGLEAAALLLAVTMDPLETPIKDGILYQQHVKFGKKCWRKVWALLYAGGPSGVARLESWEVRDGGLGAAGDRSAGPGRRGERRVIRLADCVSVLPADGESCPRDTGAFLLTTTERSHLLAAQHRQAWMGPICQLAFPGTGEASSGSTDAQSPKRGLVPMEENSIYSSWQEVGEFPVVVQRTEAATRCQLKGPALLVLGPDAIQLREAKGTQALYSWPYHFLRKFGSDKGVFSFEAGRRCHSGEGLFAFSTPCAPDLCRAVAGAIARQRERLPELTRPQPCPLPRATSLPSLDTPGELREMPPGPEPPTSRKMHLAEPGPQSLPLLLGPEPNDLASGLYASVCKRASGPPGNEHLYENLCVLEASPTLHGGEPEPHEGPGSRSPTTSPIYHNGQDLSWPGPANDSTLEAQYRRLLELDQVEGTGRPDPQAGFKAKLVTLLSRERRKGPAPCDRP

SEQ ID NO: 868939 - protein, 440 aa, Homo sapiens; identical to SEQ ID NO: 868933

SEQ ID NO: 868940 - protein, 495 aa, Homo sapiens
DSGSQTAIRRACPAEPGLEAAALLLAVTMDPLETPIKDGILYQQHVKFGKKCWRKVWALLYAGGPSGVARLESWEVRDGGLGAAGDRSAGPGRRGERRVIRLADCVSVLPADGESCPRDTGAFLLTTTERSHLLAAQHRQAWMGPICQLAFPGTGEASSGSTDAQSPKRGLVPMEENSIYSSWQEVGEFPVVVQRTEAATRCQLKGPALLVLGPDAIQLREAKGTQALYSWPYHFLRKFGSDKVRCKVGKGEGLTPWTLLLIPTRVPCAQGVFSFEAGRRCHSGEGLFAFSTPCAPDLCRAVAGAIARQRERLPELTRPQPCPLPRATSLPSLDTPGELREMPPGPEPPTSRKMHLAEPGPQSLPLLLGPEPNDLASGLYASVCKRASGPPGNEHLYENLCVLEASPTLHGGEPEPHEGPGSRSPTTSPIYHNGQDLSWPGPANDSTLEAQYRRLLELDQVEGTGRPDPQAGFKAKLVTLLSRERRKGPAPCDRP

SEQ ID NO: 868941 - protein, 227 aa, Homo sapiens
MDPLETPIKDGILYQQHVKFGKGTGEASSGSTDAQSPKRGLVPMEENSIYSSWQEVGEFPVVVQRTEAATRCQLKGPALLVLGPDAIQLREAKGTQALYSWPYHFLRKFGSDKILLGTPGVSLLICKGERTDDVSGIILDESLLRAYSVPGAGGHSRVQDSLGPVLREPTFQGERSFLKTSMLRSLCSCSWRHPRSQPCTQASCLQGSDCPAPHRNSTSAAHTLGTS

SEQ ID NO: 868942 - protein, 149 aa, Homo sapiens
AGSGFRAFFPRPRPPAGPKVDAQGLEAQRNPLRSVAPLSPVPKDYSAPQRFQCPQSNLSLKYWLSSERVPEDPALLKSEAVSPLIQRIRDSRNESIMEAAGGFQVHFHPSNGDGRFIETSSAADLEVISYSSKVSVTERCFIKVCTVLF

SEQ ID NO: 868943 - protein, 143 aa, Homo sapiens
MWLTPVMPILWEAKEGGSPEARSLRLAWPPWGNCLQKNTKIELGVVAQLLRRLMHENHLNPGGGSCSEPRSCHCIPACATQRDSVSMNEMNECMNEWSEVENSRGGHVTFHYYRNKLSLKQNGNKLSKMICGKYIEIGTIAVS

SEQ ID NO: 868944 - protein, 143 aa, Homo sapiens; identical to SEQ ID NO: 868943

SEQ ID NO: 868945 - protein, 111 aa, Homo sapiens
MVRQVPTLIVLHHLPTLVREHPCRRRSGNTSPTLSMLLLLREQDKMAPDLSHPEVKNNNIRLSSEAIPSLIQVCEHVIVRIDMFRRHFFCGQNHLYSGQHRATEPFLHVTF

SEQ ID NO: 868946 - protein, 111 aa, Homo sapiens; identical to SEQ ID NO: 868945

SEQ ID NO: 868947 - protein, 423 aa, Homo sapiens
MERGLPLLCAVLALVLAPAGAFRNDKCGDTIKIESPGYLTSPGYPHSYHPSEKCEWLIQAPDPYQRIMINFNPHFDLEDRDCKYDYVEVFDGENENGHFRGKFCGKIAPPPVVSSGPFLFIKFVSDYETHGAGFSIRYEIFKRGPECSQNYTTPSGVIKSPGFPEKYPNSLECTYIVFAPKMSEIILEFESFDLEPDSNPPGGMFCRYDRLEIWDGFPDVGPHIGRYCGQKTPGRIRSSSGILSMVFYTDSAIAKEGFSANYSVLQSSVSEDFKCMEALGMESGEIHSDQITASSQYSTNWSAERSRLNYPENGWTPGEDSYREWIQVDLGLLRFVTAVGTQGAISKETKKKYYVKTYKIDVSSNGEDWITIKEGNKPVLFQGNTNPTDVVVAVFPKPLITRFVRIKPATWETGISMRFEVYG

SEQ ID NO: 868948 - protein, 423 aa, Homo sapiens; identical to SEQ ID NO: 868947

SEQ ID NO: 868949 - protein, 381 aa, Homo sapiens [sequence omitted]

SEQ ID NO: 868950 - protein, 871 aa, Homo sapiens
MERGLPLLCAVLALVLAPAGAFRNDKCGDTIKIESPGYLTSPGYPHSYHPSEKCEWLIQAPDPYQRIMINFNPHFDLEDRDCKYDYVEVFDGENENGHFRGKFCGKIAPPPVVSSGPFLFIKFVSDYETHGAGFSIRYEIFKRGPECSQNYTTPSGVIKSPGFPEKYPNSLECTYIVFAPKMSEIILEFESFDLEPDSNPPGGMFCRYDRLEIWDGFPDVGPHIGRYCGQKTPGRIRSSSGILSMVFYTDSAIAKEGFSANYSVLQSSVSEDFKCMEALGMESGEIHSDQITASSQYSTNWSAERSRLNYPENGWTPGEDSYREWIQVDLGLLRFVTAVGTQGAISKETKKKYYVKTYKIDVSSNGEDWITIKEGNKPVLFQGNTNPTDVVVAVFPKPLITRFVRIKPATWETGISMRFEVYGCKITDYPCSGMLGMVSGLISDSQITSSNQGDRNWMPENIRLVTSRSGWALPPAPHSYINEWLQIDLGEEKIVRGIIIQGGKHRENKVFMRKFKIGYSNNGSDWKMIMDDSKRKAKSFEGNNNYDTPELRTFPALSTRFIRIYPERATHGGLGLRMELLGCEVEGGTTVLATEKPTVIDSTIQSEFPTYGFNCEFGWGSHKTFCHWEHDNHVQLKWSVLTSKTGPIQDHTGDGNFIYSQADENQKGKVARLVSPVVYSQNSAHCMTFWYHMSGSHVGTLRVKLRYQKPEEYDQLVWMAIGHQGDHWKEGRVLLHKSLKLYQVIFEGEIGKGNLGGIAVDDISINNHISQEDCARSTPGYEGEGEGDKNISRKPGNVLKTLDPILITIIAMSALGVLLGAVCGVVLYCACWHNGMSERNLSALENYNFELVDGVKLKKDKLNTQSTYSEA

SEQ ID NO: 868951 - protein, 644 aa, Homo sapiens
MERGLPLLCAVLALVLAPAGAFRNDKCGDTIKIESPGYLTSPGYPHSYHPSEKCEWLIQAPDPYQRIMINFNPHFDLEDRDCKYDYVEVFDGENENGHFRGKFCGKIAPPPVVSSGPFLFIKFVSDYETHGAGFSIRYEIFKRGPECSQNYTTPSGVIKSPGFPEKYPNSLECTYIVFAPKMSEIILEFESFDLEPDSNPPGGMFCRYDRLEIWDGFPDVGPHIGRYCGQKTPGRIRSSSGILSMVFYTDSAIAKEGFSANYSVLQSSVSEDFKCMEALGMESGEIHSDQITASSQYSTNWSAERSRLNYPENGWTPGEDSYREWIQVDLGLLRFVTAVGTQGAISKETKKKYYVKTYKIDVSSNGEDWITIKEGNKPVLFQGNTNPTDVVVAVFPKPLITRFVRIKPATWETGISMRFEVYGCKITDYPCSGMLGMVSGLISDSQITSSNQGDRNWMPENIRLVTSRSGWALPPAPHSYINEWLQIDLGEEKIVRGIIIQGGKHRENKVFMRKFKIGYSNNGSDWKMIMDDSKRKAKSFEGNNNYDTPELRTFPALSTRFIRIYPERATHGGLGLRMELLGCEVEAPTAGPTTPNGNLVDECDDDQANCHSGTGDDFQLTGGTTVLATEKPTVIDSTIQSGIK

SEQ ID NO: 868952 - protein, 686 aa, Homo sapiens
MERGLPLLCAVLALVLAPAGAFRNDKCGDTIKIESPGYLTSPGYPHSYHPSEKCEWLIQAPDPYQRIMINFNPHFDLEDRDCKYDYVEVFDGENENGHFRGKFCGKIAPPPVVSSGPFLFIKFVSDYETHGAGFSIRYEIFKRGPECSQNYTTPSGVIKSPGFPEKYPNSLECTYIVFAPKMSEIILEFESFDLEPDSNPPGGMFCRYDRLEIWDGFPDVGPHIGRYCGQKTPGRIRSSSGILSMVFYTDSAIAKEGFSANYSVLQSSVSEDFKCMEALGMESGEIHSDQITASSQYSTNWSAERSRLNYPENGWTPGEDSYREWIQVDLGLLRFVTAVGTQGAISKETKKKYYVKTYKIDVSSNGEDWITIKEGNKPVLFQGNTNPTDVVVAVFPKPLITRFVRIKPATWETGISMRFEVYGCKITDYPCSGMLGMVSGLISDSQITSSNQGDRNWMPENIRLVTSRSGWALPPAPHSYINEWLQIDLGEEKIVRGIIIQGGKHRENKVFMRKFKIGYSNNGSDWKMIMDDSKRKAKSFEGNNNYDTPELRTFPALSTRFIRIYPERATHGGLGLRMELLGCEVEAPTAGPTTPNGNLVDECDDDQANCHSGTGDDFQLTGGTTVLATEKPTVIDSTIQSARLEVSTLNLSLHNPPQQKALVKCTGWGRTLEGKGRLSFSEARSA

SEQ ID NO: 868953 - protein, 668 aa, Homo sapiens
MERGLPLLCAVLALVLAPAGAFRNDKCGDTIKIESPGYLTSPGYPHSYHPSEKCEWLIQAPDPYQRIMINFNPHFDLEDRDCKYDYVEVFDGENENGHFRGKFCGKIAPPPVVSSGPFLFIKFVSDYETHGAGFSIRYEIFKRGPECSQNYTTPSGVIKSPGFPEKYPNSLECTYIVFAPKMSEIILEFESFDLEPDSNPPGGMFCRYDRLEIWDGFPDVGPHIGRYCGQKTPGRIRSSSGILSMVFYTDSAIAKEGFSANYSVLQSSVSEDFKCMEALGMESGEIHSDQITASSQYSTNWSAERSRLNYPENGWTPGEDSYREWIQVDLGLLRFVTAVGTQGAISKETKKKYYVKTYKIDVSSNGEDWITIKEGNKPVLFQGNTNPTDVVVAVFPKPLITRFVRIKPATWETGISMRFEVYGCKITDYPCSGMLGMVSGLISDSQITSSNQGDRNWMPENIRLVTSRSGWALPPAPHSYINEWLQIDLGEEKIVRGIIIQGGKHRENKVFMRKFKIGYSNNGSDWKMIMDDSKRKAKSFEGNNNYDTPELRTFPALSTRFIRIYPERATHGGLGLRMELLGCEVEAPTAGPTTPNGNLVDECDDDQANCHSGTGDDFQLTGGTTVLATEKPTVIDSTIQSGSRFFKHHHKQQSMRPQNLHHNSILLL

SEQ ID NO: 868954 - protein, 423 aa, Homo sapiens; identical to SEQ ID NO: 868947

SEQ ID NO: 868955 - protein, 339 aa, Homo sapiens [sequence omitted]

SEQ ID NO: 868956 - protein, 320 aa, Homo sapiens
RPPTTTKFAAASTRIPTESGYRYDYVEVFDGENENGHFRGKFCGKIAPPPVVSSGPFLFIKFVSDYETHGAGFSIRYEIFKRGPECSQNYTTPSGVIKSPGFPEKYPNSLECTYIVFAPKMSEIILEFESFDLEPDSNPPGGMFCRYDRLEIWDGFPDVGPHIGRYCGQKTPGRIRSSSGILSMVFYTDSAIAKEGFSANYSVLQSSVSEDFKCMEALGMESGEIHSDQITASSQYSTNWSAERSRLNYPENGWTPGEDSYREWIQVDLGLLRFVTAVGTQGAISKETKKKYYVKTYKIDVSSNGEDWITIKEGNKPVVS

SEQ ID NO: 868957 - protein, 424 aa, Homo sapiens
LLVGVSFSSGDFVLNVNKLCDFVGSKTGIYLATGKLLRRSFEGNNNYDTPELRTFPALSTRFIRIYPERATHGGLGLRMELLGCEVEAPTAGPTTPNGNLVDECDDDQANCHSGTGDDFQLTGGTTVLATEKPTVIDSTIQSEFPTYGFNCEFGWGSHKTFCHWEHDNHVQLKWSVLTSKTGPIQDHTGDGNFIYSQADENQKGKVARLVSPVVYSQNSAHCMTFWYHMSGSHVGTLRVKLRYQKPEEYDQLVWMAIGHQGDHWKEGRVLLHKSLKLYQVIFEGEIGKGNLGGIAVDDISINNHISQEDCAKPADLDKKNPEIKIDETGSTPGYEGEGEGDKNISRKPGNVLKTLDPILITIIAMSALGVLLGAVCGVVLYCACWHNGMSERNLSALENYNFELVDGVKLKKDKLNTQSTYSEA

SEQ ID NO: 868958 - protein, 923 aa, Homo sapiens
MERGLPLLCAVLALVLAPAGAFRNDKCGDTIKIESPGYLTSPGYPHSYHPSEKCEWLIQAPDPYQRIMINFNPHFDLEDRDCKYDYVEVFDGENENGHFRGKFCGKIAPPPVVSSGPFLFIKFVSDYETHGAGFSIRYEIFKRGPECSQNYTTPSGVIKSPGFPEKYPNSLECTYIVFAPKMSEIILEFESFDLEPDSNPPGGMFCRYDRLEIWDGFPDVGPHIGRYCGQKTPGRIRSSSGILSMVFYTDSAIAKEGFSANYSVLQSSVSEDFKCMEALGMESGEIHSDQITASSQYSTNWSAERSRLNYPENGWTPGEDSYREWIQVDLGLLRFVTAVGTQGAISKETKKKYYVKTYKIDVSSNGEDWITIKEGNKPVLFQGNTNPTDVVVAVFPKPLITRFVRIKPATWETGISMRFEVYGCKITDYPCSGMLGMVSGLISDSQITSSNQGDRNWMPENIRLVTSRSGWALPPAPHSYINEWLQIDLGEEKIVRGIIIQGGKHRENKVFMRKFKIGYSNNGSDWKMIMDDSKRKAKSFEGNNNYDTPELRTFPALSTRFIRIYPERATHGGLGLRMELLGCEVEAPTAGPTTPNGNLVDECDDDQANCHSGTGDDFQLTGGTTVLATEKPTVIDSTIQSEFPTYGFNCEFGWGSHKTFCHWEHDNHVQLKWSVLTSKTGPIQDHTGDGNFIYSQADENQKGKVARLVSPVVYSQNSAHCMTFWYHMSGSHVGTLRVKLRYQKPEEYDQLVWMAIGHQGDHWKEGRVLLHKSLKLYQVIFEGEIGKGNLGGIAVDDISINNHISQEDCAKPADLDKKNPEIKIDETGSTPGYEGEGEGDKNISRKPGNVLKTLDPILITIIAMSALGVLLGAVCGVVLYCACWHNGMSERNLSALENYNFELVDGVKLKKDKLNTQSTYSEA

SEQ ID NO: 868959 - protein, 704 aa, Homo sapiens [sequence omitted]

SEQ ID NO: 868960 - protein, 303 aa, Homo sapiens
MGGTTVLATEKPTVIDSTIQSEFPTYGFNCEFGWGSHKTFCHWEHDNHVQLKWSVLTSKTGPIQDHTGDGNFIYSQADENQKGKVARLVSPVVYSQNSAHCMTFWYHMSGSHVGTLRVKLRYQKPEEYDQLVWMAIGHQGDHWKEGRVLLHKSLKLYQVIFEGEIGKGNLGGIAVDDISINNHISQEDCAKPADLDKKNPEIKIDETGSTPGYEGEGEGDKNISRKPGNVLKTLDPILITIIAMSALGVLLGAVCGVVLYCACWHNGMSERNLSALENYNFELVDGVKLKKDKLNTQSTYSEA

SEQ ID NO: 868961 - protein, 609 aa, Homo sapiens
MERGLPLLCAVLALVLAPAGAFRNDKCGDTIKIESPGYLTSPGYPHSYHPSEKCEWLIQAPDPYQRIMINFNPHFDLEDRDCKYDYVEVFDGENENGHFRGKFCGKIAPPPVVSSGPFLFIKFVSDYETHGAGFSIRYEIFKRGPECSQNYTTPSGVIKSPGFPEKYPNSLECTYIVFAPKMSEIILEFESFDLEPDSNPPGGMFCRYDRLEIWDGFPDVGPHIGRYCGQKTPGRIRSSSGILSMVFYTDSAIAKEGFSANYSVLQSSVSEDFKCMEALGMESGEIHSDQITASSQYSTNWSAERSRLNYPENGWTPGEDSYREWIQVDLGLLRFVTAVGTQGAISKETKKKYYVKTYKIDVSSNGEDWITIKEGNKPVLFQGNTNPTDVVVAVFPKPLITRFVRIKPATWETGISMRFEVYGCKITDYPCSGMLGMVSGLISDSQITSSNQGDRNWMPENIRLVTSRSGWALPPAPHSYINEWLQIDLGEEKIVRGIIIQGGKHRENKVFMRKFKIGYSNNGSDWKMIMDDSKRKAKSFEGNNNYDTPELRTFPALSTRFIRIYPERATHGGLGLRMELLGCEVEGGTTVLATEKPTVIDSTIQSGIK

SEQ ID NO: 868962 - protein, 551 aa, Homo sapiens
MERGLPLLCAVLALVLAPAGAFRNDKCGDTIKIESPGYLTSPGYPHSYHPSEKCEWLIQAPDPYQRIMINFNPHFDLEDRDCKYDYVEVFDGENENGHFRGKFCGKIAPPPVVSSGPFLFIKFVSDYETHGAGFSIRYEIFKRGPECSQNYTTPSGVIKSPGFPEKYPNSLECTYIVFAPKMSEIILEFESFDLEPDSNPPGGMFCRYDRLEIWDGFPDVGPHIGRYCGQKTPGRIRSSSGILSMVFYTDSAIAKEGFSANYSVLQSSVSEDFKCMEALGMESGEIHSDQITASSQYSTNWSAERSRLNYPENGWTPGEDSYREWIQVDLGLLRFVTAVGTQGAISKETKKKYYVKTYKIDVSSNGEDWITIKEGNKPVLFQGNTNPTDVVVAVFPKPLITRFVRIKPATWETGISMRFEVYGCKITDYPCSGMLGMVSGLISDSQITSSNQGDRNWMPENIRLVTSRSGWALPPAPHSYINEWLQIDLGEEKIVRGIIIQGGKHRENKVFMRKFKIGYSNNGSDWKMIMDDSKRKAKVAPLCWPQKSPRS

SEQ ID NO: 868963 - protein, 633 aa, Homo sapiens
  misc_feature (633)..(633): Xaa can be any naturally occurring amino acid
MERGLPLLCAVLALVLAPAGAFRNDKCGDTIKIESPGYLTSPGYPHSYHPSEKCEWLIQAPDPYQRIMINFNPHFDLEDRDCKYDYVEVFDGENENGHFRGKFCGKIAPPPVVSSGPFLFIKFVSDYETHGAGFSIRYEIFKRGPECSQNYTTPSGVIKSPGFPEKYPNSLECTYIVFAPKMSEIILEFESFDLEPDSNPPGGMFCRYDRLEIWDGFPDVGPHIGRYCGQKTPGRIRSSSGILSMVFYTDSAIAKEGFSANYSVLQSSVSEDFKCMEALGMESGEIHSDQITASSQYSTNWSAERSRLNYPENGWTPGEDSYREWIQVDLGLLRFVTAVGTQGAISKETKKKYYVKTYKIDVSSNGEDWITIKEGNKPVLFQGNTNPTDVVVAVFPKPLITRFVRIKPATWETGISMRFEVYGCKITDYPCSGMLGMVSGLISDSQITSSNQGDRNWMPENIRLVTSRSGWALPPAPHSYINEWLQIDLGEEKIVRGIIIQGGKHRENKVFMRKFKIGYSNNGSDWKMIMDDSKRKAKSFEGNNNYDTPELRTFPALSTRFIRIYPERATHGGLGLRMELLGCEVEAPTAGPTTPNGNLVDECDDDQANCHSGTGHSFLLATEKPRFIESIIX

SEQ ID NO: 868964 - protein, 564 aa, Homo sapiens
MERGLPLLCAVLALVLAPAGAFRNDKCGDTIKIESPGYLTSPGYPHSYHPSEKCEWLIQAPDPYQRIMINFNPHFDLEDRDCKYDYVEVFDGENENGHFRGKFCGKIAPPPVVSSGPFLFIKFVSDYETHGAGFSIRYEIFKRGPECSQNYTTPSGVIKSPGFPEKYPNSLECTYIVFAPKMSEIILEFESFDLEPDSNPPGGMFCRYDRLEIWDGFPDVGPHIGRYCGQKTPGRIRSSSGILSMVFYTDSAIAKEGFSANYSVLQSSVSEDFKCMEALGMESGEIHSDQITASSQYSTNWSAERSRLNYPENGWTPGEDSYREWIQVDLGLLRFVTAVGTQGAISKETKKKYYVKTYKIDVSSNGEDWITIKEGNKPVLFQGNTNPTDVVVAVFPKPLITRFVRIKPATWETGISMRFEVYGCKITDYPCSGMLGMVSGLISDSQITSSNQGDRNWMPENIRLVTSRSGWALPPAPHSYINEWLQIDLGEEKIVRGIIIQGGKHRENKVFMRKFKIGYSNNGSDWKMIMDDSKRKAKVRAGDWEEVIPYVLDFNQGPLAFSRG

SEQ ID NO: 868965 - protein, 369 aa, Homo sapiens
MERGLPLLCAVLALVLAPAGAFRNDKCGDTIKIESPGYLTSPGYPHSYHPSEKCEWLIQAPDPYQRIMINFNPHFDLEDRDCKYDYVEVFDGENENGHFRGKFCGKIAPPPVVSSGPFLFIKFVSDYETHGAGFSIRYEIFKRGPECSQNYTTPSGVIKSPGFPEKYPNSLECTYIVFAPKMSEIILEFESFDLEPDSNPPGGMFCRYDRLEIWDGFPDVGPHIGRYCGQKTPGRIRSSSGILSMVFYTDSAIAKEGFSANYSVLQSSVSEDFKCMEALGMESGEIHSDQITASSQYSTNWSAERSRLNYPENGWTPGEDSYREWIQDAKYRLRVSVVRSKSSSSSTSLEPRPLSSLKLSFFSYKIKIT

SEQ ID NO: 868966 - protein, 202 aa, Homo sapiens
MTFWYHMSGSHVGTLRVKLRYQKPEEYDQLVWMAIGHQGDHWKEGRVLLHKSLKLYQVIFEGEIGKGNLGGIAVDDISINNHISQEDCAKPADLDKKNPEIKIDETGSTPGYEGEGEGDKNISRKPGNVLKTLDPILITIIAMSALGVLLGAVCGVVLYCACWHNGMSERNLSALENYNFELVDGVKLKKDKLNTQSTYSEA

SEQ ID NO: 868967 - protein, 210 aa, Homo sapiens
MWTLGRRAVAGLLASPSPAQAQTLTRVPRPAELAPLCGRRGLRTDIDATCTPRRASSNQRGLNQIWNVKKQSVYLMNLRKSGTLGHPGSLDETTYERLAEETLDSLAEFFEDLADKPYTFEDYDVSFGSGVLTVKLGGDLGTYVINKQTPNKQIWLSSPSSGPKRYDWTGKNWVYSHDGVSLHELLAAELTKALKTKLDLSSLAYSGKDA

SEQ ID NO: 868968 - protein, 195 aa, Homo sapiens
MRPVATRGRRSTQRWRAERAADPEQHVDSRAPRSSRPPGVTQPGPGPDPHPGPAAGRVGPTLRPPWPAHRHRCDLHAPPRKFEPTWPQPDLECQKAECLFDEFEEIWNFGPPRSGVLTVKLGGDLGTYVINKQTPNKQIWLSSPSSGPKRYDWTGKNWVYSHDGVSLHELLAAELTKALKTKLDLSSLAYSGKDA

SEQ ID NO: 868969 - protein, 210 aa, Homo sapiens; identical to SEQ ID NO: 868967

SEQ ID NO: 868970 - protein, 142 aa, Homo sapiens
IDATCTPRRAVSIRAGNSRGPHAAGRTPHACAGRRRARRGRSGYARWTSSPRSFSGRPGGSGLATPFSGSPGCIYTGFCFPKEKGTFCPAVRLRVKARAKAGQAGGGDRFRGVCGCLHACHFSAITCFSNINRWYLLVYTYT

SEQ ID NO: 868971 - protein, 963 aa, Homo sapiens
MATAAETSASEPEAESKAGPKADGEEDEVKAARTRRKVLSRAVAAATYKTMGPAWDQQEEGVSESDGDEYAMASSAESSPGEYEWEYDEEEEKNQLEIERLEEQLSINVYDYNCHVDLIRLLRLEGELTKVRMARQKMSEIFPLTEELWLEWLHDEISMAQDGLDREHVYDLFEKAVKDYICPNIWLEYGQYSVGGIGQKGGLEKVRSVFERALSSVGLHMTKGLALWEAYREFESAIVEAARLEKVHSLFRRQLAIPLYDMEATFAEYEEWSEDPIPESVIQNYNKALQQLEKYKPYEEALLQAEAPRLAEYQAYIDFEMKIGDPARIQLIFERALVENCLVPDLWIRYSQYLDRQLKVKDLVLSVHNRAIRNCPWTVALWSRYLLAMERHGVDHQVISVTFEKALNAGFIQATDYVEIWQAYLDYLRRRVDFKQDSSKELEELRAAFTRALEYLKQEVEERFNESGDPSCVIMQNWARIEARLCNNMQKARELWDSIMTRGNAKYANMWLEYYNLERAHGDTQHCRKALHRAVQCTSDYPEHVCEVLLTMERTEGSLEDWDIAVQKTETRLARVNEQRMKAAEKEAALVQQEEEKAEQRKRARAEKKALKKKKKIRGPEKRGADEDDEKEWGDDEEEQPSKRRRVENSIPAAGETQNVEVAAGPAGKCAAVDVEPPSKQKEKAASLKRDMPKVLHDSSKDSITVFVSNLPYSMQEPDTKLRPLFEACGEVVQIRPIFSNRGDFRGYCYVEFKEEKSALQALEMDRKSVEGRPMFVSPCVDKSKNPDFKVFRYSTSLEKHKLFISGLPFSCTKEELEEICKAHGTVKDLRLVTNRAGKPKGLAYVEYENESQASQAVMKMDGMTIKENIIKVAISNPPQRKVPEKPETRKAPGGPMLLPQTYGARGKGRTQLSLLPRALQRPSAAAPQAENGPAAAPAVAAPAATEAPKMSNADFAKLFLRK

SEQ ID NO: 868972 - protein, 274 aa, Homo sapiens
MATAAETSASEPEAESKAGPKADGEEDEVKAARTRRKVLSRAVAAATYKTMGPAWDQQEEGVSESDGDEYAMASSAESSPGEYEWEYDEEEEKNQLEIERLEEQLSINVYDYNCHVDLIRLLRLEGELTKVRMARQKMSEIFPLTEELWLEWLHDEISMAQDGLDREHVYDLFEKAVKDYICPNIWLEYGQYSVGGIGQKGGLEKVRSVFERALSSVGLHMTKGLALWEAYREFGTSCRFVGEKACGLPGPFDRKKFPQLLFPATVGDPLYDME

SEQ ID NO: 868973 - protein, 963 aa, Homo sapiens; identical to SEQ ID NO: 868971

SEQ ID NO: 868974 - protein, 990 aa, Homo sapiens
MATAAETSASEPEAESKAGPKADGEEDEVKAARTRRKVLSRAVAAATYKTMGPAWDQQEEGVSESDGDEYAMASSAESSPGEYEWEYDEEEEKNQLEIERLEEQLSINVYDYNCHVDLIRLLRLEGELTKVRMARQKMSEIFPLTEELWLEWLHDEISMAQDGLDREHVYDLFEKAVKDYICPNIWLEYGQYSVGGIGQKGGLEKVRSVFERALSSVGLHMTKGLALWEAYREFESAIVEAARLEKVHSLFRRQLAIPLYDMEATFAEYEEWSEDPIPESVIQNYNKALQQLEKYKPYEEALVKKENIASTLEVSYVPLSIASSSLSRELQAEAPRLAEYQAYIDFEMKIGDPARIQLIFERALVENCLVPDLWIRYSQYLDRQLKVKDLVLSVHNRAIRNCPWTVALWSRYLLAMERHGVDHQVISVTFEKALNAGFIQATDYVEIWQAYLDYLRRRVDFKQDSSKELEELRAAFTRALEYLKQEVEERFNESGDPSCVIMQNWARIEARLCNNMQKARELWDSIMTRGNAKYANMWLEYYNLERAHGDTQHCRKALHRAVQCTSDYPEHVCEVLLTMERTEGSLEDWDIAVQKTETRLARVNEQRMKAAEKEAALVQQEEEKAEQRKRARAEKKALKKKKKIRGPEKRGADEDDEKEWGDDEEEQPSKRRRVENSIPAAGETQNVEVAAGPAGKCAAVDVEPPSKQKEKAASLKRDMPKVLHDSSKDSITVFVSNLPYSMQEPDTKLRPLFEACGEVVQIRPIFSNRGDFRGYCYVEFKEEKSALQALEMDRKSVEGRPMFVSPCVDKSKNPDFKVFRYSTSLEKHKLFISGLPFSCTKEELEEICKAHGTVKDLRLVTNRAGKPKGLAYVEYENESQASQAVMKMDGMTIKENIIKVAISNPPQRKVPEKPETRKAPGGPMLLPQTYGARGKGRTQLSLLPRALQRPSAAAPQAENGPAAAPAVAAPAATEAPKMSNADFAKLFLRK

SEQ ID NO: 868975 - protein, 489 aa, Homo sapiens [sequence omitted]

SEQ ID NO: 868976 - protein, 643 aa, Homo sapiens [sequence omitted]

SEQ ID NO: 868977 - protein, 702 aa, Homo sapiens
MATAAETSASEPEAESKAGPKADGEEDEVKAARTRRKVLSRAVAAATYKTMGPAWDQQEEGVSESDGDEYAMASSAESSPGEYEWEYDEEEEKNQLEIERLEEQLSINVYDYNCHVDLIRLLRLEGELTKVRMARQKMSEIFPLTEELWLEWLHDEISMAQDGLDREHVYDLFEKAVKDYICPNIWLEYGQYSVGGIGQKGGLEKVRSVFERALSSVGLHMTKGLALWEAYREFESAIVEAARLEKVHSLFRRQLAIPLYDMEATFAEYEEWSEDPIPESVIQNYNKALQQLEKYKPYEEALVKKENIASTLEVSYVPLSIASSSLSRELQAEAPRLAEYQAYIDFEMKIGDPARIQLIFERALVENCLVPDLWIRYSQYLDRQLKVKDLVLSVHNRAIRNCPWTVALWSRYLLAMERHGVDHQVISVTFEKALNAGFIQATDYVEIWQAYLDYLRRRVDFKQDSSKELEELRAAFTRALEYLKQEVEERFNESGDPSCVIMQNWARIEARLCNNMQKARELWDSIMTRGNAKYANMWLEYYNLERAHGDTQHCRKALHRAVQCTSDYPEHVCEVLLTMERTEGSLEDWDIAVQKTETRLARVNEQRMKAAEKEAALVQQEEEKAEQRKRARAEKKALKKKKKIRGPEKRGADEDDEKEWGDDEEEQLPKRRRVENRHPLRWGNPTSVEVAAGPAGEMVRAG

SEQ ID NO: 868978 - protein, 475 aa, Homo sapiens [sequence omitted]

SEQ ID NO: 868979 - protein, 414 aa, Homo sapiens
MGEISSGGSLEDWDIAVQKTETRLARVNEQRMKAAEKEAALVQQEEEKAEQRKRARAEKKALKKKKKIRGPEKRGADEDDEKEWGDDEEEQPSKRRRVENSIPAAGETQNVEVAAGPAGKCAAVDVEPPSKQKEKAASLKRDMPKVLHDSSKDSITVFVSNLPYSMQEPDTKLRPLFEACGEVVQIRPIFSNRGDFRGYCYVEFKEEKSALQALEMDRKSVEGRPMFVSPCVDKSKNPDFKVFRYSTSLEKHKLFISGLPFSCTKEELEEICKAHGTVKDLRLVTNRAGKPKGLAYVEYENESQASQAVMKMDGMTIKENIIKVAISNPPQRKVPEKPETRKAPGGPMLLPQTYGARGKGRTQLSLLPRALQRPSAAAPQAENGPAAAPAVAAPAATEAPKMSNADFAKLFLRK

SEQ ID NO: 868980 - protein, 120 aa, Homo sapiens
ILYNSSSYLICSHAVMKMDGMTIKENIIKVAISNPPQRKVPEKPETRKAPGGPMLLPQTYGARGKGRTQLSLLPRALQRPSAAAPQAENGPAAAPAVAAPAATEAPKMSNADFAKLFLRK

SEQ ID NO: 868981 - protein, 421 aa, Homo sapiens
MATAAETSASEPEAESKAGPKADGEEDEVKAARTRRKVLSRAVAAATYKTMGPAWDQQEEGVSESDGDEYAMASSAESSPGEYEWEYDEEEEKNQLEIERLEEQLSINVYDYNCHVDLIRLLRLEGELTKVRMARQKMSEIFPLTEELWLEWLHDEISMAQDGLDREHVYDLFEKAVKDYICPNIWLEYGQYSVGGIGQKGGLEKVRSVFERALSSVGLHMTKGLALWEAYREFESAIVEAARLEKVHSLFRRQLAIPLYDMEATFAEYEEWSEDPIPESVIQNYNKALQQLEKYKPYEEALLQAEAPRLAEYQAYIDFEMKIGDPARIQLIFERALVENCLVPDLWIRYSQYLDRQLKVKDLVLSVHNRAIRNCPWTVALWSRYLLAMERHGVDHQVISGADVFVGELLSYLSQVKNRER

SEQ ID NO: 868982 - protein, 325 aa, Homo sapiens
MATAAETSASEPEAESKAGPKADGEEDEVKAARTRRKVLSRAVAAATYKTMGPAWDQQEEGVSESDGDEYAMASSAESSPGEYEWEYDEEEEKNQLEIERLEEQLSINVYDYNCHVDLIRLLRLEGELTKVRMARQKMSEIFPLTEELWLEWLHDEISMAQDGLDREHVYDLFEKAVKDYICPNIWLEYGQYSVGGIGQKGGLEKVRSVFERALSSVGLHMTKGLALWEAYREFESAIVEAARPVAGFLSPFDREQTFDSQLEKVHSLFRRQLAIPLYDMEATFAEYEEWSEDPIPESVIQNYNKALQQHHHSWCCSVGDHTHSS

SEQ ID NO: 868983 - protein, 129 aa, Homo sapiens
MATAAETSASEPEAESKAGPKADGEEDEVKAARTRRKVLSRAVAAATYKTMGPAWDQQEEGVSESDGDEYAMASSAESSPGEYEWEYDEEEEKNQLEIERLEEQVGPGVGSGHLPVFQVLGSPCPGPPP

SEQ ID NO: 868984 - protein, 963 aa, Homo sapiens; identical to SEQ ID NO: 868971

SEQ ID NO: 868985 - protein, 981 aa, Homo sapiens
MATAAETSASEPEAESKAGPKADGEEDEVKAARTRRKVLSRAVAAATYKTMGPAWDQQEEGVSESDGDEYAMASSAESSPGEYEWEYDEEEEKNQLEIERLEEQLSINVYDYNCHVDLIRLLRLEGELTKVRMARQKMSEIFPLTEELWLEWLHDEISMAQDGLDREHVYDLFEKAVKDYICPNIWLEYGQYSVGGIGQKGGLEKVRSVFERALSSVGLHMTKGLALWEAYREFESAIVEAARPVAGFLSPFDREQTFDSQLEKVHSLFRRQLAIPLYDMEATFAEYEEWSEDPIPESVIQNYNKALQQLEKYKPYEEALLQAEAPRLAEYQAYIDFEMKIGDPARIQLIFERALVENCLVPDLWIRYSQYLDRQLKVKDLVLSVHNRAIRNCPWTVALWSRYLLAMERHGVDHQVISVTFEKALNAGFIQATDYVEIWQAYLDYLRRRVDFKQDSSKELEELRAAFTRALEYLKQEVEERFNESGDPSCVIMQNWARIEARLCNNMQKARELWDSIMTRGNAKYANMWLEYYNLERAHGDTQHCRKALHRAVQCTSDYPEHVCEVLLTMERTEGSLEDWDIAVQKTETRLARVNEQRMKAAEKEAALVQQEEEKAEQRKRARAEKKALKKKKKIRGPEKRGADEDDEKEWGDDEEEQPSKRRRVENSIPAAGETQNVEVAAGPAGKCAAVDVEPPSKQKEKAASLKRDMPKVLHDSSKDSITVFVSNLPYSMQEPDTKLRPLFEACGEVVQIRPIFSNRGDFRGYCYVEFKEEKSALQALEMDRKSVEGRPMFVSPCVDKSKNPDFKVFRYSTSLEKHKLFISGLPFSCTKEELEEICKAHGTVKDLRLVTNRAGKPKGLAYVEYENESQASQAVMKMDGMTIKENIIKVAISNPPQRKVPEKPETRKAPGGPMLLPQTYGARGKGRTQLSLLPRALQRPSAAAPQAENGPAAAPAVAAPAATEAPKMSNADFAKLFLRK

SEQ ID NO: 868986 - protein, 932 aa, Homo sapiens
MATAAETSASEPEAESKAGPKADGEEDEVKAARTRRKVLSRAVAAATYKTMGPAWDQQEEGVSESDGDEYAMASSAESSPGEYEWEYDEEEEKNQLEIERLEEQLSINVYDYNCHVDLIRLLRLEGELTKVRMARQKMSEIFPLTEELWLEWLHDEISMAQDGLDREHVYDLFEKAVKDYICPNIWLEYGQYSVGGIGQKGGLEKVRSVFERALSSVGLHMTKGLALWEAYREFESAIVEAARLEKVHSLFRRQLAIPLYDMEATFAEYEEWSEDPIPESVIQNYNKALQQLEKYKPYEEALVKKENIASTLEVSYVPLSIASSSLSRELQAEAPRLAEYQAYIDFEMKIGDPARIQLIFERALVENCLVPDLWIRYSQYLDRQLKVKDLVLSVHNRAIRNCPWTVALWSRYLLAMERHGVDHQVISVTFEKALNAGFIQATDYVEIWQAYLDYLRRRVDFKQDSSKELEELRAAFTRALEYLKQEVEERFNESGDPSCVIMQNWARIEARLCNNMQKARELWDSIMTRGNAKYANMWLEYYNLERAHGDTQHCRKALHRAVQCTSDYPEHVCEVLLTMERTEGSLEDWDIAVQKTETRLARVNEQRMKAAEKEAALVQQEEEKAEQRKRARAEKKALKKKKKIRGPEKRGADEDDEKEWGDDEEEQPSKRRRVENSIPAAGETQNVEVAAGPAGKCAAVDVEPPSKQKEKAASLKRDMPKVLHDSSKDSITVFVSNLPYSMQEPDTKLRPLFEACGEVVQIRPIFSNRGDFRGYCYVEFKEEKSALQALEMDRKSVEGRPMFVSPCVDKSKNPDFKVFRYSTSLEKHKLFISGLPFSCTKEELEEICKAHGTVKDLRLVTNRAGKPKGLAYVEYENESQASQAVMKMDGMTIKENIIKVAISNPPQRKVPEKPETRKAPGGPMLLPQTYGA

SEQ ID NO: 868987 - protein, 412 aa, Homo sapiens
MERTEGSLEDWDIAVQKTETRLARVNEQRMKAAEKEAALVQQEEEKAEQRKRARAEKKALKKKKKIRGPEKRGADEDDEKEWGDDEEEQPSKRRRVENSIPAAGETQNVEVAAGPAGKCAAVDVEPPSKQKEKAASLKRDMPKVLHDSSKDSITVFVSNLPYSMQEPDTKLRPLFEACGEVVQIRPIFSNRGDFRGYCYVEFKEEKSALQALEMDRKSVEGRPMFVSPCVDKSKNPDFKVFRYSTSLEKHKLFISGLPFSCTKEELEEICKAHGTVKDLRLVTNRAGKPKGLAYVEYENESQASQAVMKMDGMTIKENIIKVAISNPPQRKVPEKPETRKAPGGPMLLPQTYGARGKGRTQLSLLPRALQRPSAAAPQAENGPAAAPAVAAPAATEAPKMSNADFAKLFLRK

SEQ ID NO: 868988 - protein, 284 aa, Homo sapiens
MGRIWTTSLKRDMPKVLHDSSKDSITVFVSNLPYSMQEPDTKLRPLFEACGEVVQIRPIFSNRGDFRGYCYVEFKEEKSALQALEMDRKSVEGRPMFVSPCVDKSKNPDFKVFRYSTSLEKHKLFISGLPFSCTKEELEEICKAHGTVKDLRLVTNRAGKPKGLAYVEYENESQASQAVMKMDGMTIKENIIKVAISNPPQRKVPEKPETRKAPGGPMLLPQTYGARGKGRTQLSLLPRALQRPSAAAPQAENGPAAAPAVAAPAATEAPKMSNADFAKLFLRK

SEQ ID NO: 868989 - protein, 438 aa, Homo sapiens
MATAAETSASEPEAESKAGPKADGEEDEVKAARTRRKVLSRAVAAATYKTMGPAWDQQEEGVSESDGDEYAMASSAESSPGEYEWEYDEEEEKNQLEIERLEEQLSINVYDYNCHVDLIRLLRLEGELTKVRMARQKMSEIFPLTEELWLEWLHDEISMAQDGLDREHVYDLFEKAVKDYICPNIWLEYGQYSVGGIGQKGGLEKVRSVFERALSSVGLHMTKGLALWEAYREFESAIVEAARLEKVHSLFRRQLAIPLYDMEATFAEYEEWSEDPIPESVIQNYNKALQQLEKYKPYEEALLQAEAPRLAEYQAYIDFEMKIGDPARIQLIFERALVENCLVPDLWIRYSQYLDRQLKVKDLVLSVHNRAIRNCPWTVALWSRYLLAMERHGVDHQVISVTFEKALNAGFIQATDYVEIWQAYLDYLRRRVDFKQGI

SEQ ID NO: 868990 - protein, 201 aa, Homo sapiens
MATAAETSASEPEAESKAGPKADGEEDEVKAARTRRKVLSRAVAAATYKTMGPAWDQQEEGVSESDGDEYAMASSAESSPGEYEWEYDEEEEKNQLEIERLEEQLSINVYDYNCHVDLIRLLRLEGELTKVRMARQKMSEIFPLTEELWLEWLHDEISMAQDGLDREHVYDLFEKAVKDYICKFPWTFFGYLAMSYISVCC

SEQ ID NO: 868991 - protein, 412 aa, Homo sapiens
REQVRRGEEAAVLLTRSALLPLSAYLYPPACSATRTPSTMTTSASSHLNKGIKQVYMSLPQGEKVQAMYIWIDGTGEGLRCKTRTLDSEPKCVEELPEWNFDGSSTLQSEGSNSDMYLVPAAMFRDPFRKDPNKLVLCEVFKYNRRPAETNLRHTCKRIMDMVSNQHPWFGMEQEYTLMGTDGHPFGWPSNGFPGPQGPYYCGVGADRAYGRDIVEAHYRACLYAGVKIAGTNAEVMPAQWEFQIGPCEGISMGDHLWVARFILHRVCEDFGVIATFDPKPIPGNWNGAGCHTNFSTKAMREENGLKYIEEAIEKLSKRHQYHIRAYDPKGGLDNARRLTGFHETSNINDFSAGVANRSASIRIPRTVGQEKKGYFEDRRPSANCDPFSVTEALIRTCLLNETGDEPFQYKN

SEQ ID NO: 868992 - protein, 253 aa, Homo sapiens [sequence omitted]

SEQ ID NO: 868993 - protein, 176 aa, Homo sapiens [sequence omitted]

SEQ ID NO: 868994 - protein, 151 aa, Homo sapiens
REQVRRGEEAAVLLTRSALLPLSAYLYPPACSATRTPSTMTTSASSHLNKGIKQVYMSLPQGEKVQAMYIWIDGTGEGLRCKTRTLDSEPKCVEELPEWNFDGSSTLQSEGSNSDMYLVPAAMFRDPFRKDPNKLVLCEVFKYNRRPAGVL

SEQ ID NO: 868995 - protein, 176 aa, Homo sapiens [sequence omitted]

SEQ ID NO: 868996 - protein, 248 aa, Homo sapiens
REQVRRGEEAAVLLTRSALLPLSAYLYPPACSATRTPSTMTTSASSHLNKGIKQVYMSLPQGEKVQAMYIWIDGTGEGLRCKTRTLDSEPKCVEELPEWNFDGSSTLQSEGSNSDMYLVPAAMFRDPFRKDPNKLVLCEVFKYNRRPAETNLRHTCKRIMDMVSNQHPWFGMEQEYTLMGTDGHPFGWPSNGFPGPQGPYYCGVGADRAYGRDIVEAHYRACLYAGVKIAGTNAEVMPAQVSIAPIHQ

SEQ ID NO: 868997 - protein, 412 aa, Homo sapiens; identical to SEQ ID NO: 868991

SEQ ID NO: 868998 - protein, 412 aa, Homo sapiens; identical to SEQ ID NO: 868991

SEQ ID NO: 868999 - protein, 412 aa, Homo sapiens; identical to SEQ ID NO: 868991

SEQ ID NO: 869000 - protein, 412 aa, Homo sapiens; identical to SEQ ID NO: 868991

SEQ ID NO: 869001 - protein, 412 aa, Homo sapiens; identical to SEQ ID NO: 868991

SEQ ID NO: 869002 - protein, 412 aa, Homo sapiens; identical to SEQ ID NO: 868991

SEQ ID NO: 869003 - protein, 215 aa, Homo sapiens
REQVRRGEEAAVLLTRSALLPLSAYLYPPACSAKRGSSPSRKSTKKATNENYEDNEKSDSSGSRSSCFGFVAYSVNSGERSRVKIKTLTHQPACSDTPRAGRCLSPSPSPSPRKLRCLDQLESEKEERRERHSKKRRVKEGNPNDTLDFLWLGTPSSTKIKWTRPPAVEPLLVLHPTPTLPPLPVVPIVTQRVEYQGRFFHSMCPVNLAFFVWLG

SEQ ID NO: 869004 - protein, 412 aa, Homo sapiens; identical to SEQ ID NO: 868991

SEQ ID NO: 869005 - protein, 445 aa, Homo sapiens
REQVRRGEEAAVLLTRSALLPLSAYLYPPACSATRTPSTMTTSASSHLNKGIKQVYMSLPQGEKVQAMYIWIDGTGEGLRCKTRTLDSEPKCVEELPEWNFDGSSTLQSEGSNSDMYLVPAAMFRDPFRKDPNKLVLCEVFKYNRRPAETNLRHTCKRIMDMVSNQHPWFGMEQEYTLMGTDGHPFGWPSNGFPGPQGPYYCGVGADRAYGRDIVEAHYRACLYAGVKIAGTNAEVMPAQWEFQIGPCEGISMGDHLWVARFILHRVCEDFGVIATFDPKPIPGNWNGAGCHTNFSTKAMREENGLKYIEEAIEKLSKRHQYHIRAYDPKGGLDNARRLTGFHETSNINDFSAGVANRSASIRIPRTVGQEKKGYFEDRRPSANCDPFSVTEALIRTCLLNETGDEPPTLPPLPVVPIVTQRVEYQGRFFHSMCPVNLAFFVWLG

SEQ ID NO: 869006 - protein, 445 aa, Homo sapiens; identical to SEQ ID NO: 869005

SEQ ID NO: 869007 - protein, 112 aa, Homo sapiens
MTTSASSHLNKGIKQVYMSLPQGEKVQAMYIWIDGTGEGLRCKTRTLDSEPKCVEELPEWNFDGSSTLQSEGSNSDMYLVPAAMFRDPFRKDPNKLVLCEVFKYNRRPAGVL

SEQ ID NO: 869008 - protein, 307 aa, Homo sapiens
REQVRRGEEAAVLLTRSALLPLSAYLYPPACSATRTPSTMTTSASSHLNKGIKQVYMSLPQGEKVQAMYIWIDGTGEGLRCKTRTLDSEPKCVEELPEWNFDGSSTLQSEGSNSDMYLVPAAMFRDPFRKDPNKLVLCEVFKYNRRPAETNLRHTCKRIMDMVSNQHPWFGMEQEYTLMGTDGHPFGWPSNGFPGPQGPYYCGVGADRAYGRDIVEAHYRACLYAGVKIAGTNAEVMPAQWEFQIGPCEGISMGDHLWVARFILHRVCEDFGVIATFDPKPIPGNWNGAGCHTNFSTKAMREENGLK

SEQ ID NO: 869009 - protein, 412 aa, Homo sapiens; identical to SEQ ID NO: 868991

SEQ ID NO: 869010 - protein, 445 aa, Homo sapiens; identical to SEQ ID NO: 869005

SEQ ID NO: 869011 - protein, 412 aa, Homo sapiens; identical to SEQ ID NO: 868991

SEQ ID NO: 869012 - protein, 412 aa, Homo sapiens; identical to SEQ ID NO: 868991

SEQ ID NO: 869013 - protein, 209 aa, Homo sapiens
REQVRRGEEAAVLLTRSALLPLSAYLYPPACSATRTPSTMTTSASSHLNKGIKQVYMSLPQGEKVQAMYIWIDGTGEGLRCKTRTLDSEPKCVEELPEWNFDGSSTLQSEGSNSDMYLVPAAMFRDPFRKDPNKLVLCEVFKYNRRPAETNLRHTCKRIMDMVSNQHPWFGMEQEYTLMGTDGHPFGWPSNGFPGPQLQLFPLSQLSRL

SEQ ID NO: 869014 - protein, 412 aa, Homo sapiens; identical to SEQ ID NO: 868991

SEQ ID NO: 869015 - protein, 248 aa, Homo sapiens; identical to SEQ ID NO: 868996

SEQ ID NO: 869016 - protein, 469 aa, Homo sapiens [sequence omitted]

SEQ ID NO: 869017 - protein, 281 aa, Homo sapiens
MAPREVLTGNDEVIGQVLSTLKSEDVPYTAALTAVRPSRVARDVAVVAGGLGRQLLQKQPVSPVIHPPVSYNDTAPRILFWAQNFSVAYKDQWEDLTPLTFGVQELNLTGSFWNDSFARLSLTYERLFGTTVTFKFILANRLYPVSARHWFTMERLEVHSNGSVAYFNASQVTGPSIYSFHCEYVSSLSKKGSLLVARTQPSPWQMMLQDFQIQAFNVMGEQFSYASDCASFFSPGIWMGLLTSLFMLFIFTYGLHMILSLKTMDRFDDHKGPTISLTQIV

SEQ ID NO: 869018 - protein, 489 aa, Homo sapiens
ILTYTHSTSTLAVSRCWEAMMAAMATARVRMGPRCAQALWRMPWLPVFLSLAAAAAAAAAEQQVPLVLWSSDRDLWAPAADTHEGHITSDLQLSTYLDPALELGPRNVLLFLQDKLSIEDFTAYGGVFGNKQDSAFSNLENALDLAPSSLVLPAVDWYAVSTLTTYLQEKLGASPLHVDLATLRELKLNASLPALLLIRLPYTASSGLMAPREVLTGNDEVIGQVLSTLKSEDVPYTAALTAVRPSRVARDVAVVAGGLGRQLLQKQPVSPVIHPPVSYNDTAPRILFWAQNFSVAYKDQWEDLTPLTFGVQELNLTGSFWNDSFARLSLTYERLFGTTVTFKFILANRLYPVSARHWFTMERLEVHSNGSVAYFNASQVTGPSIYSFHCEYVSSLSKKGSLLVARTQPSPWQMMLQDFQIQAFNVMGEQFSYASDCASFFSPGIWMGLLTSLFMLFIFTYGLHMILSLKTMDRFDDHKGPTISLTQIV

SEQ ID NO: 869019 - protein, 469 aa, Homo sapiens [sequence omitted]

SEQ ID NO: 869020 - protein, 469 aa, Homo sapiens [sequence omitted]

SEQ ID NO: 869021 - protein, 444 aa, Homo sapiens
FSSLPLEPPRFPAAAEQQVPLVLWSSDRDLWAPAADTHEGHITSDLQLSTYLDPALELGPRNVLLFLQDKLSIEDFTAYGGVFGNKQDSAFSNLENALDLAPSSLVLPAVDWYAVSTLTTYLQEKLGASPLHVDLATLRELKLNASLPALLLIRLPYTASSGLMAPREVLTGNDEVIGQVLSTLKSEDVPYTAALTAVRPSRVARDVAVVAGGLGRQLLQKQPVSPVIHPPVSYNDTAPRILFWAQNFSVAYKDQWEDLTPLTFGVQELNLTGSFWNDSFARLSLTYERLFGTTVTFKFILANRLYPVSARHWFTMERLEVHSNGSVAYFNASQVTGPSIYSFHCEYVSSLSKKGSLLVARTQPSPWQMMLQDFQIQAFNVMGEQFSYASDCASFFSPGIWMGLLTSLFMLFIFTYGLHMILSLKTMDRFDDHKGPTISLTQIV

SEQ ID NO: 869022 - protein, 456 aa, Homo sapiens
DQEFTVKSKGAGGQGKVASKIVGPSGAAVPCKVEPGLGADNSVVRFLPREEGPYEVEVTYDGVPVPGSPFPLEAVAPTKPSKLSIEDFTAYGGVFGNKQDSAFSNLENALDLAPSSLVLPAVDWYAVSTLTTYLQEKLGASPLHVDLATLRELKLNASLPALLLIRLPYTASSGLMAPREVLTGNDEVIGQVLSTLKSEDVPYTAALTAVRPSRVARDVAVVAGGLGRQLLQKQPVSPVIHPPVSYNDTAPRILFWAQNFSVAYKDQWEDLTPLTFGVQELNLTGSFWNDSFARLSLTYERLFGTTVTFKFILANRLYPVSARHWFTMERLEVHSNGSVAYFNASQVTGPSIYSFHCEYVSSLSKKGSLLVARTQPSPWQMMLQDFQIQAFNVMGEQFSYASDCASFFSPGIWMGLLTSLFMLFIFTYGLHMILSLKTMDRFDDHKGPTISLTQIV

SEQ ID NO: 869023 - protein, 281 aa, Homo sapiens; identical to SEQ ID NO: 869017

SEQ ID NO: 869024 - protein, 299 aa, Homo sapiens
DLEDLGMRNVTLHSQLWSDGTQEDLTGNDEVIGQVLSTLKSEDVPYTAALTAVRPSRVARDVAVVAGGLGRQLLQKQPVSPVIHPPVSYNDTAPRILFWAQNFSVAYKDQWEDLTPLTFGVQELNLTGSFWNDSFARLSLTYERLFGTTVTFKFILANRLYPVSARHWFTMERLEVHSNGSVAYFNASQVTGPSIYSFHCEYVSSLSKKGSLLVARTQPSPWQMMLQDFQIQAFNVMGEQFSYASDCASFFSPGIWMGLLTSLFMLFIFTYGLHMILSLKTMDRFDDHKGPTISLTQIV

SEQ ID NO: 869025 - protein, 229 aa, Homo sapiens
FLLFCFVLFCFKAPLTHPPLSFGFWILFWAQNFSVAYKDQWEDLTPLTFGVQELNLTGSFWNDSFARLSLTYERLFGTTVTFKFILANRLYPVSARHWFTMERLEVHSNGSVAYFNASQVTGPSIYSFHCEYVSSLSKKGSLLVARTQPSPWQMMLQDFQIQAFNVMGEQFSYASDCASFFSPGIWMGLLTSLFMLFIFTYGLHMILSLKTMDRFDDHKGPTISLTQIV

SEQ ID NO: 869026 - protein, 168 aa, Homo sapiens
RLVEAGLNRPRERLFGTTVTFKFILANRLYPVSARHWFTMERLEVHSNGSVAYFNASQVTGPSIYSFHCEYVSSLSKKGSLLVARTQPSPWQMMLQDFQIQAFNVMGEQFSYASDCASFFSPGIWMGLLTSLFMLFIFTYGLHMILSLKTMDRFDDHKGPTISLTQIV

SEQ ID NO: 869027 - protein, 274 aa, Homo sapiens
MAAMATARVRMGPRCAQALWRMPWLPVFLSLAAAAAAAAAEQQVPLVLWSSDRDLWAPAADTHEGHITSDLQLSTYLDPALELGPRNVLLFLQDKLSIEDFTAYGGVFGNKQDSAFSNLENALDLAPSSLVLPAVDWYAVSTLTTYLQEKLGASPLHVDLATLRELKLNASLPALLLIRLPYTASSGLMAPREVLTGNDEVIGQVLSTLKSEDVPYTAALTAVRPSRVARDVAVVAGGLGRQLLQKQPVSPVIHPPVSYNDTAPRGSCRGQGYR

SEQ ID NO: 869028 - protein, 469 aa, Homo sapiens [sequence omitted]

SEQ ID NO: 869029 - protein, 489 aa, Homo sapiens
GPNIVYVRPRGILAEVYEAMMAAMATARVRMGPRCAQALWRMPWLPVFLSLAAAAAAAAAEQQVPLVLWSSDRDLWAPAADTHEGHITSDLQLSTYLDPALELGPRNVLLFLQDKLSIEDFTAYGGVFGNKQDSAFSNLENALDLAPSSLVLPAVDWYAVSTLTTYLQEKLGASPLHVDLATLRELKLNASLPALLLIRLPYTASSGLMAPREVLTGNDEVIGQVLSTLKSEDVPYTAALTAVRPSRVARDVAVVAGGLGRQLLQKQPVSPVIHPPVSYNDTAPRILFWAQNFSVAYKDQWEDLTPLTFGVQELNLTGSFWNDSFARLSLTYERLFGTTVTFKFILANRLYPVSARHWFTMERLEVHSNGSVAYFNASQVTGPSIYSFHCEYVSSLSKKGSLLVARTQPSPWQMMLQDFQIQAFNVMGEQFSYASDCASFFSPGIWMGLLTSLFMLFIFTYGLHMILSLKTMDRFDDHKGPTISLTQIV

SEQ ID NO: 869030 - protein, 469 aa, Homo sapiens [sequence omitted]

SEQ ID NO: 869031 - protein, 469 aa, Homo sapiens [sequence omitted]

SEQ ID NO: 869032 - protein, 469 aa, Homo sapiens [sequence omitted]

SEQ ID NO: 869033 - protein, 469 aa, Homo sapiens [sequence omitted]

SEQ ID NO: 869034 - protein, 466 aa, Homo sapiens
MWTVRVRMGPRCAQALWRMPWLPVFLSLAAAAAAAAAEQQVPLVLWSSDRDLWAPAADTHEGHITSDLQLSTYLDPALELGPRNVLLFLQDKLSIEDFTAYGGVFGNKQDSAFSNLENALDLAPSSLVLPAVDWYAVSTLTTYLQEKLGASPLHVDLATLRELKLNASLPALLLIRLPYTASSGLMAPREVLTGNDEVIGQVLSTLKSEDVPYTAALTAVRPSRVARDVAVVAGGLGRQLLQKQPVSPVIHPPVSYNDTAPRILFWAQNFSVAYKDQWEDLTPLTFGVQELNLTGSFWNDSFARLSLTYERLFGTTVTFKFILANRLYPVSARHWFTMERLEVHSNGSVAYFNASQVTGPSIYSFHCEYVSSLSKKGSLLVARTQPSPWQMMLQDFQIQAFNVMGEQFSYASDCASFFSPGIWMGLLTSLFMLFIFTYGLHMILSLKTMDRFDDHKGPTISLTQIV

SEQ ID NO: 869035 - protein, 394 aa, Homo sapiens
QHPPPPNMARIRPWLRWREELSIEDFTAYGGVFGNKQDSAFSNLENALDLAPSSLVLPAVDWYAVSTLTTYLQEKLGASPLHVDLATLRELKLNASLPALLLIRLPYTASSGLMAPREVLTGNDEVIGQVLSTLKSEDVPYTAALTAVRPSRVARDVAVVAGGLGRQLLQKQPVSPVIHPPVSYNDTAPRILFWAQNFSVAYKDQWEDLTPLTFGVQELNLTGSFWNDSFARLSLTYERLFGTTVTFKFILANRLYPVSARHWFTMERLEVHSNGSVAYFNASQVTGPSIYSFHCEYVSSLSKKGSLLVARTQPSPWQMMLQDFQIQAFNVMGEQFSYASDCASFFSPGIWMGLLTSLFMLFIFTYGLHMILSLKTMDRFDDHKGPTISLTQIV

SEQ ID NO: 869036 - protein, 129 aa, Homo sapiens [sequence omitted]

SEQ ID NO: 869037 - protein, 309 aa, Homo sapiens
MPRLALAGFEFACACLVHDAQLLVLNGTHGIGPSRWQSDEVIGQVLSTLKSEDVPYTAALTAVRPSRVARDVAVVAGGLGRQLLQKQPVSPVIHPPVSYNDTAPRILFWAQNFSVAYKDQWEDLTPLTFGVQELNLTGSFWNDSFARLSLTYERLFGTTVTFKFILANRLYPVSARHWFTMERLEVHSNGSVAYFNASQVTGPSIYSFHCEYVSSLSKKGSLLVARTQPSPWQMMLQDFQIQAFNVMGEQFSYASDCASFFSPGIWMGLLTSLFMLFIFTYGLHMILSLKTMDRFDDHKGPTISLTQIV

SEQ ID NO: 869038 - protein, 129 aa, Homo sapiens [sequence omitted]

SEQ ID NO: 869039 - protein, 108 aa, Homo sapiens
MDLQDPCIGDGGSREVKVRESRGSPQPPSPWQMMLQDFQIQAFNVMGEQFSYASDCASFFSPGIWMGLLTSLFMLFIFTYGLHMILSLKTMDRFDDHKGPTISLTQIV

SEQ ID NO: 869040 - protein, 346 aa, Homo sapiens
MAAMATARVRMGPRCAQALWRMPWLPVFLSLAAAAAAAAAEQQVPLVLWSSDRDLWAPAADTHEGHITSDLQLSTYLDPALELGPRNVLLFLQDKLSIEDFTAYGGVFGNKQDSAFSNLENSPEPKPPTTSDMNHPAGMQDSGQAARLRSKAILENCRCHAPDHKCSLPPSSMRNAFLCSQPDGKQIAIAAYPVATGSRPSCDKRSIAQLEQTTAGFAERWLTVRKKPLLSGNSIAIASDPNPAVVPERIRDHLEPSKGSLGRKAPQGMAQEKPKYPARPCQTKAGQFAFAAAIGNSMTLGYSKFLLAAAPEHPRKSRASNFLASLCSLIVAFLSQLAEESHKHLL

SEQ ID NO: 869041 - protein, 126 aa, Homo sapiens
RPPTITTARIQASNDVTGTWPHPTPLLPQNQSHLPASLGRAGRSQTPSWPTGPLSGSVGPWALDKHWGTCPQSHPLLIPNPVSLPPDAADSGCGLHVFMQYSLPDASPASGPWGLGCRRVVGEGGS

SEQ ID NO: 869042 - protein, 902 aa, Homo sapiens
PHPGGGALAVTRRTAAAAAEAPVPSARTLRSPEQLLEGNRGAAPGIRLGPLALLCGEGAGPPAGPEPSGSAPSPVPPPRRLLWLLWGFAGAGDPRSGRHAGIAAADQRMTFGLGGPPWVQGGGPPGLGGPRGLGWQFFPVVGAFSTPENARSFKAVHLGVGRMPCGPGPPQPGDSELPPRGNTNAARRPNSVQPGAEREKPGAGEGAGENWEPRVLPYHPAQPGQAAKKAVRTRYISTELGIRQRLLVAVLTSQTTLPTLGVAVNRTLGHRLERVVFLTGARGRRAPPGMAVVTLGEERPIGHLHLALRHLLEQHGDDFDWFFLVPDTTYTEAHGLARLTGHLSLASAAHLYLGRPQDFIGGEPTPGRYCHGGFGVLLSRMLLQQLRPHLEGCRNDIVSARPDEWLGRCILDATGVGCTGDHEGVHYSHLELSPGEPVQEGDPHFRSALTAHPVRDPVHMYQLHKAFARAELERTYQEIQELQWEIQNTSHLAVDGDRAAAWPVGIPAPSRPASRFEVLRWDYFTEQHAFSCADGSPRCPLRGADRADVADVLGTALEELNRRYHPALRLQKQQLVNGYRRFDPARGMEYTLDLQLEALTPQGGRRPLTRRVQLLRPLSRVEILPVPYVTEASRLTVLLPLAAAERDLAPGFLEAFATAALEPGDAAAALTLLLLYEPRQAQRVAHADVFAPVKAHVAELERRFPGARVPWLSVQTAAPSPLRLMDLLSKKHPLDTLFLLAGPDTVLTPDFLNRCRMHAISGWQAFFPMHFQAFHPAVAPPQGPGPPELGRDTGRFDRQAASEACFYNSDYVAARGRLAAASEQEEELLESLDVYELFLHFSSLHVLRAVEPALLQRYRAQTCSARLSEDLYHRCLQSVLEGLGSRTQLAMLLFEQEQGNST

SEQ ID NO: 869043 - protein, 749 aa, Homo sapiens
MRASLLLSVLRPAGPVAVGISLGFTLSLLSVTWVEEPCGPGPPQPGDSELPPRGNTNAARRPNSVQPGAEREKPGAGEGAGENWEPRVLPYHPAQPGQAAKKAVRTRYISTELGIRQRLLVAVLTSQTTLPTLGVAVNRTLGHRLERVVFLTGARGRRAPPGMAVVTLGEERPIGHLHLALRHLLEQHGDDFDWFFLVPDTTYTEAHGLARLTGHLSLASAAHLYLGRPQDFIGGEPTPGRYCHGGFGVLLSRMLLQQLRPHLEGCRNDIGVHYSHLELSPGEPVQEGDPHFRSALTAHPVRDPVHMYQLHKAFARAELERTYQEIQELQWEIQNTSHLAVDGDRAAAWPVGIPAPSRPASRFEVLRWDYFTEQHAFSCADGSPRCPLRGADRADVADVLGTALEELNRRYHPALRLQKQQLVNGYRRFDPARGMEYTLDLQLEALTPQGGRRPLTRRVQLLRPLSRVEILPVPYVTEASRLTVLLPLAAAERDLAPGFLEAFATAALEPGDAAAALTLLLLYEPRQAQRVAHADVFAPVKAHVAELERRFPGARVPWLSVQTAAPSPLRLMDLLSKKHPLDTLFLLAGPDTVLTPDFLNRCRMHAISGWQAFFPMHFQAFHPAVAPPQGPGPPELGRDTGRFDRQAASEACFYNSDYVAARGRLAAASEQEEELLESLDVYELFLHFSSLHVLRAVEPALLQRYRAQTCSARLSEDLYHRCLQSVLEGLGSRTQLAMLLFEQEQGNST

SEQ ID NO: 869044 - protein, 775 aa, Homo sapiens
MRASLLLSVLRPAGPVAVGISLGFTLSLLSVTWVEEPCGPGPPQPGDSELPPRGNTNAARRPNSVQPGAEREKPGAGEGAGENWEPRVLPYHPAQPGQAAKKAVRTRYISTELGIRQRLLVAVLTSQTTLPTLGVAVNRTLGHRLERVVFLTGARGRRAPPGMAVVTLGEERPIGHLHLALRHLLEQHGDDFDWFFLVPDTTYTEAHGLARLTGHLSLASAAHLYLGRPQDFIGGEPTPGRYCHGGFGVLLSRMLLQQLRPHLEGCRNDIVSARPDEWLGRCILDATGVGCTGDHEGVHYSHLELSPGEPVQEGDPHFRSALTAHPVRDPVHMYQLHKAFARAELERTYQEIQELQWEIQNTSHLAVDGDRAAAWPVGIPAPSRPASRFEVLRWDYFTEQHAFSCADGSPRCPLRGADRADVADVLGTALEELNRRYHPALRLQKQQLVNGYRRFDPARGMEYTLDLQLEALTPQGGRRPLTRRVQLLRPLSRVEILPVPYVTEASRLTVLLPLAAAERDLAPGFLEAFATAALEPGDAAAALTLLLLYEPRQAQRVAHADVFAPVKAHVAELERRFPGARVPWLSVQTAAPSPLRLMDLLSKKHPLDTLFLLAGPDTVLTPDFLNRCRMHAISGWQAFFPMHFQAFHPAVAPPQGPGPPELGRDTGRFDRQAASEACFYNSDYVAARGRLAAASEQEEELLESLDVYELFLHFSSLHVLRAVEPALLQRYRAQTCSARLSEDLYHRCLQSVLEGLGSRTQLAMLLFEQEQGNST

SEQ ID NO: 869045 - protein, 510 aa, Homo sapiens
MPLVFIDATGVYLMPLVFIDATGVGCTGDHEGVHYSHLELSPGEPVQEGDPHFRSALTAHPVRDPVHMYQLHKAFARAELERTYQEIQELQWEIQNTSHLAVDGDRAAAWPVGIPAPSRPASRFEVLRWDYFTEQHAFSCADGSPRCPLRGADRADVADVLGTALEELNRRYHPALRLQKQQLVNGYRRFDPARGMEYTLDLQLEALTPQGGRRPLTRRVQLLRPLSRVEILPVPYVTEASRLTVLLPLAAAERDLAPGFLEAFATAALEPGDAAAALTLLLLYEPRQAQRVAHADVFAPVKAHVAELERRFPGARVPWLSVQTAAPSPLRLMDLLSKKHPLDTLFLLAGPDTVLTPDFLNRCRMHAISGWQAFFPMHFQAFHPAVAPPQGPGPPELGRDTGRFDRQAASEACFYNSDYVAARGRLAAASEQEEELLESLDVYELFLHFSSLHVLRAVEPALLQRYRAQTCSARLSEDLYHRCLQSVLEGLGSRTQLAMLLFEQEQGNST

SEQ ID NO: 869046 - protein, 775 aa, Homo sapiens; identical to SEQ ID NO: 869044

SEQ ID NO: 869047 - protein, 423 aa, Homo sapiens
MPIPERKTTAPRPDRWNGCSAAWPVGIPAPSRPASRFEVLRWDYFTEQHAFSCADGSPRCPLRGADRADVADVLGTALEELNRRYHPALRLQKQQLVNGYRRFDPARGMEYTLDLQLEALTPQGGRRPLTRRVQLLRPLSRVEILPVPYVTEASRLTVLLPLAAAERDLAPGFLEAFATAALEPGDAAAALTLLLLYEPRQAQRVAHADVFAPVKAHVAELERRFPGARVPWLSVQTAAPSPLRLMDLLSKKHPLDTLFLLAGPDTVLTPDFLNRCRMHAISGWQAFFPMHFQAFHPAVAPPQGPGPPELGRDTGRFDRQAASEACFYNSDYVAARGRLAAASEQEEELLESLDVYELFLHFSSLHVLRAVEPALLQRYRAQTCSARLSEDLYHRCLQSVLEGLGSRTQLAMLLFEQEQGNST

SEQ ID NO: 869048 - protein, 775 aa, Homo sapiens; identical to SEQ ID NO: 869044

SEQ ID NO: 869049 - protein, 292 aa, Homo sapiens
AKYEAWVLNRPRILPVPYVTEASRLTVLLPLAAAERDLAPGFLEAFATAALEPGDAAAALTLLLLYEPRQAQRVAHADVFAPVKAHVAELERRFPGARVPWLSVQTAAPSPLRLMDLLSKKHPLDTLFLLAGPDTVLTPDFLNRCRMHAISGWQAFFPMHFQAFHPAVAPPQGPGPPELGRDTGRFDRQAASEACFYNSDYVAARGRLAAASEQEEELLESLDVYELFLHFSSLHVLRAVEPALLQRYRAQTCSARLSEDLYHRCLQSVLEGLGSRTQLAMLLFEQEQGNST

SEQ ID NO: 869050 - protein, 188 aa, Homo sapiens
AGHTVPAGASWRSRSMRHPLDTLFLLAGPDTVLTPDFLNRCRMHAISGWQAFFPMHFQAFHPAVAPPQGPGPPELGRDTGRFDRQAASEACFYNSDYVAARGRLAAASEQEEELLESLDVYELFLHFSSLHVLRAVEPALLQRYRAQTCSARLSEDLYHRCLQSVLEGLGSRTQLAMLLFEQEQGNST

SEQ ID NO: 869051 - protein, 775 aa, Homo sapiens; identical to SEQ ID NO: 869044

SEQ ID NO: 869052 - protein, 775 aa, Homo sapiens; identical to SEQ ID NO: 869044

SEQ ID NO: 869053 - protein, 543 aa, Homo sapiens
LVKWACVLSQSCPRAKIITNINAYYVQGSLIFSNPCNNPENNYFHWHNGRQCQLITDPFPSSPQGVHYSHLELSPGEPVQEGDPHFRSALTAHPVRDPVHMYQLHKAFARAELERTYQEIQELQWEIQNTSHLAVDGDRAAAWPVGIPAPSRPASRFEVLRWDYFTEQHAFSCADGSPRCPLRGADRADVADVLGTALEELNRRYHPALRLQKQQLVNGYRRFDPARGMEYTLDLQLEALTPQGGRRPLTRRVQLLRPLSRVEILPVPYVTEASRLTVLLPLAAAERDLAPGFLEAFATAALEPGDAAAALTLLLLYEPRQAQRVAHADVFAPVKAHVAELERRFPGARVPWLSVQTAAPSPLRLMDLLSKKHPLDTLFLLAGPDTVLTPDFLNRCRMHAISGWQAFFPMHFQAFHPAVAPPQGPGPPELGRDTGRFDRQAASEACFYNSDYVAARGRLAAASEQEEELLESLDVYELFLHFSSLHVLRAVEPALLQRYRAQTCSARLSEDLYHRCLQSVLEGLGSRTQLAMLLFEQEQGNST

SEQ ID NO: 869054 - protein, 775 aa, Homo sapiens; identical to SEQ ID NO: 869044

SEQ ID NO: 869055 - protein, 434 aa, Homo sapiens
LLRVHGTRPEIQELQWEIQNTSHLAVDGDRAAAWPVGIPAPSRPASRFEVLRWDYFTEQHAFSCADGSPRCPLRGADRADVADVLGTALEELNRRYHPALRLQKQQLVNGYRRFDPARGMEYTLDLQLEALTPQGGRRPLTRRVQLLRPLSRVEILPVPYVTEASRLTVLLPLAAAERDLAPGFLEAFATAALEPGDAAAALTLLLLYEPRQAQRVAHADVFAPVKAHVAELERRFPGARVPWLSVQTAAPSPLRLMDLLSKKHPLDTLFLLAGPDTVLTPDFLNRCRMHAISGWQAFFPMHFQAFHPAVAPPQGPGPPELGRDTGRFDRQAASEACFYNSDYVAARGRLAAASEQEEELLESLDVYELFLHFSSLHVLRAVEPALLQRYRAQTCSARLSEDLYHRCLQSVLEGLGSRTQLAMLLFEQEQGNST

SEQ ID NO: 869056 - protein, 775 aa, Homo sapiens; identical to SEQ ID NO: 869044

SEQ ID NO: 869057 - protein, 298 aa, Homo sapiens
MRASLLLSVLRPAGPVAVGISLGFTLSLLSVTWVEEPCGPGPPQPGDSELPPRGNTNAARRPNSVQPGAEREKPGAGEGAGENWEPRVLPYHPAQPGQAAKKAVRTRYISTELGIRQRLLVAVLTSQTTLPTLGVAVNRTLGHRLERVVFLTGARGRRAPPGMAVVTLGEERPIGHLHLALRHLLEQHGDDFDWFFLVPDTTYTEAHGLARLTGHLSLASAAHLYLGRPQDFIGGEPTPGRYCHGGFGVLLSRMLLQQLRPHLEGCRNDIVSARPDEWLGRCILDATGVGCTGDHEVG

SEQ ID NO: 869058 - protein, 801 aa, Homo sapiens
MLQNVTPHNKLPGEGNAGLLGLGPEAAAPGKRIRKPSLLYEGFESPTMASVPALQLTPANPPPPEVSNPKKPGRVTNQLQYLHKVVMKALWKHQFAWPFRQPVDAVKLGLPDYHKIIKQPMDMGTIKRRLENNYYWAASECMQDFNTMFTNCYIYNKPTDDIVLMAQTLEKIFLQKVASMPQEEQELVVTIPKNSHKKGAKLAALQGSVTSAHQVPAVSSVSHTALYTPPPEIPTTVLNIPHPSVISSPLLKSLHSAGPPLLAVTAAPPAQPLAKKKGVKRKADTTTPTPTAILAPGSPASPPGSLEPKAARLPPMRRESGRPIKPPRKDLPDSQQQHQSSKKGKLSEQLKHCNGILKELLSKKHAAYAWPFYKPVDASALGLHDYHDIIKHPMDLSTVKRKMENRDYRDAQEFAADVRLMFSNCYKYNPPDHDVVAMARKLQDVFEFRYAKMPDEPLEPGPLPVSTAMPPGLAKSSSESSSEESSSESSSEEEEEEDEEDEEEEESESSDSEEERAHRLAELQEQLRAVHEQLAALSQGPISKPKRKREKKEKKKKRKAEKHRGRAGADEDDKGPRAPRPPQPKKSKKASGSGGGSAALGPSGFGPSGGSGTKLPKKATKTAPPALPTGYDSEEEEESRPMSYDEKRQLSLDINKLPGEKLGRVVHIIQAREPSLRDSNPEEIEIDFETLKPSTLRELERYVLSCLRKKPRKPYTIKKPVGKTKEELALEKKRELEKRLQDVSGQLNSTKKPPKKANEKTESSSAQQVAVSRLSASSSSSDSSSSSSSSSSSDTSDSDSG

SEQ ID NO: 869059 - protein, 801 aa, Homo sapiens; identical to SEQ ID NO: 869058

SEQ ID NO: 869060 - protein, 801 aa, Homo sapiens; identical to SEQ ID NO: 869058

SEQ ID NO: 869061 - protein, 615 aa, Homo sapiens
MLQNVTPHNKLPGEGNAGLLGLGPEAAAPGKRIRKPSLLYEGFESPTMASVPALQLTPANPPPPEVSNPKKPGRVTNQLQYLHKVVMKALWKHQFAWPFRQPVDAVKLGLPDYHKIIKQPMDMGTIKRRLENNYYWAASECMQDFNTMFTNCYIYNKPTDDIVLMAQTLEKIFLQKVASMPQEEQELVVTIPKNSHKKGAKLAALQGSVTSAHQVPAVSSVSHTALYTPPPEIPTTVLNIPHPSVISSPLLKSLHSAGPPLLAVTAAPPAQPLAKKKGVKRKADTTTPTPTAILAPGSPASPPGSLEPKAARLPPMRRESGRPIKPPRKDLPDSQQQHQSSKKGKLSEQLKHCNGILKELLSKKHAAYAWPFYKPVDASALGLHDYHDIIKHPMDLSTVKRKMENRDYRDAQEFAADVRLMFSNCYKYNPPDHDVVAMARKLQDVFEFRYAKMPDEPLEPGPLPVSTAMPPGLAKSSSESSSEESSSESSSEEEEEEDEEDEEEEESESSDSEEERAHRLAELQEQLRAVHEQLAALSQGPISKPKRKREKKEKKKKRKAEKHRGRAGADEDDKGPRAPRPPQPKKSKKASGSGGGSAALGPSGFGPSGGSGTKL

SEQ ID NO: 869062 - protein, 801 aa, Homo sapiens; identical to SEQ ID NO: 869058

SEQ ID NO: 869063 - protein, 433 aa, Homo sapiens
MGTIKRRLENNYYWAASECMQDFNTMFTNCYIYNKPTDDIVLMAQTLEKIFLQKVASMPQEEQELVVTIPKNSHKKGAKLAALQGSVTSAHQVPAVSSVSHTALYTPPPEIPTTVLNIPHPSVISSPLLKSLHSAGPPLLAVTAAPPAQPLAKKKGVKRKADTTTPTPTAILAPGSPASPPGSLEPKAARLPPMRRESGRPIKPPRKDLPDSQQQHQSSKKGKLSEQLKHCNGILKELLSKKHAAYAWPFYKPVDASALGLHDYHDIIKHPMDLSTVKRKMENRDYRDAQEFAADVRLMFSNCYKYNPPDHDVVAMARKLQDVFEFRYAKMPDEPLEPGPLPVSTAMPPGLAKSSSESSSEESSSESSSEEEEEEDEEDEEEEESESSDSEEERAHRLAELQEQLRAVHEQLAALSQGPISKPKRKREKKSGN

SEQ ID NO: 869064 - protein, 801 aa, Homo sapiens; identical to SEQ ID NO: 869058

SEQ ID NO: 869065 - protein, 801 aa, Homo sapiens; identical to SEQ ID NO: 869058

SEQ ID NO: 869066 - protein, 788 aa, Homo sapiens
MLQNVTPHNKLPGEGNAGLLGLGPEAAAPGKRIRKPSLLYEGFESPTMASVPALQLTPANPPPPEVSNPKKPGRVTNQLQYLHKVVMKALWKHQFAWPFRQPVDAVKLGLPDYHKIIKQPMDMGTIKRRLENNYYWAASECMQDFNTMFTNCYIYNKPTDDIVLMAQTLEKIFLQKVASMPQEEQELVVTIPKNSHKKGAKLAALQGSVTSAHQVPAVSSVSHTALYTPPPEIPTTVLNIPHPSVISSPLLKSLHSAGPPLLAVTAAPPAQPLAKKKGVKRKADTTTPTPTAILAPGSPASPPGSLEPKAARLPPMRRESGRPIKPPRKDLPDSQQQHQSSKKGKLSEQLKHCNGILKELLSKKHAAYAWPFYKPVDASALGLHDYHDIIKHPMDLSTVKRKMENRDYRDAQEFAADVRLMFSNCYKYNPPDHDVVAMARKLQDVFEFRYAKMPDEPLEPGPLPVSTAMPPGLAKSSSESSSEESSSESSSEEEEEEDEEDEEEEESESSDSEEERAHRLAELQEQLRAVHEQLAALSQGPISKPKRKREKKEKKKKRKAEKHRGRAGADEDDKGPRAPRPPQPKKSKKASGSGGGSAALGPSGFGPSGGSGTKLPKKATKTAPPALPTGYDSEEEEESRPMSYDEKRQLSLDINKLPGEKLGRVVHIIQAREPSLRDSNPEEIEIDFETLKPSTLRELERYVLSCLRKKPRKPYTIKKPVGKTKEELALEKKRELEKRLQDVSGQLNSTKKPPKKANEKTESSSAQQVAVSRLSASSSSSDSSSSSS

SEQ ID NO: 869067 - protein, 714 aa, Homo sapiens
MLQNVTPHNKLPGEGNAGLLGLGPEAAAPGKRIRKPSLLYEGFESPTMASVPALQLTPANPPPPEVSNPKKPGRVTNQLQYLHKVVMKALWKHQFAWPFRQPVDAVKLGLPDYHKIIKQPMDMGTIKRRLENNYYWAASECMQDFNTMFTNCYIYNKPTDDIVLMAQTLEKIFLQKVASMPQEEQELVVTIPKNSHKKGAKLAALQGSVTSAHQVPAVSSVSHTALYTPPPEIPTTVLNIPHPSVISSPLLKSLHSAGPPLLAVTAAPPAQPLAKKKGVKRKADTTTPTPTAILAPGSPASPPGSLEPKAARLPPMRRESGRPIKPPRKDLPDSQQQHQSSKKGKLSEQLKHCNGILKELLSKKHAAYAWPFYKPVDASALGLHDYHDIIKHPMDLSTVKRKMENRDYRDAQEFAADVRLMFSNCYKYNPPDHDVVAMARKLQDVFEFRYAKMPDEPLEPGPLPVSTAMPPGLAKSSSESSSEESSSESSSEEEEEEDEEDEEEEESESSDSEEERAHRLAELQEQLRAVHEQLAALSQGPISKPKRKREKKEKKKKRKAEKHRGRAGADEDDKGPRAPRPPQPKKSKKASGSGGGSAALGPSGFGPSGGSGTKLPKKATKTAPPALPTGYDSEEEEESRPMSYDEKRQLSLDINKLPGEKLGRVVHIIQAREPSLRDSNPEEIEIDFETLKPSTLRELERYVLSCLRKKPRLY

SEQ ID NO: 869068 - protein, 801 aa, Homo sapiens; identical to SEQ ID NO: 869058

SEQ ID NO: 869069 - protein, 804 aa, Homo sapiens
MAAPMNGQVCVVTGASRGIGRGIALQLCKAGATVYITGRHLDTLRVVAQEAQSLGGQCVPVVCDSTPEVSNPKKPGRVTNQLQYLHKVVMKALWKHQFAWPFRQPVDAVKLGLPDYHKIIKQPMDMGTIKRRLENNYYWAASECMQDFNTMFTNCYIYNKPTDDIVLMAQTLEKIFLQKVASMPQEEQELVVTIPKNSHKKGAKLAALQGSVTSAHQVPAVSSVSHTALYTPPPEIPTTVLNIPHPSVISSPLLKSLHSAGPPLLAVTAAPPAQPLAKKKGVKRKADTTTPTPTAILAPGSPASPPGSLEPKAARLPPMRRESGRPIKPPRKDLPDSQQQHQSSKKGKLSEQLKHCNGILKELLSKKHAAYAWPFYKPVDASALGLHDYHDIIKHPMDLSTVKRKMENRDYRDAQEFAADVRLMFSNCYKYNPPDHDVVAMARKLQDVFEFRYAKMPDEPLEPGPLPVSTAMPPGLAKSSSESSSEESSSESSSEEEEEEDEEDEEEEESESSDSEEERAHRLAELQEQLRAVHEQLAALSQGPISKPKRKREKKEKKKKRKAEKHRGRAGADEDDKGPRAPRPPQPKKSKKASGSGGGSAALGPSGFGPSGGSGTKLPKKATKTAPPALPTGYDSEEEEESRPMSYDEKRQLSLDINKLPGEKLGRVVHIIQAREPSLRDSNPEEIEIDFETLKPSTLRELERYVLSCLRKKPRKPYTIKKPVGKTKEELALEKKRELEKRLQDVSGQLNSTKKPPKKANEKTESSSAQQVAVSRLSASSSSSDSSSSSSSSSSSDTSDSDSG

SEQ ID NO: 869070 - protein, 754 aa, Homo sapiens
MASVPALQLTPANPPPPEVSNPKKPGRVTNQLQYLHKVVMKALWKHQFAWPFRQPVDAVKLGLPDYHKIIKQPMDMGTIKRRLENNYYWAASECMQDFNTMFTNCYIYNKPTDDIVLMAQTLEKIFLQKVASMPQEEQELVVTIPKNSHKKGAKLAALQGSVTSAHQVPAVSSVSHTALYTPPPEIPTTVLNIPHPSVISSPLLKSLHSAGPPLLAVTAAPPAQPLAKKKGVKRKADTTTPTPTAILAPGSPASPPGSLEPKAARLPPMRRESGRPIKPPRKDLPDSQQQHQSSKKGKLSEQLKHCNGILKELLSKKHAAYAWPFYKPVDASALGLHDYHDIIKHPMDLSTVKRKMENRDYRDAQEFAADVRLMFSNCYKYNPPDHDVVAMARKLQDVFEFRYAKMPDEPLEPGPLPVSTAMPPGLAKSSSESSSEESSSESSSEEEEEEDEEDEEEEESESSDSEEERAHRLAELQEQLRAVHEQLAALSQGPISKPKRKREKKEKKKKRKAEKHRGRAGADEDDKGPRAPRPPQPKKSKKASGSGGGSAALGPSGFGPSGGSGTKLPKKATKTAPPALPTGYDSEEEEESRPMSYDEKRQLSLDINKLPGEKLGRVVHIIQAREPSLRDSNPEEIEIDFETLKPSTLRELERYVLSCLRKKPRKPYTIKKPVGKTKEELALEKKRELEKRLQDVSGQLNSTKKPPKKANEKTESSSAQQVAVSRLSASSSSSDSSSSSSSSSSSDTSDSDSG

SEQ ID NO: 869071 - protein, 754 aa, Homo sapiens; identical to SEQ ID NO: 869070

SEQ ID NO: 869072 - protein, 634 aa, Homo sapiens
  misc_feature (5)..(5): Xaa can be any naturally occurring amino acid
  misc_feature (15)..(15): Xaa can be any naturally occurring amino acid
ENLYXLEFETVGWGXFVLRKILSIIKNNPKKGAQVAALQGSVTSAHQVPAVSSVSHTALYTPPPEIPTTVLNIPHPSVISSPLLKSLHSAGPPLLAVTAAPPAQPLAKKKGVKRKADTTTPTPTAILAPGSPASPPGSLEPKAARLPPMRRESGRPIKPPRKDLPDSQQQHQSSKKGKLSEQLKHCNGILKELLSKKHAAYAWPFYKPVDASALGLHDYHDIIKHPMDLSTVKRKMENRDYRDAQEFAADVRLMFSNCYKYNPPDHDVVAMARKLQDVFEFRYAKMPDEPLEPGPLPVSTAMPPGLAKSSSESSSEESSSESSSEEEEEEDEEDEEEEESESSDSEEERAHRLAELQEQLRAVHEQLAALSQGPISKPKRKREKKEKKKKRKAEKHRGRAGADEDDKGPRAPRPPQPKKSKKASGSGGGSAALGPSGFGPSGGSGTKLPKKATKTAPPALPTGYDSEEEEESRPMSYDEKRQLSLDINKLPGEKLGRVVHIIQAREPSLRDSNPEEIEIDFETLKPSTLRELERYVLSCLRKKPRKPYTIKKPVGKTKEELALEKKRELEKRLQDVSGQLNSTKKPPKKANEKTESSSAQQVAVSRLSASSSSSDSSSSSSSSSSSDTSDSDSG

SEQ ID NO: 869073 - protein, 545 aa, Homo sapiens
HEDLRKVAVLHLLMPALAKKKGVKRKADTTTPTPTAILAPGSPASPPGSLEPKAARLPPMRRESGRPIKPPRKDLPDSQQQHQSSKKGKLSEQLKHCNGILKELLSKKHAAYAWPFYKPVDASALGLHDYHDIIKHPMDLSTVKRKMENRDYRDAQEFAADVRLMFSNCYKYNPPDHDVVAMARKLQDVFEFRYAKMPDEPLEPGPLPVSTAMPPGLAKSSSESSSEESSSESSSEEEEEEDEEDEEEEESESSDSEEERAHRLAELQEQLRAVHEQLAALSQGPISKPKRKREKKEKKKKRKAEKHRGRAGADEDDKGPRAPRPPQPKKSKKASGSGGGSAALGPSGFGPSGGSGTKLPKKATKTAPPALPTGYDSEEEEESRPMSYDEKRQLSLDINKLPGEKLGRVVHIIQAREPSLRDSNPEEIEIDFETLKPSTLRELERYVLSCLRKKPRKPYTIKKPVGKTKEELALEKKRELEKRLQDVSGQLNSTKKPPKKANEKTESSSAQQVAVSRLSASSSSSDSSSSSSSSSSSDTSDSDSG

SEQ ID NO: 869074 - protein, 399 aa, Homo sapiens [sequence omitted]

SEQ ID NO: 869075 - protein, 384 aa, Homo sapiens
LERPPTTTKFAAASTHDVVAMARKLQDVFEFRYAKMPDEPLEPGPLPVSTAMPPGLAKSSSESSSEESSSESSSEEEEEEDEEDEEEEESESSDSEEERAHRLAELQEQLRAVHEQLAALSQGPISKPKRKREKKEKKKKRKAEKHRGRAGADEDDKGPRAPRPPQPKKSKKASGSGGGSAALGPSGFGPSGGSGTKLPKKATKTAPPALPTGYDSEEEEESRPMSYDEKRQLSLDINKLPGEKLGRVVHIIQAREPSLRDSNPEEIEIDFETLKPSTLRELERYVLSCLRKKPRKPYTIKKPVGKTKEELALEKKRELEKRLQDVSGQLNSTKKPPKKANEKTESSSAQQVAVSRLSASSSSSDSSSSSSSSSSSDTSDSDSG

SEQ ID NO: 869076 - protein, 377 aa, Homo sapiens
LSDELRISLGMSVGPNAHKVPPPWLIAKMPDEPLEPGPLPVSTAMPPGLAKSSSESSSEESSSESSSEEEEEEDEEDEEEEESESSDSEEERAHRLAELQEQLRAVHEQLAALSQGPISKPKRKREKKEKKKKRKAEKHRGRAGADEDDKGPRAPRPPQPKKSKKASGSGGGSAALGPSGFGPSGGSGTKLPKKATKTAPPALPTGYDSEEEEESRPMSYDEKRQLSLDINKLPGEKLGRVVHIIQAREPSLRDSNPEEIEIDFETLKPSTLRELERYVLSCLRKKPRKPYTIKKPVGKTKEELALEKKRELEKRLQDVSGQLNSTKKPPKKANEKTESSSAQQVAVSRLSASSSSSDSSSSSSSSSSSDTSDSDSG

SEQ ID NO: 869077 - protein, 256 aa, Homo sapiens
MLLREEKEKKKKRKAEKHRGRAGADEDDKGPRAPRPPQPKKSKKASGSGGGSAALGPSGFGPSGGSGTKLPKKATKTAPPALPTGYDSEEEEESRPMSYDEKRQLSLDINKLPGEKLGRVVHIIQAREPSLRDSNPEEIEIDFETLKPSTLRELERYVLSCLRKKPRKPYTIKKPVGKTKEELALEKKRELEKRLQDVSGQLNSTKKPPKKANEKTESSSAQQVAVSRLSASSSSSDSSSSSSSSSSSDTSDSDSG

SEQ ID NO: 869078 - protein, 220 aa, Homo sapiens
WVDRGLWVDRGLWVDRGLWVDRGFGPSGGSGTKLPKKATKTAPPALPTGYDSEEEEESRPMSYDEKRQLSLDINKLPGEKLGRVVHIIQAREPSLRDSNPEEIEIDFETLKPSTLRELERYVLSCLRKKPRKPYTIKKPVGKTKEELALEKKRELEKRLQDVSGQLNSTKKPPKKANEKTESSSAQQVAVSRLSASSSSSDSSSSSSSSSSSDTSDSDSG

SEQ ID NO: 869079 - protein, 163 aa, Homo sapiens
NGMCWLAADVQEGNLGTLGAHNKMLGAILMYPDKFLSLAIKKPVGKTKEELALEKKRELEKRLQDVSGQLNSTKKPPKKGEYILSCHYRLTPSCLLDCLLLTNEDSDLNVFNFRICSAANEKTESSSAQQVAVSRLSASSSSSDSSSSSSSSSSSDTSDSDSG

SEQ ID NO: 869080 - protein, 55 aa, Homo sapiens
MPDEPLEPGPLPVSTAMPPGLAKSSSESSSEESSSESSSEEEEEEDEEDEEEEES

SEQ ID NO: 869081 - protein, 801 aa, Homo sapiens; identical to SEQ ID NO: 869058

SEQ ID NO: 869082 - protein, 813 aa, Homo sapiens
MLQNVTPHNKLPGEGNAGLLGLGPEAAAPGKRIRKPSLLYEGFESPTMASVPALQLTPANPPPPEVSNPKKPGRVTNQLQYLHKVVMKALWKHQFAWPFRQPVDAVKLGLPDYHKIIKQPMDMGTIKRRLENNYYWAASECMQDFNTMFTNCYIYNKPTDDIVLMAQTLEKIFLQKVASMPQEEQELVVTIPKNSHKKGAKLAALQGSVTSAHQVPAVSSVSHTALYTPPPEIPTTVLNIPHPSVISSPLLKSLHSAGPPLLAVTAAPPAQPLAKKKGVKRKADTTTPTPTAILAPGSPASPPGSLEPKAARLPPMRRESGRPIKPPRKDLPDSQQQHQSSKKGKLSEQLKHCNGILKELLSKKHAAYAWPFYKPVDASALGLHDYHDIIKHPMDLSTVKRKMENRDYRDAQEFAADVRLMFSNCYKYNPPDHDVVAMARKLQDVFEFRYAKMPDEPLEPGPLPVSTAMPPGLAKSSSESSSEESSSESSSEEEEEEDEEDEEEEESESSDSEEERAHRLAELQEQLRAVHEQLAALSQGPISKPKRKREKKEKKKKRKFFFFFFFEMESRFVAQAGVQWRDLSSLQAPPLGFTPFSCLSLLSSWDYRRPPPRPAWDLFYHEYSQPPYNVRLPHIHTYEAGCIAMLLQDSCKSGFVLRESTWACVPLKGPVSIAGVHACSEGMSPCEECSSAWGAERGGRQVLSEPHTFLCKLVNIRRSQCIVPVATEIPSARSSAMISRIFGLKAFAVLGSHVFRSKHKNSSTGKESLAAGAARPLRAADRMAERWPRAQDLALRTPRPGAASAKASALPRA

SEQ ID NO: 869083 - protein, 801 aa, Homo sapiens; identical to SEQ ID NO: 869058

SEQ ID NO: 869084 - protein, 840 aa, Homo sapiens
MLQNVTPHNKLPGEGNAGLLGLGPEAAAPGKRIRKPSLLYEGFESPTMASVPALQLTPANPPPPEVSNPKKPGRVTNQLQYLHKVVMKALWKHQFAWPFRQPVDAVKLGLPDYHKIIKQPMDMGTIKRRLENNYYWAASECMQDFNTMFTNCYIYNKPTDDIVLMAQTLEKIFLQKVASMPQEEQELVVTIPKNSHKKGAKLAALQGSVTSAHQVPAVSSVSHTALYTPPPEIPTTVLNIPHPSVISSPLLKSLHSAGPPLLAVTAAPPAQPLAKKKGVKRKADTTTPTPTAILAPGSPASPPGSLEPKAARLPPMRRESGRPIKPPRKDLPDSQQQHQSSKKGKLSEQLKHCNGILKELLSKKHAAYAWPFYKPVDASALGLHDYHDIIKHPMDLSTVKRKMENRDYRDAQEFAADVRLMFSNCYKYNPPDHDVVAMARKLQDVFEFRYAKMPDEPLEPGPLPVSTAMPPGLAKSSSESSSEESSSESSSEEEEEEDEEDEEEEESESSDSEEERAHRLAELQEQLRAVHEQLAALSQGPISKPKRKREKKEKKKKRKAEKHRGRAGADEDDKGPRAPRPPQPKKSKKASGSGGGSAALGPSGFGPSGGSGTKLPKKATKTAPPALPTGYDSEEEEESRPMSYDEKRQLSLDINKLPGEKLGRVVHIIQAREPSLRDSNPEEIEIDFETLKPSTLRELERYVLSCLRKKPRKPYTIKKPVGKTKEELALEKKRELEKRLQDVSGQLNSTKKPPKKGEYILSCHYRLTPSCLLDCLLLTNEDSDLNVFNFRICSAANEKTESSSAQQVAVSRLSASSSSSDSSSSSSSSSSSDTSDSDSG

SEQ ID NO: 869085 - protein, 679 aa, Homo sapiens
MGTIKRRLENNYYWAASECMQDFNTMFTNCYIYNKPTDDIVLMAQTLEKIFLQKVASMPQEEQELVVTIPKNSHKKGAKLAALQGSVTSAHQVPAVSSVSHTALYTPPPEIPTTVLNIPHPSVISSPLLKSLHSAGPPLLAVTAAPPAQPLAKKKGVKRKADTTTPTPTAILAPGSPASPPGSLEPKAARLPPMRRESGRPIKPPRKDLPDSQQQHQSSKKGKLSEQLKHCNGILKELLSKKHAAYAWPFYKPVDASALGLHDYHDIIKHPMDLSTVKRKMENRDYRDAQEFAADVRLMFSNCYKYNPPDHDVVAMARKLQDVFEFRYAKMPDEPLEPGPLPVSTAMPPGLAKSSSESSSEESSSESSSEEEEEEDEEDEEEEESESSDSEEERAHRLAELQEQLRAVHEQLAALSQGPISKPKRKREKKEKKKKRKAEKHRGRAGADEDDKGPRAPRPPQPKKSKKASGSGGGSAALGPSGFGPSGGSGTKLPKKATKTAPPALPTGYDSEEEEESRPMSYDEKRQLSLDINKLPGEKLGRVVHIIQAREPSLRDSNPEEIEIDFETLKPSTLRELERYVLSCLRKKPRKPYTIKKPVGKTKEELALEKKRELEKRLQDVSGQLNSTKKPPKKANEKTESSSAQQVAVSRLSASSSSSDSSSSSSSSSSSDTSDSDSG

SEQ ID NO: 869086 - protein, 555 aa, Homo sapiens
MLQNVTPHNKLPGEGNAGLLGLGPEAAAPGKRIRKPSLLYEGFESPTMASVPALQLTPANPPPPEVSNPKKPGRVTNQLQYLHKVVMKALWKHQFAWPFRQPVDAVKLGLPDYHKIIKQPMDMGTIKRRLENNYYWAASECMQDFNTMFTNCYIYNKPTDDIVLMAQTLEKIFLQKVASMPQEEQELVVTIPKNSHKKGAKLAALQGSVTSAHQVPAVSSVSHTALYTPPPEIPTTVLNIPHPSVISSPLLKSLHSAGPPLLAVTAAPPAQPLAKKKGVKRKADTTTPTPTAILAPGSPASPPGSLEPKAARLPPMRRESGRPIKPPRKDLPDSQQQHQSSKKGKLSEQLKHCNGILKELLSKKHAAYAWPFYKPVDASALGLHDYHDIIKHPMDLSTVKRKMENRDYRDAQEFAADVRLMFSNCYKYNPPDHDVVAMARKLQDVFEFRYAKMPDEPLEPGPLPVSTAMPPGLAKSSSESSSEESSSESSSEEEEEEDEEDEEEEESESSDSEEERAHRLAELQEQLRAVHEQLAALSQGPISKPKRKREKKSGN

SEQ ID NO: 869087 - protein, 416 aa, Homo sapiens [sequence omitted]

SEQ ID NO: 869088 - protein, 862 aa, Homo sapiens
MLQNVTPHNKLPGEGNAGLLGLGPEAAAPGKRIRKPSLLYEGFESPTMASVPALQLTPANPPPPEVSNPKKPGRVTNQLQYLHKVVMKALWKHQFAWPFRQPVDAVKLGLPDYHKIIKQPMDMGTIKRRLENNYYWAASECMQDFNTMFTNCYIYNKPTDDIVLMAQTLEKIFLQKVASMPQEEQELVVTIPKNSHKKGAKLAALQGSVTSAHQVPAVSSVSHTALYTPPPEIPTTVLNIPHPSVISSPLLKSLHSAGPPLLAVTAAPPAQPLAKKKGVKRKADTTTPTPTAILAPGSPASPPGSLEPKAARLPPMRRESGRPIKPPRKDLPDSQQQHQSSKKGKLSEQLKHCNGILKELLSKKHAAYAWPFYKPVDASALGLHDYHDIIKHPMDLSTVKTEIFLQPTQIPLTSNLNPRAQILKVIPTVLSREGSSCGVWGWQGKVSLPACAASDAGLLLQRKMENRDYRDAQEFAADVRLMFSNCYKYNPPDHDVVAMARKLQDVFEFRYAKMPDEPLEPGPLPVSTAMPPGLAKSSSESSSEESSSESSSEEEEEEDEEDEEEEESESSDSEEERAHRLAELQEQLRAVHEQLAALSQGPISKPKRKREKKEKKKKRKAEKHRGRAGADEDDKGPRAPRPPQPKKSKKASGSGGGSAALGPSGFGPSGGSGTKLPKKATKTAPPALPTGYDSEEEEESRPMSYDEKRQLSLDINKLPGEKLGRVVHIIQAREPSLRDSNPEEIEIDFETLKPSTLRELERYVLSCLRKKPRKPYTIKKPVGKTKEELALEKKRELEKRLQDVSGQLNSTKKPPKKANEKTESSSAQQVAVSRLSASSSSSDSSSSSSSSSSSDTSDSDSG

SEQ ID NO: 869089 - protein, 786 aa, Homo sapiens
MLQNVTPHNKLPGEGNAGLLGLGPEAAAPGKRIRKPSLLYEGFESPTMASVPALQLTPANPPPPEVSNPKKPGRVTNQLQYLHKVVMKALWKHQFAWPFRQPVDAVKLGLPDYHKIIKQPMDMGTIKRRLENNYYWAASECMQDFNTMFTNCYIYNKPTDDIVLMAQTLEKIFLQKVASMPQEEQELVVTIPKNSHKKGAKLAALQGSVTSAHQVPAVSSVSHTALYTPPPEIPTTVLNIPHPSVISSPLLKSLHSAGPPLLAVTAAPPAQPLAKKKGVKRKADTTTPTPTAILAPGSPASPPGSLEPKAARLPPMRRESGRPIKPPRKDLPDSQQQHQSSKKGKLSEQLKHCNGILKELLSKKHAAYAWPFYKPVDASALGLHDYHDIIKHPMDLSTVKRKMENRDYRDAQEFAADVRLMFSNCYKYNPPDHDVVAMARKLQDVFEFRYAKMPDEPLEPGPLPVSTAMPPGLAKSSSESSSEESSSESSSEEEEEEDEEDEEEEESESSDSEEERAHRLAELQEQLRAVHEQLAALSQGPISKPKRKREKKEKKKKRKAEKHRGRAGADEDDKGPRAPRPPQPKKSKKASGSGGGSAALGPSGFGPSGGSGTKLPKKATKTAPPALPTGYDSEEEEESRPMSYDEKRQLSLDINKLPGEKLGRVVHIIQAREPSLRDSNPEEIEIDFETLKPSTLRELERYVLSCLRKKPRKPYTIKKPVGKTKEELALEKKRELEKRLQDVSGQLNSTKKPPKKANEKTESSSAQPFRYLNGCELVGHYVLSCR

SEQ ID NO: 869090 - protein, 722 aa, Homo sapiens
MLQNVTPHNKLPGEGNAGLLGLGPEAAAPGKRIRKPSLLYEGFESPTMASVPALQLTPANPPPPEVSNPKKPGRVTNQLQYLHKVVMKALWKHQFAWPFRQPVDAVKLGLPDYHKIIKQPMDMGTIKRRLENNYYWAASECMQDFNTMFTNCYIYNKPTDDIVLMAQTLEKIFLQKVASMPQEEQELVVTIPKNSHKKGAKLAALQGSVTSAHQVPAVSSVSHTALYTPPPEIPTTVLNIPHPSVISSPLLKSLHSAGPPLLAVTAAPPAQPLAKKKGVKRKADTTTPTPTAILAPGSPASPPGSLEPKAARLPPMRRESGRPIKPPRKDLPDSQQQHQSSKKGKLSEQLKHCNGILKELLSKKHAAYAWPFYKPVDASALGLHDYHDIIKHPMDLSTVKRKMENRDYRDAQEFAADVRLMFSNCYKYNPPDHDVVAMARKLQDVFEFRYAKMPDEPLEPGPLPVSTAMPPGLAKSSSESSSEESSSESSSEEEEEEDEEDEEEEESESSDSEEERAHRLAELQEQLRAVHEQLAALSQGPISKPKRKREKKEKKKKRKAEKHRGRAGADEDDKGPRAPRPPQPKKSKKASGSGGGSAALGPSGFGPSGGSGTKLPKKATKTAPPALPTGYDSEEEEESRPMSYDEKRQLSLDINKLPGEKLGRVVHIIQAREPSLRDSNPEEIEIDFETLKPSTLRELERYGPFSPLFMVTSMFPIVRRPT

SEQ ID NO: 869091 - protein, 616 aa, Homo sapiens
MLQNVTPHNKLPGEGNAGLLGLGPEAAAPGKRIRKPSLLYEGFESPTMASVPALQLTPANPPPPEVSNPKKPGRVTNQLQYLHKVVMKALWKHQFAWPFRQPVDAVKLGLPDYHKIIKQPMDMGTIKRRLENNYYWAASECMQDFNTMFTNCYIYNKPTDDIVLMAQTLEKIFLQKVASMPQEEQELVVTIPKNSHKKGAKLAALQGSVTSAHQVPAVSSVSHTALYTPPPEIPTTVLNIPHPSVISSPLLKSLHSAGPPLLAVTAAPPAQPLAKKKGVKRKADTTTPTPTAILAPGSPASPPGSLEPKAARLPPMRRESGRPIKPPRKDLPDSQQQHQSSKKGKLSEQLKHCNGILKELLSKKHAAYAWPFYKPVDASALGLHDYHDIIKHPMDLSTVKRKMENRDYRDAQEFAADVRLMFSNCYKYNPPDHDVVAMARKLQDVFEFRYAKMPDEPLEPGPLPVSTAMPPGLAKSSSESSSEESSSESSSEEEEEEDEEDEEEEESESSDSEEERAHRLAELQEQLRAVHEQLAALSQGPISKPKRKREKKEKKKKRKAEKHRGRAGADEDDKGPRAPRPPQPKKSKKASGSGGGSAALGPSGFGPSGGSGTKVS

SEQ ID NO: 869092 - protein, 803 aa, Homo sapiens
IRPLGVQQPGARLPGEGNAGLLGLGPEAAAPGKRIRKPSLLYEGFESPTMASVPALQLTPANPPPPEVSNPKKPGRVTNQLQYLHKVVMKALWKHQFAWPFRQPVDAVKLGLPDYHKIIKQPMDMGTIKRRLENNYYWAASECMQDFNTMFTNCYIYNKPTDDIVLMAQTLEKIFLQKVASMPQEEQELVVTIPKNSHKKGAKLAALQGSVTSAHQVPAVSSVSHTALYTPPPEIPTTVLNIPHPSVISSPLLKSLHSAGPPLLAVTAAPPAQPLAKKKGVKRKADTTTPTPTAILAPGSPASPPGSLEPKAARLPPMRRESGRPIKPPRKDLPDSQQQHQSSKKGKLSEQLKHCNGILKELLSKKHAAYAWPFYKPVDASALGLHDYHDIIKHPMDLSTVKRKMENRDYRDAQEFAADVRLMFSNCYKYNPPDHDVVAMARKLQDVFEFRYAKMPDEPLEPGPLPVSTAMPPGLAKSSSESSSEESSSESSSEEEEEEDEEDEEEEESESSDSEEERAHRLAELQEQLRAVHEQLAALSQGPISKPKRKREKKEKKKKRKAEKHRGRAGADEDDKGPRAPRPPQPKKSKKASGSGGGSAALGPSGFGPSGGSGTKLPKKATKTAPPALPTGYDSEEEEESRPMSYDEKRQLSLDINKLPGEKLGRVVHIIQAREPSLRDSNPEEIEIDFETLKPSTLRELERYVLSCLRKKPRKPYTIKKPVGKTKEELALEKKRELEKRLQDVSGQLNSTKKPPKKANEKTESSSAQQVAVSRLSASSSSSDSSSSSSSSSSSDTSDSDSG

SEQ ID NO: 869093 - protein, 573 aa, Homo sapiens
TRGLGHPAHLNIPHPSVISSPLLKSLHSAGPPLLAVTAAPPAQPLAKKKGVKRKADTTTPTPTAILAPGSPASPPGSLEPKAARLPPMRRESGRPIKPPRKDLPDSQQQHQSSKKGKLSEQLKHCNGILKELLSKKHAAYAWPFYKPVDASALGLHDYHDIIKHPMDLSTVKRKMENRDYRDAQEFAADVRLMFSNCYKYNPPDHDVVAMARKLQDVFEFRYAKMPDEPLEPGPLPVSTAMPPGLAKSSSESSSEESSSESSSEEEEEEDEEDEEEEESESSDSEEERAHRLAELQEQLRAVHEQLAALSQGPISKPKRKREKKEKKKKRKAEKHRGRAGADEDDKGPRAPRPPQPKKSKKASGSGGGSAALGPSGFGPSGGSGTKLPKKATKTAPPALPTGYDSEEEEESRPMSYDEKRQLSLDINKLPGEKLGRVVHIIQAREPSLRDSNPEEIEIDFETLKPSTLRELERYVLSCLRKKPRKPYTIKKPVGKTKEELALEKKRELEKRLQDVSGQLNSTKKPPKKANEKTESSSAQQVAVSRLSASSSSSDSSSSSSSSSSSDTSDSDSG

SEQ ID NO: 869094 - protein, 548 aa, Homo sapiens
CVLEILFTLLLLLSSPAQPLAKKKGVKRKADTTTPTPTAILAPGSPASPPGSLEPKAARLPPMRRESGRPIKPPRKDLPDSQQQHQSSKKGKLSEQLKHCNGILKELLSKKHAAYAWPFYKPVDASALGLHDYHDIIKHPMDLSTVKRKMENRDYRDAQEFAADVRLMFSNCYKYNPPDHDVVAMARKLQDVFEFRYAKMPDEPLEPGPLPVSTAMPPGLAKSSSESSSEESSSESSSEEEEEEDEEDEEEEESESSDSEEERAHRLAELQEQLRAVHEQLAALSQGPISKPKRKREKKEKKKKRKAEKHRGRAGADEDDKGPRAPRPPQPKKSKKASGSGGGSAALGPSGFGPSGGSGTKLPKKATKTAPPALPTGYDSEEEEESRPMSYDEKRQLSLDINKLPGEKLGRVVHIIQAREPSLRDSNPEEIEIDFETLKPSTLRELERYVLSCLRKKPRKPYTIKKPVGKTKEELALEKKRELEKRLQDVSGQLNSTKKPPKKANEKTESSSAQQVAVSRLSASSSSSDSSSSSSSSSSSDTSDSDSG

SEQ ID NO: 869095 - protein, 364 aa, Homo sapiens [sequence omitted]

SEQ ID NO: 869096 - protein, 350 aa, Homo sapiens
RLYSTGRLYSTGRLYSTDRLYSTGRLYESSSEESSSESSSEEEEEEDEEDEEEEESESSDSEEERAHRLAELQEQLRAVHEQLAALSQGPISKPKRKREKKEKKKKRKAEKHRGRAGADEDDKGPRAPRPPQPKKSKKASGSGGGSAALGPSGFGPSGGSGTKLPKKATKTAPPALPTGYDSEEEEESRPMSYDEKRQLSLDINKLPGEKLGRVVHIIQAREPSLRDSNPEEIEIDFETLKPSTLRELERYVLSCLRKKPRKPYTIKKPVGKTKEELALEKKRELEKRLQDVSGQLNSTKKPPKKANEKTESSSAQQVAVSRLSASSSSSDSSSSSSSSSSSDTSDSDSG

SEQ ID NO: 869097 - protein, 381 aa, Homo sapiens
MLQNVTPHNKLPGEGNAGLLGLGPEAAAPGKRIRKPSLLYEGFESPTMASVPALQLTPANPPPPEVSNPKKPGRVTNQLQYLHKVVMKALWKHQFAWPFRQPVDAVKLGLPDYHKIIKQPMDMGTIKRRLENNYYWAASECMQDFNTMFTNCYIYNKPTDDIVLMAQTLEKIFLQKVASMPQEEQELVVTIPKNSHKKGAKLAALQGSVTSAHQVPAVSSVSHTALYTPPPEIPTTVLNIPHPSVISSPLLKSLHSAGPPLLAVTAAPPAQPLAKKKGVKRKADTTTPTPTAILAPGSPASPPGSLEPKAARLPPMRRESGRPIKPPRKDLPDSQQQHQSSKKGKLSEQLKHCNGILKELLSKKHAAYAWPCFEIVCSNLF

SEQ ID NO: 869098 - protein, 200 aa, Homo sapiens [sequence omitted]

SEQ ID NO: 869099 - protein, 222 aa, Homo sapiens
MGTIKRRLENNYYWAASECMQDFNTMFTNCYIYNKPTDDIVLMAQTLEKIFLQKVASMPQEEQELVVTIPKNSHKKGAKLAALQGSVTSAHQVPAVSSVSHTALYTPPPEIPTTVLNIPHPSVISSPLLKSLHSAGPPLLAVTAAPPAQPLAKKKGVKRKADTTTPTPTAILAPGSPASPPGSLEPKGQANGVSPPIALKKRELVSPIQGPQGKRTLAFGFL

SEQ ID NO: 869100 - protein, 124 aa, Homo sapiens
NGMCWLAADVQEGNLGTLGAHNKMLGAILMYPDKFLSLAIKKPVGKTKEELALEKKRELEKRLQDVSGQLNSTKKPPKKANEKTESSSAQQVAVSRLSASSSSSDSSSSSSSSSSSDTSDSDSG

SEQ ID NO: 869101 - protein, 417 aa, Homo sapiens
MRSLLLGTLCLLAVALAAEVKKPVEAAAPGTAEKLSSKATTLAEPSTGLAFSLYQAMAKDQAVENILVSPVVVASSLGLVSLGGKATTASQAKAVLSAEQLRDEEVHAGLGELLRSLSNSTARNVTWKLGSRLYGPSSVSFADDFVRSSKQHYNCEHSKINFPDKRSALQSINEWAAQTTDGKLPEVTKDVERTDGALLVNAMFFKPHWDEKFHHKMVDNRGFMVTRSYTVGVTMMHRTGLYNYYDDEKEKLQLVEMPLAHKLSSLIILMPHHVEPLERLEKLLTKEQLKIWMGKMQKKAVAISLPKGVVEVTHDLQKHLAGLGLTEAIDKNKADLSRMSGKKDLYLASVFHATAFELDTDGNPFDQDIYGREELRSPKLFYADHPFIFLVRDTQSGSLLFIGRLVRPKGDKMRDEL

SEQ ID NO: 869102 - protein, 118 aa, Homo sapiens
VTGSEAWVAVVEVTHDLQKHLAGLGLTEAIDKNKADLSRMSGKKDLYLASVFHATAFELDTDGNPFDQDIYGREELRSPKLFYADHPFIFLVRDTQSGSLLFIGRLVRPKGDKMRDEL

SEQ ID NO: 869103 - protein, 118 aa, Homo sapiens; identical to SEQ ID NO: 869102

SEQ ID NO: 869104 - protein, 116 aa, Homo sapiens
MRLCGGYDGLNGRLYYAPPELGRSFNMEVVPFVPWAPLDGMRKFVIRAPPGNTIFCALGNTRFSAQTYLPCWAKYPALGEVQTKWAWLCFSKIINYFVNKYKNRWLAGFGHGAIVC

SEQ ID NO: 869105 - protein, 130 aa, Homo sapiens
THFCFLKGSISQGNYGLVCWGWGLGRGYYMVLYLQQELVSRSRKTSSVLLLKPAPAALLFSWYDFHLLLSLDFSLLGLVLRISLELISSSDFIYLLLRWITSSSSCVGFKRWYHAREHEDDSLQHACPLT

SEQ ID NO: 869106 - protein, 600 aa, Homo sapiens
MQQESERCRVRARRPDMALYVPKARRGAVLLKTGDEEESCGSPNSVVKEKQKESSLSQKEVFKDKPEARRLNINPDRKEHNCREEKKSSTKLRMDTCLQKTNRVCSKRGTTESKEVLSQGQQQGAPNAGVITNAPLQRHFKPKKVECLEVETTDVTGHERILLSQACLEISEAQVPSKPFQNVEFCDFSRHEPDGEAFEDKDLEGRIETDTKVLEILYEFPRVFSSVMKPENMIVPIKLSSDSEIVQQSMQTSDGILNPSSGGITTTSVPGSPDGVFDQTCVDFEVESVGGIANSTGFILDQKDTDSIPATMGHISLSESTNDTVSPVMIRECEKNDSTADELHVKHEPPDTAVLAHETHRDSGFKNVGDITNKACMMDTTGMSCSDHVTVDSPYVVAVRIADETSINTRSFSKFVGMSADATPLHVARSGNDTEDFSNPSACSDIYGESISSHFTESTGKLIESLSDCASSLPIKKIAGSNYNTFLDSELSMLNGTKVLSDSAVGIDLGSTGDTTEALHELRTAEEFKTEEQDDSGSIEFGVSFPDRESSSMETSIEPKATETSHTEGITAIEESWESMFNDDGDCLDPRLLQEALVSG

SEQ ID NO: 869107 - protein, 600 aa, Homo sapiens; identical to SEQ ID NO: 869106

SEQ ID NO: 869108 - protein, 600 aa, Homo sapiens; identical to SEQ ID NO: 869106

SEQ ID NO: 869109 - protein, 600 aa, Homo sapiens; identical to SEQ ID NO: 869106

SEQ ID NO: 869110 - protein, 229 aa, Homo sapiens
MGDKIWLPFPVLLLAALPPVLLPGAAGFTPSLDSDFTFTLPAGQKECFYQPMPLKASLEIEYQVLDGAGLDIDFHLASPEGKTLVFEQRKSDGVHTVETEVGDYMFCFDNTFSTISEKVIFFELILDNMGEQAQEQEDWKKYITGTDILDMKLEDILESINSIKSRLSKSGHIQILLRAFEARDRNIQESNFDRVNFWSMVNLVVMVVVSAIQVYMLKSLFEDKRKSRT

SEQ ID NO: 869111 - protein, 229 aa, Homo sapiens; identical to SEQ ID NO: 869110

SEQ ID NO: 869112 - protein, 162 aa, Homo sapiens
MGDKIWLPFPVLLLAALPPVLLPGAAGFTPSLDSDFTFTLPAGQKECFYQPMPLKASLEIEYQVLDGAGLDIDFHLASPEGKTLVFEQRKSDGVHTVETEVGDYMFCFDNTFSTISEKVIFFELILDNMGEQAQEQEDWKKYITGTDILDMKLEDILVSMVF

SEQ ID NO: 869113 - protein, 229 aa, Homo sapiens; identical to SEQ ID NO: 869110

SEQ ID NO: 869114 - protein, 120 aa, Homo sapiens [sequence omitted]

SEQ ID NO: 869115 - protein, 125 aa, Homo sapiens [sequence omitted]

SEQ ID NO: 869116 - protein, 124 aa, Homo sapiens
RRLAWPLRKDDTQIREASIFLDNMGEQAQEQEDWKKYITGTDILDMKLEDILESINSIKSRLSKSGHIQILLRAFEARDRNIQESNFDRVNFWSMVNLVVMVVVSAIQVYMLKSLFEDKRKSRT

SEQ ID NO: 869117 - protein, 162 aa, Homo sapiens; identical to SEQ ID NO: 869112

SEQ ID NO: 869118 - protein, 193 aa, Homo sapiens
MGDKIWLPFPVLLLAALPPVLLPGAAGFTPSLDSDFTFTLPAGQKECFYQPMPLKASLEIEYQVLDGAGLDIDFHLASPEGKTLVFEQRKSDGVHTVETEVGDYMFCFDNTFSTISEKVIFFELILDNMGEQAQEQEDWKKYITGTDILDMKLEDILDPIIKIASDVQIRLHLGIHQQHQVQTKQKWAHTNSA

SEQ ID NO: 869119 - protein, 253 aa, Homo sapiens
MGDKIWLPFPVLLLAALPPVLLPGAAGFTPSLDSDFTFTLPAGQKECFYQPMPLKASLEIEYQVLDGAGLDIDFHLASPEGKTLVFEQRKSDGVHTCIRSKNGPGTAVHAYNPSTFRGRSVETEVGDYMFCFDNTFSTISEKVIFFELILDNMGEQAQEQEDWKKYITGTDILDMKLEDILESINSIKSRLSKSGHIQILLRAFEARDRNIQESNFDRVNFWSMVNLVVMVVVSAIQVYMLKSLFEDKRKSRT

SEQ ID NO: 869120 - protein, 178 aa, Homo sapiens
MPLKASLEIEYQVLDGAGLDIDFHLASPEGKTLVFEQRKSDGVHTVETEVGDYMFCFDNTFSTISEKVIFFELILDNMGEQAQEQEDWKKYITGTDILDMKLEDILESINSIKSRLSKSGHIQILLRAFEARDRNIQESNFDRVNFWSMVNLVVMVVVSAIQVYMLKSLFEDKRKSRT

SEQ ID NO: 869121 - protein, 125 aa, Homo sapiens [sequence omitted]

SEQ ID NO: 869122 - protein, 105 aa, Homo sapiens
GTRITPDPERWLPMRERSYYRGRKKGKKKDQIGKGTQGATAGASSEVDASKTVSSPPTSPRPGSAATVSASTSNIIPPRHQKPAGAPATKKKQQQKKKKGGKGGW

SEQ ID NO: 869123 - protein, 546 aa, Homo sapiens
CLFPVAVVARAMATCIWLRSCGARRLGSTFPGCRLRPRAGGLVPASGPAPGPAQLRCYAGRLAGLSAALLRTDSFVGGRWLPAAATFPVQDPASGAALGMVADCGVREARAAVRAAYEAFCRWREVSAKERSSLLRKWYNLMIQNKDDLARIITAESGKPLKEAHGEILYSAFFLEWFSEEARRVYGDIIHTPAKDRRALVLKQPIGVAAVITPWNFPSAMITRKVGAALAAGCTVVVKPAEDTPFSALALAELASQAGIPSGVYNVIPCSRKNAKEVGEAICTDPLVSKISFTGSTTTGKILLHHAANSVKRVSMELGGLAPFIVFDSANVDQAVAGAMASKFRNTGQTCVCSNQFLVQRGIHDAFVKAFAEAMKKNLRVGNGFEEGTTQGPLINEKAVEKVEKQVNDAVSKGATVVTGGKRHQLGKNFFEPTLLCNVTQDMLCTHEETFGPLAPVIKFDTEEEAIAIANAADVGLAGYFYSQDPAQIWRVAEQLEVGMVGVNEGLISSVECPFGGVKQSGLGREGSKYGIDEYLELKYVCYGGL

SEQ ID NO: 869124 - protein, 413 aa, Homo sapiens
CLFPVAVVARAMATCIWLRSCGARRLGSTFPGCRLRPRAGGLVPASGPAPGPAQLRCYAGRLAGLSAALLRTDSFVGGRWLPAAATFPVQDPASGAALGMVADCGVREARAAVRAAYEAFCRWREVSAKERSSLLRKWYNLMIQNKDDLARIITAESGKPLKEAHGEILYSAFFLEWFSEEARRVYGDIIHTPAKDRRALVLKQPIGVAAVITPWNFPSAMITRKVGAALAAGCTVVVKPAEDTPFSALALAELASQAGIPSGVYNVIPCSRKNAKEVGEAICTDPLVSKISFTGSTTTGKILLHHAANSVKRVSMELGGLAPFIVFDSANVDQAVAGAMASKFRNTGQTCVCSNQFLVQRGIHDAFVKAFAEAMKKNLRVGNGFEEGTTQGPLINEKAVEKVRYRGGGYSNR

SEQ ID NO: 869125 - protein, 211 aa, Homo sapiens
LLTDCVGLFLSPVQTCVCSNQFLVQRGIHDAFVKAFAEAMKKNLRVGNGFEEGTTQGPLINEKAVEKVEKQVNDAVSKGATVVTGGKRHQLGKNFFEPTLLCNVTQDMLCTHEETFGPLAPVIKFDTEEEAIAIANAADVGLAGYFYSQDPAQIWRVAEQLEVGMVGVNEGLISSVECPFGGVKQSGLGREGSKYGIDEYLELKYVCYGGL

SEQ ID NO: 869126 - protein, 123 aa, Homo sapiens
SDLLLVIIWETNQKKTKLVSFPLPLTFFMTYLNFGRFDTEEEAIAIANAADVGLAGYFYSQDPAQIWRVAEQLEVGMVGVNEGLISSVECPFGGVKQSGLGREGSKYGIDEYLELKYVCYGGL

SEQ ID NO: 869127 - protein, 143 aa, Homo sapiens [sequence omitted]

SEQ ID NO: 869128 - protein, 546 aa, Homo sapiens; identical to SEQ ID NO: 869123

SEQ ID NO: 869129 - protein, 559 aa, Homo sapiens
CLFPVAVVARAMATCIWLRSCGARRLGSTFPGCRLRPRAGGLVPASGPAPGPAQLRCYAGRLAGLSAALLRTDSFVGGRWLPAAATFPVQDPASGAALGMVADCGVREARAAVRAAYEAFCRWREVSAKERSSLLRKWYNLMIQNKDDLARIITAESGKPLKEAHGEILYSAFFLEWFSEEARRVYGDIIHTPAKDRRALVLKQPIGVAAVITPWNFPSAMITRKVGAALAAGCTVVVKPAEDTPFSALALAEVNQGFLLDLDPLLLASQAGIPSGVYNVIPCSRKNAKEVGEAICTDPLVSKISFTGSTTTGKILLHHAANSVKRVSMELGGLAPFIVFDSANVDQAVAGAMASKFRNTGQTCVCSNQFLVQRGIHDAFVKAFAEAMKKNLRVGNGFEEGTTQGPLINEKAVEKVEKQVNDAVSKGATVVTGGKRHQLGKNFFEPTLLCNVTQDMLCTHEETFGPLAPVIKFDTEEEAIAIANAADVGLAGYFYSQDPAQIWRVAEQLEVGMVGVNEGLISSVECPFGGVKQSGLGREGSKYGIDEYLELKYVCYGGL

SEQ ID NO: 869130 - protein, 120 aa, Homo sapiens
SKKALTKSLGLLRTCTRLPNSRLQRRLLDPGQAASTQRGTVAAAAPAGWRADTSRRKATRLPWWESMGDVAFLPGEKVSLQSLETRWREAPLPGTRRLLLRPGSARRLPGVPRALFPTRC

SEQ ID NO: 869131 - protein, 262 aa, Homo sapiens
MNLLPCNPHGNGLLYAGFNQDHGCFACGMENGFRVYNTDPLKEKEKQEFLEGGVGHVEMLFRCNYLALVGGGKKPKYPPNKVMIWDDLKKKTVIEIEFSTEVKAVKLRRDRIVVVLDSMIKVFTFTHNPHQLHVFETCYNPKGLCVLCPNSNNSLLAFPGTHTGHVQLVDLASTEKPPVDIPAHEGVLSCIALNLQGTRIATASEKGTLIRIFDTSSGHLIQELRRGSQAANIYWLQLPSGCVPHLGIQGTGIFIGENGIFI

SEQ ID NO: 869132 - protein, 344 aa, Homo sapiens
MNLLPCNPHGNGLLYAGFNQDHGCFACGMENGFRVYNTDPLKEKEKQEFLEGGVGHVEMLFRCNYLALVGGGKKPKYPPNKVMIWDDLKKKTVIEIEFSTEVKAVKLRRDRIVVVLDSMIKVFTFTHNPHQLHVFETCYNPKGLCVLCPNSNNSLLAFPGTHTGHVQLVDLASTEKPPVDIPAHEGVLSCIALNLQGTRIATASEKGTLIRIFDTSSGHLIQELRRGSQAANIYCINFNQDASLICVSSDHGTVHIFAAEDPKRNKQSSLASASFLPKYFSSKWSFSKFQVPSGSPCICAFGTEPNAVIAICADGSYYKFLFNPKGECIRDVYAQFLEMTDDKL

SEQ ID NO: 869133 - protein, 379 aa, Homo sapiens
MNLLPCNPHGNGLLYAGFNQDHDALRVGWKMDSGAMNLLPCNPHGNGLLYAGFNQDHGCFACGMENGFRVYNTDPLKEKEKQEFLEGGVGHVEMLFRCNYLALVGGGKKPKYPPNKVMIWDDLKKKTVIEIEFSTEVKAVKLRRDRIVVVLDSMIKVFTFTHNPHQLHVFETCYNPKGLCVLCPNSNNSLLAFPGTHTGHVQLVDLASTEKPPVDIPAHEGVLSCIALNLQGTRIATASEKGTLIRIFDTSSGHLIQELRRGSQAANIYCINFNQDASLICVSSDHGTVHIFAAEDPKRNKQSSLASASFLPKYFSSKWSFSKFQVPSGSPCICAFGTEPNAVIAICADGSYYKFLFNPKGECIRDVYAQFLEMTDDKL

SEQ ID NO: 869134 - protein, 344 aa, Homo sapiens; identical to SEQ ID NO: 869132

SEQ ID NO: 869135 - protein, 377 aa, Homo sapiens
MNLLPCNPHGNGLLYAGFNQDHGCFACGMENGFRVYNTDPLKEKEKQEFLEGGVGHVEMLFRCNYLALVGGGKKPKYPPNKGTEKMKWEEIIGRKNSGRQGLRSWPLSGSVISQVMIWDDLKKKTVIEIEFSTEVKAVKLRRDRIVVVLDSMIKVFTFTHNPHQLHVFETCYNPKGLCVLCPNSNNSLLAFPGTHTGHVQLVDLASTEKPPVDIPAHEGVLSCIALNLQGTRIATASEKGTLIRIFDTSSGHLIQELRRGSQAANIYCINFNQDASLICVSSDHGTVHIFAAEDPKRNKQSSLASASFLPKYFSSKWSFSKFQVPSGSPCICAFGTEPNAVIAICADGSYYKFLFNPKGECIRDVYAQFLEMTDDKL

SEQ ID NO: 869136 - protein, 226 aa, Homo sapiens
MIKVFTFTHNPHQLHVFETCYNPKGLCVLCPNSNNSLLAFPGTHTGHVQLVDLASTEKPPVDIPAHEGVLSCIALNLQGTRIATASEKGTLIRIFDTSSGHLIQELRRGSQAANIYCINFNQDASLICVSSDHGTVHIFAAEDPKRNKQSSLASASFLPKYFSSKWSFSKFQVPSGSPCICAFGTEPNAVIAICADGSYYKFLFNPKGECIRDVYAQFLEMTDDKL

SEQ ID NO: 869137 - protein, 344 aa, Homo sapiens; identical to SEQ ID NO: 869132

SEQ ID NO: 869138 - protein, 344 aa, Homo sapiens; identical to SEQ ID NO: 869132

SEQ ID NO: 869139 - protein, 344 aa, Homo sapiens; identical to SEQ ID NO: 869132

SEQ ID NO: 869140 - protein, 344 aa, Homo sapiens; identical to SEQ ID NO: 869132

SEQ ID NO: 869141 - protein, 238 aa, Homo sapiens
MNLLPCNPHGNGLLYAGFNQDHGCFACGMENGFRVYNTDPLKEKEKQEFLEGGVGHVEMLFRCNYLALVGGGKKPKYPPNKVMIWDDLKKKTVIEIEFSTEVKAVKLRRDRIVVVLDSMIKVFTFTHNPHQLHVFETCYNPKGLCVLCPNSNNSLLAFPGTHTGHVQLVDLASTEKPPVDIPAHEGVLSCIALNLQGTRIATASEKGTLIRIFDTSSGTLVSKPYVVVCFPKDSHFQY

SEQ ID NO: 869142 - protein, 287 aa, Homo sapiens
MNLLPCNPHGNGLLYAGFNQDHGCFACGMENGFRVYNTDPLKEKEKQEFLEGGVGHVEMLFRCNYLALVGGGKKPKYPPNKVMIWDDLKKKTVIEIEFSTEVKAVKLRRDRIVVVLDSMIKVFTFTHNPHQLHVFETCYNPKGLCVLCPNSNNSLLAFPGTHTGHVQLVDLASTEKPPVDIPAHEGVLSCIALNLQGTRIATASEKGTLIRIFDTSSGHLIQELRRGSQAANIYWHSTFNQGWRSSIWGNPGDHGTSGIFLARRRSQKALTRPVGAQPGSFQILSGP

SEQ ID NO: 869143 - protein, 287 aa, Homo sapiens; identical to SEQ ID NO: 869142

SEQ ID NO: 869144 - protein, 344 aa, Homo sapiens; identical to SEQ ID NO: 869132

SEQ ID NO: 869145 - protein, 208 aa, Homo sapiens
MNLLPCNPHGNGLLYAGFNQDHGCFACGMENGFRVYNTDPLKEKEKQEFLEGGVGHVEMLFRCNYLALVGGGKKPKYPPNKVMIWDDLKKKTVIEIEFSTEVKAVKLRRDRIVVVLDSMIKVFTFTHNPHQLHVFETCYNPKGLCVLCPNSNNSLLAFPGTHTGHVQLVDLASTEKPPVDIPAHEGVLSCIALNLQGTRIATASEKGI

SEQ ID NO: 869146 - protein, 344 aa, Homo sapiens; identical to SEQ ID NO: 869132

SEQ ID NO: 869147 - protein, 174 aa, Homo sapiens
MNLLPCNPHGNGLLYAGFNQDHGCFACGMENGFRVYNTDPLKEKEKQVMIWDDLKKKTVIEIEFSTEVKAVKLRRDRIVVVLDSMIKVFTFTHNPHQLHVFETCYNPKGLCVLCPNSNNSLLAFPGTHTGHVQLVDLASTEKPPVDIPAHEGVLSCIALNLQGTRIATASEKGI

SEQ ID NO: 869148 - protein, 186 aa, Homo sapiens
RLCSSSGHAHGPCHCDHRAPDDIPAHEGVLSCIALNLQGTRIATASEKGTLIRIFDTSSGHLIQELRRGSQAANIYCINFNQDASLICVSSDHGTVHIFAAEDPKRNKQSSLASASFLPKYFSSKWSFSKFQVPSGSPCICAFGTEPNAVIAICADGSYYKFLFNPKGECIRDVYAQFLEMTDDKL

SEQ ID NO: 869149 - protein, 344 aa, Homo sapiens; identical to SEQ ID NO: 869132

SEQ ID NO: 869150 - protein, 344 aa, Homo sapiens; identical to SEQ ID NO: 869132

SEQ ID NO: 869151 - protein, 114 aa, Homo sapiens
MNLLPCNPHGNGLLYAGFNQDHGCFACGMENGFRVYNTDPLKEKEKQEFLEGGVGHVEMLFRCNYLALVGGGKKPKYPPNKVMIWDDLKKKVAQKKKISQKYLKKQKLMALFVL

SEQ ID NO: 869152 - protein, 89 aa, Homo sapiens
APPLISFPMQLLEHSPRIHQHSPVPTLAQPGMNLLFATHGLLGAGVGGCLPTLCRRVFSPSGRAENGGIDWSRQCSCQSTERHGWGRAW

SEQ ID NO: 869153 - protein, 128 aa, Homo sapiens
MGNILTCCINSHCGWPRGKDAPCYESDTDIYETVAAATSESTTVEPGKLDVGATEGQDLQHISNQKMPTGKKATGAVYPLAHLWPPPPPSLTLIPRDILSFQLPPVHSQLSQVWAWGTKADSASCLCR

SEQ ID NO: 869154 - protein, 166 aa, Homo sapiens
MGNILTCCINSHCGWPRGKDAPCYESDTDIYETVAAATSESTTVEPGKLDVGATEGQDLQHISNQKMPTGPPEDRLSLKFLPSSEEDNDDAKIFLCVLPGSSEDNLSLVCLPRSEDDDCDDDDDDDAQILPSRVQGGCYRFDSSSCLLRTTELVCLPRSEDDDCDD

SEQ ID NO: 869155 - protein, 118 aa, Homo sapiens
MSAPAQPPAEGTEGTAPGGGPPGPPPNMTSNRRLQQTQAQVEEVVDIIRVNVDKVLERDQKLSELDDRADALQAGASQFESSAAKLKRKYWWKNCKMMIMLGAICAIIVVVIVIYFFT

SEQ ID NO: 869156 - protein, 117 aa, Homo sapiens
MSAPAQPPAEGTEGTAPGGGPPGPPPNMTSNRRLQQTQAQVEEVVDIIRVNVDKVLERDQKLSELDDRADALQAGASQFESSAAKLKRKYWWKNCKMMIMLGAICAIIVVVIVSKYR

SEQ ID NO: 869157 - protein, 117 aa, Homo sapiens; identical to SEQ ID NO: 869156

SEQ ID NO: 869158 - protein, 116 aa, Homo sapiens
MSAPAQPPAEGTEGTAPGGGPPGPPPNMTSNRRLQQTQAQVEEVVDIIRVNVDKVLERDQKLSELDDRADALQAGASQFESSAAKLKRKYWWKNCKMMIMLGAICAIIVVVIVRRD

SEQ ID NO: 869159 - protein, 189 aa, Homo sapiens
  misc_feature (6)..(6): Xaa can be any naturally occurring amino acid
LWAQIXPVCSPVCSVKAEWVRWGGRVSPEHPASRLQEYETSVFTLLVPQFYNCKIGHYLEYWDILCVSNSSAARPRGSRREAELGSSVHFSRSVPRRVSRRSLRRGTDPHSLCQKNVVDIIRVNVDKVLERDQKLSELDDRADALQAGASQFESSAAKLKRKYWWKNCKMMIMLGAICAIIVVVIVRRD

SEQ ID NO: 869160 - protein, 286 aa, Homo sapiens
MNPASDGGTSESIFDLDYASWGIRSTLMVAGFVFYLGVFVVCHQLSSSLNATYRSLVAREKVFWDLAATRAVFGVQSTAAGLWALLGDPVLHADKARGQQNWCWFHITTATGFFCFENVAVHLSNLIFRTFDLFLVIHHLFAFLGFLGCLVNLQAGHYLAMTTLLLEMSTPFTCVSWMLLKAGWSESLFWKLNQWLMIHMFHCRMVLTYHMWWVCFWHWDGLVSSLYLPHLTLFLVGLALLTLIINPYWTHKKTQQLLNPVDWNFAQPEAKSRPEGNGQLLRKKRP

SEQ ID NO: 869161 - protein, 286 aa, Homo sapiens; identical to SEQ ID NO: 869160

SEQ ID NO: 869162 - protein, 286 aa, Homo sapiens; identical to SEQ ID NO: 869160

SEQ ID NO: 869163 - protein, 211 aa, Homo sapiens
ASCTQLAVFQFSLCGRYFHKSADFWDAGQGCDFPGFLWSEISVEWRGVCWRKRPWPVLRIAYSSHLETPDFRSHSAVAENKVLERKAEALTHIDALNINTTSMSQVAGWSESLFWKLNQWLMIHMFHCRMVLTYHMWWVCFWHWDGLVSSLYLPHLTLFLVGLALLTLIINPYWTHKKTQQLLNPVDWNFAQPEAKSRPEGNGQLLRKKRP

SEQ ID NO: 869164 - protein, 128 aa, Homo sapiens
LQETGSLERKNKHNNITPAFGVEAGWSESLFWKLNQWLMIHMFHCRMVLTYHMWWVCFWHWDGLVSSLYLPHLTLFLVGLALLTLIINPYWTHKKTQQLLNPVDWNFAQPEAKSRPEGNGQLLRKKRP

SEQ ID NO: 869165 - protein, 286 aa, Homo sapiens; identical to SEQ ID NO: 869160

SEQ ID NO: 869166 - protein, 286 aa, Homo sapiens; identical to SEQ ID NO: 869160

SEQ ID NO: 869167 - protein, 342 aa, Homo sapiens
LFQGHWTLRPAQSKMCHQQLVISWFSLVFLASPLVAIWELKKDVYVVELDWYPDAPGEMVVLTCDTPEEDGITWTLDQSSEVLGSGKTLTIQVKEFGDAGQYTCHKGGEVLSHSLLLLHKKEDGIWSTDILKDQKEPKNKTFLRCEAKNYSGRFTCWWLTTISTDLTFSVKSSRGSSDPQGVTCGAATLSAERVRGDNKEYEYSVECQEDSACPAAEESLPIEVMVDAVHKLKYENYTSSFFIRDIIKPDPPKNLQLKPLKNSRQVEVSWEYPDTWSTPHSYFSLTFCVQVQGKSKREKKDRVFTDKTSATVICRKNASISVRAQDRYYSSSWSEWASVPCS

SEQ ID NO: 869168 - protein, 502 aa, Homo sapiens [sequence omitted]

SEQ ID NO: 869169 - protein, 105 aa, Homo sapiens
MLHFKLELPLQSTEHVLGVQLILTFSYRLHRMATLVMQSMAFLQSSFPVPGSQLYVNGDLRLQQKQPLSCGGLDARYNVRALLIVQLLCFCVLLFVEFFEEGDKK

SEQ ID NO: 869170 - protein, 502 aa, Homo sapiens [sequence omitted]

SEQ ID NO: 869171 - protein, 502 aa, Homo sapiens [sequence omitted]

SEQ ID NO: 869172 - protein, 728 aa, Homo sapiens
MWTADEIAQLCYEHYGIRLPKKGKPEPNHEWTLLAAVVKIQSPADKACDTPDKPVQVTKEVVSMGTGTKCIGQSKMRKNGDILNDSHAEVIARRSFQRYLLHQLQLAATLKEDSIFVPGTQKGVWKLRRDLIFVFFSSHTPCGDASIIPMLEFEDQPCCPVFRNWANNSSVEASSNLEAPGNERKCEDPDSPVTKKMRLEPGTAAREVTNGAAHHQSFGKQKSGPISPGIHSCDLTVEGLATVTRIAPGSAKVIDVYRTGAKCVPGEAGDSGKPGAAFHQVGLLRVKPGRGDRTRSMSCSDKMARWNVLGCQGALLMHLLEEPIYLSAVVIGKCPYSQEAMQRALIGRCQNVSALPKGFGVQELKILQSDLLFEQSRSAVQAKRADSPGRLVPCGAAISWSAVPEQPLDVTANGFPQGTTKKTIGSLQARSQISKVELFRSFQKLLSRMQGTSGHTPSGFWLKRSSYEEQPTVRFQHQVLLVALLGPESDGFLAWSTFPAFNRLQGDRLRVPLVSTREEDRNQDGKTDMLHFKLELPLQSTEHVLGVQLILTFSYRLHRMATLVMQSMAFLQSSFPVPGSQLYVNGDLRLQQKQPLSCGGLDARYNISVINGTSPFAYDYDLTHIVAAYQERNVTTVLNDPNPIWLVGRAADAPFVINAIIRYPVEVISYQPGFWEMVKFAWVQYVSILLIFLWVFERIKIFVFQNQVVTTIPVTVTPRGDLCKEHLS

SEQ ID NO: 869173 - protein, 336 aa, Homo sapiens
GNQEKPNLVPRLAECLRAVLMALYELFSHPVERSYRAGLCSKAALFLLLAAALTYIPPLLVAFRSHGFWLKRSSYEEQPTVRFQHQVLLVALLGPESDGFLAWSTFPAFNRLQGDRLRVPLVSTREEDRNQDGKTDMLHFKLELPLQSTEHVLGVQLILTFSYRLHRMATLVMQSMAFLQSSFPVPGSQLYVNGDLRLQQKQPLSCGGLDARYNISVINGTSPFAYDYDLTHIVAAYQERNVTTVLNDPNPIWLVGRAADAPFVINAIIRYPVEVISYQPGFWEMVKFAWVQYVSILLIFLWVFERIKIFVFQNQVVTTIPVTVTPRGDLCKEHLS

SEQ ID NO: 869174 - protein, 200 aa, Homo sapiens
MLHFKLELPLQSTEHVLGVQLILTFSYRLHRMATLVMQSMAFLQSSFPVPGSQLYVNGDLRLQQKQPLSCGGLDARYNISVINGTSPFAYDYDLTHIVAAYQERNVTTVLNDPNPIWLVGRAADAPFVINAIIRYPVEVISYQPGFWEMVKFAWVQYVSILLIFLWVFERIKIFVFQNQVVTTIPVTVTPRGDLCKEHLS

SEQ ID NO: 869175 - protein, 158 aa, Homo sapiens
GNQEKPNLVPRLAECLRAVLMALYELFSHPVERSYRAGLCSKAALFLLLAAALTYIPPLLVAFRSHGEPAPAAVPRGSPGALGQAGLPNRLPTALFNSGFWLKRSSYEEQPTVRFQHQVLLVALLGPESDGFLAWSTFPAFNRLQGDRLRVPLVSWRR

SEQ ID NO: 869176 - protein, 558 aa, Homo sapiens
MWTADEIAQLCYEHYGIRLPKKGKPEPNHEWTLLAAVVKIQSPADKACDTPDKPVQVTKEVVSMGTGTKCIGQSKMRKNGDILNDSHAEVIARRSFQRYLLHQLQLAATLKEDSIFVPGTQKGVWKLRRDLIFVFFSSHTPCGDASIIPMLEFEDQPCCPVFRNWANNSSVEASSNLEAPGNERKCEDPDSPVTKKMRLEPGTAAREVTNGAAHHQSFGKQKSGPISPGIHSCDLTVEGLATVTRIAPGSAKVIDVYRTGAKCVPGEAGDSGKPGAAFHQVGLLRVKPGRGDRTRSMSCSDKMARWNVLGCQGALLMHLLEEPIYLSAVVIGKCPYSQEAMQRALIGRCQNVSALPKGFGVQELKILQSDLLFEQSRSAVQAKRADSPGRLVPCGAAISWSAVPEQPLDVTANGFPQGTTKKTIGSLQARSQISKVELFRSFQKLLSRIARDKWPHSLRVLAEAEQLRGAADRALPTPGAARGPARTRKRRVPRLEHVPRLQPAARGSPARPARFVGEIMPLSFVYSRTVGSLCMYRSDVDSSPDSLVTRAAGPVWVS

SEQ ID NO: 869177 - protein, 728 aa, Homo sapiens; identical to SEQ ID NO: 869172

SEQ ID NO: 869178 - protein, 126 aa, Homo sapiens
GNQEKPNLVPRLAECLRAVLMALYELFSHPVERSYRAGLCSKAALFLLLAAALTYIPPLLVAFRSHGFWLKRSSYEEQPTVRFQHQVLLVALLGPESDGFLAWSTFPAFNRLQGDRLRVPLVSWRR

SEQ ID NO: 869179 - protein, 105 aa, Homo sapiens; identical to SEQ ID NO: 869169

SEQ ID NO: 869180 - protein, 259 aa, Homo sapiens
GNQEKPNLVPRLAECLRAVLMALYELFSHPVERSYRAGLCSKAALFLLLAAALTYIPPLLVAFRSHGFWLKRSSYEEQPTVRFQHQVLLVALLGPESDGFLAWSTFPAFNRLQGDRLRVPLVSTREEDRNQDGKTDMLHFKLELPLQSTEHVLGVQLILTFSYRLHRMATLVMQSMAFLQSSFPVPGSQLYVNGDLRLQQKQPLSCGGLDARYNISVINGTSPFAYDYDLTHIVAAYQERNGESQVEPIQPLLRTFKVD

SEQ ID NO: 869181 - protein, 502 aa, Homo sapiens [sequence omitted]

SEQ ID NO: 869182 - protein, 521 aa, Homo sapiens
MWTADEIAQLCYEHYGIRLPKKGKPEPNHEWTLLAAVVKIQSPADKACDTPDKPVQVTKEVVSMGTGTKCIGQSKMRKNGTRPSPASICLHLVSIFAAGDILNDSHAEVIARRSFQRYLLHQLQLAATLKEDSIFVPGTQKGVWKLRRDLIFVFFSSHTPCGDASIIPMLEFEDQPCCPVFRNWANNSSVEASSNLEAPGNERKCEDPDSPVTKKMRLEPGTAAREVTNGAAHHQSFGKQKSGPISPGIHSCDLTVEGLATVTRIAPGSAKVIDVYRTGAKCVPGEAGDSGKPGAAFHQVGLLRVKPGRGDRTRSMSCSDKMARWNVLGCQGALLMHLLEEPIYLSAVVIGKCPYSQEAMQRALIGRCQNVSALPKGFGVQELKILQSDLLFEQSRSAVQAKRADSPGRLVPCGAAISWSAVPEQPLDVTANGFPQGTTKKTIGSLQARSQISKVELFRSFQKLLSRIARDKWPHSLRVQKLDTYQEYKEAASSYQEAWSTLRKQVFGSWIRNPPDYHQFK

SEQ ID NO: 869183 - protein, 728 aa, Homo sapiens; identical to SEQ ID NO: 869172

SEQ ID NO: 869184 - protein, 200 aa, Homo sapiens; identical to SEQ ID NO: 869174

SEQ ID NO: 869185 - protein, 483 aa, Homo sapiens
HSVRRGTRPDVYRTGAKCVPGEAGDSGKPGAAFHQVGLLRVKPGRGDRTRSMSCSDKMARWNVLGCQGALLMHLLEEPIYLSAVVIGKCPYSQEAMQRALIGRCQNVSALPKGFGVQELKILQSDLLFEQSRSAVQAKRADSPGRLVPCGAAISWSAVPEQPLDVTANGFPQGTTKKTIGSLQARSQISKVELFRSFQKLLSRIARDKWPHSLRFWLKRSSYEEQPTVRFQHQVLLVALLGPESDGFLAWSTFPAFNRLQGDRLRVPLVSTREEDRNQDGKTDMLHFKLELPLQSTEHVLGVQLILTFSYRLHRMATLVMQSMAFLQSSFPVPGSQLYVNGDLRLQQKQPLSCGGLDARYNISVINGTSPFAYDYDLTHIVAAYQERNVTTVLNDPNPIWLVGRAADAPFVINAIIRYPVEVISYQPGFWEMVKFAWVQYVSILLIFLWVFERIKIFVFQNQVVTTIPVTVTPRGDLCKEHLS

SEQ ID NO: 869186 - protein, 677 aa, Homo sapiens
MWTADEIAQLCYEHYGIRLPKKGKPEPNHEWTLLAAVVKIQSPADKACDTPDKPVQVTKEVVSMGTGTKCIGQSKMRKNGDILNDSHAEVIARRSFQRYLLHQLQLAATLKEDSIFVPGTQKGVWKLRRDLIFVFFSSHTPCGDASIIPMLEFEDQPCCPVFRNWANNSSVEASSNLEAPGNERKCEDPDSPVTKKMRLEPGTAAREVTNGAAHHQSFGKQKSGPISPGIHSCDLTVEGLATVTRIAPGSAKVIDVYRTGAKCVPGEAGDSGKPGAAFHQVGLLRVKPGRGDRTRSMSCSDKMARWNVLGCQGALLMHLLEEPIYLSAVVIGKCPYSQEAMQRALIGRCQNVSALPKGFGVQELKILQSDLLFEQSRSAVQAKRADSPGRLVPCGAAISWSAVPEQPLDVTANGFPQGTTKKTIGSLQARSQISKVELFRSFQKLLSRIARDKWPHSLRVLAEAEQLRGAADRALPTPGAARGPARTRKRRVPRLEHVPRLQPAARGSPARPARFVGEIMPLSFVYSRTVGSLCMYRSDVDSSPDSLVTRAAGPVWVSQTREEDRNQDGKTDMLHFKLELPLQSTEHVLGVQLILTFSYRLHRMATLVMQSMAFLQSSFPVPGSQLYVNGDLRLQQKQPLSCGGLDARYNVRALLIVQLLCFCVLLFVEFFEEGDKK

SEQ ID NO: 869187 - protein, 158 aa, Homo sapiens
GNQEKPNLVPRLAECLRAVLMALYELFSHPVERSYRAGLCSKAALFLLLAAALTYIPPLLVAFRSHGEPAPAAVPRGSPGALGQAGLPNRLPTALFNSGFWLKRSSYEEQPTVRFQHQVLLVALLGPESDGFLAWSTFPAFNRLQGDRLRVPLVSWGR

SEQ ID NO: 869188 - protein, 495 aa, Homo sapiens
MLLLGLLLLLPLLAGARLLWNWWKLRSLHLPPLAPGFLHLLQPDLPIYLLGLTQKFGPIYRLHLGLQDVVVLNSKRTIEEAMVKKWADFAGRPEPLTYKLVSRNYPDLSLGDYSLLWKAHKKLTRSALLLGIRDSMEPVVEQLTQEFCERMRAQPGTPVAIEEEFSLLTCSIICYLTFGDKIKDDNLMPAYYKCIQEVLKTWSHWSIQIVDVIPFLRFFPNPGLRRLKQAIEKRDHIVEMQLRQHKESLVAGQWRDMMDYMLQGVAQPSMEEGSGQLLEGHVHMAAVDLLIGGTETTANTLSWAVVFLLHHPEIQQRLQEELDHELGPGASSSRVPYKDRARLPLLNATIAEVLRLRPVVPLALPHRTTRPSSISGYDIPEGTVIIPNLQGAHLDETVWERPHEFWPDRFLEPGKNSRALAFGCGARVCLGEPLARLELFVVLTRLLQAFTLLPSGDALPSLQPLPHCSVILKMQPFQVRLQPRGMGAHSPGQSQ

SEQ ID NO: 869189 - protein, 482 aa, Homo sapiens
MLLLGLLLLLPLLAGARLLWNWWKLRSLHLPPLAPGFLHLLQPDLPIYLLGLTQKFGPIYRLHLGLQDVVVLNSKRTIEEAMVKNKLVSRNYPDLSLGDYSLLWKAHKKLTRSALLLGIRDSMEPVVEQLTQEFCERMRAQPGTPVAIEEEFSLLTCSIICYLTFGDKIKDDNLMPAYYKCIQEVLKTWSHWSIQIVDVIPFLRFFPNPGLRRLKQAIEKRDHIVEMQLRQHKESLVAGQWRDMMDYMLQGVAQPSMEEGSGQLLEGHVHMAAVDLLIGGTETTANTLSWAVVFLLHHPEIQQRLQEELDHELGPGASSSRVPYKDRARLPLLNATIAEVLRLRPVVPLALPHRTTRPSSISGYDIPEGTVIIPNLQGAHLDETVWERPHEFWPDRFLEPGKNSRALAFGCGARVCLGEPLARLELFVVLTRLLQAFTLLPSGDALPSLQPLPHCSVILKMQPFQVRLQPRGMGAHSPGQSQ

SEQ ID NO: 869190 - protein, 495 aa, Homo sapiens; identical to SEQ ID NO: 869188

SEQ ID NO: 869191 - protein, 522 aa, Homo sapiens
MLLLGLLLLLPLLAGARLLWNWWKLRSLHLPPLAPGFLHLLQPDLPIYLLGLTQKFGPIYRLHLGLQDVVVLNSKRTIEEAMVKKWADFAGRPEPLTYKLVSRNYPDLSLGDYSLLWKAHKKLTRSALLLGIRDSMEPVVEQLTQEFCERMRAQPGTPVAIEEEFSLLTCSIICYLTFGDKIKDDNLMPAYYKCIQEVLKTWSHWSIQIVDVIPFLRFFPNPGLRRLKQAIEKRDHIVEMQLRQHKESLVAGQWRDMMDYMLQGVAQPSMEEGSGQLLEGHVHMAAVDLLIGGTETTANTLSWAVVFLLHHPEIQQRLQEELDHELGPGASSSRVPYKDRARLPLLNATIAEVLRLRPVVPLALPHRTTRPSSDSRGLGMSEESPSQGGPGQPLTPAPFSISGYDIPEGTVIIPNLQGAHLDETVWERPHEFWPDRFLEPGKNSRALAFGCGARVCLGEPLARLELFVVLTRLLQAFTLLPSGDALPSLQPLPHCSVILKMQPFQVRLQPRGMGAHSPGQSQ

SEQ ID NO: 869192 - protein, 139 aa, Homo sapiens
EFNSDCRAEIRTTRSSSISGYDIPEGTVIIPNLQGAHLDETVWERPHEFWPDRFLEPGKNSRALAFGCGARVCLGEPLARLELFVVLTRLLQAFTLLPSGDALPSLQPLPHCSVILKMQPFQVRLQPRGMGAHSPGQSQ

SEQ ID NO: 869193 - protein, 495 aa, Homo sapiens; identical to SEQ ID NO: 869188

SEQ ID NO: 869194 - protein, 495 aa, Homo sapiens; identical to SEQ ID NO: 869188

SEQ ID NO: 869195 - protein, 495 aa, Homo sapiens; identical to SEQ ID NO: 869188

SEQ ID NO: 869196 - protein, 495 aa, Homo sapiens; identical to SEQ ID NO: 869188

SEQ ID NO: 869197 - protein, 495 aa, Homo sapiens; identical to SEQ ID NO: 869188

SEQ ID NO: 869198 - protein, 156 aa, Homo sapiens
MLWSPWKFPGGAKCLGFVFQQLKDDAVALVDVIAPPDFVLDSPIGRADGEVKGGQGLTGVPQGLMGISAELRCSCGSGVWCLLESGHTWRSFLGRARDKSGLSHSGASPCWLCGCRGLAHPLPAFSSRDGVVALPACTGRGWRSTHCDLCPPASAF

SEQ ID NO: 869199 - protein, 700 aa, Homo sapiens
MASTVEGGDTALLPEFPRGPLDAYRARASFSWKELALFTEGEGMLRFKKTIFSALENDPLFARSPGADLSLEKYRELNFLRCKRIFEYDFLSVEDMFKSPLKVPALIQCLGMYDSSLAAKYLLHSLVFGSAVYSSGSERHLTYIQKIFRMEIFGCFALTELSHGSNTKAIRTTAHYDPATEEFIIHSPDFEAAKFWVGNMGKTATHAVVFAKLCVPGDQCHGLHPFIVQIRDPKTLLPMPGVMVGDIGKKLGQNGLDNGFAMFHKVRVPRQSLLNRMGDVTPEGTYVSPFKDVRQRFGASLGSLSSGRVSIVSLAILNLKLAVAIALRFSATRRQFGPTEEEEIPVLEYPMQQWRLLPYLAAVYALDHFSKSLFLDLVELQRGLASGDRSARQAELGREIHALASASKPLASWTTQQGIQECREACGGHGYLAMNRLGVLRDDNDPNCTYEGDNNILLQQTSNYLLGLLAHQVHDGACFRSPLKSVDFLDAYPGILDQKFEVSSVADCLDSAVALAAYKWLVCYLLRETYQKLNQEKRSGSSDFEARNKCQVSHGRPLALAFVELTVVQRFHEHVHQPSVPPSLRAVLGRLSALYALWSLSRHAALLYRGGYFSGEQAGEVLESAVLALCSQLKDDAVALVDVIAPPDFVLDSPIGRADGELYKNLWGAVLQESKVLERASWWPEFSVNKPVIGSLKSKL

SEQ ID NO: 869200 - protein, 700 aa, Homo sapiens; identical to SEQ ID NO: 869199

SEQ ID NO: 869201 - protein, 700 aa, Homo sapiens; identical to SEQ ID NO: 869199

SEQ ID NO: 869202 - protein, 490 aa, Homo sapiens
MELCVPGDQCHGLHPFIVQIRDPKTLLPMPGVMVGDIGKKLGQNGLDNGFAMFHKVRVPRQSLLNRMGDVTPEGTYVSPFKDVRQRFGASLGSLSSGRVSIVSLAILNLKLAVAIALRFSATRRQFGPTEEEEIPVLEYPMQQWRLLPYLAAVYALDHFSKSLFLDLVELQRGLASGDRSARQAELGREIHALASASKPLASWTTQQGIQECREACGGHGYLAMNRLGVLRDDNDPNCTYEGDNNILLQQTSNYLLGLLAHQVHDGACFRSPLKSVDFLDAYPGILDQKFEVSSVADCLDSAVALAAYKWLVCYLLRETYQKLNQEKRSGSSDFEARNKCQVSHGRPLALAFVELTVVQRFHEHVHQPSVPPSLRAVLGRLSALYALWSLSRHAALLYRGGYFSGEQAGEVLESAVLALCSQLKDDAVALVDVIAPPDFVLDSPIGRADGELYKNLWGAVLQESKVLERASWWPEFSVNKPVIGSLKSKL

SEQ ID NO: 869203 - protein, 226 aa, Homo sapiens
MKTTWYLQDAGSALSLGGVVTNAVFSIVTFSPSVCHSEVALAAYKWLVCYLLRETYQKLNQEKRSGSSDFEARNKCQVSHGRPLALAFVELTVVQRFHEHVHQPSVPPSLRAVLGRLSALYALWSLSRHAALLYRGGYFSGEQAGEVLESAVLALCSQLKDDAVALVDVIAPPDFVLDSPIGRADGELYKNLWGAVLQESKVLERASWWPEFSVNKPVIGSLKSKL

SEQ ID NO: 869204 - protein, 246 aa, Homo sapiens
MASTVEGGDTALLPEFPRGPLDAYRARASFSWKELALFTEGEGMLRFKKTIFSALENDPLFARSPGADLSLEKYRELNFLRCKRIFEYDFLSVEDMFKSPLKVPALIQCLGMYDSSLAAKYLLHSLVFGSAVYSSGSERHLTYIQKIFRMEIFGCFALTELSHGTLQKPLGRCPAGKQGVGAGILVARVFCEQTCHRKSEIEALVGLAHIQPSLMKRRELIRRGPQLLIPEHAGDCCCFLSPHLCA

SEQ ID NO: 869205 - protein, 700 aa, Homo sapiens
MASTVEGGDTALLPEFPRGPLDAYRARASFSWKELALFTEGEGMLRFKKTIFSALENDPLFARSPGADLSLEKYRELNFLRCKRIFEYDFLSVEDMFKSPLKVPALIQCLGMYDSSLAAKYLLHSLVFGSAVYSSGSERHLTYIQKIFRMEIFGCFALTELSHGSNTKAIRTTAHYDPATEEFIIHSPDFEAAKFWVGNMGKTATHAVVFAKLCVPGDQCHGLHPFIVQIRDPKTLLPMPGVMVGDIGKKLGQNGLDNGFAMFHKVRVPRQSLLNRMGDVTPEGTYVSPFKDVRQRFGASLGSLSSGRVSIVSLAILNLKLAVAIALRFSATRRQFGPTEEEEIPVLEYPMQQWRLLPYLAAVYALDHFSKSLFLDLVELQRGLASGDRSARQAELGREIHALASASKPLASWTTQQGIQECREACGGHGYLAMNRLGVLRDDNDPNCTYEGDNNILLQQTSNYLLGLLAHQVHDGACFRSPLKSVDFLDAYPGILDQKFEVSSVADCLDSAVALAAYKWLVCYLLRETYQKLNQEKRSGSSDFEARNKCQVSHGRPLALAFVELTVVQRFHEHVHQPSVPPSLRAVLGRLSALYALWSLSRHAALLYRGSFLGGFSQMAGTHASLVLGYTAYPFMSCVSGLVKNKILPTPRASVYPLEGGADPVEALTVLRCTKEGTQVSAREGGHRAGAPLLPEKNPK

SEQ ID NO: 869206 - protein, 126 aa, Homo sapiens
HAVVFAKLCVPGDQCHGLHPFIVQVGRWGGPQWGQCLPPGSTGNVWSHFCHNKGGACFWHLVSGPGTLPRTPVHPIAPPTVQTAPPTVHSTALPTMQIAPSTVHPTTLPTVHRQPRPQCTDSSAHS

SEQ ID NO: 869207 - protein, 624 aa, Homo sapiens
MASTVEGGDTALLPEFPRGPLDAYRARASFSWKELALFTEGEGMLRFKKTIFSALENDPLFARSPGADLSLEKYRELNFLRCKRIFEYDFLSVEDMFKSPLKVPALIQCLGMYDSSLAAKYLLHSLVFGSAVYSSGSERHLTYIQKIFRMEIFGCFALTELSHGSNTKAIRTTAHYDPATEEFIIHSPDFEAAKFWVGNMGKTATHAVVFAKLCVPGDQCHGLHPFIVQIRDPKTLLPMPGVMVGDIGKKLGQNGLDNGFAMFHKVRVPRQSLLNRMGDVTPEGTYVSPFKDVRQRFGASLGSLSSGRVSIVSLAILNLKLAVAIALRFSATRRQFGPTEEEEIPVLEYPMQQWRLLPYLAAVYALDHFSKSLFLDLVELQRGLASGDRSARQAELGREIHALASASKPLASWTTQQGIQECREACGGHGYLAMNRLGVLRDDNDPNCTYEGDNNILLQQTSNYLLGLLAHQVHDGACFRSPLKSVDFLDAYPGILDQKFEVSSVADCLDSAVALAAYKWLVCYLLRETYQKLNQEKRSGSSDFEARNKCQVSHGRPLALAFVELTVVQRFHEHVHQPSVPPSLRAVLGRLSALYALWSLSRHAALLYRAERRCSCPGRRDRSS

SEQ ID NO: 869208 - protein, 683 aa, Homo sapiens
MASTVEGGDTALLPEFPRGPLDAYRARASFSWKELALFTEGEGMLRFKKTIFSALENDPLFARSPGADLSLEKYRELNFLRCKRIFEYDFLSVEDMFKSPLKVPALIQCLGMYDSSLAAKYLLHSLVFGSAVYSSGSERHLTYIQKIFRMEIFGCFALTELSHGSNTKAIRTTAHYDPATEEFIIHSPDFEAAKFWVGNMGKTATHAVVFAKLCVPGDQCHGLHPFIVQIRDPKTLLPMPGVMVGDIGKKLGQNGLDNGFAMFHKVRVPRQSLLNRMGDVTPEGTYVSPFKDVRQRFGASLGSLSSGRVSIVSLAILNLKLAVAIALRFSATRRQFGPTEEEEIPVLEYPMQQWRLLPYLAAVYALDHFSKSLFLDLVELQRGLASGDRSARQAELGREIHALASASKPLASWTTQQGIQECREACGGHGYLAMNRLGVLRDDNDPNCTYEGDNNILLQQTSNYLLGLLAHQVHGEALLHQKFEVSSVADCLDSAVALAAYKWLVCYLLRETYQKLNQEKRSGSSDFEARNKCQVSHGRPLALAFVELTVVQRFHEHVHQPSVPPSLRAVLGRLSALYALWSLSRHAALLYRGGYFSGEQAGEVLESAVLALCSQLKDDAVALVDVIAPPDFVLDSPIGRADGELYKNLWGAVLQESKVLERASWWPEFSVNKPVIGSLKSKL

SEQ ID NO: 869209 - protein, 724 aa, Homo sapiens
MASTVEGGDTALLPEFPRGPLDAYRARASFSWKELALFTEGEGMLRFKKTIFSALENDPLFARSPGADLSLEKYRELNFLRCKRIFEYDFLSVEDMFKSPLKVPALIQCLGMYDSSLAAKYLLHSLVFGSAVYSSGSERHLTYIQKIFRMEIFGCFALTELSHGSNTKAIRTTAHYDPATEEFIIHSPDFEAAKFWVGNMGKTATHAVVFAKLCVPGDQCHGLHPFIVQIRDPKTLLPMPGVMVGDIGKKLGQNGLDNGFAMFHKVRVPRQSLLNRMGDVTPEGTYVSPFKDVRQRFGASLGSLSSGRVSIVSLAILNLKLAVAIALRFSATRRQFGPTEEEEIPVLEYPMQQWRLLPYLAAVYALDHFSKSLFLDLVELQRGLASGDRSARQAELGREIHALASASKPLASWTTQQGIQECREACGGHGYLAMNRLGVLRDDNDPNCTYEGDNNILLQQTSNYLLGLLAHQVHDGACFRSPLKSVDFLDAYPGILDQKFEVSSVADCLDSAVALAAYKWLVCYLLRETYQKLNQEKRSGSSDFEARNKCQVSHGRPLALAFVELTVVQRFHEHVHQPSVPPSLRAVLGRLSALYALWSLSRHAALLYRGGYFSGEQAGEVLESAVLALCSQLKDDAVALVDVIAPPDFVLDSPIGRADGEILVARVFCEQTCHRKSEIEALVGLAHIQPSLMKRRELIRRGPQLLIPEHAGDCCCFLSPHLCA

SEQ ID NO: 869210 - protein, 667 aa, Homo sapiens
MASTVEGGDTALLPEFPRGPLDAYRARASFSWKELALFTEGEGMLRFKKTIFSALENDPLFARSPGADLSLEKYRELNFLRCKRIFEYDFLSVEDMFKSPLKVPALIQCLGMYDSSLAAKYLLHSLVFGSAVYSSGSERHLTYIQKIFRMEIFGCFALTELSHGSNTKAIRTTAHYDPATEEFIIHSPDFEAAKFWVGNMGKTATHAVVFAKLCVPGDQCHGLHPFIVQIRDPKTLLPMPGVMVGDIGKKLGQNGLDNGFAMFHKVRVPRQSLLNRMGDVTPEGTYVSPFKDVRQRFGASLGSLSSGRVSIVSLAILNLKLAVAIALRFSATRRQFGPTEEEEIPVLEYPMQQWRLLPYLAAVYALDHFSKSLFLDLVELQRGLASGDRSARQAELGREIHALASASKPLASWTTQQGIQECREACGGHGYLAMNRLGVLRDDNDPNCTYEGDNNILLQQTSNYLLGLLAHQVHDGACFRSPLKSVDFLDAYPGILDQKFEVSSVADCLDSAVALAAYKWLVCYLLRETYQKLNQEKRSGSSDFEARNKCQVSHGRPLALAFVELTVVQRFHEHVHQPSVPPSLRAVLGRLSALYALWSLSRHAALLYRGGYFSGEQAGEVLESAVLALCSQLNCPGGREGGTRPAGLIWDRGDLQRGKEMQMIMST

SEQ ID NO: 869211 - protein, 353 aa, Homo sapiens [sequence omitted]

SEQ ID NO: 869212 - protein, 647 aa, Homo sapiens
IVTRGVCVAEEAGGTVYPQRGTMPGTKRFQHVIETPEPGKWELSGYEAAVPITEKSNPLTQDLDKADAENIVRLLGQCDAEIFQEEGQALSTYQRLYSESILTTMVQVAGKVQEVLKEPDGGLVVLSGGGTSGRMAFLMSVSFNQLMKGLGQKPLYTYLIAGGDRSVVASREGTEDSALHGIEELKKVAAGKKRVIVIGISVGLSAPFVAGQMDCCMNNTAVFLPVLVGFNPVSMARNDPIEDWSSTFRQVAERMQKMQEKQKAFVLNPAIGPEGLSGSSRMKGGSATKILLETLLLAAHKTVDQGIAASQRCLLEILRTFERAHQVTYSQSPKIATLMKSVSTSLEKKGHVYLVGWQTLGIIAIMDGVECIHTFGADFRDVRGFLIGDHSDMFNQKAELTNQGPQFTFSQEDFLTSILPSLTEIDTVVFIFTLDDNLTEVQTIVEQVKEKTNHIQALAHSTVGQTLPIPLKKLFPSIISITWPLLFFEYEGNFIQKFQRELSTKWVLNTVSTGAHVLLGKILQNHMLDLRISNSKLFWRALAMLQRFSGQSKARCIESLLRAIHFPQPLSDDIRAAPISCHVQVAHEKEQVIPIALLSLLFRCSITEAQAHLAAAPSVCEAVRSALAGPGQKRTADPLEILEPDVQ

SEQ ID NO: 869213 - protein, 631 aa, Homo sapiens
IVTRGVCVAEEAGGTVYPQRGTMPGTKRFQHVIETPEPGKWELSGYEAAVPITEKSNPLTQDLDKADAENIVRLLGQCDAEIFQEEGQALSTYQRLYSESILTTMVQVAGKVQEVLKEPDGGLVVLSGGGTSGRMAFLMSVSFNQLMKGLGQKPLYTYLIAGGDRSVVASREGTEDSALHGIEELKKVAAGKKRVIVIGISVGLSAPFVAGQMDCCMNNTAVFLPVLVGFNPVSMARNDPIEDWSSTFRQVAERMQPEGLSGSSRMKGGSATKILLETLLLAAHKTVDQGIAASQRCLLEILRTFERAHQVTYSQSPKIATLMKSVSTSLEKKGHVYLVGWQTLGIIAIMDGVECIHTFGADFRDVRGFLIGDHSDMFNQKAELTNQGPQFTFSQEDFLTSILPSLTEIDTVVFIFTLDDNLTEVQTIVEQVKEKTNHIQALAHSTVGQTLPIPLKKLFPSIISITWPLLFFEYEGNFIQKFQRELSTKWVLNTVSTGAHVLLGKILQNHMLDLRISNSKLFWRALAMLQRFSGQSKARCIESLLRAIHFPQPLSDDIRAAPISCHVQVAHEKEQVIPIALLSLLFRCSITEAQAHLAAAPSVCEAVRSALAGPGQKRTADPLEILEPDVQ

SEQ ID NO: 869214 - protein, 277 aa, Homo sapiens
IVTRGVCVAEEAGGTVYPQRGTMPGTKRFQHVIETPEPGKWELSGYEAAVPITEKSNPLTQDLDKADAENIVRLLGQCDAEIFQEEGQALSTYQRLYSESILTTMVQVAGKVQEVLKEPDGGLVVLSGGGTSGRMAFLMSVSFNQLMKGLGQKPLYTYLIAGGDRSVVASREGTEDSALHGIEELKKVAAGKKRVIVIGISVGLSAPFVAGQMDCCMNNTAVFLPVLVGFNPVSMARHPFPPPRILRSLTVFPSLRAPHYQITSLLFSMSVVTLISE

SEQ ID NO: 869215 - protein, 261 aa, Homo sapiens
MCTVFSWEGPSHLLLPQGPQFTFSQEDFLTSILPSLTEIDTVVFIFTLDDNLTEVQTIVEQVKEKTNHIQALAHSTVGQTLPIPLKKLFPSIISITWPLLFFEYEGNFIQKFQRELSTKWVLNTVSTGAHVLLGKILQNHMLDLRISNSKLFWRALAMLQRFSGQSKARCIESLLRAIHFPQPLSDDIRAAPISCHVQVAHEKEQVIPIALLSLLFRCSITEAQAHLAAAPSVCEAVRSALAGPGQKRTADPLEILEPDVQ

SEQ ID NO: 869216 - protein, 106 aa, Homo sapiens
LLHSSLFLLFCFLPIEEALAAPSERSLGLLSAPLQGPAEFSSKGAVPSPPRSGRHLSFLRGNWALLESWCFSPRCLLEILRTFERAHQVTYSQSPKIATLMKSVST

SEQ ID NO: 869217 - protein, 236 aa, Homo sapiens
GAGSRKEGHMSKHDGPFMRGNLLKCTAITCSPSPDVIKNGRLGALFPPALAEKPGFRLVKLEVGCGNWLGVIGDERDIEDIMKPVNSTPEKDTAEREKRWNKKAYLIGLVWVRRTEESESAARARGYGKHCPPTLHLGETQKRTSFICKKGKQLRQWGWLKGTLQCADAFHFFHLPCLSKNPYGPGLRTELSAEMKIYGSVFQNDEEFQDGGSGKILLQEKSVLGPMCKHLLRNLE

SEQ ID NO: 869218 - protein, 240 aa, Homo sapiens
GAGSRKEGHMSKHDGPFMRGNLLKCTAITCSPSPDVIKNGRLGALFPPALAEKPGFRLVKLEVGCGNWLGVIGDERDIEDIMKPVNSTPEKDTAEREKRWNKKAYLIGLVWVRRTEESESAARARGYGKHCPPTLHLGETQKRTSFICKKGKQLRQWGWLKGTLQCADAFHFFHLPCLSKNPYGPGLRTELSAEMKIYGSVFQNDEEFQDGGSGKILLQEKSVLGPMCKHLLSETTSGCI

SEQ ID NO: 869219 - protein, 244 aa, Homo sapiens
GAGSRKEGHMSKHDGPFMRGNLLKCTAITCSPSPDVIKNGRLGALFPPALAEKPGFRLVKLEVGCGNWLGVIGDERDIEDIMKPVNSTPEKDTAEREKRWNKKAYLIGLVWVRRTEESESAARARGYGKHCPPTLHLGETQKRTSFICKKGKQLRQWGWLKGTLQCADAFHFFHLPCLSKNPYGPGLRTELSAEMKIYGSVFQNDEEFQDGGSGKILLQEKSVLGPMCKHLLSIVKPATCSQFF

SEQ ID NO: 869220 - protein, 244 aa, Homo sapiens; identical to SEQ ID NO: 869219

SEQ ID NO: 869221 - protein, 190 aa, Homo sapiens
QSKANQKHRAQQLLWLCRQTWQCGRAAQTIREKPGVDQAPRCLRPWCNSAGDWGTLEQSFTRMGNPHSWVALPPGQARWQSVRAAGCCPQPSWSIFLRCVHCFIFKILFFTGKERKPLLRDTRYRASRGCSPAPPGRGADFSFRVDGAKSLCKMYAWWLLPASLMTKCISIPVKTCITMYLKLLSLCSIV

SEQ ID NO: 869222 - protein, 133 aa, Homo sapiens
RNRGTRRLSNLLKVTQLSCSEPHPLLRTSWAVSHPNLATTQKGLFFREWKQPTGPGLECVSHLGAPEGTYTAVLVCATRGQPPHIDLYCFRELSKPAGLRERNLVQGREREEPTAVRASDLPRVHPECVKSSS

SEQ ID NO: 869223 - protein, 153 aa, Homo sapiens
YKLTAVLTLGPLLQGMEAADWTGIGVCVRLVEGVGGGGLRQLAFFGGSLSWHLGGHQAVARAGGLQVPGTEATPCCGLQLALFSTSQLPPGGARGHIYCCTRLCHQRAASAHRSLLLPRTVQTGGTEREKPGPGQRKRGAHCSACKRSSTRPS

SEQ ID NO: 869224 - protein, 434 aa, Homo sapiens
HLVLINAEADSSPPSAPQAGAERRRALGSLRRGQGAVPGWAGYVSRYCGSRRRPRPRGSSRVRGRRAVRPGPRASRGRAGGAQGPRSPASPPSSRAQPRLGSLPLALVAMASVAQESAGSQRRLPPRHGALRGLLLLCLWLPSGRAALPPAAPLSELHAQLSGVEQLLEEFRRQLQQERPQEELELELRAGGGPQEDCPGPGSGGYSAMPDAIIRTKDSLAAGASFLRAPAAVRGWRQCVAACCSEPRCSVAVVELPRRPAPPAAVLGCYLFNCTARGRNVCKFALHSGYSSYSLSRAPDGAALATARASPRQEKDAPPLSKAGQDVVLHLPTDGVVLDGRESTDDHAIVQYEWALLQGDPSVDMKVPQSGTLKLSHLQEGTYTFQLTVTDTAGQRSSDNVSVTVLRAAYSTGDGWSICCICSKREAKEFSETS

SEQ ID NO: 869225 - protein, 577 aa, Homo sapiens
HLVLINAEADSSPPSAPQAGAERRRALGSLRRGQGAVPGWAGYVSRYCGSRRRPRPRGSSRVRGRRAVRPGPRASRGRAGGAQGPRSPASPPSSRAQPRLGSLPLALVAMASVAQESAGSQRRLPPRHGALRGLLLLCLWLPSGRAALPPAAPLSELHAQLSGVEQLLEEFRRQLQQERPQEELELELRAGGGPQEDCPGPGSGGYSAMPDAIIRTKDSLAAGASFLRAPAAVRGWRQCVAACCSEPRCSVAVVELPRRPAPPAAVLGCYLFNCTARGRNVCKFALHSGYSSYSLSRAPDGAALATARASPRQEKDAPPLSKAGQDVVLHLPTDGVVLDGRESTDDHAIVQYEWALLQGDPSVDMKVPQSGTLKLSHLQEGTYTFQLTVTDTAGQRSSDNVSVTVLRAAYSTGGCLHTCSRYHFFCDDGCCIDITLACDGVQQCPDGSDEDFCQNLGLDRKMVTHTAASPALPRTTGPSEDAGGDSLVEKSQKATAPNKPPALSNTEKRNHSAFWGPESQIIPVMPGAVLPLALGLAITALLLLMVACRLRLVKQKLKKARPITSEESDYLINGMYL

SEQ ID NO: 869226 - protein, 609 aa, Homo sapiens
HLVLINAEADSSPPSAPQAGAERRRALGSLRRGQGAVPGWAGYVSRYCGSRRRPRPRGSSRVRGRRAVRPGPRASRGRAGGAQGPRSPASPPSSRAQPRLGSLPLALVAMASVAQESAGSQRRLPPRHGALRGLLLLCLWLPSGRAALPPAAPLSELHAQLSGVEQLLEEFRRQLQQERPQEELELELRAGGGPQEDCPGPGSGGYSAMPDAIIRTKDSLAAGASFLRAPAAVRGWRQCVAACCSEPRCSVAVVELPRRPAPPAAVLGCYLFNCTARGRNVCKFALHSGYSSYSLSRAPDGAALATARASPRQEKDAPPLSKAGQDVVLHLPTDGVVLDGRESTDDHAIVQYEWALLQGDPSVDMKVPQSGTLKLSHLQEGTYTFQLTVTDTAGQRSSDNVSVTVLRAAYSTGGCLHTCSRYHFFCDDGCCIDITLACDGVQQCPDGSDEDFCQNLGLDRKMVTHTAASPALPRTTGPSEDAGGDSLVEKSQKATAPNKPPALSNTEKRNHSAFWGPESQIIPVMPDSSSSGKNRKEESYIFESKGDGGGGEHPAPETGAVLPLALGLAITALLLLMVACRLRLVKQKLKKARPITSEESDYLINGMYL

SEQ ID NO: 869227 - protein, 609 aa, Homo sapiens; identical to SEQ ID NO: 869226

SEQ ID NO: 869228 - protein, 409 aa, Homo sapiens
HLVLINAEADSSPPSAPQAGAERRRALGSLRRGQGAVPGWAGYVSRYCGSRRRPRPRGSSRVRGRRAVRPGPRASRGRAGGAQGPRSPASPPSSRAQPRLGSLPLALVAMASVAQESAGSQRRLPPRHGALRGLLLLCLWLPSGRAALPPAAPLSELHAQLSGVEQLLEEFRRQLQQERPQEELELELRAGGGPQEDCPGPGSGGYSAMPDAIIRTKDSLAAGASFLRAPAAVRGWRQCVAACCSEPRCSVAVVELPRRPAPPAAVLGCYLFNCTARGRNVCKFALHSGYSSYSLSRAPDGAALATARASPRQEKDAPPLSKAGQDVVLHLPTDGVVLDGRESTDDHAIVQYEWALLQGDPSVDMKMQGVTPWWKSLRKPLPQTSHLHYQTQRRGIIPPFGDQRVKSFL

SEQ ID NO: 869229 - protein, 609 aa, Homo sapiens; identical to SEQ ID NO: 869226

SEQ ID NO: 869230 - protein, 345 aa, Homo sapiens
HLVLINAEADSSPPSAPQAGAERRRALGSLRRGQGAVPGWAGYVSRYCGSRRRPRPRGSSRVRGRRAVRPGPRASRGRAGGAQGPRSPASPPSSRAQPRLGSLPLALVAMASVAQESAGSQRRLPPRHGALRGLLLLCLWLPSGRAALPPAAPLSELHAQLSGVEQLLEEFRRQLQQERPQEELELELRAGGGPQEDCPGPGSGGYSAMPDAIIRTKDSLAAGASFLRAPAAVRGWRQCVAACCSEPRCSVAVVELPRRPAPPAAVLGCYLFNCTARGRNVCKFALHSGYSSYSLSRAPDGAALATARASPRQGASIRNPEAVPPTGGNLHLPADRDGHCRAEKL

SEQ ID NO: 869231 - protein, 609 aa, Homo sapiens; identical to SEQ ID NO: 869226

SEQ ID NO: 869232 - protein, 95 aa, Homo sapiens
SFMNYLFSFSEKDAPPLSKAGQDVVLHLPTDGVVLDGRESTDDHAIVQYEWALLQGDPSVDMKLAARSAGAHRACEGGRPACGAPARGSCPGLLG

SEQ ID NO: 869233 - protein, 609 aa, Homo sapiens; identical to SEQ ID NO: 869226

SEQ ID NO: 869234 - protein, 609 aa, Homo sapiens; identical to SEQ ID NO: 869226

SEQ ID NO: 869235 - protein, 556 aa, Homo sapiens
HLVLINAEADSSPPSAPQAGAERRRALGSLRRGQGAVPGWAGYVSRYCGSRRRPRPRGSSRVRGRRAVRPGPRASRGRAGGAQGPRSPASPPSSRAQPRLGSLPLALVAMASVAQESAGSQRRLPPRHGALRGLLLLCLWLPSGRAALPPAAPLSELHAQLSGVEQLLEEFRRQLQQERPQEELELELRAGGGPQEDCPGPGSGGYSAMPDAIIRTKDSLAAGASFLRAPAAVRGWRQCVAACCSEPRCSVAVVELPRRPAPPAAVLGCYSSTARRAAATSASSRCTAATAATASAARRTAPPWPPRAPRPGRVPQSGTLKLSHLQEGTYTFQLTVTDTAGQRSSDNVSVTVLRAAYSTGGCLHTCSRYHFFCDDGCCIDITLACDGVQQCPDGSDEDFCQNLGLDRKMVTHTAASPALPRTTGPSEDAGGDSLVEKSQKATAPNKPPALSNTEKRNHSAFWGPESQIIPVMPDSSSSGKNRKEESYIFESKGDGGGGEHPAPETGAVLPLALGLAITALLLLMVACRLRLVKQKLKKARPITSEESDYLINGMYL

SEQ ID NO: 869236 - protein, 584 aa, Homo sapiens
HLVLINAEADSSPPSAPQAGAERRRALGSLRRGQGAVPGWAGYVSRYCGSRRRPRPRGSSRVRGRRAVRPGPRASRGRAGGAQGPRSPASPPSSRAQPRLGSLPLALVAMASVAQESAGSQRRLPPRHGALRGLLLLCLWLPSGRAALPPAAPLSELHAQLSGVEQLLEEFRRQLQQERPQEELELELRAGGGPQEDCPGPGSGGYSAMPDAIIRTKDSLAAGASFLRAPAAVRGWRQCVAACCSEPRCSVAVVELPRRPAPPAAVLGCYLFNCTARGRNVCKFALHSGYSSYSLSRAPDGAALATARASPRQEKDAPPLSKAGQDVVLHLPTDGVVLDGRESTDDHAIVQYEWALLQGDPSVDMKVPQSGTLKLSHLQEGTYTFQLTVTDTAGQRSSDNVSVTVLRAAYSTGGCLHTCSRYHFFCDDGCCIDITLACDGVQQCPDGSDEDFCQNLGLDRKMVTHTAASPALPRTTGPSEDAGGDSLVEKSQKATAPNKPPALSNTEKRNHSAFWGPESQIIPVMPDSSSSGKNRKEESYIFESKGDGGGGEHPAPETGKCPPWKPFADCSLLRTACPLAEDIP

SEQ ID NO: 869237 - protein, 309 aa, Homo sapiens
MFSPADNIFIILITGEFILGILGNGYIALVNWIDWIKKKKISTVDYILTNLVIARICLISVMVVNGIVIVLNPDVYTKNKQQIVIFTFWTFANYLNMWITTCLNVFYFLKIASSSHPLFLWLKWKIDMVVHWILLGCFAISLLVSLIAAIVLSCDYRFHAIAKHKRNITEMFHVSKIPYFEPLTLFNLFAIVPFIVSLISFFLLVRSLWRHTKQIKLYATGSRDPSTEVHVRAIKTMTSFIFFFFLYYISSILMTFSYLMTKYKLAVEFGEIAAILYPLGHSLILIVLNNKLRQTFVRMLTCRKIACMI

SEQ ID NO: 869238 - protein, 105 aa, Homo sapiens
SRCSGWPSLFCVLLLLEAQPLWRCDLVIGRFTAKTPGSPGSLEMGPLTFMDVAIEFSLEEWQCLDTAQRNVYRHVMLENYRNLVFLARPDYLSGTRKRALEYEET

SEQ ID NO: 869239 - protein, 146 aa, Homo sapiens
SRCSVWPSLFCVLLLLEAQPLWRCDLVIGRFTAKTPGSPGSLEMGPLTFMDVAIEFSLEEWQCLDTAQRNVYRHVMLENYRNLVFLALCSRFAQDLWLEQNIKDSFHKSDTEQIWKIWTYDLQLEDKAVHSVDECHGNTKAGYNGT

SEQ ID NO: 869240 - protein, 190 aa, Homo sapiens [sequence omitted]

SEQ ID NO: 869241 - protein, 437 aa, Homo sapiens
QRPGSDLWRLLQSRQEEGGSPQSKASESSSSFSSSSSSSSSRPGSPATRQTPPSTAPGAGPSRRQGPSTLRPEPRSRGFRSPRGGGLAAVQVKLQMALELMRKELEDALTQEANVGKKTVIWKEKVEMQRQRFRLEFEKHRGFLAQEEQRQLRRLEAEERATLQRLRESKSRLVQQSKALKELADELQERCQRPALGLLEGVRGVLSRSKAVTRLEAENIPMELKTACCIPGRRELLRKFQVDVKLDPATAHPSLLLTADLRSVQDGEPWRDVPNNPERFDTWPCILGLQSFSSGRHYWEVLVGEGAEWGLGVCQDTLPRKGETTPSPENGVWALWLLKGNEYMVLASPSVPLLQLESPRCIGIFLDYEAGEISFYNVTDGSYIYTFNQLFSGLLRPYFFICDATPLILPPTTIAGSGNWASRDHLDPASDVRDDHL

SEQ ID NO: 869242 - protein, 193 aa, Homo sapiens
HHILSAVDVKLDPATAHPSLLLTADLRSVQDGEPWRDVPNNPERFDTWPCILGLQSFSSGRHYWEVLVGEGAEWGLGVCQDTLPRKGETTPSPENGVWALWLLKGNEYMVLASPSVPLLQLESPRCIGIFLDYEAGEISFYNVTDGSYIYTFNQLFSGLLRPYFFICDATPLILPPTTIAGSGNWASRDHLDP

SEQ ID NO: 869243 - protein, 888 aa, Homo sapiens
MDRSSKRRQVKPLAASLLEALDYDSSDDSDFKVGDASDSEGSGNGSEDASKDSGEGSCSDSEENILEEELNEDIKVKEEQLKNSAEEEVLSSEKQLIKMEKKEEEENGERPRKKREKEKEKEKEKEKEKEREKEKEKATVSENVAASAAATTPATSPPAVNTSPSVPTTTTATEEQVSEPKKWNLRRNRPLLDFVSMEELNDMDDYDSEDDNDWRPTVVKRKGRSASQKEGSDGDNEDDEDEGSGSDEDENDEGNDEDHSSPASEGGCKKKKSKVLSRNSADDEELTNDSLTLSQSKSNEDSLILEKSQNWSSQKMDHILICCVCLGDNSEDADEIIQCDNCGITVHEGCYGVDGESDSIMSSASENSTEPWFCDACKCGVSPSCELCPNQDGIFKETDAGRWVHIVCALYVPGVAFGDIDKLRPVTLTEMNYSKYGAKECSFCEDPRFARTGVCISCDAGMCRAYFHVTCAQKEGLLSEAAAEEDIADPFFAYCKQHADRLDRKWKRKNYLALQSYCKMSLQEREKQLSPEAQARINARLQQYRAKAELARSTRPQAWVPREKLPRPLTSSASAIRKLMRKAELMGISTDIFPVDNSDTSSSVDGRRKHKQPALTADFVNYYFERNMRMIQIQENMAEQKNIKDKLENEQEKLHVEYNKLCESLEELQNLNGKLRSEGQGIWALLGRITGQKLNIPAILRAPKERKPSKKEGGTQKTSTLPAVLYSCGICKKNHDQHLLLLCDTCKLHYHLGCLDPPLTRMPRKTKNSYWQCSECDQAGSSDMEADMAMETLPDGTKRSRRQIKEPVKFVPQDVPPEPKKIPIRNTRTRGRKRSFVPEEEKHEERVPRERRQRQSVLQKKPKAEDLRTECATCKGTGDNENLVRYPS

SEQ ID NO: 869244 - protein, 878 aa, Homo sapiens
MDRSSKRRQVKPLAASLLEALDYDSSDDSDFKVGDASDSEGSGNGSEDASKDSGEGSCSDSEENILEEELNEDIKVKEEQLKNSAEEEVLSSEKQLIKMEKKEEEENGERPRKKREKEKEKEKEKEKEKEREKEKEKATVSENVAASAAATTPATSPPAVNTSPSVPTTTTATEEQVSEPKKWNLRRNRPLLDFVSMEELNDMDDYDSEDDNDWRPTVVKRKGRSASQKEGSDGDNEDDEDEGSGSDEDENDEGNDEDHSSPASEGGCKKKKSKVLSRNSADDEELTNDSLTLSQSKSNEDSLILEKSQNWSSQKMDHILICCVCLGDNSEDADEIIQCDNCGITVHEDGFIIVCALYVPGVAFGDIDKLRPVTLTEMNYSKYGAKECSFCEDPRFARTGVCISCDAGMCRAYFHVTCAQKEGLLSEAAAEEDIADPFFAYCKQHADRLDRKWKRKNYLALQSYCKMSLQEREKQLSPEAQARINARLQQYRAKAELARSTRPQAWVPREKLPRPLTSSASAIRKLMRKAELMGISTDIFPVDNSDTSSSVDGRRKHKQPALTADFVNYYFERNMRMIQIQENMAEQKNIKDKLENEQEKLHVEYNKLCESLEELQNLNGKLRSEGQGIWALLGRITGQKLNIPAILRAPKERKPSKKEGGTQKTSTLPAVLYSCGICKKNHDQHLLLLCDTCKLHYHLGCLDPPLTRMPRKTKNSYWQCSECDQAGSSDMEADMAMETLPDGTKRSRRQIKEPVKFVPQDVPPEPKKIPIRNTERVPRERRQRQSVLQKKPKAEDLRTECATCKGTGDNENLVRCDECRLCYHFGCLDPPLKKSPKQTGYGWICQECDSSSSKEDENEAERKNISQELNMEQKNPKK

SEQ ID NO: 869245 - protein, 697 aa, Homo sapiens
WCWGDSPDLRRCSEGGCKKKKSKVLSRNSADDEELTNDSLTLSQSKSNEDSLILEKSQNWSSQKMDHILICCVCLGDNSEDADEIIQCDNCGITVHEGCYGVDGESDSIMSSASENSTEPWFCDACKCGVSPSCELCPNQDGIFKETDAGRWVHIVCALYVPGVAFGDIDKLRPVTLTEMNYSKYGAKECSFCEDPRFARTGVCISCDAGMCRAYFHVTCAQKEGLLSEAAAEEDIADPFFAYCKQHADRLDRKWKRKNYLALQSYCKMSLQEREKQLSPEAQARINARLQQYRAKAELARSTRPQAWVPREKLPRPLTSSASAIRKLMRKAELMGISTDIFPVDNSDTSSSVDGRRKHKQPALTADFVNYYFERNMRMIQIQENMAEQKNIKDKLENEQEKLHVEYNKLCESLEELQNLNGKLRSEGQGIWALLGRITGQKLNIPAILRAPKERKPSKKEGGTQKTSTLPAVLYSCGICKKNHDQHLLLLCDTCKLHYHLGCLDPPLTRMPRKTKNSYWQCSECDQAGSSDMEADMAMETLPDGTKRSRRQIKEPVKFVPQDVPPEPKKIPIRNTRTRGRKRSFVPEEEKHEERVPRERRQRQSVLQKKPKAEDLRTECATCKGTGDNENLVRCDECRLCYHFGCLDPPLKKSPKQTGYGWICQECDSSSSKEDENEAERKNISQELNMEQKNPKK

SEQ ID NO: 869246 - protein, 895 aa, Homo sapiens
MDRSSKRRQVKPLAASLLEALDYDSSDDSDFKVGDASDSEGSGNGSEDASKDSGEGSCSDSEENILEEELNEDIKVKEEQLKNSAEEEVLSSEKQLIKMEKKEEEENGERPRKKREKEKEKEKEKEKEKEREKEKEKATVSENVAASAAATTPATSPPAVNTSPSVPTTTTATEEQVSEPKKWNLRRNRPLLDFVSMEELNDMDDYDSEDDNDWRPTVVKRKGRSASQKEGSDGDNEDDEDEGSGSDEDENDEGNDEDHSSPASEGGCKKKKSKVLSRNSADDEELTNDSLTLSQSKSNEDSLILEKSQNWSSQKMDHILICCVCLGDNSEDADEIIQCDNCGITVHEDGFIIVCALYVPGVAFGDIDKLRPVTLTEMNYSKYGAKECSFCEDPRFARTGVCISCDAGMCRAYFHVTCAQKEGLLSEAAAEEDIADPFFAYCKQHADRLDRKWKRKNYLALQSYCKMSLQEREKQLSPEAQARINARLQQYRAKAELARSTRPQAWVPREKLPRPLTSSASAIRKLMRKAELMGISTDIFPVDNSDTSSSVDGRRKHKQPALTADFVNYYFERNMRMIQIQENMAEQKNIKDKLENEQEKLHVEYNKLCESLEELQNLNGKLRSEGQGIWALLGRITGQKLNIPAILRAPKERKPSKKEGGTQKTSTLPAVLYSCGICKKNHDQHLLLLCDTCKLHYHLGCLDPPLTRMPRKTKNSYWQCSECDQAGSSDMEADMAMETLPDGTKRSRRQIKEPVKFVPQDVPPEPKKIPIRNTRTRGRKRSFVPEEEKHEERVPRERRQRQSVLQKKPKAEDLRTECATCKGTGDNENLVRCDECRLCYHFGCLDPPLKKSPKQTGYGWICQECDSSSSKEDENEAERKNISQELNMEQKNPKK

SEQ ID NO: 869247 - protein, 895 aa, Homo sapiens; identical to SEQ ID NO: 869246

SEQ ID NO: 869248 - protein, 895 aa, Homo sapiens; identical to SEQ ID NO: 869246

SEQ ID NO: 869249 - protein, 835 aa, Homo sapiens
MDRSSKRRQVKPLAASLLEALDYDSSDDSDFKVGDASDSEGSGNGSEDASKDSGEGSCSDSEENILEEELNEDIKVKEEQLKNSAEEEVLSSEKQLIKMEKKEEEENGERPRKKREKEKEKEKEKEKEKEREKEKEKATVSENVAASAAATTPATSPPAVNTSPSVPTTTTATEEQVSEPKKWNLRRNRPLLDFVSMEELNDMDDYDSEDDNDWRPTVVKRKGRSASQKEGSDGDNEDDEDEGSGSDEDENDEGNDEDHSSPASEGGCKKKKSKVLSRNSADDEELTNDSLTLSQSKSNEDSLILEKSQNWSSQKMDHILICCVCLGDNSEDADEIIQCDNCGITVHEDGFIIVCALYVPGVAFGDIDKLRPVTLTEMNYSKYGAKECSFCEDPRFARTGVCISCDAGMCRAYFHVTCAQKEGLLSEAAAEEDIADPFFAYCKQHADRLDRKWKRKNYLALQSYCKMSLQEREKQLSPEAQARINARLQQYRAKAELARSTRPQAWVPREKLPRPLTSSASAIRKLMRKAELMGISTDIFPVDNSDTSSSVDGRRKHKQPALTADFVNYYFERNMRMIQIQENMAEQKNIKDKLENEQEKLHVEYNKLCESLEELQNLNGKLRSEGQGIWALLGRITGQKLNIPAILRAPKERKPSKKEGGTQKTSTLPAVLYSCGICKKNHDQHLLLLCDTCKLHYHLGCLDPPLTRMPRKTKNSYWQCSECDQAGSSDMEADMAMETLPDGTKRSRRQIKEPVKFVPQDVPPEPKKIPIRNTRTRGRKRSFVPEEEKHEERVPRERRQRQSVLQKKPKAEDLRTECATCKGTGDNENLVRYPS

SEQ ID NO: 869250 - protein, 839 aa, Homo sapiens
MDRSSKRRQVKPLAASLLEALDYDSSDDSDFKVGDASDSEGSGNGSEDASKDSGEGSCSDSEENILEEELNEDIKVKEEQLKNSAEEEVLSSEKQLIKMEKKEEEENGERPRKKREKEKEKEKEKEKEKEREKEKEKATVSENVAASAAATTPATSPPAVNTSPSVPTTTTATEEQVSEPKKWNLRRNRPLLDFVSMEELNDMDDYDSEDDNDWRPTVVKRKGRSASQKEGSDGDNEDDEDEGSGSDEDENDEGNDEDHSSPASEGGCKKKKSKVLSRNSADDEELTNDSLTLSQSKSNEDSLILEKSQNWSSQKMDHILICCVCLGDNSEDADEIIQCDNCGITVHEDGFIIVCALYVPGVAFGDIDKLRPVTLTEMNYSKYGAKECSFCEDPRFARTGVCISCDAGMCRAYFHVTCAQKEGLLSEAAAEEDIADPFFAYCKQHADRLDRKWKRKNYLALQSYCKMSLQEREKQLSPEAQARINARLQQYRAKAELARSTRPQAWVPREKLPRPLTSSASAIRKLMRKAELMGISTDIFPVDNSDTSSSVDGRRKHKQPALTADFVNYYFERNMRMIQIQENMAEQKNIKDKLENEQEKLHVEYNKLCESLEELQNLNGKLRSEGQGIWALLGRITGQKLNIPAILRAPKERKPSKKEGGTQKTSTLPAVLYSCGICKKNHDQHLLLLCDTCKLHYHLGCLDPPLTRMPRKTKNSYWQCSECDQAGSSDMEADMAMETLPDGTKRSRRQIKEPVKFVPQDVPPEPKKIPIRNTRTRGRKRSFVPEEEKHEERVPRERRQRQSVLQKKPKAEDLRTECATCKGTGDNENLVRHNANQKS

SEQ ID NO: 869251 - protein, 871 aa, Homo sapiens
MDRSSKRRQVKPLAASLLEALDYDSSDDSDFKVGDASDSEGSGNGSEDASKDSGEGSCSDSEENILEEELNEDIKVKEEQLKNSAEEEVLSSEKQLIKMEKKEEEENGERPRKKREKEKEKEKEKEKEKEREKEKEKATVSENVAASAAATTPATSPPAVNTSPSVPTTTTATEEQVSEPKKWNLRRNRPLLDFVSMEELNDMDDYDSEDDNDWRPTVVKRKGRSASQKEGSDGDNEDDEDEGSGSDEDENDEGNDEDHSSPASEGGCKKKKSKVLSRNSADDEELTNDSLTLSQSKSNEDSLILEKSQNWSSQKMDHILICCVCLGDNSEDADEIIQCDNCGITVHEDGFIIVCALYVPGVAFGDIDKLRPVTLTEMNYSKYGAKECSFCEDPRFARTGVCISCDAGMCRAYFHVTCAQKEGLLSEAAAEEDIADPFFAYCKQHADRLDRKWKRKNYLALQSYCKMSLQEREKQLSPEAQARINARLQQYRAKAELARSTRPQAWVPREKLPRPLTSSASAIRKLMRKAELMGISTDIFPVDNSDTSSSVDGRRKHKQPALTADFVNYYFERNMRMIQIQENMAEQKNIKDKLENEQEKLHVEYNKLCESLEELQNLNGKLRSEGQGIWALLGRITGQKLNIPAILRAPKERKPSKKEGGTQKTSTLPAVLYSCGICKKNHDQHLLLLCDTCKLHYHLGCLDPPLTRMPRKTKNSYWQCSECDQAGSSDMEADMAMETLPDGTKRSRRQIKEPVKFVPQDVPPEPKKIPIRNTRTRGRKRSFVPEEEKHEERVPRERRQRQSVLQKKPKAEDLRTECATCKGTGDNENLVRCDECRLCYHFGCLDPPLKKSPKQTGYGWICQECDSSSSK

SEQ ID NO: 869252 - protein, 410 aa, Homo sapiens
MDRSSKRRQVKPLAASLLEALDYDSSDDSDFKVGDASDSEGSGNGSEDASKDSGEGSCSDSEENILEEELNEDIKVKEEQLKNSAEEEVLSSEKQLIKMEKKEEEENGERPRKKREKEKEKEKEKEKEKEREKEKEKATVSENVAASAAATTPATSPPAVNTSPSVPTTTTATEEQVSEPKKWNLRRNRPLLDFVSMEELNDMDDYDSEDDNDWRPTVVKRKGRSASQKEGSDGDNEDDEDEGSGSDEDENDEGNDEDHSSPASEGGCKKKKSKVLSRNSADDEELTNDSLTLSQSKSNEDSLILEKSQNWSSQKMDHILICCVCLGDNSEDADEIIQCDNCGITVHEGCYGVDGESDSIMSSASENSTEPWFCDACKCGVSPSCELCPNQDGIFKETDAGRRLPSRVGD

SEQ ID NO: 869253 - protein, 895 aa, Homo sapiens; identical to SEQ ID NO: 869246

SEQ ID NO: 869254 - protein, 663 aa, Homo sapiens
MIVQMTVILKLEMPQDSLILEKSQNWSSQKMDHILICCVCLGDNSEDADEIIQCDNCGITVHEGCYGVDGESDSIMSSASENSTEPWFCDACKCGVSPSCELCPNQDGIFKETDAGRWVHIVCALYVPGVAFGDIDKLRPVTLTEMNYSKYGAKECSFCEDPRFARTGVCISCDAGMCRAYFHVTCAQKEGLLSEAAAEEDIADPFFAYCKQHADRLDRKWKRKNYLALQSYCKMSLQEREKQLSPEAQARINARLQQYRAKAELARSTRPQAWVPREKLPRPLTSSASAIRKLMRKAELMGISTDIFPVDNSDTSSSVDGRRKHKQPALTADFVNYYFERNMRMIQIQENMAEQKNIKDKLENEQEKLHVEYNKLCESLEELQNLNGKLRSEGQGIWALLGRITGQKLNIPAILRAPKERKPSKKEGGTQKTSTLPAVLYSCGICKKNHDQHLLLLCDTCKLHYHLGCLDPPLTRMPRKTKNSYWQCSECDQAGSSDMEADMAMETLPDGTKRSRRQIKEPVKFVPQDVPPEPKKIPIRNTRTRGRKRSFVPEEEKHEERVPRERRQRQSVLQKKPKAEDLRTECATCKGTGDNENLVRCDECRLCYHFGCLDPPLKKSPKQTGYGWICQECDSSSSKEDENEAERKNISQELNMEQKNPKK

SEQ ID NO: 869255 - protein, 895 aa, Homo sapiens; identical to SEQ ID NO: 869246

SEQ ID NO: 869256 - protein, 895 aa, Homo sapiens; identical to SEQ ID NO: 869246

SEQ ID NO: 869257 - protein, 205 aa, Homo sapiens
RHTLMGTGTPTSGADPLLQGARKTKQLLQCSECDQAGSSDMEADMAMETLPDGTKRSRRQIKEPVKFVPQDVPPEPKKIPIRNTRTRGRKRSFVPEEEKHEERVPRERRQRQSVLQKKPKAEDLRTECATCKGTGDNENLVRCDECRLCYHFGCLDPPLKKSPKQTGYGWICQECDSSSSKEDENEAERKNISQELNMEQKNPKK

SEQ ID NO: 869258 - protein, 833 aa, Homo sapiens
MDRSSKRRQVKPLAASLLEALDYDSSDDSDFKVGDASDSEGSGNGSEDASKDSGEGSCSDSEENILEEELNEDIKVKEEQLKNSAEEEVLSSEKQLIKMEKKEEEENGERPRKKREKEKEKEKEKEKEKEREKEKEKATVSENVAASAAATTPATSPPAVNTSPSVPTTTTATEEQVSEPKKWNLRRNRPLLDFVSMEELNDMDDYDSEDDNDWRPTVVKRKGRSASQKEGSDGDNEDDEDEGSGSDEDENDEGNDEDHSSPASEGGCKKKKSKVLSRNSADDEELTNDSLTLSQSKSNEDSLILEKSQNWSSQKMDHILICCVCLGDNSEDADEIIQCDNCGITVHEDGFIIVCALYVPGVAFGDIDKLRPVTLTEMNYSKYGAKECSFCEDPRFARTGVCISCDAGMCRAYFHVTCAQKEGLLSEAAAEEDIADPFFAYCKQHADRLDRKWKRKNYLALQSYCKMSLQEREKQLSPEAQARINARLQQYRAKAELARSTRPQAWVPREKLPRPLTSSASAIRKLMRKAELMGISTDIFPVDNSDTSSSVDGRRKHKQPALTADFVNYYFERNMRMIQIQENMAEQKNIKDKLENEQEKLHVEYNKLCESLEELQNLNGKLRSEGQGIWALLGRITGQKLNIPAILRAPKERKPSKKEGGTQKTSTLPAVLYSCGICKKNHDQHLLLLCDTCKLHYHLGCLDPPLTRMPRKTKNSYWQCSECDQAGSSDMEADMAMETLPDGTKRSRRQIKEPVKFVPQDVPPEPKKIPIRNTRTRGRKRSFVPEEEKHEERVPRERRQRQSVLQKKPKAEDLRTECATCKGTGDNENLVRK

SEQ ID NO: 869259 - protein, 361 aa, Homo sapiens
MDRSSKRRQVKPLAASLLEALDYDSSDDSDFKVGDASDSEGSGNGSEDASKDSGEGSCSDSEENILEEELNEDIKVKEEQLKNSAEEEVLSSEKQLIKMEKKEEEENGERPRKKREKEKEKEKEKEKEKEREKEKEKATVSENVAASAAATTPATSPPAVNTSPSVPTTTTATEEQVSEPKKWNLRRNRPLLDFVSMEELNDMDDYDSEDDNDWRPTVVKRKGRSASQKEGSDGDNEDDEDEGSGSDEDENDEGNDEDHSSPASEGGCKKKKSKVLSRNSADDEELTNDSLTLSQSKSNEDSLILEKSQNWSSQKMDHILICCVCLGDNSEDADEIIQCDNCGITVHEDGFILFVPCMFLE

SEQ ID NO: 869260 - protein, 333 aa, Homo sapiens
MVSKSRWKLLAMLALVLVVMVWYSISREDRYIELFYFPIPEKKEPCLQGEAESKASKLFGNYSRDQPIFLRLEDYFWVKTPSAYELPYGTKGSEDLLLRVLAITSSSIPKNIQSLRCRRCVVVGNGHRLRNSSLGDAINKYDVVIRLNNAPVAGYEGDVGSKTTMRLFYPESAHFDPKVENNPDTLLVLVAFKAMDFHWIETILSDKKRVRKGFWKQPPLIWDVNPKQIRILNPFFMEIAADKLLSLPMQQPRKIKQKPTTGLLAITLALHLCDLVHIAGFGYPDAYNKKQTIHYYEQITLKSMAGSGHNVSQEALAIKRMLEMGAIKNLTSF

SEQ ID NO: 869261 - protein, 124 aa, Homo sapiens
MVSKSRWKLLAMLALVLVVMVWYSISREDRYIELFYFPIPEKKEPCLQGEAESKASKLFGNYSRDQPIFLRLEDYFWVKTPSAYELPYGTKGSGKFLPGSWEPWAHPDHVASYSLPSTAPVPKF

SEQ ID NO: 869262 - protein, 333 aa, Homo sapiens; identical to SEQ ID NO: 869260

SEQ ID NO: 869263 - protein, 333 aa, Homo sapiens; identical to SEQ ID NO: 869260

SEQ ID NO: 869264 - protein, 333 aa, Homo sapiens; identical to SEQ ID NO: 869260

SEQ ID NO: 869265 - protein, 339 aa, Homo sapiens
MVSKSRWKLLAMLALVLVVMVWYSISREDRYIELFYFPIPEKKEPCLQGEAESKASKLFGKLSPLCSYSRDQPIFLRLEDYFWVKTPSAYELPYGTKGSEDLLLRVLAITSSSIPKNIQSLRCRRCVVVGNGHRLRNSSLGDAINKYDVVIRLNNAPVAGYEGDVGSKTTMRLFYPESAHFDPKVENNPDTLLVLVAFKAMDFHWIETILSDKKRVRKGFWKQPPLIWDVNPKQIRILNPFFMEIAADKLLSLPMQQPRKIKQKPTTGLLAITLALHLCDLVHIAGFGYPDAYNKKQTIHYYEQITLKSMAGSGHNVSQEALAIKRMLEMGAIKNLTSF

SEQ ID NO: 869266 - protein, 301 aa, Homo sapiens
MVSKSRWKLLAMLALVLVVMVWYSISREDRYIELFYFPIPEKKEPCLQGEAESKASKLFGNYSRDQPIFLRLEDYFWVKTPSAYELPYGTKGSEDLLLRVLAITSSSIPKNIQRLNNAPVAGYEGDVGSKTTMRLFYPESAHFDPKVENNPDTLLVLVAFKAMDFHWIETILSDKKRVRKGFWKQPPLIWDVNPKQIRILNPFFMEIAADKLLSLPMQQPRKIKQKPTTGLLAITLALHLCDLVHIAGFGYPDAYNKKQTIHYYEQITLKSMAGSGHNVSQEALAIKRMLEMGAIKNLTSF

SEQ ID NO: 869267 - protein, 375 aa, Homo sapiens
MVSKSRWKLLAMLALVLVVMVWYSISREDRYIELFYFPIPEKKEPCLQGEAESKASKLFGNYSRDQPIFLRLEDYFWVKTPSAYELPYGTKGSEDLLLRVLAITSSSIPKNIQRLNNAPVAGYEGDVGSKTTMRLFYPESAHFDPKVENNPDTLLVLVAFKAMDFHWIETILSDKKRVRKGFWKQPPLIWDVNPKQIRILNPFFMEIAADKLLSLPMQQPRKIKQDAEFGQSRSCQSSAEWQLNPGRSLPVLRKACNCVFTMLFQDSQGRYNFPQQERGTSEVCTAWLATQVLAKVTVGLLARPPPAVPGALTMRSGGGVLRMKHLIWPFSPWRACWVWVLEMMGGPVEKQRPIRHPGRARPCWRPLGWVQKCIH

SEQ ID NO: 869268 - protein, 437 aa, Homo sapiens
SDPLRSLGVSKRDSSAESFRPQSPQPLRPGLKRRPPPPASSSDGFSHNYPGQVQHLGADCAGGDRLCGVRLCAGVSKVAEQDPKVARGSRDDSSPQESCCLLRNMVSKSRWKLLAMLALVLVVMVWYSISREDRYIELFYFPIPEKKEPCLQGEAESKASKLFGNYSRDQPIFLRLEDYFWVKTPSAYELPYGTKGSEDLLLRVLAITSSSIPKNIQSLRCRRCVVVGNGHRLRNSSLGDAINKYDVVIRLNNAPVAGYEGDVGSKTTMRLFYPESAHFDPKVENNPDTLLVLVAFKAMDFHWIETILSDKKRVRKGFWKQPPLIWDVNPKQIRILNPFFMEIAADKLLSLPMQQPRKIKQKPTTGLLAITLALHLCDLVHIAGFGYPDAYNKKQTIHYYEQITLKSMAGSGHNVSQEALAIKRMLEMGAIKNLTSF

SEQ ID NO: 869269 - protein, 333 aa, Homo sapiens; identical to SEQ ID NO: 869260

SEQ ID NO: 869270 - protein, 333 aa, Homo sapiens; identical to SEQ ID NO: 869260

SEQ ID NO: 869271 - protein, 333 aa, Homo sapiens; identical to SEQ ID NO: 869260

SEQ ID NO: 869272 - protein, 356 aa, Homo sapiens
MELVARGSRDDSSPQESCCLLRNMVSKSRWKLLAMLALVLVVMVWYSISREDRYIELFYFPIPEKKEPCLQGEAESKASKLFGNYSRDQPIFLRLEDYFWVKTPSAYELPYGTKGSEDLLLRVLAITSSSIPKNIQSLRCRRCVVVGNGHRLRNSSLGDAINKYDVVIRLNNAPVAGYEGDVGSKTTMRLFYPESAHFDPKVENNPDTLLVLVAFKAMDFHWIETILSDKKRVRKGFWKQPPLIWDVNPKQIRILNPFFMEIAADKLLSLPMQQPRKIKQKPTTGLLAITLALHLCDLVHIAGFGYPDAYNKKQTIHYYEQITLKSMAGSGHNVSQEALAIKRMLEMGAIKNLTSF

SEQ ID NO: 869273 - protein, 275 aa, Homo sapiens
MVSKSRWKLLAMLALVLVVMVWYSISREDRYIELFYFPIPEKKEPCLQGEAESKASKLFGNYSRDQPIFLRLEDYFWVKTPSAYELPYGTKGSEDLLLRVLAITSSSIPKNIQSLRCRRCVVVGNGHRLRNSSLGDAINKYDVVIRLNNAPVAGYEGDVGSKTTMRLFYPESAHFDPKVENNPDTLLVLVAFKAMDFHWIETILSDKKRVRKGFWKQPPLIWDVNPKQIRILNPFFMEIAADKLLSLPMQQPRKIKQMENVSVTAGSSTAERWQR

SEQ ID NO: 869274 - protein, 407 aa, Homo sapiens
MVSKSRWKLLAMLALVLVVMVWYSISREDRYIELFYFPIPEKKEPCLQGEAESKASKLFGNYSRDQPIFLRLEDYFWVKTPSAYELPYGTKGSEDLLLRVLAITSSSIPKNIQSLRCRRCVVVGNGHRLRNSSLGDAINKYDVVIRLNNAPVAGYEGDVGSKTTMRLFYPESAHFDPKVENNPDTLLVLVAFKAMDFHWIETILSDKKRVRKGFWKQPPLIWDVNPKQIRILNPFFMEIAADKLLSLPMQQPRKIKQDAEFGQSRSCQSSAEWQLNPGRSLPVLRKACNCVFTMLFQDSQGRYNFPQQERGTSEVCTAWLATQVLAKVTVGLLARPPPAVPGALTMRSGGGVLRMKHLIWPFSPWRACWVWVLEMMGGPVEKQRPIRHPGRARPCWRPLGWVQKCIH

SEQ ID NO: 869275 - protein, 316 aa, Homo sapiens
RKSRGGSKETRSPRLMAMLVLVPGRVMRPLGGQLWRFLPRGLEFWGPAEGTARVLLRQFCARQAEAWRASGRPGYCLGTRPLSTARPPPPWSQKGPGDSTRPSKPGPVSWKSLAITFAIGGALLAGMKHVKKEKAEKLEKERQRHIGKPLLGGPFSLTTHTGERKTDKDYLGQWLLIYFGFTHCPDVCPEELEKMIQVVDEIDSITTLPDLTPLFISIDPERDTKEAIANYVKEFSPKLVGLTGTREEVDQVARAYRVYYSPGPKDEDEDYIVDHTIIMYLIGPDGEFLDYFGQNKRKGEIAASIATHMRPYRKKS

SEQ ID NO: 869276 - protein, 316 aa, Homo sapiens; identical to SEQ ID NO: 869275

SEQ ID NO: 869277 - protein, 232 aa, Homo sapiens
HATPPPPRPPPPPPADYRYGMSPVSWKSLAITFAIGGALLAGMKHVKKEKAEKLEKERQRHIGKPLLGGPFSLTTHTGERKTDKDYLGQWLLIYFGFTHCPDVCPEELEKMIQVVDEIDSITTLPDLTPLFISIDPERDTKEAIANYVKEFSPKLVGLTGTREEVDQVARAYRVYYSPGPKDEDEDYIVDHTIIMYLIGPDGEFLDYFGQNKRKGEIAASIATHMRPYRKKS

SEQ ID NO: 869278 - protein, 316 aa, Homo sapiens; identical to SEQ ID NO: 869275

SEQ ID NO: 869279 - protein, 298 aa, Homo sapiens
RKSRGGSKETRSPRLMAMLVLVPGRVMRPLGGQLWRFLPRGLEFWGPAEGTARVLLRQFCARQAEAWRASGRPGYCLGTRPLSTARPPPPWSQKGPGDSTRPSKPGPVSWKSLAITFAIGGALLAGMKHVKKEKAEKLEKERQRHIGKPLLGGPFSLTTHTGEPHCPDVCPEELEKMIQVVDEIDSITTLPDLTPLFISIDPERDTKEAIANYVKEFSPKLVGLTGTREEVDQVARAYRVYYSPGPKDEDEDYIVDHTIIMYLIGPDGEFLDYFGQNKRKGEIAASIATHMRPYRKKS

SEQ ID NO: 869280 - protein, 226 aa, Homo sapiens
MQVLQCAAGGNVNVEMNAAPGVDLTVLLNNMRAEYEALAEQNRRDAEAWFNEKSASLQQQISEDVGATTSARNELTEMKRTLQTLEIELQSLLATKHSLECSLTETESNYCAQLAQIQAQIGALEEQLHQVRTETEGQKLEYEQLLDIKLHLEKEIETYCLLIGGDDGACKSGGYKSKDYGSGNVGSQVKDPAKAIVVKKVLEEVDQRSKILTTRLHSLEEKSQSN

SEQ ID NO: 869281 - protein, 121 aa, Homo sapiens
AIWEVEEEQEEEKETTRPVMVSRAYGGGGSGGGEKKEERKETEQKELEEEEVEEEEGKEMEQQEEGKEMEEEEQEENEMEEEEEEKEMEEEKETGGGKRNGGGRGGGGQRNSQAGRGGSPL

SEQ ID NO: 869282 - protein, 138 aa, Homo sapiens
MNVSLEKQLRPSQPWPRGKCRKTPGWEEARPKAQDLRGDLGKTQAGPAEAHTRGPPRLPAATGCPPHLPGLLSGISVDIDPTGLQSQWTPKGQDPPLMFSEDYQKSLLEQYHLGLDQKLRKYVVGELIWNFADFMTNQ

SEQ ID NO: 869283 - protein, 123 aa, Homo sapiens
MNVSLEKQLRPSQPWPRGKCRKTPGWEEARPKAQDLRGDLGKTQAGPAEAHTRGPPRLPAATGCPPHLPGLLSGISVDIDPTGLQSQWTPKGQRWGLSILPRPVVNSWVQAIHPPRPLEVLGL

SEQ ID NO: 869284 - protein, 54 aa, Homo sapiens
MWQTCFTLSGLLWELIRTMGDWAEVFLLQRGSWTGARCWPWGFQSKHNSVKHVF

SEQ ID NO: 869285 - protein, 121 aa, Homo sapiens; identical to SEQ ID NO: 869281

SEQ ID NO: 869286 - protein, 183 aa, Homo sapiens
MNVSLEKQLRPSQPWPRGKCRKTPGWEEARPKAQDLRGDLGKTQAGPAEAHTRGPPRLPAATGCPPHLPGLLSGISVDIDPTGLQSQWTPKGQDPPLMFSEDYQKSLLEQYHLGLDQKLRKYVVGELIWNFADFMTNQCKRQFGSWDNVPVLIFSGCLAHSGHLDCKNIGNKARSWFNPCRLR

SEQ ID NO: 869287 - protein, 140 aa, Homo sapiens
MNVSLEKQLRPSQPWPRGKCRKTPGWEEARPKAQDLRGDLGKTQAGPAEAHTRGPPRLPAATGCPPHLPGLLSGISVDIDPTGLQSQWTPKGQDPPLMFSEDYQKSLLEQYHLGLDQKLRKYVVGELIWNFADFMTNQCG

SEQ ID NO: 869288 - protein, 430 aa, Homo sapiens
MATLSVKPSRRFQLPDWHTNSYLLSTNAQLQRDASHQIRQEARVLRNETNNQTIWDEHDNRTRLVERIDTVNRWKEMLDKCLTDLDAEIDALTQMKESAEQNLQAKNLPLDVAIECLTLRESRRDIDVVKDPVEDELHKEVEVIEATKKALQQKVSQAFEQLCLLQEVQQQLNSDHRGKMETLEIDRGCLSLNLRSPNISLKVDPTRVPDGSTTLQQWDDFSRFNKDRAEAEMKAATELREATALTIAETNNELEAQRVATEFAFRKRLREMEKVYSELKWQEKNTLEEIAELQEDIRHLEEDLRTKLLSLKLSHTRLEARTYRPNVELCRDQAQYGLTDEVHQLEATIAALKQKLAQAQDALDALCKHLARLQADIACKANSMLLDTKCMDTRRKLTVPAERFVPEVDTFTRTTNSTLSPLKSCQLELA

SEQ ID NO: 869289 - protein, 474 aa, Homo sapiens
MATLSVKPSRRFQLPDWHTNSYLLSTNAQLQRDASHQIRQEARVLRNETNNQTIWDEHDNRTRLVERIDTVNRWKEMLDKCLTDLDAEIDALTQRRGFTIFGQAVLELLTSSVPSNSASRSAGITDVSHRARPRPLFQMKESAEQNLQAKNLPLDVAIECLTLRESRRDIDVVKDPVEDELHKEVEVIEATKKALQQKVSQAFEQLCLLQEVQQQLNSDHRGKMETLEIDRGCLSLNLRSPNISLKVDPTRVPDGSTTLQQWDDFSRFNKDRAEAEMKAATELREATALTIAETNNELEAQRVATEFAFRKRLREMEKVYSELKWQEKNTLEEIAELQEDIRHLEEDLRTKLLSLKLSHTRLEARTYRPNVELCRDQAQYGLTDEVHQLEATIAALKQKLAQAQDALDALCKHLARLQADIACKANSMLLDTKCMDTRRKLTVPAERFVPEVDTFTRTTNSTLSPLKSCQLELA

SEQ ID NO: 869290 - protein, 392 aa, Homo sapiens
MATLSVKPSRRFQLPDWHTNSYLLSTNAQLQRDASHQIRQEARVLRNETNNQTIWDEHDNRTRLVERIDTVNRWKEMLDKCLTDLDAEIDALTQMKESAEQNLQAKNLPLDVAIECLTLRESRRDIDVVKDPVEDELHKEVEVIEATKKALQQKVSQAFEQLCLLQEVQQQLNSDHRGKMETLEIDRGCLSLNLRSPNISLKVDPTRVPDGTNNELEAQRVATEFAFRKRLREMEKVYSELKWQEKNTLEEIAELQEDIRHLEEDLRTKLLSLKLSHTRLEARTYRPNVELCRDQAQYGLTDEVHQLEATIAALKQKLAQAQDALDALCKHLARLQADIACKANSMLLDTKCMDTRRKLTVPAERFVPEVDTFTRTTNSTLSPLKSCQLELA

SEQ ID NO: 869291 - protein, 326 aa, Homo sapiens
MFFIHKRVHIGQTFGKYNEYEKACNNSAIIVQGITQVRQPTCCRKSDFSKHQQTHTGEKPHECVECEKPSISKSDLMIQHKMPTEEKPYACNWCEKLFSYKSSLTIHQRIHTGEKPYGCNECGKTVRCKSFLTLHQRTHTGDKPYKCIECGKTFTVNQLLTLHHRTHSGEKPYQCSECGKTFSQKSYLTIHHRTHTWQKPYACDHCEKAFNHKSKLTVHQRTHTGEKPYECNECRKPFINKSNLRIHQRTHIRKNPMNAMNVGKRFTKSRSSLSIKGLTKAKNPTNATNVGKPFTICHSSLSIRELILGKKHMHVTNVEKRIATSH

SEQ ID NO: 869292 - protein, 262 aa, Homo sapiens
ASLWKGSLRLGTEAAARRTAGAMYLRRAVSKTLALPLRAPPNPAPLGKDASLRRMSSNRFPGSSGSNMIYYLVVGVTVSAGGYYAYKTVTSDQAKHTEHKTNLKEKTKAEIHPFQGEKENVAETEKASSEAPEELIVEAEVVDAEESPSATVVVIKEASACPGHVEAAPETTAVSAETGPEVTDAAARETTEVNPETTPEVTNAALDEAVTIDNDKDTTKNETSDEYAELEEENSPAESESSAGDDLQEEASVGSEAASAQG

SEQ ID NO: 869293 - protein, 333 aa, Homo sapiens
MKGKEEKEGGARLGAGGGSPEKSPSAQELKEQGNRLFVGRKYPEAAACYGRAIPERRSWDGPWVRVGTLSLRPHAAGPALVPMTRNPLVAVYYTNRALCYLKMQQHEQALADCRRALELDGQSVKAHFFLGQCQLEMESYDEAIANLQRAYSLAKEQRLNFGDDIPSALRIAKKKRWNSIEERRIHQESELHSYLSRLIAAERERELEECQRNHEGDEDDSHVRAQQACIEAKHDKYMADMDELFSQVDEKRKKRDIPDYLCGKISFELMREPCITPSGITYDRKDIEEHLQRVGHFDPVTRSPLTQEQLIPNLAMKEVIDAFISENGWVEDY

SEQ ID NO: 869294 - protein, 303 aa, Homo sapiens
MKGKEEKEGGARLGAGGGSPEKSPSAQELKEQGNRLFVGRKYPEAAACYGRAITRNPLVAVYYTNRALCYLKMQQHEQALADCRRALELDGQSVKAHFFLGQCQLEMESYDEAIANLQRAYSLAKEQRLNFGDDIPSALRIAKKKRWNSIEERRIHQESELHSYLSRLIAAERERELEECQRNHEGDEDDSHVRAQQACIEAKHDKYMADMDELFSQVDEKRKKRDIPDYLCGKISFELMREPCITPSGITYDRKDIEEHLQRVGHFDPVTRSPLTQEQLIPNLAMKEVIDAFISENGWVEDY

SEQ ID NO: 869295 - protein, 303 aa, Homo sapiens; identical to SEQ ID NO: 869294

SEQ ID NO: 869296 - protein, 231 aa, Homo sapiens
MQQHEQALADCRRALELDGQSVKAHFFLGQCQLEMESYDEAIANLQRAYSLAKEQRLNFGDDIPSALRIAKKKRWNSIEERRIHQESELHSYLSRLIAAERERELEECQRNHEGDEDDSHVRAQQACIEAKHDKYMADMDELFSQVDEKRKKRDIPDYLCGKISFELMREPCITPSGITYDRKDIEEHLQRVGHFDPVTRSPLTQEQLIPNLAMKEVIDAFISENGWVEDY

SEQ ID NO: 869297 - protein, 349 aa, Homo sapiens
MKGKEEKEGGARLGAGGGSPEKSPSAQELKEQGNRLFVGRKYPEAAACYGRAITRNPLVAVYYTNRALCYLKMQQHEQALADCRRALELDGQSVKAHFFLGQCQLEMESYDEAIANLQRAYSLAKEQRLNFGDDIPSALRIAKKKRWNSIEERRIHQESELHSYLSRLIAAERERELEECQRNHEGDEDDSHVRAQQACIEAKHVRVPPTHMWVCVCARGVGASPPCVGSVPMEEGGGVSPPSTALNSSQDKYMADMDELFSQVDEKRKKRDIPDYLCGKISFELMREPCITPSGITYDRKDIEEHLQRVGHFDPVTRSPLTQEQLIPNLAMKEVIDAFISENGWVEDY

SEQ ID NO: 869298 - protein, 246 aa, Homo sapiens
MKGKEEKEGGARLGAGGGSPEKSPSAQELKEQGNRLFVGRKYPEAAACYGRAITRNPLVAVYYTNRALCYLKMQQHEQALADCRRALELDGQSVKAHFFLGQCQLEMESYDEAIANLQRAYSLAKEQRLNFGDDIPSALRIAKKKRWNSIEERRIHQESELHSYLSRLIAAERERELEECQRNHEGDEDDSHVRAQQACIEAKHVRVPPTHMTSTWRTWTSFFLRWMRRGRSETSPTTCVARSALS

SEQ ID NO: 869299 - protein, 266 aa, Homo sapiens
MKGKEEKEGGARLGAGGGSPEKSPSAQELKEQGNRLFVGRKYPEAAACYGRAITRNPLVAVYYTNRALCYLKMQQHEQALADCRRALELDGQSVKAHFFLGQCQLEMESYDEAIANLQRAYSLAKEQRLNFGDDIPSALRIAKKKRWNSIEERRIHQESELHSYLSRLIAAERERELEECQRNHEGDEDDSHVRAQQACIEAKHDKYMADMDELFSQVDEKRKVSVCRLLPMAGRCSCSAPFQPLTVCPCATEARHPRLPVWQDQL

SEQ ID NO: 869300 - protein, 265 aa, Homo sapiens [sequence omitted]

SEQ ID NO: 869301 - protein, 279 aa, Homo sapiens
MKGKEEKEGGARLGAGGGSPEKSPSAQELKEQGNRLFVGRKYPEAAACYGRAITRNPLVAVYYTNRALCYLKMQQHEQALADCRRALELDGQSVKAHFFLGQCQLEMESYDEAIANLQRAYSLAKEQRLNFGDDIPSALRIAKKKRWNSIEERRIHQESELHSYLSRLIAAERERELEECQRNHEGDEDDSHVRAQQACIEAKHDKYMADMDELFSQVDEKRKKRDIPDYLCGKISFELMREPCITPSGITYDRKDIEEHLQVRPAAGGAGPVAWSWAP

SEQ ID NO: 869302 - protein, 266 aa, Homo sapiens; identical to SEQ ID NO: 869299

SEQ ID NO: 869303 - protein, 265 aa, Homo sapiens [sequence omitted]

SEQ ID NO: 869304 - protein, 201 aa, Homo sapiens
MKGKEEKEGGARLGAGGGSPEKSPSAQELKEQGNRLFVGRKYPEAAACYGRAITRNPLVAVYYTNRALCYLKMQQHEQALADCRRALELDGQSVKAHFFLGQCQLEMESYDEAIANLQRAYSLAKEQRLNFGDDIPSALRIAKKKRWNSIEERRIHQESELHSYLSRLIAAERERELEECQRNHRDVARDVARDVSGASSI

SEQ ID NO: 869305 - protein, 98 aa, Homo sapiens
GMCCGRSRGSLSTLEDAAPEDGGGVSPPSTALNSSQDKYMADMDELFSQVDEKRKVSVCRLLPMAGRCSCSAPFQPLTVCPCATEARHPRLPVWQDQL

SEQ ID NO: 869306 - protein, 303 aa, Homo sapiens; identical to SEQ ID NO: 869294

SEQ ID NO: 869307 - protein, 303 aa, Homo sapiens; identical to SEQ ID NO: 869294

SEQ ID NO: 869308 - protein, 483 aa, Homo sapiens
LGSNSDFLYNCLISLFWAVCCSSGSPSFCYLRQVKLVSHPSVVKARKAMLSGSAHSFGDNQLSRVPPTPAGNKSRTAAVSLRCPCNHGFDKVSVSWGINDSHIVLAGLKFPQGDINGDTTFTLSFHLSKTQAYLKEPFPISAASFSNFFNGSFVDATAFIDQMASSGGLARIYVSNDDNVDMSLFLSHFGFLGVVFTTPVFGGPSAQELKEQGNRLFVGRKYPEAAACYGRAITRNPLVAVYYTNRALCYLKMQQHEQALADCRRALELDGQSVKAHFFLGQCQLEMESYDEAIANLQRAYSLAKEQRLNFGDDIPSALRIAKKKRWNSIEERRIHQESELHSYLSRLIAAERERELEECQRNHEGDEDDSHVRAQQACIEAKHDKYMADMDELFSQVDEKRKKRDIPDYLCGKISFELMREPCITPSGITYDRKDIEEHLQRVGHFDPVTRSPLTQEQLIPNLAMKEVIDAFISENGWVEDY

SEQ ID NO: 869309 - protein, 284 aa, Homo sapiens
MKGKEEKEGGARLGAGGGSPEKSPSAQELKEQGNRLFVGRKYPEAAACYGRAIMQQHEQALADCRRALELDGQSVKAHFFLGQCQLEMESYDEAIANLQRAYSLAKEQRLNFGDDIPSALRIAKKKRWNSIEERRIHQESELHSYLSRLIAAERERELEECQRNHEGDEDDSHVRAQQACIEAKHDKYMADMDELFSQVDEKRKKRDIPDYLCGKISFELMREPCITPSGITYDRKDIEEHLQRVGHFDPVTRSPLTQEQLIPNLAMKEVIDAFISENGWVEDY

SEQ ID NO: 869310 - protein, 303 aa, Homo sapiens; identical to SEQ ID NO: 869294

SEQ ID NO: 869311 - protein, 279 aa, Homo sapiens; identical to SEQ ID NO: 869301

SEQ ID NO: 869312 - protein, 265 aa, Homo sapiens [sequence omitted]

SEQ ID NO: 869313 - protein, 230 aa, Homo sapiens
MKGKEEKEGGARLGAGGGSPEKSPSAQELKEQGNRLFVGRKYPEAAACYGRAICQLEMESYDEAIANLQRAYSLAKEQRLNFGDDIPSALRIAKKKRWNSIEERRIHQESELHSYLSRLIAAERERELEECQRNHEGDEDDSHVRAQQACIEAKHDKYMADMDELFSQVDEKRKKRDIPDYLCGKISFELMREPCITPSGITYDRKDIEEHLQVRPAAGGAGPVAWSWAP

SEQ ID NO: 869314 - protein, 137 aa, Homo sapiens
MDLLTIFVSAKLASYVKFYQNNKDFIDSLGLLHEQNMAKMRLLTFMGMAVENKEISFDTMQQELQIGADDVEAFVIDAVRTKMVYCKIDQTQRKVVVSHSTHRTFGKQQWQQLYDTLNAWKQNLNKVKNSLLSLSDT

SEQ ID NO: 869315 - protein, 137 aa, Homo sapiens; identical to SEQ ID NO: 869314

SEQ ID NO: 869316 - protein, 137 aa, Homo sapiens; identical to SEQ ID NO: 869314

SEQ ID NO: 869317 - protein, 137 aa, Homo sapiens; identical to SEQ ID NO: 869314

SEQ ID NO: 869318 - protein, 135 aa, Homo sapiens
MDLLTIFVSAKLASYVKFYQNNKDFIDSLGLLHEQNMAKMRLLTFMGMAVENKEISFDTMQQELQIGADDVEAFVIDAVRTKMVYCKIDQTQRKVVVSCSGELEGLGSIVIAHIGHLENSSGNNCMTHLMPGNKI

SEQ ID NO: 869319 - protein, 112 aa, Homo sapiens
TRPNLRLGTRLGVAAWSCEWSVRCARACTMSVPAFIDISEEDQAAELRAYLKSKGAEISEENSEGGLHVDLAQIIEACDVCLKEDDKDVESVMNSVVSLLCDPGTRQARSFD

SEQ ID NO: 869320 - protein, 137 aa, Homo sapiens; identical to SEQ ID NO: 869314

SEQ ID NO: 869321 - protein, 137 aa, Homo sapiens; identical to SEQ ID NO: 869314

SEQ ID NO: 869322 - protein, 112 aa, Homo sapiens; identical to SEQ ID NO: 869319

SEQ ID NO: 869323 - protein, 108 aa, Homo sapiens
NLRLGTRLGAAWSCEWSVRCARACTMSVPAFIDISEEDQAAELRAYLKSKGAEISEENSEGGLHVDLAQIIEACDVCLKEDDKDVESVMNSVVSLLCDPGTRQARSFD

SEQ ID NO: 869324 - protein, 137 aa, Homo sapiens; identical to SEQ ID NO: 869314

SEQ ID NO: 869325 - protein, 191 aa, Homo sapiens
MVGIARKVTQRTNASQARVDAHRCIVRALKDPNAFLFDHLLTLKPVKFLEGELIHDSFNHFVSAKLASYVKFYQNNKDFIESPGLLHEQNMAKMRLLTFMGMAVENKEISFDTMQQELQIGADDVEAFVIDAVRTKMVYCKIDQTQRKVVVSHSTHRTFGKQQWQQLYDTLNAWKQNLNKVKNSLLSLSDT

SEQ ID NO: 869326 - protein, 137 aa, Homo sapiens; identical to SEQ ID NO: 869314

SEQ ID NO: 869327 - protein, 108 aa, Homo sapiens; identical to SEQ ID NO: 869323

SEQ ID NO: 869328 - protein, 108 aa, Homo sapiens; identical to SEQ ID NO: 869323

SEQ ID NO: 869329 - protein, 108 aa, Homo sapiens; identical to SEQ ID NO: 869323

SEQ ID NO: 869330 - protein, 60 aa, Homo sapiens
MRNDVCFRPSNAATFGVGGGESVVSISRVGKSNFVLKIKMPGRARWLTPLIPALWDAEAG

SEQ ID NO: 869331 - protein, 137 aa, Homo sapiens; identical to SEQ ID NO: 869314

SEQ ID NO: 869332 - protein, 137 aa, Homo sapiens; identical to SEQ ID NO: 869314

SEQ ID NO: 869333 - protein, 112 aa, Homo sapiens; identical to SEQ ID NO: 869319

SEQ ID NO: 869334 - protein, 112 aa, Homo sapiens; identical to SEQ ID NO: 869319

SEQ ID NO: 869335 - protein, 191 aa, Homo sapiens
MVGIARKVTQRTNASQARVDAHRCIVRALKDPNAFLFDHLLTLKPVKFLEGELIHDLLTIFVSAKLASYVKFYQNNKDFIDSLGLLHEQNMAKMRLLTFMGMAVENKEISFDTMQQELQIGADDVEAFVIDAVRTKMVYCKIDQTQRKVVVSHSTHRTFGKQQWQQLYDTLNAWKQNLNKVKNSLLSLSDT

SEQ ID NO: 869336 - protein, 112 aa, Homo sapiens; identical to SEQ ID NO: 869319

SEQ ID NO: 869337 - protein, 191 aa, Homo sapiens; identical to SEQ ID NO: 869335

SEQ ID NO: 869338 - protein, 112 aa, Homo sapiens; identical to SEQ ID NO: 869319

SEQ ID NO: 869339 - protein, 191 aa, Homo sapiens
MVGIARKVTQRTNASQARVDAHRCIVRALKDPNAFLFDHLLTLKTSQVLEGELIHDLLTILGVLNGDPYVKFYQNNKDFIESPGLLHEQNMAKMRLLTFMGMAVENKEISFDTMQQELQIGADDVEAFVIDAVRTKMVYCKIDQTQRKVVVSHSTHRTFGKQQWQQLYDTLNAWKQNLNKVKNSLLSLSDT

SEQ ID NO: 869340 - protein, 137 aa, Homo sapiens; identical to SEQ ID NO: 869314

SEQ ID NO: 869341 - protein, 137 aa, Homo sapiens; identical to SEQ ID NO: 869314

SEQ ID NO: 869342 - protein, 85 aa, Homo sapiens
NLRLGTRLGAAWSCEWSVRCARACTMSVPAFIDISEEDQAAELRAYLKSKGAEISEENSEGGLHVDLAQIIEACDVCLKEDDKHQ

SEQ ID NO: 869343 - protein, 161 aa, Homo sapiens
MLLQSQTMGVSHSFTPKGITIPQREKPGHMYQNEDYLQNGLPTETTVLGFGITGSLSIISGKQSTKPFDLSSLTSNAVSSVTAGAGLFLLADSMVALRTASQHCGSEMDYLSSLPYSEYYYPIYEIKDCLLTSVSLTSSFSSTQSQDHIQQVKKSSSRSWI

SEQ ID NO: 869344 - protein, 240 aa, Homo sapiens
MLLQSQTMGVSHSFTPKGITIPQREKPGHMYQNEDYLQNGLPTETTVLGTVQILCCLLISSLGAILVFAPYPSHFNPAISTTLMSGYPFLGALCFGITGSLSIISGKQSTKPFDLSSLTSNAVSSVTAGAGLFLLADSMVALRTASQHCGSEMDYLSSLPYSEYYYPIYEIKDCLLTSVSLTGVLVVMLIFTVLELLLAAYSSVFWWKQLYSNNPGSSFSSTQSQDHIQQVKKSSSRSWI

SEQ ID NO: 869345 - protein, 102 aa, Homo sapiens
MVALRTASQHCGSEMDYLSSLPYSEYYYPIYEIKDCLLTSVSLTGVLVVMLIFTVLELLLAAYSSVFWWKQLYSNNPGSSFSSTQSQDHIQQVKKSSSRSWI

SEQ ID NO: 869346 - protein, 177 aa, Homo sapiens
MLLQSQTMGVSHSFTPKGITIPQREKPGHMYQNEDYLQNGLPTETTVLGFGITGSLSIISGSVTAGAGLFLLADSMVALRTASQHCGSEMDYLSSLPYSEYYYPIYEIKDCLLTSVSLTGVLVVMLIFTVLELLLAAYSSVFWWKQLYSNNPGSSFSSTQSQDHIQQVKKSSSRSWI

SEQ ID NO: 869347 - protein, 270 aa, Homo sapiens
FTSCVIINTALRKGQEVSEAGEQSTKIVLAGTASGRFQLSAPQSIISIMLLQSQTMGVSHSFTPKGITIPQREKPGHMYQNEDYLQNGLPTETTVLGTVQILCCLLISSLGAILVFAPYPSHFNPAISTTLMSGYPFLGALCFGITGSLSIISGSVTAGAGLFLLADSMVALRTASQHCGSEMDYLSSLPYSEYYYPIYEIKDCLLTSVSLTGVLVVMLIFTVLELLLAAYSSVFWWKQLYSNNPGSSFSSTQSQDHIQQVKKSSSRSWI

SEQ ID NO: 869348 - protein, 240 aa, Homo sapiens; identical to SEQ ID NO: 869344

SEQ ID NO: 869349 - protein, 102 aa, Homo sapiens
MLLQSQTMGVSHSFTPKGITIPQREKPGHMYQNEDYLQNGLPTETTVLGTVQILCCLLISSLGAILVFAPYPSHFNPAISTTLMSGYPFLGALCGEESMKTS

SEQ ID NO: 869350 - protein, 214 aa, Homo sapiens
MLLQSQTMGVSHSFTPKGITIPQREKPGHMYQNEDYLQNGLPTETTVLGTVQILCCLLISSLGAILVFAPYPSHFNPAISTTLMSGYPFLGALCFGITGSLSIISGKQSTKPFDLSSLTSNAVSSVTAGAGLFLLADSMVALRTASQHCGSEMDYLSSLPYSEYYYPIYEIKDCLLTSVSLTVSSFRLNILSCESSVSPLCILSAFLAVSGWSV

SEQ ID NO: 869351 - protein, 240 aa, Homo sapiens; identical to SEQ ID NO: 869344

SEQ ID NO: 869352 - protein, 240 aa, Homo sapiens; identical to SEQ ID NO: 869344

SEQ ID NO: 869353 - protein, 195 aa, Homo sapiens
MLLQSQTMGVSHSFTPKGITIPQREKPGHMYQNEDYLQNGLPTETTVLGFGITGSLSIISGKQSTKPFDLSSLTSNAVSSVTAGAGLFLLADSMVALRTASQHCGSEMDYLSSLPYSEYYYPIYEIKDCLLTSVSLTGVLVVMLIFTVLELLLAAYSSVFWWKQLYSNNPGSSFSSTQSQDHIQQVKKSSSRSWI

SEQ ID NO: 869354 - protein, 263 aa, Homo sapiens
MTQNCAKGRTEGGVSPRSSIISIMLLQSQTMGVSHSFTPKGITIPQREKPGHMYQNEDYLQNGLPTETTVLGTVQILCCLLISSLGAILVFAPYPSHFNPAISTTLMSGYPFLGALCFGITGSLSIISGKQSTKPFDLSSLTSNAVSSVTAGAGLFLLADSMVALRTASQHCGSEMDYLSSLPYSEYYYPIYEIKDCLLTSVSLTGVLVVMLIFTVLELLLAAYSSVFWWKQLYSNNPGSSFSSTQSQDHIQQVKKSSSRSWI

SEQ ID NO: 869355 - protein, 166 aa, Homo sapiens
MYQNEDYLQNGLPTETTVLGFGITGSLSIISGKQSTKPFDLSSLTSNAVSSVTAGAGLFLLADSMVALRTASQHCGSEMDYLSSLPYSEYYYPIYEIKDCLLTSVSLTGVLVVMLIFTVLELLLAAYSSVFWWKQLYSNNPGSSFSSTQSQDHIQQVKKSSSRSWI

SEQ ID NO: 869356 - protein, 121 aa, Homo sapiens
MTQNCAKGRTEGGVSPRSSIISIMLLQSQTMGVSHSFTPKGITIPQREKPGHMYQNEDYLQNGLPTETTVLGTVQILCCLLISSLGAILVFAPYPSHFNPAISTTLMSGYPFLGALCGRSQ

SEQ ID NO: 869357 - protein, 104 aa, Homo sapiens
MTFGEDCVLLKRQPGNWIIILSLILTTCVSWSVSSVPFLGLSLLTCQIRKLGKTILEVSLIEVIFLNVLHSPGVSLSLTESTLNKYCAIRLNLALEPHGPTLIL

SEQ ID NO: 869358 - protein, 125 aa, Homo sapiens
MEEDEFIGEKTFQRYCAEFIKHSQQIGDSWEWRPSKDCSDGYMCKIHFQIKNGSVMSHLGASTHGQTCLPMEVKSCSVTQAGVQLRDLSSLQPPPSGFKQFSCLSLPSNWDYRGSPLHLANFLYF

SEQ ID NO: 869359 - protein, 220 aa, Homo sapiens [sequence omitted]

SEQ ID NO: 869360 - protein, 184 aa, Homo sapiens
MEEDEFIGEKTFQRYCAEFIKHSQQIGDSWEWRPSKDCSDGYMCKIHFQIKNGSVMSHLGASTHGQTCLPMEEAFELPLDDCEVIETAAASEVIKYEYHVLYSCSYQVPVLYFRASFLDGRPLTLKDIWEGVHECYKMRLLQGPWDTITQQEHPILGQPFFVLHPCKTNEFMTPVLKNSQKINK

SEQ ID NO: 869361 - protein, 184 aa, Homo sapiens; identical to SEQ ID NO: 869360

SEQ ID NO: 869362 - protein, 149 aa, Homo sapiens
MLVSYSLVMKVAVACEAGLMVLSFEAFELPLDDCEVIETAAASEVIKYGRPLTLKDIWEGVHECYKMRLLQGPWDTITQQEHPILGQPFFVLHPCKTNEFMTPVLKNSQKINKNVNYITSWLSIVGPVVGLNLPLSYAKATSQDERNVH

SEQ ID NO: 869363 - protein, 190 aa, Homo sapiens
MEEDEFIGEKTFQRYCAEFIKHSQQIGDSWEWRPSKDCSDGYMCKIHFQIKNGSVMSHLGASTHGQTCLPMEEAFELPLDDCEVIETAAASEVIKYEYHVLYSCSYQVPVLYFRASFLDGRPLTLKDIWEGVHECYKMRLLQGPWDTITQQGQKRNIGYFDNLKADSRNITNSMTFATKSSNQNFIIFLE

SEQ ID NO: 869364 - protein, 150 aa, Homo sapiens
MEEDEFIGEKTFQRYCAEFIKHSQQIGDSWEWRPSKDCSDGYMCKIHFQIKNGSVMSHLGASTHGQTCLPMEEAFELPLDDCEVIETAAASEVIKYEYHVLYSCSYQVPVLYFRASFLGKNMSEAKSKFITFTYKAKSIFGKLFSRGKKI

SEQ ID NO: 869365 - protein, 125 aa, Homo sapiens; identical to SEQ ID NO: 869358

SEQ ID NO: 869366 - protein, 220 aa, Homo sapiens [sequence omitted]

SEQ ID NO: 869367 - protein, 220 aa, Homo sapiens [sequence omitted]

SEQ ID NO: 869368 - protein, 107 aa, Homo sapiens
MSSHGDGRPLTLKDIWEGVHECYKMRLLQGPWDTITQQEHPILGQPFFVLHPCKTNEFMTPVLKNSQKINKNVNYITSWLSIVGPVVGLNLPLSYAKATSQDERNVH

SEQ ID NO: 869369 - protein, 206 aa, Homo sapiens
MEEDEFIGEKTFQRYCAEFIKHSQQIGDSWEWRPSKDCSDGYMCKIHFQIKNGSVMSHLGASTHGQTCLPMEEAFELPLDDCEVIETAAASEVIKYEYHVLYSCSYQVPVLYFRASFLDGRPLTLKDIWEGVHECYKMRLLQGPWDTITQQEHPILGQPFFVLHPCKTNEFMTPVLKNSQKINKAKRETLATLTTLKRTPGISPTA

SEQ ID NO: 869370 - protein, 113 aa, Homo sapiens
VVYRHLAYADCSLAVVSYLQNSADADGRPLTLKDIWEGVHECYKMRLLQGPWDTITQQEHPILGQPFFVLHPCKTNEFMTPVLKNSQKINKAKRETLATLTTLKRTPGISPTA

SEQ ID NO: 869371 - protein, 227 aa, Homo sapiens
MADANKAEVPGATGGDSPHLQPAEPPGEPRREPHPAEAEKQQPQHSSSSNGVKMENDESAKEEKSDLKEKSTGSKKANRFHPYSKDKNSGTGEKKGPNRNRVFISNIPYDMKWQAIKDLMREKGVVEFKDEEFVKKALETMNKYDLSGRPLNIKEDPDGENARRALQRTGGSFPGGHVPDMGSGLMNLPPSILNNPNIPPEVISNLQAGRLGSTIFVANVSSSFSLK

SEQ ID NO: 869372 - protein, 576 aa, Homo sapiens
MADANKAEVPGATGGDSPHLQPAEPPGEPRREPHPAEAEKQQPQHSSSSNGVKMENDESAKEEKSDLKEKSTGSKKANRFHPYSKDKNSGTGEKKGPNRNRVFISNIPYDMKWQAIKDLMREKVGEVTYVELFKDAEGKSRGCGVVEFKDEEFVKKALETMNKYDLSGRPLNIKEDPDGENARRALQRTGGSFPGGHVPDMGSGLMNLPPSILNNPNIPPEVISNLQAGRLGSTIFVANLDFKVGWKKLKEVFSIAGTVKAGRYKEDKDGKSRGMGTVTFEQAIEAVQAISMFNGQFLFDRPMHVKMDDKSVPHEEYRSHDGKTPQLPRGLGGIGMGLGPGGQPISASQLNIGGVMGNLGPGGMGMDGPGFGGMNRIGGGIGFGGLEAMNSMGGFGGVGRMGELYRGAMTSSMERDFGRGDIGINRGFGDSFGRLGGGMGSMNSVTGGMGMGLDRMSSSFDRMGPGIGAILERSIDMDRGFLSGPMGSGMRERIGSKGNQIFVRNLPFDLTWQKLKEKFSQCGHVMFAEIKMENGKSKGCGTVRFDSPESAEKACRIMNGIKISGREIDVRLDRNA

SEQ ID NO: 869373 - protein, 397 aa, Homo sapiens
MADANKAEVPGATGGDSPHLQPAEPPGEPRREPHPAEAEKQQPQHSSSSNGVKMENDESAKEEKSDLKEKSTGSKKANRFHPYSKDKNSGTGEKKGPNRNRVFISNIPYDMKWQAIKDLMREKVGEVTYVELFKDAEGKSRGCGVVEFKDEEFVKKALETMNKYDLSGRPLNIKEDPDGENARRALQRTGGSFPGGHVPDMGSGLMNLPPSILNNPNIPPEVISNLQAGRLGSTIFVANLDFKVGWKKLKEVFSIAGTVKAGRYKEDKDGKSRGMGTVTFEQAIEAVQAISMFNGQFLFDRPMHVKMDDKSVPHEEYRSHDGKTPQLPRGLGGIGMGLGPGGQPISASQLNIGGVMGNLGPGGMGMDGPGFGGMNRIGGGMYKDLFFCMYPSPFLIN

SEQ ID NO: 869374 - protein, 302 aa, Homo sapiens
MGTVTFEQAIEAVQAISMFNGQFLFDRPMHVKMDDKSVPHEEYRSHDGKTPQLPRGLGGIGMGLGPGGQPISASQLNIGGVMGNLGPGGMGMDGPGFGGMNRIGGGIGFGGLEAMNSMGGFGGVGRMGELYRGAMTSSMERDFGRGDIGINRGFGDSFGRLGGGMGSMNSVTGGMGMGLDRMSSSFDRMGPGIGAILERSIDMDRGFLSGPMGSGMRERIGSKGNQIFVRNLPFDLTWQKLKEKFSQCGHVMFAEIKMENGKSKGCGTVRFDSPESAEKACRIMNGIKISGREIDVRLDRNA

SEQ ID NO: 869375 - protein, 397 aa, Homo sapiens; identical to SEQ ID NO: 869373

SEQ ID NO: 869376 - protein, 600 aa, Homo sapiens
MADANKAEVPGATGGDSPHLQPAEPPGEPRREPHPAEAEKQQPQHSSSSNGVKMENDESAKEEKSDLKEKSTGSKKANRFHPYSKDKNSGTGEKKGPNRNRVFISNIPYDMKWQAIKDLMREKVGEVTYVELFKDAEGKSRGCGVVEFKDEEFVKKALETMNKYDLSGRPLNIKEDPDGENARRALQRTGGSFPGGHVPDMGSGLMNLPPSILNNPNIPPEVISNLQAGRLGSTIFVANLDFKVGWKKLKEVFSIAGTVKAGRYKEDKDGKSRGMGTVTFEQAIEAVQAISMFNGQFLFDRPMHVKMDDKSVPHEEYRSHDGKTPQLPRGLGGIGMGLGPGGQPISASQLNIGGVMGNLGPGGMGMDGPGFGGMNRIGGGIGFGGLEAMNSMGGFGGVGRMGELYRGAMTSSMERDFGRGDIGINRGFGDSFGRLGSAMIGGFAGRIGSSNMGPVGSGISGGMGSMNSVTGGMGMGLDRMSSSFDRMGPGIGAILERSIDMDRGFLSGPMGSGMRERIGSKGNQIFVRNLPFDLTWQKLKEKFSQCGHVMFAEIKMENGKSKGCGTVRFDSPESAEKACRIMNGIKISGREIDVRLDRNA

SEQ ID NO: 869377 - protein, 576 aa, Homo sapiens; identical to SEQ ID NO: 869372

SEQ ID NO: 869378 - protein, 556 aa, Homo sapiens
MADANKAEVPGATGGDSPHLQPAEPPGEPRREPHPAEAEKQQPQHSSSSNGVKMENDESAKEEKSDLKEKSTGSKKANRFHPYSKDKNSGTGEKKGPNRNRVFISNIPYDMKWQAIKDLMREKGVVEFKDEEFVKKALETMNKYDLSGRPLNIKEDPDGENARRALQRTGGSFPGGHVPDMGSGLMNLPPSILNNPNIPPEVISNLQAGRLGSTIFVANLDFKVGWKKLKEVFSIAGTVKAGRYKEDKDGKSRGMGTVTFEQAIEAVQAISMFNGQFLFDRPMHVKMDDKSVPHEEYRSHDGKTPQLPRGLGGIGMGLGPGGQPISASQLNIGGVMGNLGPGGMGMDGPGFGGMNRIGGGIGFGGLEAMNSMGGFGGVGRMGELYRGAMTSSMERDFGRGDIGINRGFGDSFGRLGGGMGSMNSVTGGMGMGLDRMSSSFDRMGPGIGAILERSIDMDRGFLSGPMGSGMRERIGSKGNQIFVRNLPFDLTWQKLKEKFSQCGHVMFAEIKMENGKSKGCGTVRFDSPESAEKACRIMNGIKISGREIDVRLDRNA

SEQ ID NO: 869379 - protein, 241 aa, Homo sapiens
MVSKRRLSKSEDKESLTEDASKTRKQPLSKKTKKSHIANEVEENDSIFVKLLKISGIILKTGESQNQLAVDQIAFQKKLFQTLRRHPSYPKIIEEFVSGLESYIEDEDSFRNCLLSCERLQDEEASMGASYSKSLIKLLLGIDILQPAIIKTLFEKLPEYFFENKNSDEINIPRLIVSQLKWLDRVVDGKDLTTKIMQLISIAPENLQHDIITSLPEILGDSQHADVGKELRWINPLSSSK

SEQ ID NO: 869380 - protein, 1451 aa, Homo sapiens
MVSKRRLSKSEDKESLTEDASKTRKQPLSKKTKKSHIANEVEENDSIFVKLLKISGIILKTGESQNQLAVDQIAFQKKLFQTLRRHPSYPKIIEEFVSGLESYIEDEDSFRNCLLSCERLQDEEASMGASYSKSLIKLLLGIDILQPAIIKTLFEKLPEYFFENKNSDEINIPRLIVSQLKWLDRVVDGKDLTTKIMQLISIAPENLQHDIITSLPEILGDSQHADVGKELSDLLIENTSLTVPILDVLSSLRLDPNFLLKVRQLVMDKLSSIRLEDLPVIIKFILHSVTAMDTLEVISELREKLDLQHCVLPSRLQASQVKLKSKGRASSSGNQESSGQSCIILLFDVIKSAIRYEKTISEAWIKAIENTASVSEHKVFDLVMLFIIYSTNTQTKKYIDRVLRNKIRSGCIQEQLLQSTFSVHYLVLKDMCSSILSLAQSLLHSLDQSIISFGSLLYKYAFKFFDTYCQQEVVGALVTHICSGNEAEVDTALDVLLELVVLNPSAMMMNAVFVKGILDYLDNISPQQIRKLFYVLSTLAFSKQNEASSHIQDDMHLVIRKQLSSTVFKYKLIGIIGAVTMAGIMAADRSESPSLTQERANLSDEQCTQVTSLLQLVHSCSEQSPQASALYYDEFANLIQHEKLDPKALEWVGHTICNDFQDAFVVDSCVVPEGDFPFPVKALYGLEEYDTQDGIAINLLPLLFSQDFAKDGGPVTSQESGQKLVSPLCLAPYFRLLRLCVERQHNGNLEEIDGLLDCPIFLTDLEPGEKLESMSAKERSFMCSLIFLTLNWFREIVNAFCQETSPEMKGKVLTRLKHIVELQIILEKYLAVTPDYVPPLGNFDVETLDITPHTVTAISAKIRKKGKIERKQKTDGSKTSSSDTLSEEKNSECDPTPSHRGQLNKEFTGKEEKTSLLLHNSHAFFRELDIEVFSILHCGLVTKFILDTEMHTEATEVVQLGPPELLFLLEDLSQKLESMLTPPIARRVPFLKNKGSRNIGFSHLQQRSAQEIVHCVFQLLTPMCNHLENIHNYFQCLAAENHGVVDGPGVKVQEYHIMSSCYQRLLQIFHGLFAWSGFSQPENQNLLYSALHVLSSRLKQGEHSQPLEELLSQSVHYLQNFHQSIPSFQCALYLIRLLMVILEKSTASAQNKEKIASLARQFLCRVWPSGDKEKSNISNDQLHALLCIYLEHTESILKAIEEIAGVGVPELINSPKDASSSTFPTLTRHTFVVFFRVMMAELEKTVKKIEPGTAADSQQIHEEKLLYWNMAVRDFSILINLIKVFDSHPVLHVCLKYGRLFVEAFLKQCMPLLDFSFRKHREDVLSLLETFQLDTRLLHHLCGHSKIHQDTRLTQHVPLLKKTLELLVCRVKAMLTLNNCREAFWLGNLKNRDLQGEEIKSQNSQESTADESEDDMSSQASKSKATEDGEEDEVSAGEKEQDSDESYDDSD

SEQ ID NO: 869381 - protein, 1426 aa, Homo sapiens
MVSKRRLSKSEDKESLTEDASKTRKQPLSKKTKKSHIANEVEENDSIFVKLLKISGIILKTGESQNQLAVDQIAFQKKLFQTLRRHPSYPKIIEEFVSGLESYIEDEDSFRNCLLSCERLQDEEASMGASYSKSLIKLLLGIDILQPAIIKTLFEKLPEYFFENKNSDEINIPRLIVSQLKWLDRVVDGKDLTTKIMQLISIAPENLQHDIITSLPEILGDSQHADVGKELSDLLIENTSLTVPILDVLSSLRLDPNFLLKVRQLVMDKLSSIRLEDLPVIIKFILHSVTAMDTLEVISELREKLDLQHCVLPSRLQASQVKLKSKGRASSSGNQESSGQSCIILLFDVIKSAIRYEKTISEAWIKAIENTASVSEHKVFDLVMLFIIYSTNTQTKKYIDRVLRNKIRSGCIQEQLLQSTFSVHYLVLKDMCSSILSLAQSLLHSLDQSIISFGSLLYKYAFKFFDTYCQQEVVGALVTHICSGNEAEVDTALDVLLELVVLNPSAMMMNAVFVKGILDYLDNISPQQIRKLFYVLSTLAFSKQNEASSHIQDDMHLVIRKQLSSTVFKYKLIGIIGAVTMAGIMAADRSESPSLTQERANLSDEQCTQVTSLLQLVHSCSEQSPQASALYYDEFANLIQHEKLDPKALEWVGHTICNDFQDAFVVDSCVVPEGDFPFPVKALYGLEEYDTQDGIAINLLPLLFSQDFAKDGGPVTSQESGQKLVSPLCLAPYFRLLRLCVERQHNGNLEEIDGLLDCPIFLTDLEPGEKLESMSAKERSFMCSLIFLTLNWFREIVNAFCQETSPEMKGKVLTRLKHIVELQIILEKYLAVTPDYVPPLGNFDVETLDITPHTVTAISAKIRKKGKIERKQKTDGSKTSSSDTLSEEKNSECDPTPSHRGQLNKEFTGKEEKTSLLLHNSHAFFRELDIEVFSILHCGLVTKFILDTEMHTEATEVVQLGPPELLFLLEDLSQKLESMLTPPIARRVPFLKNKGSRNIGFSHLQQRSAQEIVHCVFQLLTPMCNHLENIHNYFQCLAAENHGVVDGPGVKVQEYHIMSSCYQRLLQIFHGLFAWSGFSQPENQNLLYSALHVLSSRLKQGEHSQPLEELLSQSVHYLQNFHQSIPSFQCALYLIRLLMVILEKSTASAQNKEKIASLARQFLCRVWPSGDKEKSNISNDQLHALLCIYLEHTESILKAIEEIAGVGVPELINSPKDASSSTFPTLTRHTFVVFFRVMMAELEKTVKKIEPGTAADSQQIHEEKLLYWNMAVRDFSILINLIKVFDSHPVLHVCLKEDVLSLLETFQLDTRLLHHLCGHSKIHQDTRLTQHVPLLKKTLELLVCRVKAMLTLNNCREAFWLGNLKNRDLQGEEIKSQNSQESTADESEDDMSSQASKSKATEDGEEDEVSAGEKEQDSDESYDDSD

SEQ ID NO: 869382 - protein, 1551 aa, Homo sapiens
MVSKRRLSKSEDKESLTEDASKTRKQPLSKKTKKSHIANEVEENDSIFVKLLKISGIILKTGESQNQLAVDQIAFQKKLFQTLRRHPSYPKIIEEFVSGLESYIEDEDSFRNCLLSCERLQDEEASMGASYSKSLIKLLLGIDILQPAIIKTLFEKLPEYFFENKNSDEINIPRLIVSQLKWLDRVVDGKDLTTKIMQLISIAPENLQHDIITSLPEILGDSQHADVGKELSDLLIENTSLTVPILDVLSSLRLDPNFLLKVRQLVMDKLSSIRLEDLPVIIKFILHSVTAMDTLEVISELREKLDLQHCVLPSRLQASQVKLKSKGRASSSGNQESSGQSCIILLFDVIKSAIRYEKTISEAWIKAIENTASVSEHKVFDLVMLFIIYSTNTQTKKYIDRVLRNKIRSGCIQEQLLQSTFSVHYLVLKDMCSSILSLAQSLLHSLDQSIISFGSLLYKYAFKFFDTYCQQEVVGALVTHICSGNEAEVDTALDVLLELVVLNPSAMMMNAVFVKGILDYLDNISPQQIRKLFYVLSTLAFSKQNEASSHIQDDMHLVIRKQLSSTVFKYKLIGIIGAVTMAGIMAADRSESPSLTQERANLSDEQCTQVTSLLQLVHSCSEQSPQASALYYDEFANLIQHEKLDPKALEWVGHTICNDFQDAFVVDSCVVPEGEVLFTCWLGCTGEVTSILSVADTNFRIPFTSATAAQSHSFFPPNPSTPAPLAPKFLKGSLFVLLISPHDVVFEIGFALVVFPVALRIPELQHQILVFLRSDFPFPVKALYGLEEYDTQDGIAINLLPLLFSQDFAKDGGPVTSQESGQKLVSPLCLAPYFRLLRLCVERQHNGNLEEIDGLLDCPIFLTDLEPGEKLESMSAKERSFMCSLIFLTLNWFREIVNAFCQETSPEMKGKVLTRLKHIVELQIILEKYLAVTPDYVPPLGNFDVETLDITPHTVTAISAKIRKKGKIERKQKTDGSKTSSSDTLSEEKNSECDPTPSHRGQLNKEFTGKEEKTSLLLHNSHAFFRELDIEVFSILHCGLVTKFILDTEMHTEATEVVQLGPPELLFLLEDLSQKLESMLTPPIARRVPFLKNKGSRNIGFSHLQQRSAQEIVHCVFQLLTPMCNHLENIHNYFQCLAAENHGVVDGPGVKVQEYHIMSSCYQRLLQIFHGLFAWSGFSQPENQNLLYSALHVLSSRLKQGEHSQPLEELLSQSVHYLQNFHQSIPSFQCALYLIRLLMVILEKSTASAQNKEKIASLARQFLCRVWPSGDKEKSNISNDQLHALLCIYLEHTESILKAIEEIAGVGVPELINSPKDASSSTFPTLTRHTFVVFFRVMMAELEKTVKKIEPGTAADSQQIHEEKLLYWNMAVRDFSILINLIKVFDSHPVLHVCLKYGRLFVEAFLKQCMPLLDFSFRKHREDVLSLLETFQLDTRLLHHLCGHSKIHQDTRLTQHVPLLKKTLELLVCRVKAMLTLNNCREAFWLGNLKNRDLQGEEIKSQNSQESTADESEDDMSSQASKSKATEDGEEDEVSAGEKEQDSDESYDDSD

SEQ ID NO: 869383 - protein, 523 aa, Homo sapiens
MVSKRRLSKSEDKESLTEDASKTRKQPLSKKTKKSHIANEVEENDSIFVKLLKISGIILKTGESQNQLAVDQIAFQKKLFQTLRRHPSYPKIIEEFVSGLESYIEDEDSFRNCLLSCERLQDEEASMGASYSKSLIKLLLGIDILQPAIIKTLFEKLPEYFFENKNSDEINIPRLIVSQLKWLDRVVDGKDLTTKIMQLISIAPENLQHDIITSLPEILGDSQHADVGKELSDLLIENTSLTVPILDVLSSLRLDPNFLLKVRQLVMDKLSSIRLEDLPVIIKFILHSVTAMDTLEVISELREKLDLQHCVLPSRLQASQVKLKSKGRASSSGNQESSGQSCIILLFDVIKSAIRYEKTISEAWIKAIENTASVSEHKVFDLVMLFIIYSTNTQTKKYIDRVLRNKIRSGCIQEQLLQSTFSVHYLVLKDMCSSILSLAQSLLHSLDQSIISFGSLLYKYAFKFFDTYCQQEVVGALVTHICSGNEAEVDTALDVLLELVVLNPSAMMMNAVFVKVSYWLLVL

SEQ ID NO: 869384 - protein, 112 aa, Homo sapiens
MLFISIQIHQDTRLTQHVPLLKKTLELLVCRVKAMLTLNNCREAFWLGNLKNRDLQGEEIKSQNSQESTADESEDDMSSQASKSKATEDGEEDEVSAGEKEQDSDESYDDSD

SEQ ID NO: 869385 - protein, 1471 aa, Homo sapiens
MVSKRRLSKSEDKESLTEDASKTRKQPLSKKTKKSHIANEVEENDSIFVKLLKISGIILKTGESQNQLAVDQIAFQKKLFQTLRRHPSYPKIIEEFVSGLESYIEDEDSFRNCLLSCERLQDEEASMGASYSKSLIKLLLGIDILQPAIIKTLFEKLPEYFFENKNSDEINIPRLIVSQLKWLDRVVDGKDLTTKIMQLISIAPENLQHDIITSLPEILGDSQHADVGKELSDLLIENTSLTVPILDVLSSLRLDPNFLLKVRQLVMDKLSSIRLEDLPVIIKFILHSVTAMDTLEVISELREKLDLQHCVLPSRLQASQVKLKSKGRASSSGNQESSGQSCIILLFDVIKSAIRYEKTISEAWIKAIENTASVSEHKVFDLVMLFIIYSTNTQTKKYIDRVLRNKIRSGCIQEQLLQSTFSVHYLVLKDMCSSILSLAQSLLHSLDQSIISFGSLLYKYAFKFFDTYCQQEVVGALVTHICSGNEAEVDTALDVLLELVVLNPSAMMMNAVFVKGILDYLDNISPQQIRKLFYVLSTLAFSKQNEASSHIQDDMHLVIRKQLSSTVFKYKLIGIIGAVTMAGIMAADRSESPSLTQERANLSDEQCTQVTSLLQLVHSCSEQSPQASALYYDEFANLIQHEKLDPKALEWVGHTICNDFQDAFVVDSCVVPEGDFPFPVKALYGLEEYDTQDGIAINLLPLLFSQDFAKDGGPVTSQESGQKLVSPLCLAPYFRLLRLCVERQHNGNLEEIDGLLDCPIFLTDLEPGEKLESMSAKERSFMCSLIFLTLNWFREIVNAFCQETSPEMKGKVLTRLKHIVELQIILEKYLAVTPDYVPPLGNFDVETLDITPHTVTAISAKIRKKGKIERKQKTDGSKTSSSDTLSEEKNSECDPTPSHRGQLNKEFTGKEEKTSLLLHNSHAFFRELDIEVFSILHCGLVTKFILDTEMHTEATEVVQLGPPELLFLLEDLSQKLESMLTPPIARRVPFLKNKGSRNIGFSHLQQRSAQEIVHCVFQLLTPMCNHLENIHNYFQCLAAENHGVVDGPGVKVQEYHIMSSCYQRLLQIFHGLFAWSGFSQPENQNLLYSALHVLSSRLKQGEHSQPLEELLSQSVHYLQNFHQSIPSFQCALYLIRLLMVILEKSTASAQNKEKIASLARQFLCRVWPSGDKEKSNISNDQLHALLCIYLEHTESILKAIEEIAGVGVPELINSPKDASSSTFPTLTRHTFVVFFRVMMAELEKTVKKIEPGTAADSQQIHEEKLLYWNMAVRDFSILINLIKVFDSHPVLHVCLKYGRLFVEAFLKQCMPLLDFSFRKHREDVLSLLETFQLDTRLLHHLCGHSKIHQDTRLTQHVPLLKKTLELLVCRVKAMLTLNNCREAFWLGNLKNRDLQGEEIKSQNSQESTADESEDDMSSQASKSKATEVSLQNPPESGTDGCILLIVLSWWSRTLPTYVYCQMLLCPFPFPP

SEQ ID NO: 869386 - protein, 1451 aa, Homo sapiens; identical to SEQ ID NO: 869380

SEQ ID NO: 869387 - protein, 1451 aa, Homo sapiens; identical to SEQ ID NO: 869380

SEQ ID NO: 869388 - protein, 811 aa, Homo sapiens
MVSKRRLSKSEDKESLTEDASKTRKQPLSKKTKKSHIANEVEENDSIFVKLLKISGIILKTGESQNQLAVDQIAFQKKLFQTLRRHPSYPKIIEEFVSGLESYIEDEDSFRNCLLSCERLQDEEASMGASYSKSLIKLLLGIDILQPAIIKTLFEKLPEYFFENKNSDEINIPRLIVSQLKWLDRVVDGKDLTTKIMQLISIAPENLQHDIITSLPEILGDSQHADVGKELSDLLIENTSLTVPILDVLSSLRLDPNFLLKVRQLVMDKLSSIRLEDLPVIIKFILHSVTAMDTLEVISELREKLDLQHCVLPSRLQASQVKLKSKGRASSSGNQESSGQSCIILLFDVIKSAIRYEKTISEAWIKAIENTASVSEHKVFDLVMLFIIYSTNTQTKKYIDRVLRNKIRSGCIQEQLLQSTFSVHYLVLKDMCSSILSLAQSLLHSLDQSIISFGSLLYKYAFKFFDTYCQQEVVGALVTHICSGNEAEVDTALDVLLELVVLNPSAMMMNAVFVKGILDYLDNISPQQIRKLFYVLSTLAFSKQNEASSHIQDDMHLVIRKQLSSTVFKYKLIGIIGAVTMAGIMAADRSESPSLTQERANLSDEQCTQVTSLLQLVHSCSEQSPQASALYYDEFANLIQHEKLDPKALEWVGHTICNDFQDAFVVDSCVVPEGDFPFPVKALYGLEEYDTQDGIAINLLPLLFSQDFAKDGGPVTSQESGQKLVSPLCLAPYFRLLRLCVERQHNGNLEEIDGLLDCPIFLTDLEPGEKLESMSAKERSFMCSLIFLTLNWFRESPQTMSLLLETLMWKL

SEQ ID NO: 869389 - protein, 232 aa, Homo sapiens
MVSKRRLSKSEDKESLTEDASKTRKQPLSKKTKKSHIANEVEENDSIFVKLLKISGIILKTGESQNQLAVDQIAFQKKLFQTLRRHPSYPKIIEEFVSGLESYIEDEDSFRNCLLSCERLQDEEASMGASYSKSLIKLLLGIDILQPAIIKTLFEKLPEYFFENKNSDEINIPRLIVSQLKWLDRVVDGKDLTTKIMQLISIAPENLQHDIITSLPEILGDSQHADVGKELR

SEQ ID NO: 869390 - protein, 187 aa, Homo sapiens
CSEIFASLRLPRIMAHSKQPSHFQSLMLLQWPLSYLAIFWILQPLFVYLLFTSLWPLPVLYFAWLFLDWKTPERGGRRSAWVRNWCVWTHIRDYFPITILKTKDLSPEHNYLMGVHPHGLLTFGAFCNFCTEATGFSKTFPGITPHLATLSWFFKIPFVREYLMAKGASDHTYWSFWSMFLLGNAPF

SEQ ID NO: 869391 - protein, 139 aa, Homo sapiens
MFFQGGSHPSLCLENKLEFSYRAHLVPTFTFGETEVYDQVLFHKDSRMYKFQSCFRRIFGFYCCVFYGQSFCQGSTGLLPYSRPIVTVVGEPLPLPQIEKPSQEMVDKYHALYMDALHKLFDQHKTHYGCSETQKLFFL

SEQ ID NO: 869392 - protein, 341 aa, Homo sapiens
CSEIFASLRLPRIMAHSKQPSHFQSLMLLQWPLSYLAIFWILQPLFVYLLFTSLWPLPVLYFAWLFLDWKTPERGGRRSAWVRNWCVWTHIRDYFPITILKTKDLSPEHNYLMGVHPHGLLTFGAFCNFCTEATGFSKTFPGITPHLATLSWFFKIPFVREYLMAKGVCSVSQPAINYLLSHGTGNLVGIVVGGVGEALQSVPNTTTLILQKRKGFVRTALQHGAHLVPTFTFGETEVYDQVLFHKDSRMYKFQSCFRRIFGFYCCVFYGQSFCQGSTGLLPYSRPIVTVVGEPLPLPQIEKPSQEMVDKYHALYMDALHKLFDQHKTHYGCSETQKLFFL

SEQ ID NO: 869393 - protein, 77 aa, Homo sapiens
MSPHPWERQAGDSAKDKGQVLNAGTRGASCEGRMVYGQPVRSDPASWEEELKLSPRRRRRSSPGSRLGRELQRLRQL

SEQ ID NO: 869394 - protein, 197 aa, Homo sapiens
MEVTGVSAPTVTVFISSSLNTFRSEKRYSRSLTIAEFKCKLELLVGSPASCMELELYGVDDKFYSKLDQEDALLGSYPVDDGCRIHVIDHSGARLGEYEDVSRVEKYTISQEAYDQRQDTVRSFLKRSKLGRYNEEERAQQEAEAAQRLAEEKAQASSIPVGSRCEVRAAGQIPSPGHRHVCRSHRFQAWLLDWCPL

SEQ ID NO: 869395 - protein, 217 aa, Homo sapiens
MEVTGVSAPTVTVFISSSLNTFRSEKRYSRSLTIAEFKCKLELLVGSPASCMELELYGVDDKFYSKLDQEDALLGSYPVDDGCRIHVIDHSGARLGEYEDVSRVEKYTISQEAYDQRQDTVRSFLKRSKLGRYNEEERAQQEAEAAQRLAEEKAQASSIPVGSRCEVRAAGQIPSPGHRHVCRTQFWFKIQLVWWVLYNMGNLEVLEPLPSSILAWN

SEQ ID NO: 869396 - protein, 239 aa, Homo sapiens
WGPGRGGAGPERTRECRDEGRVQRKIRRSRGRGQEARGWIAAPCVLTGGSFGGKGTWRWSLMQGAGPPWPPSSHPASSSQCKLELLVGSPASCMELELYGVDDKFYSKLDQEDALLGSYPVDDGCRIHVIDHSGARLGEYEDVSRVEKYTISQEAYDQRQDTVRSFLKRSKLGRYNEEERAQQEAEAAQRLAEEKAQASSIPVGSRCEVRAAGQIPSPGHRHVCRSHRFQAWLLDWCPL

SEQ ID NO: 869397 - protein, 146 aa, Homo sapiens
MELELYGVDDKFYSKLDQEDALLGSYPVDDGCRIHVIDHSGARLGEYEDVSRVEKYTISQEAYDQRQDTVRSFLKRSKLGRYNEEERAQQEAEAAQRLAEEKAQASSIPVGSRCEVRAAGQIPSPGHRHVCRSHRFQAWLLDWCPL

SEQ ID NO: 869398 - protein, 118 aa, Homo sapiens
MEVTGVSAPTVTVFISSSLNTFRSEKRYSRSLTIAEFKCKLELLVGSPASCMELELYGVDDKFYSKLDQEDALLGSYPVDDGCRIHVIDHSGARLGEYEDVSRVEKYTISQETRSALS

SEQ ID NO: 869399 - protein, 197 aa, Homo sapiens; identical to SEQ ID NO: 869394

SEQ ID NO: 869400 - protein, 197 aa, Homo sapiens; identical to SEQ ID NO: 869394

SEQ ID NO: 869401 - protein, 282 aa, Homo sapiens
MEVTGVSAPTVTVFISSSLNTFRSEKRYSRSLTIAEFKCKLELLVGSPASCMELELYGVDDKFYSKLDQEDALLGSYPVDDGCRIHVIDHSGARLGEYEDVSRVEKYTISQEAYDQRQDTVRSFLKRSKLGRYNEEERAQQEAEAAQRLAEEKAQASSIPVGSRCEVRAAGQIPSPGHRHVCSLTPSPRLEAVVLSAHCILCLPGSSNSHASASRVAGIIGLTDFKPGYWIGVRYDEPLGKNDGSVNGKRYFECQAKYGAFVKPAVVTVGDFPEEDYGLDEI

SEQ ID NO: 869402 - protein, 226 aa, Homo sapiens
MEVTGVSAPTVTVFISSSLNTFRSEKRYSRSLTIAEFKCKLELLVGSPASCMELELYGVDDKFYSKLDQEDALLGSYPVDDGCRIHVIDHSGARLGEYEDVSRVEKYTISQEAYDQRQDTVRSFLKRSKLGRYNEEERAQQEAEAAQRLAEEKAQASSIPVGSRCLTDFKPGYWIGVRYDEPLGKNDGSVNGKRYFECQAKYGAFVKPAVVTVGDFPEEDYGLDEI

SEQ ID NO: 869403 - protein, 206 aa, Homo sapiens
MEVTGVSAPTVTVFISSSLNTFRSEKRYSRSLTIAEFKCKLELLVGSPASCMELELYGVDDKFYSKLDQEDALLGSYPVDDGCRIHVIDHSGARLGEYEDVSRVEKYTISQEAYDQRQAPSPWAAAVRCGRRDKSPRRGTVMYVGLTDFKPGYWIGVRYDEPLGKNDGSVNGKRYFECQAKYGAFVKPAVVTVGDFPEEDYGLDEI

SEQ ID NO: 869404 - protein, 129 aa, Homo sapiens [sequence omitted]

SEQ ID NO: 869405 - protein, 285 aa, Homo sapiens
WGPGRGGAGPERTRECRDEGRVQRKIRRSRGRGQEARGWIAAPCVLTGGSFGGKGTWRWSLMQGAGPPWPPSSHPASSSQCKLELLVGSPASCMELELYGVDDKFYSKLDQEDALLGSYPVDDGCRIHKLAGRGGKMPVILATQEAEAGGSLEPRSWKLQGAEITPLHSSLDDRVIDHSGARLGEYEDVSRVEKYTISQEAYDQRQDTVRSFLKRSKLGRYNEEERAQQEAEAAQRLAEEKAQASSIPVGSRCEVRAAGQIPSPGHRHVCRSHRFQAWLLDWCPL

SEQ ID NO: 869406 - protein, 197 aa, Homo sapiens; identical to SEQ ID NO: 869394

SEQ ID NO: 869407 - protein, 239 aa, Homo sapiens
MEVTGVSAPTVTVFISSSLNTFRSEKRYSRSLTIAEFKCKLELLVGSPASCMELELYGVDDKFYSKLDQEDALLGSYPVDDGCRIHVIDHSGARLGEYEDVSRVEKYTISQEAYDQRQDTVRSFLKRSKLGRYNEEERAQQEAEAAQRLAEEKAQASSIPVGSRCEVRAAGQIPSPGHRHVCSRCVARGPGPGLQGSKAGRKCWGHSGASETTLCLGARGWGGLETISVPGGDGTICRH

SEQ ID NO: 869408 - protein, 151 aa, Homo sapiens
MEVTGVSAPTVTVFISSSLNTFRSEKRYSRSLTIAEFKCKLELLVGSPASCMELELYGVDDKFYSKLDQEDALLGSYPVDDGCRIHVIDHSGARLGEYEDVSRVEKYTISQEAYDQRQGEVRAAGQIPSPGHRHVCRSHRFQAWLLDWCPL

SEQ ID NO: 869409 - protein, 38 aa, Homo sapiens
MRGGGRAGIRMAGLRLSVPTWPSSRNPENKKTFPGPDP

SEQ ID NO: 869410 - protein, 127 aa, Homo sapiens
HASALLALGAPWRAGPCWRCGSSACSAVWWPPRADFDLAMPFLMEETVTQHHLMPPNQSQIQTPTDLVSLVTQHHLIPPNQSQIQIPTDLVSLIRASNPTGWSLCSVYLAVMSVSSEKRRFQGLTLT

SEQ ID NO: 869411 - protein, 127 aa, Homo sapiens; identical to SEQ ID NO: 869410

SEQ ID NO: 869412 - protein, 382 aa, Homo sapiens
MALPPGPAALRHTLLLLPALLSSGWGELEPQIDGQTWAERALRENERHAFTCRVAGGPGTPRLAWYLDGQLQEASTSRLLSVGGEAFSGGTSTFTVTAHRAQHELNCSLQDPRSGRSANASVILNVQFKPEIAQVGAKYQEAQGPGLLVVLFALVRANPPANVTWIDQDGPVTVNTSDFLVLDAQNYPWLTNHTVQLQLRSLAHNLSVVATNDVGVTSASLPAPGLLATRVEVPLLGIVVAAGLALGTLVGFSTLVACLVCRKEKKTKGPSRHPSLISSDSNNLKLNNVRLPRENMSLPSNLQLNDLTPDSRAVKPADRQMAQNNSRPELLDPEPGGLLTSQACLLHHGTPALTNPWLPHQQEGALPGGWSPQAHNSTVWKL

SEQ ID NO: 869413 - protein, 307 aa, Homo sapiens
MALPPGPAALRHTLLLLPALLSSGWGELEPQIDGQTWAERALRENERHAFTCRVAGGPGTPRLAWYLDGQLQEASTSRLLSVGGEAFSGGTSTFTVTAHRAQHELNCSLQDPRSGRSANASVILNVQFKPEIAQVGAKYQEAQGPGLLVVLFALVRANPPANVTWIDQDGPVTVNTSDFLVLDAQNYPWLTNHTVQLQLRSLAHNLSVVATNDVGVTSASLPAPGPSRHPSLISSDSNNLKLNNVRLPRENMSLPSNLQLNDLTPDSRAVKPADRQMAQNNSRPELLDPEPGGLLTSQGRRNQDKDA

SEQ ID NO: 869414 - protein, 350 aa, Homo sapiens
MALPPGPAALRHTLLLLPALLSSGGPGTPRLAWYLDGQLQEASTSRLLSVGGEAFSGGTSTFTVTAHRAQHELNCSLQDPRSGRSANASVILNVQFKPEIAQVGAKYQEAQGPGLLVVLFALVRANPPANVTWIDQDGPVTVNTSDFLVLDAQNYPWLTNHTVQLQLRSLAHNLSVVATNDVGVTSASLPAPGLLATRVEVPLLGIVVAAGLALGTLVGFSTLVACLVCRKEKKTKGPSRHPSLISSDSNNLKLNNVRLPRENMSLPSNLQLNDLTPDSRAVKPADRQMAQNNSRPELLDPEPGGLLTSQACLLHHGTPALTNPWLPHQQEGALPGGWSPQAHNSTVWKL

SEQ ID NO: 869415 - protein, 351 aa, Homo sapiens
MALPPGPAALRHTLLLLPALLSSGWGELEPQIDGQTWAERALRENERHAFTCRVAGGPGTPRLAWYLDGQLQEASTSRLLSVGGEAFSGGTSTFTVTAHRAQHELNCSLQDPRSGRSANASVILNVQFKPEIAQVGAKYQEAQGPGLLVVLFALVRANPPANVTWIDQDGPVTVNTSDFLVLDAQNYPWLTNHTVQLQLRSLAHNLSVVATNDVGVTSASLPAPGLLATRVEVPLLGIVVAAGLALGTLVGFSTLVACLVCRKEKKTKGPSRHPSLISSDSNNLKLNNVRLPRENMSLPSNLQLNDLTPDSRAVKPADRQMAQNNSRPELLDPEPGGLLTSQGRRNQDKDA

SEQ ID NO: 869416 - protein, 338 aa, Homo sapiens
MALPPGPAALRHTLLLLPALLSSGWGELEPQIDGQTWAERALRENERHAFTCRVAGGPGTPRLAWYLDGQLQEASTSRLLSVGGEAFSGGTSTFTVTAHRAQHELNCSLQDPRSGRSANASVILNVQFKPEIAQVGAKYQEAQGPGLLVVLFALVRANPPANVTWIDQDGPVTVNTSDFLVLDAQNYPWLTNHTVQLQLRSLAHNLSVVATNDVGVTSASLPAPGPSRHPSLISSDSNNLKLNNVRLPRENMSLPSNLQLNDLTPDSRAVKPADRQMAQNNSRPELLDPEPGGLLTSQACLLHHGTPALTNPWLPHQQEGALPGGWSPQAHNSTVWKL

SEQ ID NO: 869417 - protein, 351 aa, Homo sapiens; identical to SEQ ID NO: 869415

SEQ ID NO: 869418 - protein, 119 aa, Homo sapiens
SCVAFFTLPGSLARHDVGYLAKAILCRPRGRCSLCIIHSPHDVLEVNLGCLSLARGIGISRAFPFAHLTFSYLVNCMHLPPAQDYKYELIMICMFSLWVQAFPYRRATVEVMGKYVLNW

SEQ ID NO: 869419 - protein, 129 aa, Homo sapiens
MQQGTVAFEDVAVNFSQEEWSLLSEVQRCLYHDVMLENWVLISSLGCWCGSEDEEAPSKKSISIQRVSQNVRLSAQAGVARSQLTAASTSRVQAILLPQPPGDLKGISLCPPHLFIFGKLYAFASSPRL

SEQ ID NO: 869420 - protein, 276 aa, Homo sapiens
MQQGTVAFEDVAVNFSQEEWSLLSEVQRCLYHDVMLENWVLISSLGCWCGSEDEEAPSKKSISIQRVSQVSTPGAGVSPKKAHSCEMCGAILGDILHLADHQGTHHKQKLHRCEAWGNKLYDSSNRPHQNQYLGEKPYRSSVEEALFVKRCKFHVSEESSIFIQSGKDFLPSSGLLLQEATHTGEKSNSKPECESPFQWGDTHYSCGECMKHSSTKHVFVQQQRLPSREECYCWECGKSFSKYDSVSNHQRVHTGKRPYECGECGKSFSHKGSLVQ

SEQ ID NO: 869421 - protein, 234 aa, Homo sapiens
MAEAEGESLESWLNKATNPSNRQEDWEYIIGFCDQINKELEGPQIAVRLLAHKIQSPQEWEALQALTYLGDRVSEKVKTKVIELLYSWTMALPEEAKIKDAYHMLKRQGIVQSDPPIPVDRTLIPSPPPRPKNPVFDDEEKSKLLAKLLKSKNPDDLQEANKLIKSMVKEDEARIQKVTKRLHTLEEVNNNVRLLSEMLLHYSQEDSSDGDRELMKVGPPTAKAASRGCAALQE

SEQ ID NO: 869422 - protein, 723 aa, Homo sapiens
MAEAEGESLESWLNKATNPSNRQEDWEYIIGFCDQINKELEGPQIAVRLLAHKIQSPQEWEALQALTVLEACMKNCGRRFHNEVGKFRFLNELIKVVSPKYLGDRVSEKVKTKVIELLYSWTMALPEEAKIKDAYHMLKRQGIVQSDPPIPVDRTLIPSPPPRPKNPVFDDEEKSKLLAKLLKSKNPDDLQEANKLIKSMVKEDEARIQKVTKRLHTLEEVNNNVRLLSEMLLHYSQEDSSDGDRELMKELFDQCENKRRTLFKLASETEDNDNSLGDILQASDNLSRVINSYKTIIEGQVINGEVATLTLPDSEGNSQCSNQGTLIDLAELDTTNSLSSVLAPAPTPPSSGIPILPPPPQASGPPRSRSSSQAEATLGPSSTSNALSWLDEELLCLGLADPAPNVPPKESAGNSQWHLLQREQSDLDFFSPRPGTAACGASDAPLLQPSAPSSSSSQAPLPPPFPAPVVPASVPAPSAGSSLFSTGVAPALAPKVEPAVPGHHGLALGNSALHHLDALDQLLEEAKVTSGLVKPTTSPLIPTTTPARPLLPFSTGPGSPLFQPLSFQSQGSPPKGPELSLASIHVPLESIKPSSALPVTAYDKNGFRILFHFAKECPPGRPDVLVVVVSMLNTAPLPVKSIVLQAAVPKSMKVKLQPPSGTELSPFSPIQPPAAITQVMLLANPLKEKVRLRYKLTFALGEQLSTEVGEVDQFPPVEQWGNL

SEQ ID NO: 869423 - protein, 688 aa, Homo sapiens
MAEAEGESLESWLNKATNPSNRQEDWEYIIGFCDQINKELEGPQIAVRLLAHKIQSPQEWEALQALTVLEACMKNCGRRFHNEVGKFRFLNELIKVVSPKYLGDRVSEKVKTKVIELLYSWTMALPEEAKIKDAYHMLKRQALAKLLKSKNPDDLQEANKLIKSMVKEDEARIQKVTKRLHTLEEVNNNVRLLSEMLLHYSQEDSSDGDRELMKELFDQCENKRRTLFKLASETEDNDNSLGDILQASDNLSRVINSYKTIIEGQVINGEVATLTLPDSEGNSQCSNQGTLIDLAELDTTNSLSSVLAPAPTPPSSGIPILPPPPQASGPPRSRSSSQAEATLGPSSTSNALSWLDEELLCLGLADPAPNVPPKESAGNSQWHLLQREQSDLDFFSPRPGTAACGASDAPLLQPSAPSSSSSQAPLPPPFPAPVVPASVPAPSAGSSLFSTGVAPALAPKVEPAVPGHHGLALGNSALHHLDALDQLLEEAKVTSGLVKPTTSPLIPTTTPARPLLPFSTGPGSPLFQPLSFQSQGSPPKGPELSLASIHVPLESIKPSSALPVTAYDKNGFRILFHFAKECPPGRPDVLVVVVSMLNTAPLPVKSIVLQAAVPKSMKVKLQPPSGTELSPFSPIQPPAAITQVMLLANPLKEKVRLRYKLTFALGEQLSTEVGEVDQFPPVEQWGNL

SEQ ID NO: 869424 - protein, 756 aa, Homo sapiens
MAEAEGESLESWLNKATNPSNRQEDWEYIIGFCDQINKELEGPQIAVRLLAHKIQSPQEWEALQALTVLEACMKNCGRRFHNEVGKFRFLNELIKVVSPKYLGDRVSEKVKTKVIELLYSWTMALPEEAKIKDAYHMLKRQGIVQSDPPIPVDRTLIPSPPPRPKNPVFDDEEKSKLLAKLLKSKNPDDLQEANKLIKSMVKEDEARIQKVTKRLHTLEEVNNNVRLLSEMLLHYSQEDSSDGDRELMKELFDQCENKRRTLFKLASETEDNDNSLGEVKERRSGISQAFGYVGGNCHNRSEKSLFPAPGDILQASDNLSRVINSYKTIIEGQVINGEVATLTLPDSEGNSQCSNQGTLIDLAELDTTNSLSSVLAPAPTPPSSGIPILPPPPQASGPPRSRSSSQAEATLGPSSTSNALSWLDEELLCLGLADPAPNVPPKESAGNSQWHLLQREQSDLDFFSPRPGTAACGASDAPLLQPSAPSSSSSQAPLPPPFPAPVVPASVPAPSAGSSLFSTGVAPALAPKVEPAVPGHHGLALGNSALHHLDALDQLLEEAKVTSGLVKPTTSPLIPTTTPARPLLPFSTGPGSPLFQPLSFQSQGSPPKGPELSLASIHVPLESIKPSSALPVTAYDKNGFRILFHFAKECPPGRPDVLVVVVSMLNTAPLPVKSIVLQAAVPKSMKVKLQPPSGTELSPFSPIQPPAAITQVMLLANPLKEKVRLRYKLTFALGEQLSTEVGEVDQFPPVEQWGNL

SEQ ID NO: 869425 - protein, 328 aa, Homo sapiens
MAEAEGESLESWLNKATNPSNRQEDWEYIIGFCDQINKELEGPQIAVRLLAHKIQSPQEWEALQALTVLEACMKNCGRRFHNEVGKFRFLNELIKVVSPKYLGDRVSEKVKTKVIELLYSWTMALPEEAKIKDAYHMLKRQGIVQSDPPIPVDRTLIPSPPPRPKNPVFDDEEKSKLLAKLLKSKNPDDLQEANKLIKSMVKEDEARIQKVTKRLHTLEEVNNNVRLLSEMLLHYSQEDSSDGDRELMKELFDQCENKRRTLFKLASETEDNDNSLGDILQASDNLSRVINSYKTIIEGQVINGEVATLTLPDSEGNSQCSNRALLLS

SEQ ID NO: 869426 - protein, 125 aa, Homo sapiens
LCWVSLVLLLPHSRHVLTGSALPVTAYDKNGFRILFHFAKECPPGRPDVLVVVVSMLNTAPLPVKSIVLQAAVPKVPVSPWGQNGLILTLLCRGLCSQQVAVCVCTAGSIWGHLPVLFKGVSLSL

SEQ ID NO: 869427 - protein, 79 aa, Homo sapiens
LGESPAALAGSLTCFPSFPPPRTSGLVKPTTSPLIPTTTPARPLLPFSTGPGSPLFQPLSFQSQGSPPKGPELSLASIH

SEQ ID NO: 869428 - protein, 690 aa, Homo sapiens
MAEAEGESLESWLNKATNPSNRQEDWEYIIGFCDQINKELEGPQIAVRLLAHKIQSPQEWEALQALTYLGDRVSEKVKTKVIELLYSWTMALPEEAKIKDAYHMLKRQGIVQSDPPIPVDRTLIPSPPPRPKNPVFDDEEKSKLLAKLLKSKNPDDLQEANKLIKSMVKEDEARIQKVTKRLHTLEEVNNNVRLLSEMLLHYSQEDSSDGDRELMKELFDQCENKRRTLFKLASETEDNDNSLGDILQASDNLSRVINSYKTIIEGQVINGEVATLTLPDSEGNSQCSNQGTLIDLAELDTTNSLSSVLAPAPTPPSSGIPILPPPPQASGPPRSRSSSQAEATLGPSSTSNALSWLDEELLCLGLADPAPNVPPKESAGNSQWHLLQREQSDLDFFSPRPGTAACGASDAPLLQPSAPSSSSSQAPLPPPFPAPVVPASVPAPSAGSSLFSTGVAPALAPKVEPAVPGHHGLALGNSALHHLDALDQLLEEAKVTSGLVKPTTSPLIPTTTPARPLLPFSTGPGSPLFQPLSFQSQGSPPKGPELSLASIHVPLESIKPSSALPVTAYDKNGFRILFHFAKECPPGRPDVLVVVVSMLNTAPLPVKSIVLQAAVPKSMKVKLQPPSGTELSPFSPIQPPAAITQVMLLANPLKEKVRLRYKLTFALGEQLSTEVGEVDQFPPVEQWGNL

SEQ ID NO: 869429 - protein, 723 aa, Homo sapiens; identical to SEQ ID NO: 869422

SEQ ID NO: 869430 - protein, 820 aa, Homo sapiens
MAEAEGESLESWLNKATNPSNRQEDWEYIIGFCDQINKELEGPQIAVRLLAHKIQSPQEWEALQALTVLEACMKNCGRRFHNEVGKFRFLNELIKVVSPKYLGDRVSEKVKTKVIELLYSWTMALPEEAKIKDAYHMLKRQGIVQSDPPIPVDRTLIPSPPPRPKNPVFDDEEKSKLLAKLLKSKNPDDLQEANKLIKSMVKEDEARIQKVTKRLHTLEEVNNNVRLLSEMLLHYSQEDSSDGDRELMKELFDQCENKRRTLFKLASETEDNDNSLGDILQASDNLSRVINSYKTIIEGQVINGEVATLTLPDSEGNSQCSNQGTLIDLAELDTTNSLSSVLAPAPTPPSSGIPILPPPPQASGPPRSRSSSQAEATLGPSSTSNALSWLDEELLCLGLADPAPNVPPKESAGNSQWHLLQREQSDLDFFSPRPGTAACGASDAPLLQPSAPSSSSSQAPLPPPFPAPVVPASVPAPSAGSSLFSTGVAPALAPKVEPAVPGHHGLALGNSALHHLDALDQLLEEAKVTSGLVKPTTSPLIPTTTPARPLLPFSTGPGSPLFQPLSFQSQGSPPKGPELSLASIHVPLESIKPSRCWRIEVGGAVGPIATELEDMRQGWIQALFAGGPLKPGGLPACILSLKLLTERLSQIPLGSTGLIMTTESALFSSPPGLCWVSLVLLLPHSRHVLTGSALPVTAYDKNGFRILFHFAKECPPGRPDVLVVVVSMLNTAPLPVKSIVLQAAVPKSMKVKLQPPSGTELSPFSPIQPPAAITQVMLLANPLKEKVRLRYKLTFALGEQLSTEVGEVDQFPPVEQWGNL

SEQ ID NO: 869431 - protein, 93 aa, Homo sapiens
VKKCPGSFNADEDDRVDIWAPSRSRTSNSLPAPTPTTLPSPGSWGSLCQAWVCLAWDEAAHGVMSCVLVPGSGRLCPMDILAGHGIWPHDRPN

SEQ ID NO: 869432 - protein, 267 aa, Homo sapiens
MAEAEGESLESWLNKATNPSNRQEDWEYIIGFCDQINKELEGPQIAVRLLAHKIQSPQEWEALQALTVLEACMKNCGRRFHNEVGKFRFLNELIKVVSPKYLGDRVSEKVKTKVIELLYSWTMALPEEAKIKDAYHMLKRQGIVQSDPPIPVDRTLIPSPPPRPKNPVFDDEEKSKLLAKLLKSKNPDDLQEANKLIKSMVKEDEARIQKVTKRLHTLEEVNNNVRLLSEMLLHYSQEDSSDGDRELMKVGPPTAKAASRGCAALQE

SEQ ID NO: 869433 - protein, 653 aa, Homo sapiens
MGCSSSSTKTRRSDTSLRAALIIQNWYRGYKARLKARQHYALTIFQSIEYADEQGQMQLSTFFSFMLENYTHIHKEELELRNQSLESEQDMRDRWDYVDSIDVPDSYNGPRLQFPLTCTDIDLLLEAFKEQQILHAHYVLEVLFETKKVLKQMPNFTHIQTSPSKEVTICGDLHGKLDDLFLIFYKNGLPSERNPYVFNGDFVDRGKNSIEILMILCVSFLVYPNDLHLNRGNHEDFMMNLRYGFTKEILHKYKLHGKRILQILEEFYAWLPIGTIVDNEILVIHGGISETTDLNLLHRVERNKMKSVLIPPTETNRDHDTDSKHNKVGVTFNAHGRIKTNGSPTEHLTEHEWEQIIDILWSDPRGKNGCFPNTCRGGGCYFGPDVTSKILNKYQLKMLIRSHECKPEGYEICHDGKVVTIFSASNYYEEGSNRGAYIKLCSGTTPRFFQYQVTKATCFQPLRQRVDTMENSAIKILRERVISRKSDLTRAFQLQDHRKSGKLSVSQWAFCMENILGLNLPWRSLSSNLVNIDQNGNVEYMSSFQNIRIEKPVQEAHSTLVETLYRYRSDLEIIFNAIDTDHSGLISVEEFRAMWKLFSSHYNVHIDDSQVNKLANIMDLNKDGSIDFNEFLKAFYVVHRYEDLMKPDVTNLG

SEQ ID NO: 869434 - protein, 653 aa, Homo sapiens; identical to SEQ ID NO: 869433

SEQ ID NO: 869435 - protein, 506 aa, Homo sapiens
MGCSSSSTKTRRSDTSLRAALIIQNWYRGYKARLKARQHYALTIFQSIEYADEQGQMQLSTFFSFMLENYTHIHKEELELRNQSLESEQDMRDRWDYVDSIDVPDSYNGPRLQFPLTCTDIDLLLEAFKEQQILHAHYVLEVLFETKKVLKQMPNFTHIQTSPSKEVTICGDLHGKLDDLFLIFYKNGLPSERNPYVFNGDFVDRGKNSIEILMILCVSFLVYPNDLHLNRGNHEDFMMNLRYGFTKEILHKYKLHGKRILQILEEFYAWLPIGTIVDNEILVIHGGISETTDLNLLHRVERNKMKSVLIPPTETNRDHDTDSKHNKVGVTFNAHGRIKTNGSPTEHLTEHEWEQIIDILWSDPRGKNGCFPNTCRGGGCYFGPDVTSKILNKYQLKMLIRSHECKPEGYEICHDGKVVTIFSASNYYEEGSNRGAYIKLCSGTTPRFFQYQVTKATCFQPLRQRVDTMENSAIKILRERVISRKSDLTRAFQLQDHRKSGSFYSS

SEQ ID NO: 869436 - protein, 653 aa, Homo sapiens; identical to SEQ ID NO: 869433

SEQ ID NO: 869437 - protein, 143 aa, Homo sapiens
  misc_feature (142)..(142): Xaa can be any naturally occurring amino acid
MGCSSSSTKTRRSDTSLRAALIIQNWYRGYKARLKARQHYALTIFQSIEYADEQGQMQLSTFFSFMLENYTHIHKEELELRNQSLESEQDMRDRWDYVDSIDVPDSYNGPRLQFPLTCTDIDLLLEAFKEQQQILMPLCLEXY

SEQ ID NO: 869438 - protein, 196 aa, Homo sapiens
MPNFTHIQTSPSKEVTICGDLHGKLDDLFLIFYKNGLPSERNPYVFNGDFVDRGKNSIEILMILCVSFLVYPNDLHLNRGNHEDFMMNLRYGFTKEILHKYKLHGKRILQILEEFYAWLPIGTIVDNEILVIHGGISETTDLNLLHRVERNKMNLVLITPTEQREHDMIESHKVRVALMDWRIKMVLYEINELLGR

SEQ ID NO: 869439 - protein, 1022 aa, Homo sapiens
VAGAAIVLRSWALGEPPTSPGRAPTAGAWMRRRPEPGRTRGGRARETRRQPRHRSGRRMAEAISCTLNCSCQSFKPGKINHRQCDQCKHGWVAHALSKLRIPPMYPTSQVEIVQSNVVFDISSLMLYGTQAIPVRLKILLDRLFSVLKQDEVLQILHALDWTLQDYIRGYVLQDASGKVLDHWCIMTSEEEVATLQQFLRFGETKSIVELMAIQEKEEQSIIIPPSTANVDIRAFIESCSHRSSSLPTPVDKGNPSSIHPFENLISNMTFMLPFQFFNPLPPALIGSLPEQYMLEQGHDQSQDPKQEVHGPNPDSSFLTSSSTPFQVEKDQCLNCPDAITKKEDSTHLSDSSSYNIVTKFERTQLSPEAKVKPERNSLGTKKGRVFCTACEKTFYDKGTLKIHYNAVHLKIKHKCTIEGCNMVFSSLRTRNRHSANPNPRLHMPMNRNNRDKDLRNSLNLASSENYKCPGFTVTSPDCRPPPSYPGSGEDSKGQPAFPNIGQNGVLFPNLKTVQPVLPFYRSPATPAEVANTPGILPSLPLLSSSIPEQLISNEMPFDALPKKKSRKSSMPIKIEKEAVEIANEKRHNLSSDEDMPLQVVSEDEQEACSPQSHRVSEEQHVQSGGLGKPFPEGERPCHRESVIESSGAISQTPEQATHNSERETEHTPALIMVPREVEDGGHEHYFTPGMEPQVPFSDYMELQQRLLAGGLFSALSNRGMAFPCLEDSKELEHVGQHALARQIEENRFQCDICKKTFKNACSVKIHHKNMHVKEMHTCTVEGCNATFPSRRSRDRHSSNLNLHQKALSQEALESSEDHFRAAYLLKDVAKEAYQDVAFTQQASQTSVIFKGTSRMGSLVYPITQVHSASLESYNSGPLSEGTILDLSTTSSMKSESSSHSSWDSDGVSEEGTVLMEDSDGNCEGSSLVPGEDEYPICVLMEKADQSLASLPSGLPITCHLCQKTYSNKGTFRAHYKTVHLRQLHKCKVPGCNTMFSSVRSRNRHSQNPNLHKSLASSPSHLQ

SEQ ID NO: 869440 - protein, 151 aa, Homo sapiens
ALLIGMYCKTHNKGLEMHQLLAELSVIVYWTIPKLSGIKQPYIFFSHCCELTGISGQCLLGASSPVAAIWLKKWVLAKAWLGWGMHTMVPSLLCLVPLCPPGDSLSGRIAQTFYPLGSSFHGQGKKLAAFLKARPGLGTASLSLYSIHQST

SEQ ID NO: 869441 - protein, 136 aa, Homo sapiens
MYQNCPSPLAPPPCAKTSPGRTHTWAPVCTLSRGACACTPAYLQRLAFEPLDLRVGSSQCVCGYGHGPCPQSKQDSTSCATTAWPHFGAGAAQTTSLCGLCFLLPFLALLCSSPHPAGKRNPQLPPSPGARWEKWV

SEQ ID NO: 869442 - protein, 377 aa, Homo sapiens
MDSALSDPHNGSAEAGGPTNSTTRPPSTPEGIALAYGSLLLMALLPIFFGALRSVRCARGKNASDMPETITSRDAARFPIIASCTLLGLYLFFKIFSQEYINLLLSMYFFVLGILALSHTISPFMNKFFPASFPNRQYQLLFTQGSGENKEEIINYEFDTKDLVCLGLSSIVGVWYLLRKHWIANNLFGLAFSLNGVELLHLNNVSTGCILLGGLFIYDVFWVFGTNVMVTVAKSFEAPIKLVFPQDLLEKGLEANNFAMLGLGDVVIPGIFIALLLRFDISLKKNTHTYFYTSFAAYIFGLGLTIFIMHIFKHAQPALLYLVPACIGFPVLVALAKGEVTEMFSYEESNPKDPAAVTESKEGTEASASKGLEKKEK

SEQ ID NO: 869443 - protein, 174 aa, Homo sapiens
  misc_feature (12)..(12): Xaa can be any naturally occurring amino acid
MSDSRGPGYLEXEGKRCPVKEPVSPPASLLQQPELESDPERTLAMDSALSDPHNGSAEAGGPTNSTTRPPSTPEGIALAYGSLLLMALLPIFFGALRSVRCARGKNASDMPETITSRDAARFPIIASCTLLGLYLFFKIFSQEYINLLLSMYFFVLGILALSHTISQKASLCNI

SEQ ID NO: 869444 - protein, 107 aa, Homo sapiens
MSNLDSNRDNEVDFQEYCVFLSCIAMMCNEFFEGFPDKQPRKKENSSDVVGGSATGAAGSHFVGSAAHEVTEMFSYEESNPKDPAAVTESKEGTEASASKGLEKKEK

SEQ ID NO: 869445 - protein, 377 aa, Homo sapiens; identical to SEQ ID NO: 869442

SEQ ID NO: 869446 - protein, 426 aa, Homo sapiens
MDSALSDPHNGSAEAGGPTNSTTRPPSTPEGIALAYGSLLLMALLPIFFGALRSVRCARGKNASDMPETITSRDAARFPIIASCTLLGLYLFFKIFSQEYINLLLSMYFFVLGILALSHTISPFMNKFFPASFPNRQYQLLFTQGSGENKEEIINYEFDTKDLVCLGLSSIVGVWYLLRKHWIANNLFGLAFSLNGVELLHLNNVSTGCILLGGLFIYDVFWVFGTNVMVTVAKSFEAPIKLVFPQDLLEKGLEANNFAMLGLGDVVIPGIFIALLLRFDISLKKNTHTYFYTSFAAYIFGLGLTIFIMHIFKHAQPALLYLVPACIGFPVLVALAKGEVTEMFSYESSAEILPHTPRLTHFPTVSGSPASLADSMQQKLAGPRRRRPQNPSAIYEESNPKDPAAVTESKEGTEASASKGLEKKEK

SEQ ID NO: 869447 - protein, 394 aa, Homo sapiens
MDSALSDPHNGSAEAGGPTNSTTRPPSTPEGIALAYGSLLLMALLPIFFGALRSVRCARGKNASDMPETITSRDAARFPIIASCTLLGLYLFFKIFSQEYINLLLSMYFFVLGILALSHTISPFMNKFFPASFPNRQYQLLFTQGSGENKEEIINYEFDTKDLVCLGLSSIVGVWYLLRKHWIANNLFGLAFSLNGVELLHLNNVSTGCILLGGLFIYDVFWVFGTNVMVTVAKSFEAPIKLVFPQDLLEKGLEANNFAMLGLGDVVIPGIFIALLLRFDISLKKNTHTYFYTSFAAYIFGLGLTIFIMHIFKHAQPALLYLVPACIGFPVLVALAKGEVTEMFSYESSAEILPHTPRLTHFPTVSGSPASLADSMQQKLAGPRRRRPQNPSAM

SEQ ID NO: 869448 - protein, 317 aa, Homo sapiens
MDSALSDPHNGSAEAGGPTNSTTRPPSTPEGIALAYGSLLLMALLPIFFGALRSVRCARGKNASDMPETITSRDAARFPIIASCTLLGLYLFFKIFSQEYINLLLSMYFFVLGILALSHTISPFMNKFFPASFPNRQYQLLFTQGSGENKEEIINYEFDTKDLVCLGLSSIVGVWYLLRKHWIANNLFGLAFSLNGVELLHLNNVSTGCILLGGLFIYDVFWVFGTNVMVTVAKSFEAPIKLVFPQDLLEKGLEANNFAMLGLGDVVIPGIFIALLLRFDISLKKNTHTYFYTSFAAYIFGLGLTIFIMHIFKHAQL

SEQ ID NO: 869449 - protein, 377 aa, Homo sapiens; identical to SEQ ID NO: 869442

SEQ ID NO: 869450 - protein, 345 aa, Homo sapiens
MDSALSDPHNGSAEAGGPTNSTTRPPSTPEGIALAYGSLLLMALLPIFFGALRSVRCARGKNASDMPETITSRDAARFPIIASCTLLGLYLFFKIFSQEYINLLLSMYFFVLGILALSHTISPFMNKFFPASFPNRQYQLLFTQGSGENKEEIINYEFDTKDLVCLGLSSIVGVWYLLRKHWIANNLFGLAFSLNGVELLHLNNVSTGCILLGGLFIYDVFWVFGTNVMVTVAKSFEAPIKLVFPQDLLEKGLEANNFAMLGLGDVVIPGIFIALLLRFDISLKKNTHTYFYTSFAAYIFGLGLTIFIMHIFKHAQPALLYLVPACIGFPVLVALAKGEVTEMFR

SEQ ID NO: 869451 - protein, 345 aa, Homo sapiens
MDSALSDPHNGSAEAGGPTNSTTRPPSTPEGIALAYGSLLLMALLPIFFGALRSVRCARGKNASDMPETITSRDAARFPIIASCTLLGLYLFFKIFSQEYINLLLSMYFFVLGILALSHTISPFMNKFFPASFPNRQYQLLFTQGSGENKEEIINYEFDTKDLVCLGLSSIVGVWYLLRKHWIANNLFGLAFSLNGVELLHLNNVSTGCILLGGLFIYDVFWVFGTNVMVTVAKSFEAPIKLVFPQDLLEKGLEANNFAMLGLGDVVIPGIFIALLLRFDISLKKNTHTYFYTSFAAYIFGLGLTIFIMHIFKHAQPALLYLVPACIGFPVLVALAKGEVTEMFS

SEQ ID NO: 869452 - protein, 317 aa, Homo sapiens; identical to SEQ ID NO: 869448

SEQ ID NO: 869453 - protein, 331 aa, Homo sapiens
MDSALSDPHNGSAEAGGPTNSTTRPPSTPEGIALAYGSLLLMALLPIFFGALRSVRCARGKNASDMPETITSRDAARFPIIASCTLLGLYLFFKIFSQEYINLLLSMYFFVLGILALSHTISPFMNKFFPASFPNRQYQLLFTQGSGENKEEIINYEFDTKDLVCLGLSSIVGVWYLLRKHWIANNLFGLAFSLNGVELLHLNNVSTGCILLGGLFIYDVFWVFGTNVMVTVAKSFEAPIKLVFPQDLLEKGLEANNFAMLGLGDVVIPGIFIALLLRFDISLKKNTHTYFYTSFAAYIFGLGLTIFIMHIFKHAQGGQDGIRVSGMPHCK

SEQ ID NO: 869454 - protein, 344 aa, Homo sapiens
MDSALSDPHNGSAEAGGPTNSTTRPPSTPEGIALAYGSLLLMALLPIFFGALRSVRCARGKIFSQEYINLLLSMYFFVLGILALSHTISPFMNKFFPASFPNRQYQLLFTQGSGENKEEIINYEFDTKDLVCLGLSSIVGVWYLLRKHWIANNLFGLAFSLNGVELLHLNNVSTGCILLGGLFIYDVFWVFGTNVMVTVAKSFEAPIKLVFPQDLLEKGLEANNFAMLGLGDVVIPGIFIALLLRFDISLKKNTHTYFYTSFAAYIFGLGLTIFIMHIFKHAQPALLYLVPACIGFPVLVALAKGEVTEMFSYEESNPKDPAAVTESKEGTEASASKGLEKKEK

SEQ ID NO: 869455 - protein, 253 aa, Homo sapiens [sequence omitted]

SEQ ID NO: 869456 - protein, 253 aa, Homo sapiens [sequence omitted]

SEQ ID NO: 869457 - protein, 253 aa, Homo sapiens [sequence omitted]

SEQ ID NO: 869458 - protein, 335 aa, Homo sapiens
MDSALSDPHNGSAEAGGPTNSTTRPPSTPEGIALAYGSLLLMALLPIFFGALRSVRCARGKNASDMPETITSRDAARFPIIASCTLLGLYLFFKIFSQEYINLLLSMYFFVLGILALSHTISPFMNKFFPASFPNRQYQLLFTQGSGENKEEIINYEFDTKDLVCLGLSSIVGVWYLLRKVFGTNVMVTVAKSFEAPIKLVFPQDLLEKGLEANNFAMLGLGDVVIPGIFIALLLRFDISLKKNTHTYFYTSFAAYIFGLGLTIFIMHIFKHAQPALLYLVPACIGFPVLVALAKGEVTEMFSYEESNPKDPAAVTESKEGTEASASKGLEKKEK

SEQ ID NO: 869459 - protein, 192 aa, Homo sapiens
DYEGADGVRQVQDPSTKKYMDTGCILLGGLFIYDVFWVFGTNVMVTVAKSFEAPIKLVFPQDLLEKGLEANNFAMLGLGDVVIPGIFIALLLRFDISLKKNTHTYFYTSFAAYIFGLGLTIFIMHIFKHAQPALLYLVPACIGFPVLVALAKGEVTEMFSYEESNPKDPAAVTESKEGTEASASKGLEKKEK

SEQ ID NO: 869460 - protein, 243 aa, Homo sapiens
MDSALSDPHNGSAEAGGPTNSTTRPPSTPEGIALAYGSLLLMALLPIFFGALRSVRCARGKNASDMPETITSRDAARFPIIASCTLLGLYLFFKIFSQEYINLLLSMYFFVLGILALSHTISPFMNKFFPASFPNRQYQLLFTQGSGENKEEIINYEFDTKDLVCLGLSSIVGVWYLLRKHWIANNLFGLAFSLNGVELLHLNNVSTGCILLGGLFIYDVFWVFGTNVMVTVAKSFEAPIKCK

SEQ ID NO: 869461 - protein, 112 aa, Homo sapiens
EPWVQAQPLTCYGPGPVTVLQSSPEGVWGAGHGPEAVPCPAWLHQPVSSHEPALLYLVPACIGFPVLVALAKGEVTEMFSYEESNPKDPAAVTESKEGTEASASKGLEKKEK

SEQ ID NO: 869462 - protein, 130 aa, Homo sapiens
MDSALSDPHNGSAEAGGPTNSTTRPPSTPEGIALAYGSLLLMALLPIFFGALRSVRCARGKNASDMPETITSRDAARFPIIASCTLLGLYLFFKIFSQEYINLLLSMYFFVLGILALSHTISQKASLCNI

SEQ ID NO: 869463 - protein, 203 aa, Homo sapiens
MDSALSDPHNGSAEAGGPTNSTTRPPSTPEGIALAYGSLLLMALLPIFFGALRSVRCARGKNASDMPETITSRDAARFPIIASCTLLGLYLFFKVYFPNKSYAGSVLKTWKTQKSKKGKTAVIQNPTTRDSHSFPSEIFSQEYINLLLSMYFFVLGILALSHTISALHLRCLLGIWHQCDGDSGQVLRGTNKIYRLSISNPKI

SEQ ID NO: 869464 - protein, 135 aa, Homo sapiens
MDSALSDPHNGSAEAGGPTNSTTRPPSTPEGIALAYGSLLLMALLPIFFGALRSVRCARGKNASDMPETITSRDAARFPIIASCTLLGLYLFFKIFSQEYINLLLSMYFFVLGILALSHTISPKRGAPFPKLANI

SEQ ID NO: 869465 - protein, 120 aa, Homo sapiens
GALRSVRCARGKVGSAGKPGTFHPHTEHGRHGPFLGGTDTSPRTLTLPSPDHHRSLCLGPTFRGWHFLPRDLGTDPRPGYDTFPNRNLLLLPTRTLTLPSLCIMPRLGTLSARPPLRLGH

SEQ ID NO: 869466 - protein, 92 aa, Homo sapiens
REPINPTCMVLQGSERGTESVRHASKEERKMLPGGQATVSACHGSTGSWRQAVVGGDWGRFHSGDQETAVFLVTHSTTADSLSPCVEESFMA

SEQ ID NO: 869467 - protein, 377 aa, Homo sapiens; identical to SEQ ID NO: 869442

SEQ ID NO: 869468 - protein, 377 aa, Homo sapiens; identical to SEQ ID NO: 869442

SEQ ID NO: 869469 - protein, 377 aa, Homo sapiens; identical to SEQ ID NO: 869442

SEQ ID NO: 869470 - protein, 420 aa, Homo sapiens
MDSALSDPHNGSAEAGGPTNSTTRPPSTPEGIALAYGSLLLMALLPIFFGALRSVRCARGKNASDMPETITSRDAARFPIIASCTLLGLYLFFKVYFPNKSYAGSVLKTWKTQKSKKGKTAVIQNPTTRDSHSFPSEIFSQEYINLLLSMYFFVLGILALSHTISPFMNKFFPASFPNRQYQLLFTQGSGENKEEIINYEFDTKDLVCLGLSSIVGVWYLLRKHWIANNLFGLAFSLNGVELLHLNNVSTGCILLGGLFIYDVFWVFGTNVMVTVAKSFEAPIKLVFPQDLLEKGLEANNFAMLGLGDVVIPGIFIALLLRFDISLKKNTHTYFYTSFAAYIFGLGLTIFIMHIFKHAQPALLYLVPACIGFPVLVALAKGEVTEMFSYEESNPKDPAAVTESKEGTEASASKGLEKKEK

SEQ ID NO: 869471 - protein, 253 aa, Homo sapiens [sequence omitted]

SEQ ID NO: 869472 - protein, 280 aa, Homo sapiens
MVRACGEIGRGFFVLGILALSHTISPFMNKFFPASFPNRQYQLLFTQGSGENKEEIINYEFDTKDLVCLGLSSIVGVWYLLRKHWIANNLFGLAFSLNGVELLHLNNVSTGCILLGGLFIYDVFWVFGTNVMVTVAKSFEAPIKLVFPQDLLEKGLEANNFAMLGLGDVVIPGIFIALLLRFDISLKKNTHTYFYTSFAAYIFGLGLTIFIMHIFKHAQPALLYLVPACIGFPVLVALAKGEVTEMFSYEESNPKDPAAVTESKEGTEASASKGLEKKEK

SEQ ID NO: 869473 - protein, 149 aa, Homo sapiens [sequence omitted]

SEQ ID NO: 869474 - protein, 149 aa, Homo sapiens [sequence omitted]

SEQ ID NO: 869475 - protein, 334 aa, Homo sapiens
SGRPRGARAGLPAGDSTGALPIPFVSLLSPASPWIMFKKFDEKESVSNCIQLKTSVIKGIKSQLVEQFPDKKTEAQRGHCLPQGHPATSNKACASNTKDHFPLTLCQAEIINYEFDTKDLVCLGLSSIVGVWYLLRKHWIANNLFGLAFSLNGVELLHLNNVSTGCILLGGLFIYDVFWVFGTNVMVTVAKSFEAPIKLVFPQDLLEKGLEANNFAMLGLGDVVIPGIFIALLLRFDISLKKNTHTYFYTSFAAYIFGLGLTIFIMHIFKHAQPALLYLVPACIGFPVLVALAKGEVTEMFSYEESNPKDPAAVTESKEGTEASASKGLEKKEK

SEQ ID NO: 869476 - protein, 211 aa, Homo sapiens
MPSSVQGLTGGRGSPASGSGLTWPLCSEIINYEFDTKDLVCLGLSSIVGVWYLLRKVFGTNVMVTVAKSFEAPIKLVFPQDLLEKGLEANNFAMLGLGDVVIPGIFIALLLRFDISLKKNTHTYFYTSFAAYIFGLGLTIFIMHIFKHAQPALLYLVPACIGFPVLVALAKGEVTEMFSYEESNPKDPAAVTESKEGTEASASKGLEKKEK

SEQ ID NO: 869477 - protein, 285 aa, Homo sapiens
MDSALSDPHNGSAEAGGPTNSTTRPPSTPEGIALAYGSLLLMALLPIFFGALRSVRCARGKNASDMPETITSRDAARFPIIASCTLLGLYLFFKIFSQEYINLLLSMYFFVLGILALSHTISALHLHVFWVFGTNVMVTVAKSFEAPIKLVFPQDLLEKGLEANNFAMLGLGDVVIPGIFIALLLRFDISLKKNTHTYFYTSFAAYIFGLGLTIFIMHIFKHAQPALLYLVPACIGFPVLVALAKGEVTEMFSYEESNPKDPAAVTESKEGTEASASKGLEKKEK

SEQ ID NO: 869478 - protein, 144 aa, Homo sapiens
MIAPRWNTRLGTRTQSPVSSLPCCFPATLYPQLSPTGIFIALLLRFDISLKKNTHTYFYTSFAAYIFGLGLTIFIMHIFKHAQPALLYLVPACIGFPVLVALAKGEVTEMFSYEESNPKDPAAVTESKEGTEASASKGLEKKEK

SEQ ID NO: 869479 - protein, 251 aa, Homo sapiens
MDSALSDPHNGSAEAGGPTNSTTRPPSTPEGIALAYGSLLLMALLPIFFGALRSVRCARGKNASDMPETITSRDAARFPIIASCTLLGLYLFFKIFSQEYINLLLSMYFFVLGILALSHTISPFMNKFFPASFPNRQYQLLFTQGSGENKEEIINYEFDTKDLVCLGLSSIVGVWYLLRKHWIANNLFGLAFSLNGVELLHLNNVSTGCILLGGLFIYDVFWVSQAGMPRMSGSGAISSHHPASLAQVAVI

SEQ ID NO: 869480 - protein, 107 aa, Homo sapiens; identical to SEQ ID NO: 869444

SEQ ID NO: 869481 - protein, 130 aa, Homo sapiens; identical to SEQ ID NO: 869462

SEQ ID NO: 869482 - protein, 84 aa, Homo sapiens
MVRACGEIGRGFFVLGILALSHTISPFMNKFFPASFPNRQYQLLFTQGSGENKEEIINYESHTISPFMNKFFPASFPNRAKCRN

SEQ ID NO: 869483 - protein, 124 aa, Homo sapiens
SVSHWSAGLGAAATPHPSARSRVRMPPLSDHCPNRLLVLGPRVADSLVLDQAQEGSALGQITRLSRVLVAGEAEGVSAGLSIPGTNRILSFFPEKCWSRLFRPTLPSKHIHPERNNRNQNSQGA

SEQ ID NO: 869484 - protein, 93 aa, Homo sapiens
AAARDLELPTRPADSLVLDQAQEGSALGQITRLSRVLVAGEAEGVSAGLSIPGTNRILSFFPEKCWSRLFRPTLPSKHIHPERNNRNQNSQGA

SEQ ID NO: 869485 - protein, 2100 aa, Homo sapiens
QLRAAGAEGRKFAVERPGFRGQGRGRQRWLLRHTEGGAMGDEMDAMIPEREMKDFQFRALKKVRIFDSPEELPKERSSLLAVSNKYGLVFAGGASGLQIFPTKNLLIQNKPGDDPNKIVDKVQGLLVPMKFPIHHLALSCDNLTLSACMMSSEYGSIIAFFDVRTFSNEAKQQKRPFAYHKLLKDAGGMVIDMKWNPTVPSMVAVCLADGSIAVLQVTETVKVCATLPSTVAVTSVCWSPKGKQLAVGKQNGTVVQYLPTLQEKKVIPCPPFYESDHPVRVLDVLWIGTYVFAIVYAAADGTLETSPDVVMALLPKKEEKHPEIFVNFMEPCYGSCTERQHHYYLSYIEEWDLVLAASAASTEVSILARQSDQINWESWLLEDSSRAELPVTDKSDDSLPMGVVVDYTNQVEITISDEKTLPPAPVLMLLSTDGVLCPFYMINQNPGVKSLIKTPERLSLEGERQPKSPGSTPTTPTSSQAPQKLDASAAAAPASLPPSSPAAPIATFSLLPAGGAPTVFSFGSSSLKSSATVTGEPPSYSSGSDSSKAAPGPGPSTFSFVPPSKASLAPTPAASPVAPSAASFSFGSSGFKPTLESTPVPSVSAPNIAMKSSFPPSTSAVKVNLSEKFTAAATSTPVSSSQSAPPMSPFSSASKPAASGPLSHPTPLSAPPSSVPLKSSVLPSPSGRSAQGSSSPVPSMVQKSPRITPPAAKPGSPQAKSLQPAVAEKQGHQWKDSDPVMAGIGEEIAHFQKELEELKARTSKACFQVGTSEEMKMLRTESDDLHTFLLEIKETTESLHGDISSLKTTLLEGFAGVEEAREQNERNRDSGYLHLLYKRPLDPKSEAQLQEIRRLHQYVKFAVQDVNDVLDLEWDQHLEQKKKQRHLLVPERETLFNTLANNREIINQQRKRLNHLVDSLQQLRLYKQTSLWSLSSAVPSQSSIHSFDSDLESLCNALLKTTIESHTKSLPKVPAKLSPMKQAQLRNFLAKRKTPPVRSTAPASLSRSAFLSQRYYEDLDEVSSTSSVSQSLESEDARTSCKDDEAVVQAPRHAPVVRTPSIQPSLLPHAAPFAKSHLVHGSSPGVMGTSVATSASKIIPQGADSTMLATKTVKHGAPSPSHPISAPQAAAAAALRRQMASQAPAVNTLTESTLKNVPQVVNVQELKNNPATPSTAMGSSVPYSTAKTPHPVLTPVAANQAKQGSLINSLKPSGPTPASGQLSSGDKAFRTGFNFGIITPTPSSNFTAAQGATPSTKESSQPDAFSSGGGSKPSYEAIPESSPPSGITSASNTTPGEPAASSSRPVAPSGTALSTTSSKLETPPSKLGELLFPSSLAGETLGSFSGLRVGQADDSTKPTNKASSTSLTSTQPTKTSGVPSGFNFTAPPVLGKHTEPPVTSSATTTSVVPPAATSTSSTAVFGSLPVTSAGSSGVISFGGTSLSAGKTSFSFGSQQTNSTVPPSAPPPTTAATPLPTSFPTLSFGSLLSSATTPSLPMSAGRSTEEATSSALPEKPGDSEVSASAASLLEEQQSAQLPQAPPQTSDSVKKEPVLAQPAVSNSGTAASSTSLVALSAEATPATTGVPDARTEAVPPASSFSVPGQTAVTAAAISSAGPVAVETSSTPIASSTTSIVAPGPSAEAAAFGTVTSGSSVFAQPPAASSSSAFNQLTNNTATAPSATPVFGQVAASTAPSLFGQQTGSTASTAAATPQVSSSGFSSPAFGTTAPGVFGQTTFGQASVFGQSASSAASVFSFSQPGFSSVPAFGQPASSTPTSTSGSVFGAASSTSSSSSFSFGQSSPNTGGGLFGQSNAPAFGQSPGFGQGGSVFGGTSAATTTAATSGFSFCQASGFGSSNTGSVFGQAASTGGIVFGQQSSSSSGSVFGSGNTGRGGGFFSGLGGKPSQDAANKNPFSSASGGFGSTATSNTSNLFGNSGAKTFGGFASSSFGEQKPTGTFSSGGGSVASQGFGFSSPNKTGGFGAAPVFGSPPTFGGSPGFGGVPAFGSAPAFTSPLGSTGGKVFGEGTAAASAGGFGFGSSSNTTSFGTLASQNAPTFGSLSQQTSGFGTQSSGFSGFGSGTGGFSFGSNNSSVQGFGGWRS

SEQ ID NO: 869486 - protein, 2128 aa, Homo sapiens
QLRAAGAEGRKFAVERPGFRGQGRGRQRWLLRHTEGGAMGDEMDAMIPEREMKDFQFRALKKVRIFDSPEELPKERSSLLAVSNKYGLVFAGGASGLQIFPTKNLLIQNKPGDDPNKIVDKVQGLLVPMKFPIHHLALSCDNLTLSACMMSSEYGSIIAFFDVRTFSNEAKQQKRPFAYHKLLKDAGGMVIDMKWNPTVPSMVAVCLADGSIAVLQVTETVKVCATLPSTVAVTSVCWSPKGKQLAVGKQNGTVVQYLPTLQEKKVIPCPPFYESDHPVRVLDVLWIGTYVFAIVYAAADGTLETSPDVVMALLPKKEEKHPEIFVNFMEPCYGSCTERQHHYYLSYIEEWDLVLAASAASTEVSILARQSDQINWESWLLEDSSRAELPVTDKSDDSLPMGVVVDYTNQVEITISDEKTLPPAPVLMLLSTDGVLCPFYMINQNPGVKSLIKTPERLSLEGERQPKSPGSTPTTPTSSQAPQKLDASAAAAPASLPPSSPAAPIATFSLLPAGGAPTVFSFGSSSLKSSATVTGEPPSYSSGSDSSKAAPGPGPSTFSFVPPSKASLAPTPAASPVAPSAASFSFGSSGFKPTLESTPVPSVSAPNIAMKSSFPPSTSAVKVNLSEKFTAAATSTPVSSSQSAPPMSPFSSASKPAASGPLSHPTPLSAPPSSVPLKSSVLPSPSGRSAQGSSSPVPSMVQKSPRITPPAAKPGSPQAKSLQPAVAEKQGHQWKDSDPVMAGIGEEIAHFQKELEELKARTSKACFQVGTSEEMKMLRTESDDLHTFLLEIKETTESLHGDISSLKTTLLEGFAGVEEAREQNERNRDSGYLHLLYKRPLDPKSEAQLQEIRRLHQYVKFAVQDVNDVLDLEWDQHLEQKKKQRHLLVPERETLFNTLANNREIINQQRKRLNHLVDSLQQLRLYKQTSLWSLSSAVPSQSSIHSFDSDLESLCNALLKTTIESHTKSLPKVPAKLSPMKQAQLRNFLAKRKTPPVRSTAPASLSRSAFLSQRYYEDLDEVSSTSSVSQSLESEDARTSCKDDEAVVQAPRHAPVVRTPSIQPSLLPHAAPFAKSHLVHGSSPGVMGTSVATSASKIIPQGADSTMLATKTVKHGAPSPSHPISAPQAAAAAALRRQMASQAPAVNTLTESTLKNVPQVVNVQELKNNPATPSTAMGSSVPYSTAKTPHPVLTPVAANQAKQGSLINSLKPSGPTPASGQLSSGDKASGTAKIETAVTSTPSASGQFSKPFSFSPSGTGFNFGIITPTPSSNFTAAQGATPSTKESSQPDAFSSGGGSKPSYEAIPESSPPSGITSASNTTPGEPAASSSRPVAPSGTALSTTSSKLETPPSKLGELLFPSSLAGETLGSFSGLRVGQADDSTKPTNKASSTSLTSTQPTKTSGVPSGFNFTAPPVLGKHTEPPVTSSATTTSVVPPAATSTSSTAVFGSLPVTSAGSSGVISFGGTSLSAGKTSFSFGSQQTNSTVPPSAPPPTTAATPLPTSFPTLSFGSLLSSATTPSLPMSAGRSTEEATSSALPEKPGDSEVSASAASLLEEQQSAQLPQAPPQTSDSVKKEPVLAQPAVSNSGTAASSTSLVALSAEATPATTGVPDARTEAVPPASSFSVPGQTAVTAAAISSAGPVAVETSSTPIASSTTSIVAPGPSAEAAAFGTVTSGSSVFAQPPAASSSSAFNQLTNNTATAPSATPVFGQVAASTAPSLFGQQTGSTASTAAATPQVSSSGFSSPAFGTTAPGVFGQTTFGQASVFGQSASSAASVFSFSQPGFSSVPAFGQPASSTPTSTSGSVFGAASSTSSSSSFSFGQSSPNTGGGLFGQSNAPAFGQSPGFGQGGSVFGGTSAATTTAATSGFSFCQASGFGSSNTGSVFGQAASTGGIVFGQQSSSSSGSVFGSGNTGRGGGFFSGLGGKPSQDAANKNPFSSASGGFGSTATSNTSNLFGNSGAKTFGGFASSSFGEQKPTGTFSSGGGSVASQGFGFSSPNKTGGFGAAPVFGSPPTFGGSPGFGGVPAFGSAPAFTSPLGSTGGKVFGEGTAAASAGGFGFGSSSNTTSFGTLASQNAPTFGSLSQQTSGFGTQSSGFSGFGSGTGGFSFGSNNSSVQGFGGWRS

SEQ ID NO: 869487 - protein, 2106 aa, Homo sapiens
QLRAAGAEGRKFAVERPGFRGQGRGRQRWLLRHTEGGAMGDEMDAMIPEREMKDFQFRALKKVRIFDSPEELPKERSSLLAVSNKYGLVFAGGASGLQIFPTKNLLIQNKPGDDPNKIVDKVQGLLVPMKFPIHHLALSCDNLTLSACMMSSEYGSIIAFFDVRTFSNEAKQQKRPFAYHKLLKDAGGMVIDMKWNPTVPSMVAVCLADGSIAVLQVTETVKVCATLPSTVAVTSVCWSPKGKQLAVGKQNGTVVQYLPTLQEKKVIPCPPFYESDHPVRVLDVLWIGTYVFAIVYAAADGTLETSPDVVMALLPKKEEKHPEIFVNFMEPCYGSCTERQHHYYLSYIEEMINWESWLLEDSSRAELPVTDKSDDSLPMGVVVDYTNQVEITISDEKTLPPAPVLMLLSTDGVLCPFYMINQNPGVKSLIKTPERLSLEGERQPKSPGSTPTTPTSSQAPQKLDASAAAAPASLPPSSPAAPIATFSLLPAGGAPTVFSFGSSSLKSSATVTGEPPSYSSGSDSSKAAPGPGPSTFSFVPPSKASLAPTPAASPVAPSAASFSFGSSGFKPTLESTPVPSVSAPNIAMKSSFPPSTSAVKVNLSEKFTAAATSTPVSSSQSAPPMSPFSSASKPAASGPLSHPTPLSAPPSSVPLKSSVLPSPSGRSAQGSSSPVPSMVQKSPRITPPAAKPGSPQAKSLQPAVAEKQGHQWKDSDPVMAGIGEEIAHFQKELEELKARTSKACFQVGTSEEMKMLRTESDDLHTFLLEIKETTESLHGDISSLKTTLLEGFAGVEEAREQNERNRDSGYLHLLYKRPLDPKSEAQLQEIRRLHQYVKFAVQDVNDVLDLEWDQHLEQKKKQRHLLVPERETLFNTLANNREIINQQRKRLNHLVDSLQQLRLYKQTSLWSLSSAVPSQSSIHSFDSDLESLCNALLKTTIESHTKSLPKVPAKLSPMKQAQLRNFLAKRKTPPVRSTAPASLSRSAFLSQRYYEDLDEVSSTSSVSQSLESEDARTSCKDDEAVVQAPRHAPVVRTPSIQPSLLPHAAPFAKSHLVHGSSPGVMGTSVATSASKIIPQGADSTMLATKTVKHGAPSPSHPISAPQAAAAAALRRQMASQAPAVNTLTESTLKNVPQVVNVQELKNNPATPSTAMGSSVPYSTAKTPHPVLTPVAANQAKQGSLINSLKPSGPTPASGQLSSGDKASGTAKIETAVTSTPSASGQFSKPFSFSPSGTGFNFGIITPTPSSNFTAAQGATPSTKESSQPDAFSSGGGSKPSYEAIPESSPPSGITSASNTTPGEPAASSSRPVAPSGTALSTTSSKLETPPSKLGELLFPSSLAGETLGSFSGLRVGQADDSTKPTNKASSTSLTSTQPTKTSGVPSGFNFTAPPVLGKHTEPPVTSSATTTSVVPPAATSTSSTAVFGSLPVTSAGSSGVISFGGTSLSAGKTSFSFGSQQTNSTVPPSAPPPTTAATPLPTSFPTLSFGSLLSSATTPSLPMSAGRSTEEATSSALPEKPGDSEVSASAASLLEEQQSAQLPQAPPQTSDSVKKEPVLAQPAVSNSGTAASSTSLVALSAEATPATTGVPDARTEAVPPASSFSVPGQTAVTAAAISSAGPVAVETSSTPIASSTTSIVAPGPSAEAAAFGTVTSGSSVFAQPPAASSSSAFNQLTNNTATAPSATPVFGQVAASTAPSLFGQQTGSTASTAAATPQVSSSGFSSPAFGTTAPGVFGQTTFGQASVFGQSASSAASVFSFSQPGFSSVPAFGQPASSTPTSTSGSVFGAASSTSSSSSFSFGQSSPNTGGGLFGQSNAPAFGQSPGFGQGGSVFGGTSAATTTAATSGFSFCQASGFGSSNTGSVFGQAASTGGIVFGQQSSSSSGSVFGSGNTGRGGGFFSGLGGKPSQDAANKNPFSSASGGFGSTATSNTSNLFGNSGAKTFGGFASSSFGEQKPTGTFSSGGGSVASQGFGFSSPNKTGGFGAAPVFGSPPTFGGSPGFGGVPAFGSAPAFTSPLGSTGGKVFGEGTAAASAGGFGFGSSSNTTSFGTLASQNAPTFGSLSQQTSGFGTQSSGFSGFGSGTGGFSFGSNNSSVQGFGGWRS

SEQ ID NO: 869488 - protein, 1347 aa, Homo sapiens
QLRAAGAEGRKFAVERPGFRGQGRGRQRWLLRHTEGGAMGDEMDAMIPEREMKDFQFRALKKVRIFDSPEELPKERSSLLAVSNKYGLVFAGGASGLQIFPTKNLLIQNKPGDDPNKIVDKVQGLLVPMKFPIHHLALSCDNLTLSACMMSSEYGSIIAFFDVRTFSNEAKQQKRPFAYHKLLKDAGGMVIDMKWNPTVPSMVAVCLADGSIAVLQVTETVKVCATLPSTVAVTSVCWSPKGKQLAVGKQNGTVVQYLPTLQEKKVIPCPPFYESDHPVRVLDVLWIGTYVFAIVYAAADGTLETSPDVVMALLPKKEEKHPEIFVNFMEPCYGSCTERQHHYYLSYIEEWDLVLAASAASTEVSILARQSDQINWESWLLEDSSRAELPVTDKSDDSLPMGVVVDYTNQVEITISDEKTLPPAPVLMLLSTDGVLCPFYMINQNPGVKSLIKTPERLSLEGERQPKSPGSTPTTPTSSQAPQKLDASAAAAPASLPPSSPAAPIATFSLLPAGGAPTVFSFGSSSLKSSATVTGEPPSYSSGSDSSKAAPGPGPSTFSFVPPSKASLAPTPAASPVAPSAASFSFGSSGFKPTLESTPVPSVSAPNIAMKSSFPPSTSAVKVNLSEKFTAAATSTPVSSSQSAPPMSPFSSASKPAASGPLSHPTPLSAPPSSVPLKSSVLPSPSGRSAQGSSSPVPSMVQKSPRITPPAAKPGSPQAKSLQPAVAEKQGHQWKDSDPVMAGIGEEIAHFQKELEELKARTSKACFQVGTSEEMKMLRTESDDLHTFLLEIKETTESLHGDISSLKTTLLEGFAGVEEAREQNERNRDSGYLHLLYKRPLDPKSEAQLQEIRRLHQYVKFAVQDVNDVLDLEWDQHLEQKKKQRHLLVPERETLFNTLANNREIINQQRKRLNHLVDSLQQLRLYKQTSLWSLSSAVPSQSSIHSFDSDLESLCNALLKTTIESHTKSLPKVPAKLSPMKQAQLRNFLAKRKTPPVRSTAPASLSRSAFLSQRYYEDLDEVSSTSSVSQSLESEDARTSCKDDEAVVQAPRHAPVVRTPSIQPSLLPHAAPFAKSHLVHGSSPGVMGTSVATSASKIIPQGADSTMLATKTVKHGAPSPSHPISAPQAAAAAALRRQMASQAPAVNTLTESTLKNVPQVVNVQELKNNPATPSTAMGSSVPYSTAKTPHPVLTPVAANQAKQGSLINSLKPSGPTPASGQLSSGDKASGTAKIETAVTSTPSASGQFSKPFSFSPSGTGFNFGIITPTPSSNFTAAQGATPSTKESSQPDAFSSGGGSKPSYEAIPESSPPSGITSASNTTPGEPAASSSRPVAPSGTALSTTSTS

SEQ ID NO: 869489 - protein, 2128 aa, Homo sapiens; identical to SEQ ID NO: 869486

SEQ ID NO: 869490 - protein, 1910 aa, Homo sapiens
QLRAAGAEGRKFAVERPGFRGQGRGRQRWLLRHTEGGAMGDEMDAMIPEREMKDFQFRALKKVRIFDSPEELPKERSSLLAVSNKYGLVFAGGASGLQIFPTKNLLIQNKPGDDPNKIVDKVQGLLVPMKFPIHHLALSCDNLTLSACMMSSEYGSIIAFFDVRTFSNEAKQQKRPFAYHKLLKDAGGMVIDMKWNPTVPSMVAVCLADGSIAVLQVTETVKVCATLPSTVAVTSVCWSPKGKQLAVGKQNGTVVQYLPTLQEKKVIPCPPFYESDHPVRVLDVLWIGTYVFAIVYAAADGTLETSPDVVMALLPKKEEKHPEIFVNFMEPCYGSCTERQHHYYLSYIEEWDLVLAASAASTEVSILARQSDQINWESWLLEDSSRAELPVTDKSDDSLPMGVVVDYTNQVEITISDEKTLPPAPVLMLLSTDGVLCPFYMINQNPGVKSLIKTPERLSLEGERQPKSPGSTPTTPTSSQAPQKLDASAAAAPASLPPSSPAAPIATFSLLPAGGAPTVFSFGSSSLKSSATVTGEPPSYSSGSDSSKAAPGPGPSTFSFVPPSKASLAPTPAASPVAPSAASFSFGSSGFKPTLESTPVPSVSAPNIAMKSSFPPSTSAVKVNLSEKFTAAATSTPVSSSQSAPPMSPFSSASKPAASGPLSHPTPLSAPPSSVPLKSSVLPSPSGRSAQGSSSPVPSMVQKSPRITPPAAKPGSPQAKSLQPAVAEKQGHQWKDSDPVMAGIGEEIAHFQKELEELKARTSKACFQVGTSEEMKMLRTESDDLHTFLLEIKETTESLHGDISSLKTTLLEGFAGVEEAREQNERNRDSGYLHLLYKRPLDPKSEAQLQEIRRLHQYVKFAVQDVNDVLDLEWDQHLEQKKKQRHLLVPERETLFNTLANNREIINQQRKRLNHLVDSLQQLRLYKQTSLWSLSSAVPSQSSIHSFDSDLESLCNALLKTTIESHTKSLPKVPAKLSPMKQAQLRNFLAKRKTPPVRSTAPASLSRSAFLSQRYYEDLDEVSSTSSVSQSLESEDARTSCKDDEAVVQAPRHAPVVRTPSIQPSLLPHAAPFAKSHLVHGSSPGVMGTSVATSASKIIPQGADSTMLATKTVKHGAPSPSHPISAPQAAAAAALRRQMASQAPAVNTLTESTLKNVPQVVNVQELKNNPATPSTAMGSSVPYSTAKTPHPVLTPVAANQAKQGSLINSLKPSGPTPASGQLSSGDKASGTAKIETAVTSTPSASGQFSKPFSFSPSGTGFNFGIITPTPSSNFTAAQGATPSTKESSQPDAFSSGGGSKPSYEAIPESSPPSGITSASNTTPGEPAASSSRPVAPSGTALSTTSSKLETPPSKLGELLFPSSLAGETLGSFSGLRVGQADDSTKPTNKASSTSLTSTQPTKTSGVPSGFNFTAPPVLGKHTEPPVTSSATTTSVVPPAATSTSSTAVFGSLPVTSAGSSGVISFGGTSLSAGKTSFSFGSQQTNSTVPPSAPPPTTAATPLPTSFPTLSFGSLLSSATTPSLPMSAGRSTEEATSSALPEKPGDSEVSASAASLLEEQQSAQLPQAPPQTSDSVKKEPVLAQPAVSNSGTAASSTSLVALSAEATPATTGVPDARTEAVPPASSFSVPGQTAVTAAAISSAGPVAVETSSTPIASSTTSIVAPGPSAEAAAFGTVTSGSSVFAQPPAASSSSAFNQLTNNTATAPSATPVFGQVAASTAPSLFGQQTGSTASTAAATPQVSSSGFSSPAFGTTAPGVFGQTTFGQASVFGQSASSAASVFSFSQPGFSSVPAFGQPASSTPTSTSGSVFGAASSTSSSSSFSFGQSSPNTGGGLFGQSNAPAFGQSPGFGQGGSVFGGTSAATTTAATSGFSFCQASGFGSSNTGSVFGQAASTGGIVFGQLLNKAGHL

SEQ ID NO: 869491 - protein, 1599 aa, Homo sapiens
QLRAAGAEGRKFAVERPGFRGQGRGRQRWLLRHTEGGAMGDEMDAMIPEREMKDFQFRALKKVRIFDSPEELPKERSSLLAVSNKYGLVFAGGASGLQIFPTKNLLIQNKPGDDPNKIVDKVQGLLVPMKFPIHHLALSCDNLTLSACMMSSEYGSIIAFFDVRTFSNEAKQQKRPFAYHKLLKDAGGMVIDMKWNPTVPSMVAVCLADGSIAVLQVTETVKVCATLPSTVAVTSVCWSPKGKQLAVGKQNGTVVQYLPTLQEKKVIPCPPFYESDHPVRVLDVLWIGTYVFAIVYAAADGTLETSPDVVMALLPKKEEKHPEIFVNFMEPCYGSCTERQHHYYLSYIEEWDLVLAASAASTEVSILARQSDQINWESWLLEDSSRAELPVTDKSDDSLPMGVVVDYTNQVEITISDEKTLPPAPVLMLLSTDGVLCPFYMINQNPGVKSLIKTPERLSLEGERQPKSPGSTPTTPTSSQAPQKLDASAAAAPASLPPSSPAAPIATFSLLPAGGAPTVFSFGSSSLKSSATVTGEPPSYSSGSDSSKAAPGPGPSTFSFVPPSKASLAPTPAASPVAPSAASFSFGSSGFKPTLESTPVPSVSAPNIAMKSSFPPSTSAVKVNLSEKFTAAATSTPVSSSQSAPPMSPFSSASKPAASGPLSHPTPLSAPPSSVPLKSSVLPSPSGRSAQGSSSPVPSMVQKSPRITPPAAKPGSPQAKSLQPAVAEKQGHQWKDSDPVMAGIGEEIAHFQKELEELKARTSKACFQVGTSEEMKMLRTESDDLHTFLLEIKETTESLHGDISSLKTTLLEGFAGVEEAREQNERNRDSGYLHLLYKRPLDPKSEAQLQEIRRLHQYVKFAVQDVNDVLDLEWDQHLEQKKKQRHLLVPERETLFNTLANNREIINQQRKRLNHLVDSLQQLRLYKQTSLWSLSSAVPSQSSIHSFDSDLESLCNALLKTTIESHTKSLPKVPAKLSPMKQAQLRNFLAKRKTPPVRSTAPASLSRSAFLSQRYYEDLDEVSSTSSVSQSLESEDARTSCKDDEAVVQAPRHAPVVRTPSIQPSLLPHAAPFAKSHLVHGSSPGVMGTSVATSASKIIPQGADSTMLATKTVKHGAPSPSHPISAPQAAAAAALRRQMASQAPAVNTLTESTLKNVPQVVNVQELKNNPATPSTAMGSSVPYSTAKTPHPVLTPVAANQAKQGSLINSLKPSGPTPASGQLSSGDKASGTAKIETAVTSTPSASGQFSKPFSFSPSGTGFNFGIITPTPSSNFTAAQGATPSTKESSQPDAFSSGGGSKPSYEAIPESSPPSGITSASNTTPGEPAASSSRPVAPSGTALSTTSSKLETPPSKLGELLFPSSLAGETLGSFSGLRVGQADDSTKPTNKASSTSLTSTQPTKTSGVPSGFNFTAPPVLGKHTEPPVTSSATTTSVVPPAATSTSSTAVFGSLPVTSAGSSGVISFGGTSLSAGKTSFSFGSQQTNSTVPPSAPPPTTAATPLPTSFPTLSFGSLLSSATTPSLPMSAGRSTEEATSSALPEKPGDSEVSASAASLLEEQQSAQLPQAPPQTSDSVKKEPVLAQPAVSNSGTAASSTTEV

SEQ ID NO: 869492 - protein, 930 aa, Homo sapiens
LLRPGYYGRMAPTVVLITATAYTLRKEGEQLEGLEDTSCDHSTPSASGQFSKPFSFSPSGTGFNFGIITPTPSSNFTAAQGATPSTKESSQPDAFSSGGGSKPSYEAIPESSPPSGITSASNTTPGEPAASSSRPVAPSGTALSTTSSKLETPPSKLGELLFPSSLAGETLGSFSGLRVGQADDSTKPTNKASSTSLTSTQPTKTSGVPSGFNFTAPPVLGKHTEPPVTSSATTTSVVPPAATSTSSTAVFGSLPVTSAGSSGVISFGGTSLSAGKTSFSFGSQQTNSTVPPSAPPPTTAATPLPTSFPTLSFGSLLSSATTPSLPMSAGRSTEEATSSALPEKPGDSEVSASAASLLEEQQSAQLPQAPPQTSDSVKKEPVLAQPAVSNSGTAASSTSLVALSAEATPATTGVPDARTEAVPPASSFSVPGQTAVTAAAISSAGPVAVETSSTPIASSTTSIVAPGPSAEAAAFGTVTSGSSVFAQPPAASSSSAFNQLTNNTATAPSATPVFGQVAASTAPSLFGQQTGSTASTAAATPQVSSSGFSSPAFGTTAPGVFGQTTFGQASVFGQSASSAASVFSFSQPGFSSVPAFGQPASSTPTSTSGSVFGAASSTSSSSSFSFGQSSPNTGGGLFGQSNAPAFGQSPGFGQGGSVFGGTSAATTTAATSGFSFCQASGFGSSNTGSVFGQAASTGGIVFGQQSSSSSGSVFGSGNTGRGGGFFSGLGGKPSQDAANKNPFSSASGGFGSTATSNTSNLFGNSGAKTFGGFASSSFGEQKPTGTFSSGGGSVASQGFGFSSPNKTGGFGAAPVFGSPPTFGGSPGFGGVPAFGSAPAFTSPLGSTGGKVFGEGTAAASAGGFGFGSSSNTTSFGTLASQNAPTFGSLSQQTSGFGTQSSGFSGFGSGTGGFSFGSNNSSVQGFGGWRS

SEQ ID NO: 869493 - protein, 874 aa, Homo sapiens
  misc_feature (17)..(17): Xaa can be any naturally occurring amino acid
  misc_feature (21)..(21): Xaa can be any naturally occurring amino acid
AAELPQADGVEVTATPXSNCXAAQGATPSTKESSQPDAFSSGGGSKPSYEAIPESSPPSGITSASNTTPGEPAASSSRPVAPSGTALSTTSSKLETPPSKLGELLFPSSLAGETLGSFSGLRVGQADDSTKPTNKASSTSLTSTQPTKTSGVPSGFNFTAPPVLGKHTEPPVTSSATTTSVVPPAATSTSSTAVFGSLPVTSAGSSGVISFGGTSLSAGKTSFSFGSQQTNSTVPPSAPPPTTAATPLPTSFPTLSFGSLLSSATTPSLPMSAGRSTEEATSSALPEKPGDSEVSASAASLLEEQQSAQLPQAPPQTSDSVKKEPVLAQPAVSNSGTAASSTSLVALSAEATPATTGVPDARTEAVPPASSFSVPGQTAVTAAAISSAGPVAVETSSTPIASSTTSIVAPGPSAEAAAFGTVTSGSSVFAQPPAASSSSAFNQLTNNTATAPSATPVFGQVAASTAPSLFGQQTGSTASTAAATPQVSSSGFSSPAFGTTAPGVFGQTTFGQASVFGQSASSAASVFSFSQPGFSSVPAFGQPASSTPTSTSGSVFGAASSTSSSSSFSFGQSSPNTGGGLFGQSNAPAFGQSPGFGQGGSVFGGTSAATTTAATSGFSFCQASGFGSSNTGSVFGQAASTGGIVFGQQSSSSSGSVFGSGNTGRGGGFFSGLGGKPSQDAANKNPFSSASGGFGSTATSNTSNLFGNSGAKTFGGFASSSFGEQKPTGTFSSGGGSVASQGFGFSSPNKTGGFGAAPVFGSPPTFGGSPGFGGVPAFGSAPAFTSPLGSTGGKVFGEGTAAASAGGFGFGSSSNTTSFGTLASQNAPTFGSLSQQTSGFGTQSSGFSGFGSGTGGFSFGSNNSSVQGFGGWRS

SEQ ID NO: 869494 - protein, 719 aa, Homo sapiens
YKMCILNTAVELSAFSIVLLRCKRLVVPPAATSTSSTAVFGSLPVTSAGSSGVISFGGTSLSAGKTSFSFGSQQTNSTVPPSAPPPTTAATPLPTSFPTLSFGSLLSSATTPSLPMSAGRSTEEATSSALPEKPGDSEVSASAASLLEEQQSAQLPQAPPQTSDSVKKEPVLAQPAVSNSGTAASSTSLVALSAEATPATTGVPDARTEAVPPASSFSVPGQTAVTAAAISSAGPVAVETSSTPIASSTTSIVAPGPSAEAAAFGTVTSGSSVFAQPPAASSSSAFNQLTNNTATAPSATPVFGQVAASTAPSLFGQQTGSTASTAAATPQVSSSGFSSPAFGTTAPGVFGQTTFGQASVFGQSASSAASVFSFSQPGFSSVPAFGQPASSTPTSTSGSVFGAASSTSSSSSFSFGQSSPNTGGGLFGQSNAPAFGQSPGFGQGGSVFGGTSAATTTAATSGFSFCQASGFGSSNTGSVFGQAASTGGIVFGQQSSSSSGSVFGSGNTGRGGGFFSGLGGKPSQDAANKNPFSSASGGFGSTATSNTSNLFGNSGAKTFGGFASSSFGEQKPTGTFSSGGGSVASQGFGFSSPNKTGGFGAAPVFGSPPTFGGSPGFGGVPAFGSAPAFTSPLGSTGGKVFGEGTAAASAGGFGFGSSSNTTSFGTLASQNAPTFGSLSQQTSGFGTQSSGFSGFGSGTGGFSFGSNNSSVQGFGGWRS

SEQ ID NO: 869495 - protein, 822 aa, Homo sapiens
SAAQHGATTCTARTTQPTHHQQRQVALDLGWQVALFQLERLVQQHRLLAAPAFRRITQAFARNAVETVAMRAGDYKRFGHGGLLGVANGFNLEPAMRFIKTRRKDETLIVPTLRVVMHPVVLLRCKRLVVPPAATSTSSTAVFGSLPVTSAGSSGVISFGGTSLSAGKTSFSFGSQQTNSTVPPSAPPPTTAATPLPTSFPTLSFGSLLSSATTPSLPMSAGRSTEEATSSALPEKPGDSEVSASAASLLEEQQSAQLPQAPPQTSDSVKKEPVLAQPAVSNSGTAASSTSLVALSAEATPATTGVPDARTEAVPPASSFSVPGQTAVTAAAISSAGPVAVETSSTPIASSTTSIVAPGPSAEAAAFGTVTSGSSVFAQPPAASSSSAFNQLTNNTATAPSATPVFGQVAASTAPSLFGQQTGSTASTAAATPQVSSSGFSSPAFGTTAPGVFGQTTFGQASVFGQSASSAASVFSFSQPGFSSVPAFGQPASSTPTSTSGSVFGAASSTSSSSSFSFGQSSPNTGGGLFGQSNAPAFGQSPGFGQGGSVFGGTSAATTTAATSGFSFCQASGFGSSNTGSVFGQAASTGGIVFGQQSSSSSGSVFGSGNTGRGGGFFSGLGGKPSQDAANKNPFSSASGGFGSTATSNTSNLFGNSGAKTFGGFASSSFGEQKPTGTFSSGGGSVASQGFGFSSPNKTGGFGAAPVFGSPPTFGGSPGFGGVPAFGSAPAFTSPLGSTGGKVFGEGTAAASAGGFGFGSSSNTTSFGTLASQNAPTFGSLSQQTSGFGTQSSGFSGFGSGTGGFSFGSNNSSVQGFGGWRS

SEQ ID NO: 869496 - protein, 1109 aa, Homo sapiens
QLRAAGAEGRKFAVERPGFRGQGRGRQRWLLRHTEGGAMGDEMDAMIPEREMKDFQFRALKKVRIFDSPEELPKERSSLLAVSNKYGLVFAGGASGLQIFPTKNLLIQNKPGDDPNKIVDKVQGLLVPMKFPIHHLALSCDNLTLSACMMSSEYGSIIAFFDVRTFSNEAKQQKRPFAYHKLLKDAGGMVIDMKWNPTVPSMVAVCLADGSIAVLQVTETVKVCATLPSTVAVTSVCWSPKGKQLAVGKQNGTVVQYLPTLQEKKVIPCPPFYESDHPVRVLDVLWIGTYVFAIVYAAADGTLETSPDVVMALLPKKEEKHPEIFVNFMEPCYGSCTERQHHYYLSYIEEWDLVLAASAASTEVSILARQSDQINWESWLLEDSSRAELPVTDKSDDSLPMGVVVDYTNQVEITISDEKTLPPAPVLMLLSTDGVLCPFYMINQNPGVKSLIKTPERLSLEGERQPKSPGSTPTTPTSSQAPQKLDASAAAAPASLPPSSPAAPIATFSLLPAGGAPTVFSFGSSSLKSSATVTGEPPSYSSGSDSSKAAPGPGPSTFSFVPPSKASLAPTPAASPVAPSAASFSFGSSGFKPTLESTPVPSVSAPNIAMKSSFPPSTSAVKVNLSEKFTAAATSTPVSSSQSAPPMSPFSSASKPAASGPLSHPTPLSAPPSSVPLKSSVLPSPSGRSAQGSSSPVPSMVQKSPRITPPAAKPGSPQAKSLQPAVAEKQGHQWKDSDPVMAGIGEEIAHFQKELEELKARTSKACFQVGTSEEMKMLRTESDDLHTFLLEIKETTESLHGDISSLKTTLLEGFAGVEEAREQNERNRDSGYLHLLYKRPLDPKSEAQLQEIRRLHQYVKFAVQDVNDVLDLEWDQHLEQKKKQRHLLVPERETLFNTLANNREIINQQRKRLNHLVDSLQQLRLYKQTSLWSLSSAVPSQSSIHSFDSDLESLCNALLKTTIESHTKSLPKVPAKLSPMKQAQLRNFLAKRKTPPVRSTAPASLSRSAFLSQRYYEDLDEVSSTSSVSQSLESEDARTSCKDDEAVVQAPRHAPVVRTPSIQPSLLPHAAPFAKSHLVHGSSPGVMGTSAGTSASKIFLEGSATAGIL

SEQ ID NO: 869497 - protein, 1007 aa, Homo sapiens
QLRAAGAEGRKFAVERPGFRGQGRGRQRWLLRHTEGGAMGDEMDAMIPEREMKDFQFRALKKVRIFDSPEELPKERSSLLAVSNKYGLVFAGGASGLQIFPTKNLLIQNKPGDDPNKIVDKVQGLLVPMKFPIHHLALSCDNLTLSACMMSSEYGSIIAFFDVRTFSNEAKQQKRPFAYHKLLKDAGGMVIDMKWNPTVPSMVAVCLADGSIAVLQVTETVKVCATLPSTVAVTSVCWSPKGKQLAVGKQNGTVVQYLPTLQEKKVIPCPPFYESDHPVRVLDVLWIGTYVFAIVYAAADGTLETSPDVVMALLPKKEEKHPEIFVNFMEPCYGSCTERQHHYYLSYIEEWDLVLAASAASTEVSILARQSDQINWESWLLEDSSRAELPVTDKSDDSLPMGVVVDYTNQVEITISDEKTLPPAPVLMLLSTDGVLCPFYMINQNPGVKSLIKTPERLSLEGERQPKSPGSTPTTPTSSQAPQKLDASAAAAPASLPPSSPAAPIATFSLLPAGGAPTVFSFGSSSLKSSATVTGEPPSYSSGSDSSKAAPGPGPSTFSFVPPSKASLAPTPAASPVAPSAASFSFGSSGFKPTLESTPVPSVSAPNIAMKSSFPPSTSAVKVNLSEKFTAAATSTPVSSSQSAPPMSPFSSASKPAASGPLSHPTPLSAPPSSVPLKSSVLPSPSGRSAQGSSSPVPSMVQKSPRITPPAAKPGSPQAKSLQPAVAEKQGHQWKDSDPVMAGIGEEIAHFQKELEELKARTSKACFQVGTSEEMKMLRTESDDLHTFLLEIKETTESLHGDISSLKTTLLEGFAGVEEAREQNERNRDSGYLHLLYKRPLDPKSEAQLQEIRRLHQYVKFAVQDVNDVLDLEWDQHLEQKKKQRHLLVPERETLFNTLANNREIINQQRKRLNHLVDSLQQLRLYKQTSLWSLSSAVPSQSSIHSFDSDLESLCNALLKTTIESHTKSLPKVPAKLSPMKQAQLRNFLAKRKTPPVRSTAPGKENQ

SEQ ID NO: 869498 - protein, 170 aa, Homo sapiens
MAKRTRRGDNQDFSLKKMTHQHSVQPQPLQALWARREAKCSERALQLPAQEDSGLGAAATPHPSARSRVRMPPLSDHCPNRLLVLGPRVADSLVLDQAQEGSALGQITRLSRVLVAGEAEGVSAGLSIPGTNRILSFFPEKCWSRLFRPTLPSKHIHPERNNRNQNSQGA

SEQ ID NO: 869499 - protein, 478 aa, Homo sapiens
QLRAAGAEGRKFAVERPGFRGQGRGRQRWLLRHTEGGAMGDEMDAMIPEREMKDFQFRALKKVRIFDSPEELPKERSSLLAVSNKYGLVFAGGASGLQIFPTKNLLIQNKPGDDPNKIVDKVQGLLVPMKFPIHHLALSCDNLTLSACMMSSEYGSIIAFFDVRTFSNEAKQQKRPFAYHKLLKDAGGMVIDMKWNPTVPSMVAVCLADGSIAVLQVTETVKVCATLPSTVAVTSVCWSPKGKQLAVGKQNGTVVQYLPTLQEKKVIPCPPFYESDHPVRVLDVLWIGTYVFAIVYAAADGTLETSPDVVMALLPKKEEKHPEIFVNFMEPCYGSCTERQHHYYLSYIEEWDLVLAASAASTEVSILARQSDQINWESWLLEDSSRAELPVTDKSDDSLPMGVVVDYTNQVEITISDEKTLPPAPVLMLLSTDGVLCPFYMINQNPGVKSLIKTPERLSLEGERQPKSPGMCLCLLYQ

SEQ ID NO: 869500 - protein, 138 aa, Homo sapiens
PFFLPISVCLPLFCSGGFGAAPVFGSPPTFGGSPGFGGVPAFGSAPAFTSPLGSTGGKVFGEGTAAASAGGFGFGSSSNTTSFGTLASQNAPTFGSLSQQTSGFGTQSSGFSGFGSGTGGFSFGSNNSSVQGFGGWRS

SEQ ID NO: 869501 - protein, 188 aa, Homo sapiens
SAAQHGATTCTARTTQPTHHQQRQVALDLGWQVALFQLERLVQQHRLLAAPAFRRITQAFARNAVETVAMRAGDYKRFGHGGLLGVANGFNLEPAMRFIKTRRKDETLIVPTLRVVMHPVVLLRCKRLVVPPAATSTSSTAVFGSLPVTSAGSSGVISFGGTSLSAGKTSFSFGSQQTNSTVPPSAPP

SEQ ID NO: 869502 - protein, 105 aa, Homo sapiens
VLAFELLTSSFPFFLPILIWFLIAQCLLFLSPPFFLPISVCLPLFCSGGFGAAPVFGSPPTFGGSPGFGGVPAFGSAPAFTSPLGSTGGKVFGEGTAAASAGGFG

SEQ ID NO: 869503 - protein, 2128 aa, Homo sapiens; identical to SEQ ID NO: 869486

SEQ ID NO: 869504 - protein, 2133 aa, Homo sapiens
QLRAAGAEGRKFAVERPGFRGQGRGRQRWLLRHTEGGAMGDEMDAMIPEREMKDFQFRALKKVRIFDSPEELPKERSSLLAVSNKYGLVFAGGASGLQIFPTKNLLIQNKPGDDPNKIVDKVQGLLVPMKFPIHHLALSCDNLTLSACMMSSEYGSIIAFFDVRTFSNEAKQQKRPFAYHKLLKDAGGMVIDMKWNPTVPSMVAVCLADGSIAVLQVTETVKVCATLPSTVAVTSVCWSPKGKQLAVGKQNGTVVQYLPTLQEKKVIPCPPFYESDHPVRVLDVLWIGTYVFAIVYAAADGTLETSPDVVMALLPKKEEKHPEIFVNFMEPCYGSCTERQHHYYLSYIEEWDLVLAASAASTEVSILARQSDQINWESWLLEDSSRAELPVTDKSDDSLPMGVVVDYTNQVEITISDEKTLPPAPVLMLLSTDGVLCPFYMINQNPGVKSLIKTPERLSLEGERQPKSPGSTPTTPTSSQAPQKLDASAAAAPASLPPSSPAAPIATFSLLPAGGAPTVFSFGSSSLKSSATVTGEPPSYSSGSDSSKAAPGPGPSTFSFVPPSKASLAPTPAASPVAPSAASFSFGSSGFKPTLESTPVPSVSAPNIAMKSSFPPSTSAVKVNLSENSSQSAPPMSPFSSASKPAASGPLSHPTPLSAPPSSVPLKSSVLPSPSGRSAQGSSSPVPSMVQKSPRITPPAAKPGSPQAKSLQPAVAEKQGHQWKDSDPVMAGIGEEIAHFQKELEELKARTSKACFQVGTSEEMKMLRTESDDLHTFLLEIKETTESLHGDISSLKTTLLEGFAGVEEAREQNERNRDSGYLHLLYKRPLDPKSEAQLQEIRRLHQYVKFAVQDVNDVLDLEWDQHLEQKKKQRHLLVPERETLFNTLANNREIINQQRKRLNHLVDSLQQLRLYKQTSLWSLSSAVPSQSSIHSFDSDLESLCNALLKTTIESHTKSLPKVPAKLSPMKQAQLRNFLAKRKTPPVRSTAPASLSRSAFLSQRYYEDLDEVSSTSSVSQSLESEDARTSCKDDEAVVQAPRHAPVVRTPSIQPSLLPHAAPFAKSHLVHGSSPGVMGTSVATSASKIIPQGADSTMLATKTVKHGAPSPSHPISAPQAAAAAALRRQMASQAPAVNTLTESTLKNVPQVVNVQELKNNPATPSTAMAKTPHPVLTPVAANQAKQGSLINSLKPSGPTPASGQLSSGDKASGTAKIETAVTSTPSASGQFSKPFSFSPSGTGFNFGIITPTPSSNFTAAQGATPSTKESSQPDAFSSGGGSKPSYEAIPESSPPSGITSASNTTPGEPAASSSRPVAPSGTALSTTSSKLETPPSKLGELLFPSSLAGETLGSFSGLRVGQADDSTKPTNKASSTSLTSTQPTKTSGVPSGFNFTAPPVLGKHTEPPVTSSATTTSVVPPAATSTSSTAVFGSLPVTSAGSSGVISFGGTSLSAGKTSFSFGSQQTNSTVPPSAPPPTTAATPLPTSFPTLSFGSLLSSATTPSLPMSAGRSTEEATSSALPEKPGDSEVSASAASLLEEQQSAQLPQAPPQTSDSVKKEPVLAQPAVSNSGTAASSTSLVALSAEATPATTGVPDARTEAVPPASSFSVPGQTAVTAAAISSAGPVAVETSSTPIASSTTSIVAPGPSAEAAAFGTVTSGSSVFAQPPAASSSSAFNQLTNNTATAPSATPVFGQVAASTAPSLFGQQTGSTASTAAATPQVSSSGFSSPAFGTTAPGVFGQTTFGQASVFGQSASSAASVFSFSQPGFSSVPAFGQPASSTPTSTSGSVFGAASSTSSSSSFSFGQSSPNTGGGLFGQSNAPAFGQSPGFGQGGSVFGGTSAATTTAATSGFSFCQASGFGSSNTGSVFGQAASTGGIVFGQQSSSSSGSVFGSGNTGRGGGFFSGLGGKPSQDAANKNPFSSASGGFGSTATSNTSNLFGNSGAKTFGGFASSSFGEQKPTGTFSSGGGSVASQGFGFSSPNKTGGFGAAPVFGSPPTFGGSPGFGGVPAFGSAPAFTSPLGSTGGKVFGEGTAAASAGGFGSLAMSLSPTLKGRLLLMRPKAGGGREQAAPGRKSNESRSLGHLCMERALTSPLKVWEQQQHHILRHARESECPHFRITVPTDFWFWDPE

SEQ ID NO: 869505 - protein, 196 aa, Homo sapiens
KSAMAASETQLLLAGVASSASTQSQSASLDGPDTQWLKEQGEEITKFQPQKDDPPAFGSAPAFTSPLGSTGGKVFGEGTAAASAGGFGFGSSSNTTSFGTLASQNAPTFGSLSQQTSGFGTQSSGFSGFGSGTGGLSRVLVAGEAEGVSAGLSIPGTNRILSFFPEKCWSRLFRPTLPSKHIHPERNNRNQNSQGA

SEQ ID NO: 869506 - protein, 1599 aa, Homo sapiens; identical to SEQ ID NO: 869491

SEQ ID NO: 869507 - protein, 2128 aa, Homo sapiens; identical to SEQ ID NO: 869486

SEQ ID NO: 869508 - protein, 2118 aa, Homo sapiens
QLRAAGAEGRKFAVERPGFRGQGRGRQRWLLRHTEGGAMGDEMDAMIPEREMKDFQFRALKKVRIFDSPEELPKERSSLLAVSNKYGLVFAGGASGLQIFPTKNLLIQNKPGDDPNKIVDKVQGLLVPMKFPIHHLALSCDNLTLSACMMSSEYGSIIAFFDVRTFSNEAKQQKRPFAYHKLLKDAGGMVIDMKWNPTVPSMVAVCLADGSIAVLQVTETVKVCATLPSTVAVTSVCWSPKGKQLAVGKQNGTVVQYLPTLQEKKVIPCPPFYESDHPVRVLDVLWIGTYVFAIVYAAADGTLETSPDVVMALLPKKEEKHPEIFVNFMEPCYGSCTERQHHYYLSYIEEWDLVLAASAASTEVSILARQSDQINWESWLLEDSSRAELPVTDKSDDSLPMGVVVDYTNQVEITISDEKTLPPAPVLMLLSTDGVLCPFYMINQNPGVKSLIKTPERLSLEGERQPKSPGSTPTTPTSSQAPQKLDASAAAAPASLPPSSPAAPIATFSLLPAGGAPTVFSFGSSSLKSSATVTGEPPSYSSGSDSSKAAPGPGPSTFSFVPPSKASLAPTPAASPVAPSAASFSFGSSGFKPTLESTPVPSVSAPNIAMKSSFPPSTSAVKVNLSEKFTAAATSTPVSSSQSAPPMSPFSSASKPAASGPLSHPTPLSAPPSSVPLKSSVLPSPSGRSAQGSSSPVPSMVQKSPRITPPAAKPGSPQAKSLQPAVAEKQGHQWKDSDPVMAGIGEEIAHFQKELEELKARTSKACFQVGTSEEMKMLRTESDDLHTFLLEIKETTESLHGDISSLKTTLLEGFAGVEEAREQNERNRDSGYLHLLYKRPLDPKSEAQLQEIRRLHQYVKFAVQDVNDVLDLEWDQHLEQKKKQRHLLVPERETLFNTLANNREIINQQRKRLNHLVDSLQQLRLYKQTSLWSLSSAVPSQSSIHSFDSDLESLCNALLKTTIESHTKSLPKVPAKLSPMKQAQLRNFLAKRKTPPVRSTAPASLSRSAFLSQRYYEDLDEVSSTSSVSQSLESEDARTSCKDDEAVVQAPRHAPVVRTPSIQPSLLPHAAPFAKSHLVHGSSPGVMGTSVATSASKIIPQGADSTMLATKTVKHGAPSPSHPISAPQAAAAAALRRQMASQAPAVNTLTESTLKNVPQVVNVQELKNNPATPSTAMGSSVPYSTAKTPHPVLTPVAANQAKQGSLINSLKPSGPTPASGQLSSGDKASGTAKIETAVTSTPSASGQFSKPFSFSPSGTGFNFGIITPTPSSNFTAAQGATPSTKESSQPDAFSSGGGSKPSYEAIPESSPPSGITSASNTTPGEPAASSSRPVAPSGTALSTTSSKLETPPSKLGELLFPSSLAGETLGSFSGLRVGQADDSTKPTNKASSTSLTSTQPTKTSGVPSGFNFTAPPVLGKHTEPPVTSSATTTSVVPPAATSTSSTAVFGSLPVTSAGSSGVISFGGTSLSAGKTSFSFGSQQTNSTVPPSAPPPTTAATPLPTSFPTLSFGSLLSSATTPSLPMSAGRSTEEATSSALPEKPGDSEVSASAASLLEEQQSAQLPQAPPQTSDSVKKEPVLAQPAVSNSGTAASSTSLVALSAEATPATTGVPDARTEAVPPASSFSVPGQTAVTAAAISSAGPVAVETSSTPIASSTTSIVAPGPSAEAAAFGTVTSGSSVFAQPPAASSSSAFNQLTNNTATAPSATPVFGQVAASTAPSLFGQQTGSTASTAAATPQVSSSGFSSPAFGTTAPGVFGQTTFGQASVFGQSASSAASVFSFSQPGFSSVPAFGQPASSTPTSTSGSVFGAASSTSSSSSFSFGQSSPNTGGGLFGQSNAPAFGQSPGFGQGGSVFGGTSAATTTAATSGFSFCQASGFGSSNTGSVFGQAASTGGIVFGQQSSSSSGSVFGSGNTGRGGGFFSGLGGKPSQDAANKNPFSSASGGFGSTATSNTSNLFGNSGAKTFGGFASSSFGEQKPTGTFSSGGGSVASQGFGFSSPNKTGGFGAAPVFGSPPTFGGSPGFGGVPAFGSAPAFTSPLGSTGGKVFGEGTAAASAGGFGFGSSSNTTSFGTLASQNAPTFGSLSQQTSGFGTQSSGFSGFGSGTGGFSFGSNNS

SEQ ID NO: 869509 - protein, 2135 aa, Homo sapiens
QLRAAGAEGRKFAVERPGFRGQGRGRQRWLLRHTEGGAMGDEMDAMIPEREMKDFQFRALKKVRIFDSPEELPKERSSLLAVSNKYGLVFAGGASGLQIFPTKNLLIQNKPGDDPNKIVDKVQGLLVPMKFPIHHLALSCDNLTLSACMMSSEYGSIIAFFDVRTFSNEAKQQKRPFAYHKLLKDAGGMVIDMKWNPTVPSMVAVCLADGSIAVLQVTETVKVCATLPSTVAVTSVCWSPKGKQLAVGKQNGTVVQYLPTLQEKKVIPCPPFYESDHPVRVLDVLWIGTYVFAIVYAAADGTLETSPDVVMALLPKKEEKHPEIFVNFMEPCYGSCTERQHHYYLSYIEEWDLVLAASAASTEVSILARQSDQINWESWLLEDSSRAELPVTDKSDDSLPMGVVVDYTNQVEITISDEKTLPPAPVLMLLSTDGVLCPFYMINQNPGVKSLIKTPERLSLEGERQPKSPGSTPTTPTSSQAPQKLDASAAAAPASLPPSSPAAPIATFSLLPAGGAPTVFSFGSSSLKSSATVTGEPPSYSSGSDSSKAAPGPGPSTFSFVPPSKASLAPTPAASPVAPSAASFSFGSSGFKPTLESTPVPSVSAPNIAMKSSFPPSTSAVKVNLSEKFTAAATSTPVSSSQSAPPMSPFSSASKPAASGPLSHPTPLSAPPSSVPLKSSVLPSPSGRSAQGSSSPVPSMVQKSPRITPPAAKPGSPQAKSLQPAVAEKQGHQWKDSDPVMAGIGEEIAHFQKELEELKARTSKACFQVGTSEEMKMLRTESDDLHTFLLEIKETTESLHGDISSLKTTLLEGFAGVEEAREQNERNRDSGYLHLLYKRPLDPKSEAQLQEIRRLHQYVKFAVQDVNDVLDLEWDQHLEQKKKQRHLLVPERETLFNTLANNREIINQQRKRLNHLVDSLQQLRLYKQTSLWSLSSAVPSQSSIHSFDSDLESLCNALLKTTIESHTKSLPKVPAKLSPMKQAQLRNFLAKRKTPPVRSTAPASLSRSAFLSQRYYEDLDEVSSTSSVSQSLESEDARTSCKDDEAVVQAPRHAPVVRTPSIQPSLLPHAAPFAKSHLVHGSSPGVMGTSVATSASKIIPQGADSTMLATKTVKHGAPSPSHPISAPQAAAAAALRRQMASQAPAVNTLTESTLKNVPQVVNVQELKNNPATPSTAMGSSVPYSTAKTPHPVLTPVAANQAKQGSLINSLKPSGPTPASGQLSSGDKASGTAKIETAVTSTPSASGQFSKPFSFSPSGTGFNFGIITPTPSSNFTAAQGATPSTKESSQPDAFSSGGGSKPSYEAIPESSPPSGITSASNTTPGEPAASSSRPVAPSGTALSTTSSKLETPPSKLGELLFPSSLAGETLGSFSGLRVGQADDSTKPTNKASSTSLTSTQPTKTSGVPSGFNFTAPPVLGKHTEPPVTSSATTTSVVPPAATSTSSTAVFGSLPVTSAGSSGVISFGGTSLSAGKTSFSFGSQQTNSTVPPSAPPPTTAATPLPTSFPTLSFGSLLSSATTPSLPMSAGRSTEEATSSALPEKPGDSEVSASAASLLEEQQSAQLPQAPPQTSDSVKKEPVLAQPAVSNSGTAASSTSLVALSAEATPATTGVPDARTEAVPPASSFSVPGQTAVTAAAISSAGPVAVETSSTPIASSTTSIVAPGPSAEAAAFGTVTSGSSVFAQPPAASSSSAFNQLTNNTATAPSATPVFGQVAASTAPSLFGQQTGSTASTAAATPQVSSSGFSSPAFGTTAPGVFGQTTFGQASVFGQSASSAASVFSFSQPGFSSVPAFGQPASSTPTSTSGSVFGAASSTSSSSSFSFGQSSPNTGGGLFGQSNAPAFGQSPGFGQGGSVFGGTSAATTTAATSGFSFCQASGFGSSNTGSVFGQAASTGGIVFGQQSSSSSGSVFGSGNTGRGGGFFSGLGGKPSQDAANKNPFSSASGGFGSTATSNTSNLFGNSGAKTFGGFASSSFGEQKPTGTFSSGGGSVASQGFGFSSPNKTGGFGAAPVFGSPPTFGGSPGFGGVPAFGSAPAFTSPLGSTGGKVFGEGTAAASAGGFGFGSSSNTTSFGTLASQNAPTFGSLSQQTSGFGTQSSGFSGFGSGTGGSALGQITRLSAFGASIRPDPLDERS

SEQ ID NO: 869510 - protein, 1904 aa, Homo sapiens
QLRAAGAEGRKFAVERPGFRGQGRGRQRWLLRHTEGGAMGDEMDAMIPEREMKDFQFRALKKVRIFDSPEELPKERSSLLAVSNKYGLVFAGGASGLQIFPTKNLLIQNKPGDDPNKIVDKVQGLLVPMKFPIHHLALSCDNLTLSACMMSSEYGSIIAFFDVRTFSNEAKQQKRPFAYHKLLKDAGGMVIDMKWNPTVPSMVAVCLADGSIAVLQVTETVKVCATLPSTVAVTSVCWSPKGKQLAVGKQNGTVVQYLPTLQEKKVIPCPPFYESDHPVRVLDVLWIGTYVFAIVYAAADGTLETSPDVVMALLPKKEEKHPEIFVNFMEPCYGSCTERQHHYYLSYIEEWDLVLAASAASTEVSILARQSDQINWESWLLEDSSRAELPVTDKSDDSLPMGVVVDYTNQVEITISDEKTLPPAPVLMLLSTDGVLCPFYMINQNPGVKSLIKTPERLSLEGERQPKSPGSTPTTPTSSQAPQKLDASAAAAPASLPPSSPAAPIATFSLLPAGGAPTVFSFGSSSLKSSATVTGEPPSYSSGSDSSKAAPGPGPSTFSFVPPSKASLAPTPAASPVAPSAASFSFGSSGFKPTLESTPVPSVSAPNIAMKSSFPPSTSAVKVNLSEKFTAAATSTPVSSSQSAPPMSPFSSASKPAASGPLSHPTPLSAPPSSVPLKSSVLPSPSGRSAQGSSSPVPSMVQKSPRITPPAAKPGSPQAKSLQPAVAEKQGHQWKDSDPVMAGIGEEIAHFQKELEELKARTSKACFQVGTSEEMKMLRTESDDLHTFLLEIKETTESLHGDISSLKTTLLEGFAGVEEAREQNERNRDSGYLHLLYKRPLDPKSEAQLQEIRRLHQYVKFAVQDVNDVLDLEWDQHLEQKKKQRHLLVPERETLFNTLANNREIINQQRKRLNHLVDSLQQLRLYKQTSLWSLSSAVPSQSSIHSFDSDLESLCNALLKTTIESHTKSLPKVPAKLSPMKQAQLRNFLAKRKTPPVRSTAPASLSRSAFLSQRYYEDLDEVSSTSSVSQSLESEDARTSCKDDEAVVQAPRHAPVVRTPSIQPSLLPHAAPFAKSHLVHGSSPGVMGTSVATSASKIIPQGADSTMLATKTVKHGAPSPSHPISAPQAAAAAALRRQMASQAPAVNTLTESTLKNVPQVVNVQELKNNPATPSTAMGSSVPYSTAKTPHPVLTPVAANQAKQGSLINSLKPSGPTPASGQLSSGDKASGTAKIETAVTSTPSASGQFSKPFSFSPSGTGFNFGIITPTPSSNFTAAQGATPSTKESSQPDAFSSGGGSKPSYEAIPESSPPSGITSASNTTPGEPAASSSRPVAPSGTALSTTSSKLETPPSKLGELLFPSSLAGETLGSFSGLRVGQADDSTKPTNKASSTSLTSTQPTKTSGVPSGFNFTAPPVLGKHTEPPVTSSATTTSVVPPAATSTSSTAVFGSLPVTSAGSSGVISFGGTSLSAGKTSFSFGSQQTNSTVPPSAPPPTTAATPLPTSFPTLSFGSLLSSATTPSLPMSAGRSTEEATSSALPEKPGDSEVSASAASLLEEQQSAQLPQAPPQTSDSVKKEPVLAQPAVSNSGTAASSTSLVALSAEATPATTGVPDARTEAVPPASSFSVPGQTAVTAAAISSAGPVAVETSSTPIASSTTSIVAPGPSAEAAAFGTVTSGSSVFAQPPAASSSSAFNQLTNNTATAPSATPVFGQVAASTAPSLFGQQTGSTASTAAATPQVSSSGFSSPAFGTTAPGVFGQTTFGQASVFGQSASSAASVFSFSQPGFSSVPAFGQPASSTPTSTSGSVFGAASSTSSSSSFSFGQSSPNTGGGLFGQSNAPAFGQSPGFGQGGSVFGGTSAATTTAATSGFSFCQASGFGSSNTGSVFGQAASTGGIVFGQYL

SEQ ID NO: 869511 - protein, 1904 aa, Homo sapiens; identical to SEQ ID NO: 869510

SEQ ID NO: 869512 - protein, 1894 aa, Homo sapiens
WTLEKPQLLQLVLQQRLLLRGKYLSTLEDGQAIPGPPFYNVDTGVRVLDVLWIGTYVFAIVYAAADGTLETSPDVVMALLPKKEEKHPEIFVNFMEPCYGSCTERQHHYYLSYIEEWDLVLAASAASTEVSILARQSDQINWESWLLEDSSRAELPVTDKSDDSLPMGVVVDYTNQVEITISDEKTLPPAPVLMLLSTDGVLCPFYMINQNPGVKSLIKTPERLSLEGERQPKSPGSTPTTPTSSQAPQKLDASAAAAPASLPPSSPAAPIATFSLLPAGGAPTVFSFGSSSLKSSATVTGEPPSYSSGSDSSKAAPGPGPSTFSFVPPSKASLAPTPAASPVAPSAASFSFGSSGFKPTLESTPVPSVSAPNIAMKSSFPPSTSAVKVNLSEKFTAAATSTPVSSSQSAPPMSPFSSASKPAASGPLSHPTPLSAPPSSVPLKSSVLPSPSGRSAQGSSSPVPSMVQKSPRITPPAAKPGSPQAKSLQPAVAEKQGHQWKDSDPVMAGIGEEIAHFQKELEELKARTSKACFQVGTSEEMKMLRTESDDLHTFLLEIKETTESLHGDISSLKTTLLEGFAGVEEAREQNERNRDSGYLHLLYKRPLDPKSEAQLQEIRRLHQYVKFAVQDVNDVLDLEWDQHLEQKKKQRHLLVPERETLFNTLANNREIINQQRKRLNHLVDSLQQLRLYKQTSLWSLSSAVPSQSSIHSFDSDLESLCNALLKTTIESHTKSLPKVPAKLSPMKQAQLRNFLAKRKTPPVRSTAPASLSRSAFLSQRYYEDLDEVSSTSSVSQSLESEDARTSCKDDEAVVQAPRHAPVVRTPSIQPSLLPHAAPFAKSHLVHGSSPGVMGTSVATSASKIIPQGADSTMLATKTVKHGAPSPSHPISAPQAAAAAALRRQMASQAPAVNTLTESTLKNVPQVVNVQELKNNPATPSTAMGSSVPYSTAKTPHPVLTPVAANQAKQGSLINSLKPSGPTPASGQLSSGDKASGTAKIETAVTSTPSASGQFSKPFSFSPSGTGFNFGIITPTPSSNFTAAQGATPSTKESSQPDAFSSGGGSKPSYEAIPESSPPSGITSASNTTPGEPAASSSRPVAPSGTALSTTSSKLETPPSKLGELLFPSSLAGETLGSFSGLRVGQADDSTKPTNKASSTSLTSTQPTKTSGVPSGFNFTAPPVLGKHTEPPVTSSATTTSVVPPAATSTSSTAVFGSLPVTSAGSSGVISFGGTSLSAGKTSFSFGSQQTNSTVPPSAPPPTTAATPLPTSFPTLSFGSLLSSATTPSLPMSAGRSTEEATSSALPEKPGDSEVSASAASLLEEQQSAQLPQAPPQTSDSVKKEPVLAQPAVSNSGTAASSTSLVALSAEATPATTGVPDARTEAVPPASSFSVPGQTAVTAAAISSAGPVAVETSSTPIASSTTSIVAPGPSAEAAAFGTVTSGSSVFAQPPAASSSSAFNQLTNNTATAPSATPVFGQVAASTAPSLFGQQTGSTASTAAATPQVSSSGFSSPAFGTTAPGVFGQTTFGQASVFGQSASSAASVFSFSQPGFSSVPAFGQPASSTPTSTSGSVFGAASSTSSSSSFSFGQSSPNTGGGLFGQSNAPAFGQSPGFGQGGSVFGGTSAATTTAATSGFSFCQASGFGSSNTGSVFGQAASTGGIVFGQQSSSSSGSVFGSGNTGRGGGFFSGLGGKPSQDAANKNPFSSASGGFGSTATSNTSNLFGNSGAKTFGGFASSSFGEQKPTGTFSSGGGSVASQGFGFSSPNKTGGFGAAPVFGSPPTFGGSPGFGGVPAFGSAPAFTSPLGSTGGKVFGEGTAAASAGGFGFGSSSNTTSFGTLASQNAPTFGSLSQQTSGFGTQSSGFSGFGSGTGGFSFGSNNSSVQGFGGWRS

SEQ ID NO: 869513 - protein, 1603 aa, Homo sapiens
KTSYDTMSYRISSSGTPSEQCWEPAPGPGPSTFSFVPPSKASLAPTPAASPVAPSAASFSFGSSGFKPTLESTPVPSVSAPNIAMKSSFPPSTSAVKVNLSEKFTAAATSTPVSSSQSAPPMSPFSSASKPAASGPLSHPTPLSAPPSSVPLKSSVLPSPSGRSAQGSSSPVPSMVQKSPRITPPAAKPGSPQAKSLQPAVAEKQGHQWKDSDPVMAGIGEEIAHFQKELEELKARTSKACFQVGTSEEMKMLRTESDDLHTFLLEIKETTESLHGDISSLKTTLLEGFAGVEEAREQNERNRDSGYLHLLYKRPLDPKSEAQLQEIRRLHQYVKFAVQDVNDVLDLEWDQHLEQKKKQRHLLVPERETLFNTLANNREIINQQRKRLNHLVDSLQQLRLYKQTSLWSLSSAVPSQSSIHSFDSDLESLCNALLKTTIESHTKSLPKVPAKLSPMKQAQLRNFLAKRKTPPVRSTAPASLSRSAFLSQRYYEDLDEVSSTSSVSQSLESEDARTSCKDDEAVVQAPRHAPVVRTPSIQPSLLPHAAPFAKSHLVHGSSPGVMGTSVATSASKIIPQGADSTMLATKTVKHGAPSPSHPISAPQAAAAAALRRQMASQAPAVNTLTESTLKNVPQVVNVQELKNNPATPSTAMGSSVPYSTAKTPHPVLTPVAANQAKQGSLINSLKPSGPTPASGQLSSGDKASGTAKIETAVTSTPSASGQFSKPFSFSPSGTGFNFGIITPTPSSNFTAAQGATPSTKESSQPDAFSSGGGSKPSYEAIPESSPPSGITSASNTTPGEPAASSSRPVAPSGTALSTTSSKLETPPSKLGELLFPSSLAGETLGSFSGLRVGQADDSTKPTNKASSTSLTSTQPTKTSGVPSGFNFTAPPVLGKHTEPPVTSSATTTSVVPPAATSTSSTAVFGSLPVTSAGSSGVISFGGTSLSAGKTSFSFGSQQTNSTVPPSAPPPTTAATPLPTSFPTLSFGSLLSSATTPSLPMSAGRSTEEATSSALPEKPGDSEVSASAASLLEEQQSAQLPQAPPQTSDSVKKEPVLAQPAVSNSGTAASSTSLVALSAEATPATTGVPDARTEAVPPASSFSVPGQTAVTAAAISSAGPVAVETSSTPIASSTTSIVAPGPSAEAAAFGTVTSGSSVFAQPPAASSSSAFNQLTNNTATAPSATPVFGQVAASTAPSLFGQQTGSTASTAAATPQVSSSGFSSPAFGTTAPGVFGQTTFGQASVFGQSASSAASVFSFSQPGFSSVPAFGQPASSTPTSTSGSVFGAASSTSSSSSFSFGQSSPNTGGGLFGQSNAPAFGQSPGFGQGGSVFGGTSAATTTAATSGFSFCQASGFGSSNTGSVFGQAASTGGIVFGQQSSSSSGSVFGSGNTGRGGGFFSGLGGKPSQDAANKNPFSSASGGFGSTATSNTSNLFGNSGAKTFGGFASSSFGEQKPTGTFSSGGGSVASQGFGFSSPNKTGGFGAAPVFGSPPTFGGSPGFGGVPAFGSAPAFTSPLGSTGGKVFGEGTAAASAGGFGFGSSSNTTSFGTLASQNAPTFGSLSQQTSGFGTQSSGFSGFGSGTGGFSFGSNNSSVQGFGGWRS

SEQ ID NO: 869514 - protein, 1905 aa, Homo sapiens
QLRAAGAEGRKFAVERPGFRGQGRGRQRWLLRHTEGGAMGDEMDAMIPEREMKDFQFRALKKVRIFDSPEELPKERSSLLAVSNKYGLVFAGGASGLQIFPTKNLLIQNKPGDDPNKIVDKVQGLLVPMKFPIHHLALSCDNLTLSACMMSSEYGSIIAFFDVRTFSNEAKQQKRPFAYHKLLKDAGGMVIDMKWNPTVPSMVAVCLADGSIAVLQVTETVKVCATLPSTVAVTSVCWSPKGKQLAVGKQNGTVVQYLPTLQEKKVIPCPPFYESDHPVRVLDVLWIGTYVFAIVYAAADGTLETSPDVVMALLPKKEEKHPEIFVNFMEPCYGSCTERQHHYYLSYIEEWDLVLAASAASTEVSILARQSDQINWESWLLEDSSRAELPVTDKSDDSLPMGVVVDYTNQVEITISDEKTLPPAPVLMLLSTDGVLCPFYMINQNPGVKSLIKTPERLSLEGERQPKSPGSTPTTPTSSQAPQKLDASAAAAPASLPPSSPAAPIATFSLLPAGGAPTVFSFGSSSLKSSATVTGEPPSYSSGSDSSKAAPGPGPSTFSFVPPSKASLAPTPAASPVAPSAASFSFGSSGFKPTLESTPVPSVSAPNIAMKSSFPPSTSAVKVNLSEKFTAAATSTPVSSSQSAPPMSPFSSASKPAASGPLSHPTPLSAPPSSVPLKSSVLPSPSGRSAQGSSSPVPSMVQKSPRITPPAAKPGSPQAKSLQPAVAEKQGHQWKDSDPVMAGIGEEIAHFQKELEELKARTSKACFQVGTSEEMKMLRTESDDLHTFLLEIKETTESLHGDISSLKTTLLEGFAGVEEAREQNERNRDSGYLHLLYKRPLDPKSEAQLQEIRRLHQYVKFAVQDVNDVLDLEWDQHLEQKKKQRHLLVPERETLFNTLANNREIINQQRKRLNHLVDSLQQLRLYKQTSLWSLSSAVPSQSSIHSFDSDLESLCNALLKTTIESHTKSLPKVPAKLSPMKQAQLRNFLAKRKTPPVRSTAPASLSRSAFLSQRYYEDLDEVSSTSSVSQSLESEDARTSCKDDEAVVQAPRHAPVVRTPSIQPSLLPHAAPFAKSHLVHGSSPGVMGTSVATSASKIIPQGADSTMLATKTVKHGAPSPSHPISAPQAAAAAALRRQMASQAPAVNTLTESTLKNVPQVVNVQELKNNPATPSTAMGSSVPYSTAKTPHPVLTPVAANQAKQGSLINSLKPSGPTPASGQLSSGDKASGTAKIETAVTSTPSASGQFSKPFSFSPSGTGFNFGIITPTPSSNFTAAQGATPSTKESSQPDAFSSGGGSKPSYEAIPESSPPSGITSASNTTPGEPAASSSRPVAPSGTALSTTSSKLETPPSKLGELLFPSSLAGETLGSFSGLRVGQADDSTKPTNKASSTSLTSTQPTKTSGVPSGFNFTAPPVLGKHTEPPVTSSATTTSVVPPAATSTSSTAVFGSLPVTSAGSSGVISFGGTSLSAGKTSFSFGSQQTNSTVPPSAPPPTTAATPLPTSFPTLSFGSLLSSATTPSLPMSAGRSTEEATSSALPEKPGDSEVSASAASLLEEQQSAQLPQAPPQTSDSVKKEPVLAQPAVSNSGTAASSTSLVALSAEATPATTGVPDARTEAVPPASSFSVPGQTAVTAAAISSAGPVAVETSSTPIASSTTSIVAPGPSAEAAAFGTVTSGSSVFAQPPAASSSSAFNQLTNNTATAPSATPVFGQVAASTAPSLFGQQTGSTASTAAATPQVSSSGFSSPAFGTTAPGVFGQTTFGQASVFGQSASSAASVFSFSQPGFSSVPAFGQPASSTPTSTSGSVFGAASSTSSSSSFSFGQSSPNTGGGLFGQSNAPAFGQSPGFGQGGSVFGGTSAATTTAATSGFSFCQASDTLRMETVFEEMDEESTGGRFIFESKK

SEQ ID NO: 869515 - protein, 916 aa, Homo sapiens
MKSSLLLRGVHFCFHLPGTAKIETAVTSTPSASGQFSKPFSFSPSGTGFNFGIITPTPSSNFTAAQGATPSTKESSQPDAFSSGGGSKPSYEAIPESSPPSGITSASNTTPGEPAASSSRPVAPSGTALSTTSSKLETPPSKLGELLFPSSLAGETLGSFSGLRVGQADDSTKPTNKASSTSLTSTQPTKTSGVPSGFNFTAPPVLGKHTEPPVTSSATTTSVVPPAATSTSSTAVFGSLPVTSAGSSGVISFGGTSLSAGKTSFSFGSQQTNSTVPPSAPPPTTAATPLPTSFPTLSFGSLLSSATTPSLPMSAGRSTEEATSSALPEKPGDSEVSASAASLLEEQQSAQLPQAPPQTSDSVKKEPVLAQPAVSNSGTAASSTSLVALSAEATPATTGVPDARTEAVPPASSFSVPGQTAVTAAAISSAGPVAVETSSTPIASSTTSIVAPGPSAEAAAFGTVTSGSSVFAQPPAASSSSAFNQLTNNTATAPSATPVFGQVAASTAPSLFGQQTGSTASTAAATPQVSSSGFSSPAFGTTAPGVFGQTTFGQASVFGQSASSAASVFSFSQPGFSSVPAFGQPASSTPTSTSGSVFGAASSTSSSSSFSFGQSSPNTGGGLFGQSNAPAFGQSPGFGQGGSVFGGTSAATTTAATSGFSFCQASGFGSSNTGSVFGQAASTGGIVFGQQSSSSSGSVFGSGNTGRGGGFFSGLGGKPSQDAANKNPFSSASGGFGSTATSNTSNLFGNSGAKTFGGFASSSFGEQKPTGTFSSGGGSVASQGFGFSSPNKTGGFGAAPVFGSPPTFGGSPGFGGVPAFGSAPAFTSPLGSTGGKVFGEGTAAASAGGFGFGSSSNTTSFGTLASQNAPTFGSLSQQTSGFGTQSSGFSGFGSGTGGFSFGSNNSSVQGFGGWRS

SEQ ID NO: 869516 - protein, 246 aa, Homo sapiens [sequence omitted]

SEQ ID NO: 869517 - protein, 736 aa, Homo sapiens
CVWNKNHCESWESGNTNNILRAKCPPKTAASDDRCYRYADCASCTANTNGCQWCDDKKCISANSNCSMSVKNYTKCHVRNEQICNKLTSCKSCSLNLNCQWDQRQQECQALPAHLCGEGWSHIGDACLRVNSSRENYDNAKLYCYNLSGNLASLTTSKEVEFVLDEIQKYTQQKVSPWVGLRKINISYWGWEDMSPFTNTTLQWLPGEPNDSGFCAYLERAAVAGLKANPCTSMANGLVCEKPVVSPNQNARPCKKPCSLRTSCSNCTSNGMECMWCSSTKRCVDSNAYIISFPYGQCLEWQTATCSPQNCSGLRTCGQCLEQPGCGWCNDPSNTGRGHCIEGSSRGPMKLIGMHHSEMVLDTNLCPKEKNYEWSFIQCPACQCNGHSTCINNNVCEQCKNLTTGKQCQDCMPGYYGDPTNGGQCTACTCSGHANICHLHTGKCFCTTKGIKGDQCQLCDSENRYVGNPLRGTCYSYYRKMIATITAINFIANPEQSNKNLDISINASNNFNLNITWSVGSTAGTISGEETSIVSKNNIKEYRDSFSYEKFNFRSNPNITFYVYVSNFSWPIKIQIAFSQHNTIMDLVQFFVTFFSCFLSLLLVAAVVWKIKQTCWASRRREQLLRERQQMASRPFASVDVALEVGAEQTEFLRGPLEGAPKPIAIEPCAGNRAAVLTVFLCLPRGSSGAPPPGQSGLAIASALIDISQQKASDSKDKTSGVRNRKHLSTRQGTCV

SEQ ID NO: 869518 - protein, 747 aa, Homo sapiens
CVWNKNHCESWESGNTNNILRAKCPPKTAASDDRCYRYADCASCTANTNGCQWCDDKKCISANSNCSMSVKNYTKCHVRNEQICNKLTSCKSCSLNLNCQWDQRQQECQALPAHLCGEGWSHIGDACLRVNSSRENYDNAKLYCYNLSGNLASLTTSKEVEFVLDEIQKYTQQKVSPWVGLRKINISYWGWEDMSPFTNTTLQWLPGEPNDSGFCAYLERAAVAGLKANPCTSMANGLVCEKPVVSPNQNARPCKKPCSLRTSCSNCTSNGMECMWCSSTKRCVDSNAYIISFPYGQCLEWQTATCSPQNCSGLRTCGQCLEQPGCGWCNDPSNTGRGHCIEGSSRGPMKLIGMHHSEMVLDTNLCPKEKNYEWSFIQCPACQCNGHSTCINNNVCEQCKNLTTGKQCQDCMPGYYGDPTNGGQCTACTCSGHANICHLHTGKCFCTTKGIKGDQCQLCDSENRYVGNPLRGTCYYSLLIDYQFTFSLLQEDDRHHTAINFIANPEQSNKNLDISINASNNFNLNITWSVGSTAGTISGEETSIVSKNNIKEYRDSFSYEKFNFRSNPNITFYVYVSNFSWPIKIQIAFSQHNTIMDLVQFFVTFFSCFLSLLLVAAVVWKIKQTCWASRRREQLLRERQQMASRPFASVDVALEVGAEQTEFLRGPLEGAPKPIAIEPCAGNRAAVLTVFLCLPRGSSGAPPPGQSGLAIASALIDISQQKASDSKDKTSGVRNRKHLSTRQGTCV

SEQ ID NO: 869519 - protein, 689 aa, Homo sapiens
CVWNKNHCESWESGNTNNILRAKCPPKTAASDDRCYRYADCASCTANTNGCQWCDDKKCISANSNCSMSVKNYTKCHVRNEQICNKLTSCKSCSLNLNCQWDQRQQECQALPAHLCGEGWSHIGDACLRVNSSRENYDNAKLYCYNLSGNLASLTTSKEVEFVLDEIQKYTQQKVSPWVGLRKINISYWGWEDMSPFTNTTLQWLPGEPNDSGFCAYLERAAVAGLKANPCTSMANGLVCEKPVVSPNQNARPCKKPCSLRTSCSNCTSNGMECMWCSSTKRCVDSNAYIISFPYGQCLEWQTATCSPQNCSGLRTCGQCLEQPGCGWCNDPSNTGRGHCIEGSSRGPMKLIGMHHSEMVLDTNLCPKEKNYEWSFIQCPACQCNGHSTCINNNVCEQCKNLTTGKQCQDCMPGYYGDPTNGGQCTACTCSGHANICHLHTGKCFCTTKGIKGDQCQLCDSENRYVGNPLRGTCYSYYRKMIATITAINFIANPEQSNKNLDISINASNNFNLNITWSVGSTAGTISGEETSIVSKNNIKEYRDSFSYEKFNFRSNPNITFYVYVSNFSWPIKIQIAFSQHNTIMDLVQFFVTFFSCFLSLLLVAAVVWKIKQTCWASRRRETESHSCHPGWRAVWGSQLTATSASWVKQFSITGAHYHAQLIFVFFSRDGVSPCWPDWTSGDLPTSAS

SEQ ID NO: 869520 - protein, 148 aa, Homo sapiens
MLATRVFSLVGKRAISTSVCVRAHESVVKSEDFSLPAYMDRRDHPLPEVAHVKHLSASQKALKEKEKASWSSLSMDEKVELYRIKFKESFAEMNRGSNEWEDGCGRCHVLQSVSPRSLSCGRSTMCTAPSRKALTKSGWPSRPRGCWT

SEQ ID NO: 869521 - protein, 148 aa, Homo sapiens; identical to SEQ ID NO: 869520

SEQ ID NO: 869522 - protein, 148 aa, Homo sapiens; identical to SEQ ID NO: 869520

SEQ ID NO: 869523 - protein, 148 aa, Homo sapiens; identical to SEQ ID NO: 869520

SEQ ID NO: 869524 - protein, 158 aa, Homo sapiens
  misc_feature (149)..(149): Xaa can be any naturally occurring amino acid
MLATRVFSLVGKRAISTSVCVRAHESVVKSEDFSLPAYMDRRDHPLPEVAHVKHLSASQKALKEKEKASWSSLSMDEKVELYRIKFKESFAEMNRGSNEWEDGCGRCHVLQSVSPRSLSCGRSTMHVTNLRKMGAPESGLAEYLCDKHXLAEAEAVRA

SEQ ID NO: 869525 - protein, 157 aa, Homo sapiens
  misc_feature (143)..(143): Xaa can be any naturally occurring amino acid
  misc_feature (155)..(155): Xaa can be any naturally occurring amino acid
MLATRVFSLVGKRAISTSVCVRAHESVVKSEDFSLPAYMDRRDHPLPEVAHVKHLSASQKALKEKEKASWSSLSMDEKVELYRIKFKESFAEMNRGSNEWEDGFWAVPCFFQSVFNRASLIHCWARKHYCVNGPLPRKSFCKXVGLPKQDQGGFXDN

SEQ ID NO: 869526 - protein, 148 aa, Homo sapiens; identical to SEQ ID NO: 869520

SEQ ID NO: 869527 - protein, 148 aa, Homo sapiens; identical to SEQ ID NO: 869520

SEQ ID NO: 869528 - protein, 148 aa, Homo sapiens; identical to SEQ ID NO: 869520

SEQ ID NO: 869529 - protein, 148 aa, Homo sapiens; identical to SEQ ID NO: 869520

SEQ ID NO: 869530 - protein, 148 aa, Homo sapiens; identical to SEQ ID NO: 869520

SEQ ID NO: 869531 - protein, 159 aa, Homo sapiens
MLATRVFSLVGKRAISTSVCVRAHESVVKSEDFSLPAYMDRRDHPLPEVAHVKHLSASQKALKEKEKASWSSLSMDEKVELYRIKFKESFAEMNRGSNEWEDGCGRCHVLQSVSPRSLSCGRSTMVSREGGRHGRLDWGSSLQCPLVGCGGPPYLEAMR

SEQ ID NO: 869532 - protein, 152 aa, Homo sapiens
MLATRVFSLVGKRAISTSVCVRAHESVVKSEDFSLPAYMDRRDHPLPEVAHVKHLSASQKALKEKEKASWSSLSMDEKVELYRIKFKESFAEMNRGSNEWEDGCGRCHVLQSVSPRSLSCGRSTMCTAPSRKALTKSGWPSRPRSADSWYRA

SEQ ID NO: 869533 - protein, 119 aa, Homo sapiens
MCVNMMWPGLVYPSALCFLLHKCGFGEKWLNVAEEGAADLCACKWLSSLPPVYRIKFKESFAEMNRGSNEWEDGCGRCHVLQSVSPRSLSCGRSTMCTAPSRKALTKSGWPSRPRGCWT

SEQ ID NO: 869534 - protein, 159 aa, Homo sapiens; identical to SEQ ID NO: 869531

SEQ ID NO: 869535 - protein, 159 aa, Homo sapiens; identical to SEQ ID NO: 869531

SEQ ID NO: 869536 - protein, 155 aa, Homo sapiens
MLATRVFSLVGKRAISTSVCVRAHESVVKSEDFSLPAYMDRRDHPLPEVAHVKHLSASQKALKEKEKASWSSLSMDEKVELYRIKFKESFAEMNRGSNEWEDGCGRCHVLQSVSPRSLSCGRSTIDMNHVGAFMPPSCCLYQPTPFLGMKGLDIE

SEQ ID NO: 869537 - protein, 133 aa, Homo sapiens
MCVNMMWPGLVYPSALCFLLHKCGFGEKWLNVAEEGAADLCACKWLSSLPPVYRIKFKESFAEMNRGSNEWEDGCGRCHVLQSVSPRSLSCGRSTMVSIEGRTLGPLDMAFILDLPICGPLRNLRPLGGLSVV

SEQ ID NO: 869538 - protein, 148 aa, Homo sapiens; identical to SEQ ID NO: 869520

SEQ ID NO: 869539 - protein, 148 aa, Homo sapiens; identical to SEQ ID NO: 869520

SEQ ID NO: 869540 - protein, 38 aa, Homo sapiens
MLDMKVNPIQGLASKWDYEKNEWKKGEKLCGREAVRPV

SEQ ID NO: 869541 - protein, 148 aa, Homo sapiens; identical to SEQ ID NO: 869520

SEQ ID NO: 869542 - protein, 110 aa, Homo sapiens
MDRRDHPLPEVAHVKHLSASQKALKEKEKASWSSLSMDEKVELYRIKFKESFAEMNRGSNEWEDGCGRCHVLQSVSPRSLSCGRSTMCTAPSRKALTKSGWPSRPRGCWT

SEQ ID NO: 869543 - protein, 179 aa, Homo sapiens
GRTYERTFHGRVIRTGDAAAGGGRNCAELREEGLQVGGAEAGAGGGADSEELLREHYSELRVRARGRTRMDRRDHPLPEVAHVKHLSASQKALKEKEKASWSSLSMDEKVELYRIKFKESFAEMNRGSNEWEDGCGRCHVLQSVSPRSLSCGRSTMCTAPSRKALTKSGWPSRPRGCWT

SEQ ID NO: 869544 - protein, 159 aa, Homo sapiens
MLATRVFSLVGKRAISTSVCVRAHESVVKSEDFSLPAYMDRRDHPLPEVAHVKHLSASQKALKEKEKASWSSLSMDEKVELYRIKFKESFAEMNRGSNEWEDGCGRCHVLQSVSPRSLSCGRSTMVTLGSVCQILLSIAFREDLLLLAYFVANFLQTKG

SEQ ID NO: 869545 - protein, 130 aa, Homo sapiens
MCVNMMWPGLVYPSALCFLLHKCGFGEKWLNVAEEGAADLCACKWLSSLPPVYRIKFKESFAEMNRGSNEWEDGCGRCHVLQSVSPRSLSCGRSTMVSREGGRHGRLDWGSSLQCPLVGCGGPPYLEAMR

SEQ ID NO: 869546 - protein, 162 aa, Homo sapiens
MLATRVFSLVGKRAISTSVCVRAHESVVKSEDFSLPAYMDRRDHPLPEVAHVKHLSASQKALKEKEKASWSSLSMDEKVELYRIKFKESFAEMNRGSNEWEDGCGRCHVLQSVSPRSLSCGRSTIFDKEWVAKQTKRMLDMKVNPIQGLASKWDYEKNEWKK

SEQ ID NO: 869547 - protein, 140 aa, Homo sapiens
MLATRVFSLVGKRAISTSVCVRAHESVVKSEDFSLPAYMDRRDHPLPEVAHVKHLSASQKALKEKEKASWSSLSMDEKVELYRIKFKESFAEMNRGSNEWEDGCGRCHVLQSVSPRSLSCGRSTMGLASKWDYEKNEWKK

SEQ ID NO: 869548 - protein, 141 aa, Homo sapiens
MCVNMMWPGLVYPSALCFLLHKCGFGEKWLNVAEEGAADLCACKWLSSLPPVYRIKFKESFAEMNRGSNEWEDGCGRCHVLQSVSPRSLSCGRSTMCYRPPSRNFDKEWVAKQTKRMLDMKVNPIQGLASKWDYEKNEWKK

SEQ ID NO: 869549 - protein, 50 aa, Homo sapiens
MDRRDHPLPEVAHVKHLSASQKALKEKEKASWSSLSMETCQFMSRLYLQR

SEQ ID NO: 869550 - protein, 113 aa, Homo sapiens
MELAHSLLLNEEAYNQLGEVQKAEFIFEWLRYLEKLLLATSRNDVREKQKTLVEQLLSLLNSSPGPPTRKLLAKNLAILYSIGDTFSVHEAIDKCNDLIRSKDDSPSYLPTKL

SEQ ID NO: 869551 - protein, 99 aa, Homo sapiens
MAEGSRIPQARALLQQCLHARLQIRPADGDVAAQWVEVQRGLVIYVCFFKGADKELLPKMAEAGLYCCHLWLTATSLPDSPASACRVPAIAGGATTPDW

SEQ ID NO: 869552 - protein, 109 aa, Homo sapiens [sequence omitted]

SEQ ID NO: 869553 - protein, 168 aa, Homo sapiens
MAEGSRIPQARALLQQCLHARLQIRPADGDVAAQWVEVQRGLVIYVCFFKGADKELLPKMVNTLLNVKLSETENGKHVSILDLPGNILIIPQATLGGRLKGRNMQYHSNSGKEEGFELYSQFVTLCEKEVAANSKCAEARVVVEHGTYGNRQVLKLDTNGPFTHLIEF

SEQ ID NO: 869554 - protein, 113 aa, Homo sapiens; identical to SEQ ID NO: 869550

SEQ ID NO: 869555 - protein, 168 aa, Homo sapiens; identical to SEQ ID NO: 869553

SEQ ID NO: 869556 - protein, 168 aa, Homo sapiens; identical to SEQ ID NO: 869553

SEQ ID NO: 869557 - protein, 168 aa, Homo sapiens; identical to SEQ ID NO: 869553

SEQ ID NO: 869558 - protein, 168 aa, Homo sapiens; identical to SEQ ID NO: 869553

SEQ ID NO: 869559 - protein, 685 aa, Homo sapiens
MWLKLFFLLLYFLVLFVLARFFEAIVWYETGIFATQLVDPVALSFKKLKTILECRGLGYSGLPEKKDVRELVEKSGDLMEGELYSALKEEEASESVSSTNFSGEMHFYELVEDTKDGIWLVQVIANDRSPLVGKIHWEKMVKKVSRFGIRTGTFNCSSDPRYCRRRGWVRSTLIMSVPQTSTSKGKVMLKEYSGRKIEVEHIFKWITAHAASRIKTIYNAEHLKEEWNKSDQYWLKIYLFANLDQPPAFFSALSIKFTGRVEFIFVNVENWDNKSYMTDIGIYNMPSYILRTPEGIYRYGNHTGEFISLQAMDSFLRSLQPEVNDLFVLSLVLVNLMAWMDLFITQGATIKRFVVLISTLGTYNSLLIISWLPVLGFLQLPYLDSFYEYSLKLLRYSNTTTLASWVRADWMFYSSHPALFLSTYLGHGLLIDYFEKKRRRNNNNDEVNANNLEWLSSLWDWYTSYLFHPIASFQNFPVESDWDEDPDLFLERLAFPDLWLHPLIPTDYIKNLPMWRFKCLGVQSEEEMSEGSQDTENDSESENTDTLSSEKEVFEDKQSVLHNSPGTASHCDAEACSCANKYCQTSPCERKGRSYGSYNTNEDMEPDWLTWPADMLHCTECVVCLENFENGCLLMGLPCGHVFHQNCIVMWLAGGRHCCPVCRWPSYKKKQPYAQHQPLSNDVPS

SEQ ID NO: 869560 - protein, 412 aa, Homo sapiens
MWLKLFFLLLYFLVLFVLARFFEAIVWYETGIFATQLVDPVALSFKKLKTILECRGLGYSGLPEKKDVRELVEKSGDLMEGELYSALKEEEASESVSSTNFSGEMHFYELVEDTKDGIWLVQVIANDRSPLVGKIHWEKMVKKVSRFGIRTGTFNCSSDPRYCRRRGWVRSTLIMSVPQTSTSKGKVMLKEYSGRKIEVEHIFKWITAHAASRIKTIYNAEHLKEEWNKSDQYWLKIYLFANLDQPPAFFSALSIKFTGRVEFIFVNVENWDNKSYMTDIGIYNMPSYILRTPEGIYRYGNHTGEFISLQAMDSFLRSLQPEVNDLFVLSLVLVNLMAWMDLFITQGATIKRFVVLISTLGTYNSLLIISWLPVLGFLQLPYLDSFYEYSLTGCFTLHTQPCFSVHTLVMVY

SEQ ID NO: 869561 - protein, 685 aa, Homo sapiens; identical to SEQ ID NO: 869559

SEQ ID NO: 869562 - protein, 122 aa, Homo sapiens
MWLKLFFLLLYFLVLFVLARFFEAIVWYETGIFATQLVDPVALSFKKLKTILECRGLGYSGLPEKKDVRELVEKSGDLMEGELYSALKEEEASESVSSTNFSGEMHFYELVEDTKDGIWLVQ

SEQ ID NO: 869563 - protein, 681 aa, Homo sapiens
MSRLRPRPPLIHGCGGFFEAIVWYETGIFATQLVDPVALSFKKLKTILECRGLGYSGLPEKKDVRELVEKSGDLMEGELYSALKEEEASESVSSTNFSGEMHFYELVEDTKDGIWLVQVIANDRSPLVGKIHWEKMVKKVSRFGIRTGTFNCSSDPRYCRRRGWVRSTLIMSVPQTSTSKGKVMLKEYSGRKIEVEHIFKWITAHAASRIKTIYNAEHLKEEWNKSDQYWLKIYLFANLDQPPAFFSALSIKFTGRVEFIFVNVENWDNKSYMTDIGIYNMPSYILRTPEGIYRYGNHTGEFISLQAMDSFLRSLQPEVNDLFVLSLVLVNLMAWMDLFITQGATIKRFVVLISTLGTYNSLLIISWLPVLGFLQLPYLDSFYEYSLKLLRYSNTTTLASWVRADWMFYSSHPALFLSTYLGHGLLIDYFEKKRRRNNNNDEVNANNLEWLSSLWDWYTSYLFHPIASFQNFPVESDWDEDPDLFLERLAFPDLWLHPLIPTDYIKNLPMWRFKCLGVQSEEEMSEGSQDTENDSESENTDTLSSEKEVFEDKQSVLHNSPGTASHCDAEACSCANKYCQTSPCERKGRSYGSYNTNEDMEPDWLTWPADMLHCTECVVCLENFENGCLLMGLPCGHVFHQNCIVMWLAGGRHCCPVCRWPSYKKKQPYAQHQPLSNDVPS

SEQ ID NO: 869564 - protein, 667 aa, Homo sapiens
MWLKLFFLLLYFLVLFVLARFFEAIVWYETGIFATQLVDPVALSFKKLKTILECRGLGYSGLPEKKDVRELVEKSGDLMEGELYSALKEEEASESVSSTNFSGEMHFYELVEDTKDGIWLVQVIANDRSPLVGKIHWEKMVKKVSRFGIRTGTFNCSSDPRYCRRRGWVRSTLIMSVPQTSTSKGKVMLKEYSGRKIEVEHIFKWITAHAASRIKTIYNAEHLKEEWNKSDQYWLKIYLFANLDQPPAFFSALSIKFTGRVEFIFVNVAYILRTPEGIYRYGNHTGEFISLQAMDSFLRSLQPEVNDLFVLSLVLVNLMAWMDLFITQGATIKRFVVLISTLGTYNSLLIISWLPVLGFLQLPYLDSFYEYSLKLLRYSNTTTLASWVRADWMFYSSHPALFLSTYLGHGLLIDYFEKKRRRNNNNDEVNANNLEWLSSLWDWYTSYLFHPIASFQNFPVESDWDEDPDLFLERLAFPDLWLHPLIPTDYIKNLPMWRFKCLGVQSEEEMSEGSQDTENDSESENTDTLSSEKEVFEDKQSVLHNSPGTASHCDAEACSCANKYCQTSPCERKGRSYGSYNTNEDMEPDWLTWPADMLHCTECVVCLENFENGCLLMGLPCGHVFHQNCIVMWLAGGRHCCPVCRWPSYKKKQPYAQHQPLSNDVPS

SEQ ID NO: 869565 - protein, 132 aa, Homo sapiens
MSRLRPRPPLIHGCGGFFEAIVWYETGIFATQLVDPVALSFKKLKTILECRGLGYSGLPEKKDVRELVEKSGDLMEGELYSALKEEEASESVSSTNFSGEMHFYELVEDTKDGIWLVQLCQSGILKLFKTKC

SEQ ID NO: 869566 - protein, 221 aa, Homo sapiens
MWLKLFFLLLYFLVLFVLARFFEAIVWYETGIFATQLVDPVALSFKKLKTILECRGLGYSGLPEKKDVRELVEKSGDLMEGELYSALKEEEASESVSSTNFSGEMHFYELVEDTKDGIWLVQVNEWSLKIRKEMRVVDRQIRDIQREEEKVKRSVKDAAKKGQKDVCIVLAKEMIRSRKAVSKLYASKAHMNSVLMGMKNQLAVLRVAGSLQKSTEVMKAM

SEQ ID NO: 869567 - protein, 597 aa, Homo sapiens
MSSKGSSTDGRTDLANGSLSSSPEEMSGAEEGRETSSGIEVEASDLSLSLTGDDGGPNRTSTESRGTDTESSGEDKDSDSMEDTGHYSINDENRVHDRSEEEEEEEEEEEEEQPRRRVQRKRANRDQDSSDDERALEDWVSSETSALPRPRWQALPALRERELGSSARFVYEACGARVFVQRFRLQHGLEGHTGCVNTLHFNQRGTWLASGSDDLKVVVWDWVRRQPVLDFESGHKSNVFQAKFLPNSGDSTLAMCARDGQVRVAELSATQCCKNTKRVAQHKGASHKLALEPDSPCTFLSAGEDAVVFTIDLRQDRPASKLVVTKEKEKKVGLYTIYVNPANTHQFAVGGRDQFVRIYDQRKIDENENNGVLKKFCPHHLVNSESKANITCLVYSHDGTELLASYNDEDIYLFNSSHSDGAQYVKRYKGHRNNATVKGVNFYGPKSEFVVSGSDCGHIFLWEKSSCQIIQFMEGDKGGVVNCLEPHPHLPVLATSGLDHDVKIWAPTAEASTELTGLKDVIKKNKRERDEDSLHQTDLFDSHMLWFLMHHLRQRRHHRRWREPGVGATDADSDESPSSSDTSDEEEGPDRVQCMPS

SEQ ID NO: 869568 - protein, 628 aa, Homo sapiens
ESVAAQAQAQRAEAVVVAAAGQCWLQQTSFKMSSKGSSTDGRTDLANGSLSSSPEEMSGAEEGRETSSGIEVEASDLSLSLTGDDGGPNRTSTESRGTDTESSGEDKDSDSMEDTGHYSINDENRVHDRSEEEEEEEEEEEEEQPRRRVQRKRANRDQDSSDDERALEDWVSSETSALPRPRWQALPALRERELGSSARFVYEACGARVFVQRFRLQHGLEGHTGCVNTLHFNQRGTWLASGSDDLKVVVWDWVRRQPVLDFESGHKSNVFQAKFLPNSGDSTLAMCARDGQVRVAELSATQCCKNTKRVAQHKGASHKLALEPDSPCTFLSAGEDAVVFTIDLRQDRPASKLVVTKEKEKKVGLYTIYVNPANTHQFAVGGRDQFVRIYDQRKIDENENNGVLKKFCPHHLVNSESKANITCLVYSHDGTELLASYNDEDIYLFNSSHSDGAQYVKRYKGHRNNATVKGVNFYGPKSEFVVSGSDCGHIFLWEKSSCQIIQFMEGDKGGVVNCLEPHPHLPVLATSGLDHDVKIWAPTAEASTELTGLKDVIKKNKRERDEDSLHQTDLFDSHMLWFLMHHLRQRRHHRRWREPGVGATDADSDESPSSSDTSDEEEGPDRVQCMPS

SEQ ID NO: 869569 - protein, 597 aa, Homo sapiens; identical to SEQ ID NO: 869567

SEQ ID NO: 869570 - protein, 597 aa, Homo sapiens; identical to SEQ ID NO: 869567

SEQ ID NO: 869571 - protein, 597 aa, Homo sapiens; identical to SEQ ID NO: 869567

SEQ ID NO: 869572 - protein, 326 aa, Homo sapiens
HRARPWLAEASTRERPQLALEPDSPCTFLSAGEDAVVFTIDLRQDRPASKLVVTKEKEKKVGLYTIYVNPANTHQFAVGGRDQFVRIYDQRKIDENENNGVLKKFCPHHLVNSESKANITCLVYSHDGTELLASYNDEDIYLFNSSHSDGAQYVKRYKGHRNNATVKGVNFYGPKSEFVVSGSDCGHIFLWEKSSCQIIQFMEGDKGGVVNCLEPHPHLPVLATSGLDHDVKIWAPTAEASTELTGLKDVIKKNKRERDEDSLHQTDLFDSHMLWFLMHHLRQRRHHRRWREPGVGATDADSDESPSSSDTSDEEEGPDRVQCMPS

SEQ ID NO: 869573 - protein, 544 aa, Homo sapiens
MSSKGSSTDGRTDLANGSLSSSPEEMSGAEEGRETSSGIEVEASDLSLSLTGDDGGPNRTSTESRGTDTESSGEDKDSDSMEDTGHYSINDENRVHDRSEEEEEEEEEEEEEQPRRRVQRKRANRDQDSSDDERALEDWVSSETSALPRPRWQALPALRERELGSSARFVYEACGARVFVQRFRLQHGLEGHTGCVNTLHFNQRGTWLASGSDDLKVVVWDWVRRQPVLDFESGHKSNVFQAKFLPNSGDSTLAMCARDGQVRVAELSATQCCKNTKRVAQHKGASHKLALEPDSPCTFLSAGEDAVVFTIDLRQDRPASKLVVTKEKEKKVGLYTIYVNPANTHQFAVGGRDQFVRIYDQRKIDENENNGVLKKFCPHHLVNSESKANITCLVYSHDGTELLASYNDEDIYLFNSSHSDGAQYVKRYKGHRNNATVKGVNFYGPKSEFVVSGSDCGHIFLWEKSSCQIIQFMEGDKGGVVNCLEPHPHLPVLATSGLDHDVKIWAPTAEASTELTGLKDDITSSVIFLRNIVWWQQSPCPYHC

SEQ ID NO: 869574 - protein, 597 aa, Homo sapiens; identical to SEQ ID NO: 869567

SEQ ID NO: 869575 - protein, 561 aa, Homo sapiens
MSSKGSSTDGRTDLANGSLSSSPEEMSGAEEGRETSSGIEVEASDLSLSLTGDDGGPNRTSTESRGTDTESSGEDKDSDSMEDTGHYSINDENRVHDRSEEEEEEEEEEEEEQPRRRVQRKRANRDQDSSDDERALEDWVSSETSALPRPRWQALPALRERELGSSARFVYEACGARVFVQRFRLQHGLEGHTGCVNTLHFNQRGTWLASGSDDLKVVVWDWVRRQPVLDFESGHKSNVFQAKFLPNSGDSTLAMCARDGQVRVAELSATQCCKNTKRVAQHKGASHKLALEPDSPCTFLSAGEDAVVFTIDLRQDRPASKLVVTKEKEKKVGLYTIYVNPANTHQFAVGGRDQFVRIYDQRKIDENENNGVLKKFCPHHLVNSESKANITCLVYSHDGTELLASYNDEDIYLFNSSHSDGAQYVKRYKGHRNNATVKGVNFYGPKSEFVVSGSDCGHIFLWEKSSCQIIQFMEGDKGGVVNCLEPHPHLPVLATSGLDHDVKIWAPTAEASTELTGLKDVIKKNKRERDEDSLHQTDLFDSHMLWFLMHHLRQRRHHRVS

SEQ ID NO: 869576 - protein, 401 aa, Homo sapiens [sequence omitted]

SEQ ID NO: 869577 - protein, 320 aa, Homo sapiens
MSSKGSSTDGRTDLANGSLSSSPEEMSGAEEGRETSSGIEVEASDLSLSLTGDDGGPNRTSTESRGTDTESSGEDKDSDSMEDTGHYSINDENRVHDRSEEEEEEEEEEEEEQPRRRVQRKRANRDQDSSDDERALEDWVSSETSALPRPRWQALPALRERELGSSARFVYEACGARVFVQRFRLQHGLEGHTGCVNTLHFNQRGTWLASGSDDLKVVVWDWVRRQPVLDFESGHKSNVFQAKFLPNSGDSTLAMCARDGQVRVAELSATQCCKNTKRVAQHKGASHKLALEPDSPCTFLSAGEDAVVFTIDLRQDRPAS

SEQ ID NO: 869578 - protein, 284 aa, Homo sapiens
MSSKGSSTDGRTDLANGSLSSSPEEMSGAEEGRETSSGIEVEASDLSLSLTGDDGGPNRTSTESRGTDTESSGEDKDSDSMEDTGHYSINDENRVHDRSEEEEEEEEEEEEEQPRRRVQRKRANRDQDSSDDERALEDWVSSETSALPRPRWQALPALRERELGSSARFVYEACGARVFVQRFRLQHGLEGHTGCVNTLHFNQRGTWLASGSDDLKVVVWDWVRRQPVLDFESGHKSNVFQATFFLTAGESTLGLVLPVRAGPPFERLAHVVRDFKLAARGVPI

SEQ ID NO: 869579 - protein, 203 aa, Homo sapiens
MSSKGSSTDGRTDLANGSLSSSPEEMSGAEEGRETSSGIEVEASDLSLSLTGDDGGPNRTSTESRGTDTESSGEDKDSDSMEDTGHYSINDENRVHDRSEEEEEEEEEEEEEQPRRRVQRKRANRDQDSSDDERALEDWVSSETSALPRPRWQALPALRERELGSSARFVYEACGARVFVQRFRLQHGLEGHTGCVNTAVLTP

SEQ ID NO: 869580 - protein, 134 aa, Homo sapiens
EGDKARSRLVAGGTGGVVNCLEPHPHLPVLATSGLDHDVKIWAPTAEASTELTGLKDVIKKNKRERDEDSLHQTDLFDSHMLWFLMHHLRQRRHHRRWREPGVGATDADSDESPSSSDTSDEEEGPDRVQCMPS

SEQ ID NO: 869581 - protein, 597 aa, Homo sapiens; identical to SEQ ID NO: 869567

SEQ ID NO: 869582 - protein, 597 aa, Homo sapiens; identical to SEQ ID NO: 869567

SEQ ID NO: 869583 - protein, 572 aa, Homo sapiens
MSGAEEGRETSSGIEVEASDLSLSLTGDDGGPNRTSTESRGTDTESSGEDKDSDSMEDTGHYSINDENRVHDRSEEEEEEEEEEEEEQPRRRVQRKRANRDQDSSDDERALEDWVSSETSALPRPRWQALPALRERELGSSARFVYEACGARVFVQRFRLQHGLEGHTGCVNTLHFNQRGTWLASGSDDLKVVVWDWVRRQPVLDFESGHKSNVFQAKFLPNSGDSTLAMCARDGQVRVAELSATQCCKNTKRVAQHKGASHKLALEPDSPCTFLSAGEDAVVFTIDLRQDRPASKLVVTKEKEKKVGLYTIYVNPANTHQFAVGGRDQFVRIYDQRKIDENENNGVLKKFCPHHLVNSESKANITCLVYSHDGTELLASYNDEDIYLFNSSHSDGAQYVKRYKGHRNNATVKGVNFYGPKSEFVVSGSDCGHIFLWEKSSCQIIQFMEGDKGGVVNCLEPHPHLPVLATSGLDHDVKIWAPTAEASTELTGLKDVIKKNKRERDEDSLHQTDLFDSHMLWFLMHHLRQRRHHRRWREPGVGATDADSDESPSSSDTSDEEEGPDRVQCMPS

SEQ ID NO: 869584 - protein, 597 aa, Homo sapiens; identical to SEQ ID NO: 869567

SEQ ID NO: 869585 - protein, 224 aa, Homo sapiens
VSICSLLQVNSESKANITCLVYSHDGTELLASYNDEDIYLFNSSHSDGAQYVKRYKGHRNNATVKGVNFYGPKSEFVVSGSDCGHIFLWEKSSCQIIQFMEGDKGGVVNCLEPHPHLPVLATSGLDHDVKIWAPTAEASTELTGLKDVIKKNKRERDEDSLHQTDLFDSHMLWFLMHHLRQRRHHRRWREPGVGATDADSDESPSSSDTSDEEEGPDRVQCMPS

SEQ ID NO: 869586 - protein, 597 aa, Homo sapiens; identical to SEQ ID NO: 869567

SEQ ID NO: 869587 - protein, 497 aa, Homo sapiens
MSSKGSSTDGRTDLANGSLSSSPEEMSGAEEGRETSSGIEVEASDLSLSLTGDDGGPNRTSTESRGTDTESSGEDKDSDSMEDTGHYSINDENRVHDRSEEEEEEEEEEEEEQPRRRVQRKRANRDQDSSDDERALEDWVSSETSALPRPRWQALPALRERELGSSARFVYEACGARVFVQRFRLQHGLEGHTGCVNTLHFNQRGTWLASGSDDLKVVVWDWVRRQPVLDFESGHKSNVFQAKFLPNSGDSTLAMCARDGQVRVAELSATQCCKNTKRVAQHKGASHKLALEPDSPCTFLSAGEDAVVFTIDLRQDRPASKLVVTKEKEKKVGLYTIYVNPANTHQFAVGGRDQFVRIYDQRKIDENENNGVLKKFCPHHLVNSESKANITCLVYSHDGTELLASYNDEDIYLFNSSHSDGAQYVKRYKGHRNNATVKGVNFYGPKSEFVVSGSDCGHIFLWEKSSCQIIQFMEGDKGGVVNCLEPHPHLRCTYSLR

SEQ ID NO: 869588 - protein, 273 aa, Homo sapiens
MSSKGSSTDGRTDLANGSLSSSPEEMSGAEEGRETSSGIEVEASDLSLSLTGDDGGPNRTSTESRGTDTESSGEDKDSDSMEDTGHYSINDENRVHDRSEEEEEEEEEEEEEQPRRRVQRKRANRDQDSSDDERALEDWVSSETSALPRPRWQALPALRERELGSSARFVYEACGARVFVQRFRLQHGLEGHTGCVNTLHFNQRGTWLASGSDDLKVVVWDWVRRQPVLDFESGHKSNVFQVRQGSIIATERIRHELEKSELQHGLGADSELL

SEQ ID NO: 869589 - protein, 253 aa, Homo sapiens
MSSKGSSTDGRTDLANGSLSSSPEEMSGAEEGRETSSGIEVEASDLSLSLTGDDGGPNRTSTESRGTDTESSGEDKDSDSMEDTGHYSINDENRVHDRSEEEEEEEEEEEEEQPRRRVQRKRANRDQDSSDDERALEDWVSSETSALPRPRWQALPALRERELGSSARFVYEACGARVFVQRFRLQHGLEGHTGCVNTLHFNQRGTWLASGSDDLKVVVWDWVRRQPVLDFERATSGKASPRKYNWSSVLMFK

SEQ ID NO: 869590 - protein, 122 aa, Homo sapiens [sequence omitted]

SEQ ID NO: 869591 - protein, 567 aa, Homo sapiens
MLERRCRGPLAMGLAQPRLLSGPSQESPQTLGKESRGLRQQGTSVAQSGAQAPGRAHRCAHCRRHFPGWVALWLHTRRCQARLPLPCPECGRRFRHAPFLALHRQVHAAATPDLGFACHLCGQSFRGWVALVLHLRAHSAAKRPIACPKCERRFWRRKQLRAHLRRCHPPAPEARPFICGNCGRSFAQWDQLVAHKRVHVAEALEEAAAKALGPRPRGRPAVTAPRPGGDAVDRPFQCACCGKRFRHKPNLIAHRRVHTGERPHQCPECGKRFTNKPYLTSHRRIHTGEKPYPCKECGRRFRHKPNLLSHSKIHKRSEGSAQAAPGPGSPQLPAGPQESAAEPTPAVPLKPAQEPPPGAPPEHPQDPIEAPPSLYSCDDCGRSFRLERFLRAHQRQHTGERPFTCAECGKNFGKKTHLVAHSRVHSGERPFACEECGRRFSQGSHLAAHRRDHAPDRPFVCPDCGKAFRHKPYLAAHRRIHTGEKPYVCPDCGKAFSQKSNLVSHRRIHTGERPYACPDCDRSFSQKSNLITHRKSHIRDGAFCCAICGQTFDDEERLLAHQKKHDV

SEQ ID NO: 869592 - protein, 567 aa, Homo sapiens; identical to SEQ ID NO: 869591

SEQ ID NO: 869593 - protein, 597 aa, Homo sapiens
MWHRKQQTQGEGSIRHCREQWPHFLAEEEPMLERRCRGPLAMGLAQPRLLSGPSQESPQTLGKESRGLRQQGTSVAQSGAQAPGRAHRCAHCRRHFPGWVALWLHTRRCQARLPLPCPECGRRFRHAPFLALHRQVHAAATPDLGFACHLCGQSFRGWVALVLHLRAHSAAKRPIACPKCERRFWRRKQLRAHLRRCHPPAPEARPFICGNCGRSFAQWDQLVAHKRVHVAEALEEAAAKALGPRPRGRPAVTAPRPGGDAVDRPFQCACCGKRFRHKPNLIAHRRVHTGERPHQCPECGKRFTNKPYLTSHRRIHTGEKPYPCKECGRRFRHKPNLLSHSKIHKRSEGSAQAAPGPGSPQLPAGPQESAAEPTPAVPLKPAQEPPPGAPPEHPQDPIEAPPSLYSCDDCGRSFRLERFLRAHQRQHTGERPFTCAECGKNFGKKTHLVAHSRVHSGERPFACEECGRRFSQGSHLAAHRRDHAPDRPFVCPDCGKAFRHKPYLAAHRRIHTGEKPYVCPDCGKAFSQKSNLVSHRRIHTGERPYACPDCDRSFSQKSNLITHRKSHIRDGAFCCAICGQTFDDEERLLAHQKKHDV

SEQ ID NO: 869594 - protein, 597 aa, Homo sapiens; identical to SEQ ID NO: 869593

SEQ ID NO: 869595 - protein, 567 aa, Homo sapiens; identical to SEQ ID NO: 869591

SEQ ID NO: 869596 - protein, 567 aa, Homo sapiens; identical to SEQ ID NO: 869591

SEQ ID NO: 869597 - protein, 567 aa, Homo sapiens; identical to SEQ ID NO: 869591

SEQ ID NO: 869598 - protein, 584 aa, Homo sapiens
MARYEAGFNRPRAEEEPMLERRCRGPLAMGLAQPRLLSGPSQESPQTLGKESRGLRQQGTSVAQSGAQAPGRAHRCAHCRRHFPGWVALWLHTRRCQARLPLPCPECGRRFRHAPFLALHRQVHAAATPDLGFACHLCGQSFRGWVALVLHLRAHSAAKRPIACPKCERRFWRRKQLRAHLRRCHPPAPEARPFICGNCGRSFAQWDQLVAHKRVHVAEALEEAAAKALGPRPRGRPAVTAPRPGGDAVDRPFQCACCGKRFRHKPNLIAHRRVHTGERPHQCPECGKRFTNKPYLTSHRRIHTGEKPYPCKECGRRFRHKPNLLSHSKIHKRSEGSAQAAPGPGSPQLPAGPQESAAEPTPAVPLKPAQEPPPGAPPEHPQDPIEAPPSLYSCDDCGRSFRLERFLRAHQRQHTGERPFTCAECGKNFGKKTHLVAHSRVHSGERPFACEECGRRFSQGSHLAAHRRDHAPDRPFVCPDCGKAFRHKPYLAAHRRIHTGEKPYVCPDCGKAFSQKSNLVSHRRIHTGERPYACPDCDRSFSQKSNLITHRKSHIRDGAFCCAICGQTFDDEERLLAHQKKHDV

SEQ ID NO: 869599 - protein, 567 aa, Homo sapiens; identical to SEQ ID NO: 869591

SEQ ID NO: 869600 - protein, 567 aa, Homo sapiens; identical to SEQ ID NO: 869591

SEQ ID NO: 869601 - protein, 105 aa, Homo sapiens
MLERRCRGPLAMGLAQPRLLSGPSQESPQTLGKESRGLRQQGTSVAQSGAQAPGRAHRCAHCRRHFPGWVALWLHTRRCQARLPLPRPGPSYAATVAGALPSGTS

SEQ ID NO: 869602 - protein, 388 aa, Homo sapiens
MLCGRSFAQWDQLVAHKRVHVAEALEEAAAKALGPRPRGRPAVTAPRPGGDAVDRPFQCACCGKRFRHKPNLIAHRRVHTGERPHQCPECGKRFTNKPYLTSHRRIHTGEKPYPCKECGRRFRHKPNLLSHSKIHKRSEGSAQAAPGPGSPQLPAGPQESAAEPTPAVPLKPAQEPPPGAPPEHPQDPIEAPPSLYSCDDCGRSFRLERFLRAHQRQHTGERPFTCAECGKNFGKKTHLVAHSRVHSGERPFACEECGRRFSQGSHLAAHRRDHAPDRPFVCPDCGKAFRHKPYLAAHRRIHTGEKPYVCPDCGKAFSQKSNLVSHRRIHTGERPYACPDCDRSFSQKSNLITHRKSHIRDGAFCCAICGQTFDDEERLLAHQKKHDV

SEQ ID NO: 869603 - protein, 410 aa, Homo sapiens
MARYEAGFNLAEARVGRGGRPSGSMDGRRVPAQPAAEAEEEPMLERRCRGPLAMGLAQPRLLSGPSQESPQTLGKESRGLRQQGGKRFRHKPNLIAHRRVHTGERPHQCPECGKRFTNKPYLTSHRRIHTGEKPYPCKECGRRFRHKPNLLSHSKIHKRSEGSAQAAPGPGSPQLPAGPQESAAEPTPAVPLKPAQEPPPGAPPEHPQDPIEAPPSLYSCDDCGRSFRLERFLRAHQRQHTGERPFTCAECGKNFGKKTHLVAHSRVHSGERPFACEECGRRFSQGSHLAAHRRDHAPDRPFVCPDCGKAFRHKPYLAAHRRIHTGEKPYVCPDCGKAFSQKSNLVSHRRIHTGERPYACPDCDRSFSQKSNLITHRKSHIRDGAFCCAICGQTFDDEERLLAHQKKHDV

SEQ ID NO: 869604 - protein, 176 aa, Homo sapiens
MWVFLGFRESIPSCAECGKNFGKKTHLVAHSRVHSGERPFACEECGRRFSQGSHLAAHRRDHAPDRPFVCPDCGKAFRHKPYLAAHRRIHTGEKPYVCPDCGKAFSQKSNLVSHRRIHTGERPYACPDCDRSFSQKSNLITHRKSHIRDGAFCCAICGQTFDDEERLLAHQKKHDV

SEQ ID NO: 869605 - protein, 253 aa, Homo sapiens
TRRGEVGDGPGSCELEPAAVAAAGRGARVGRGGRPSGSMDGRRVPAQPAAEAEEEPMLERRCRGPLAMGLAQPRLLSGPSQESPQTLGKESRGLRQQGTSVAQSGAQAPGRAHRCAHCRRHFPGWVALWLHTRRCQARLPLPCPECGRRFRHAPFLALHRQVHAAATPDLGFACHLCGQSFRGWVALVLHLRAHSAAKRPIACPDCDRSFSQKSNLITHRKSHIRDGAFCCAICGQTFDDEERLLAHQKKHDV

SEQ ID NO: 869606 - protein, 203 aa, Homo sapiens
MTELASSGGGSPAGDGEEGLGDERGLVIHHPAEEQPYRCPLCGQTFSQQPSLVRHQKAHAGAGRAAAFVCPECGKAFSVKHNLEVHQRTHTGERPFPCPECGRCFSLKQNLLTHQRIHSGEKPHQCAQCGRCFREPRFLLNHQRTHARMPAPHPRRPGVFGERRPYFCPRCGKSFAREGSLKTHQRSHGHGPEGQAAHLGRVL

SEQ ID NO: 869607 - protein, 203 aa, Homo sapiens; identical to SEQ ID NO: 869606

SEQ ID NO: 869608 - protein, 203 aa, Homo sapiens; identical to SEQ ID NO: 869606

SEQ ID NO: 869609 - protein, 537 aa, Homo sapiens
MESGLAGNGTGAGLVMKVKQEKPERLLQTLAPQAMLVEKDKENIFQQHRGLPPRQTMGRPRALGGQEESGSPRWAPPTEQDAGLAGRAPGSASGPLSPSLSSGEGHFVCLDCGKRFSWWSSLKIHQRTHTGEKPYLCGKCGKSFSQKPNLARHQRHHTGERPFCCPECARRFSQKQHLLKHQKTHSRPATHSCPECERCFRHQVGLRIHQRAHARDRQGSRAGLHELIQDAAARRACRLQPGPPRGRPEWAWLGLCQGWWGQPGARAAVSGPEGPGEPRQFICNECGKSFTWWSSLNIHQRIHTGERPYACPECGRRFSQKPNLTRHLRNHTGERPHPCPHCGRGFRQKQHLLKHLRTHLPGAQAAPCPSCGKSCRSRAALRAHQRAHAVAEPAVPAGEPGDQPQAEAIPGLAARPRSSQRSPGARDTLWGRGQAGLAGPGEPRQFICNECGKSFSWWSALTIHQRIHTGERPYPCPECGRRFSQKPNLTRHRRNHTGERPYLCPACGRGFSQKQHLLKHQRVHRAAPACSPKEEAR

SEQ ID NO: 869610 - protein, 245 aa, Homo sapiens
MTELASSGGGSPAGDGEEGLGDERGLVIHHPAEEQPYRCPLCGQTFSQQPSLVRHQKAHAGAGRAAAFVCPECGKAFSVKHNLEVHQRTHTGERPFPCPECGRCFSLKQNLLTHQRIHSGEKPHQCAQCGRCFREPRFLLNHQRTHARMPAPHPRRPGVFGERRPYFCPRCGKSFAREGSLKTHQPLAWALEGVGRRQAPAARSRSSLGTLWLAAHSCFRLLPWFSFSGPSGLEQLQSGQDLKTR

SEQ ID NO: 869611 - protein, 232 aa, Homo sapiens
MESGLAGNGTGAGLVMKVKQEKPERLLQTLAPQAMLVEKDKENIFQQHRGLPPRQTMGRPRALGGQEESGSPRWAPPTEQDAGLAGRAPGSASGPLSPSLSSGEGHFVCLDCGKRFSWWSSLKIHQRTHTGEKPYLCGKCGKSFSQKPNLARHQRHHTGERPLPVSRLRPRLQPEAAPAQAPARAPRGPCVQPQGGGALVDWTSADPWWCGGCLRGVCGEWGWPGLLALRTP

SEQ ID NO: 869612 - protein, 198 aa, Homo sapiens [sequence omitted]

SEQ ID NO: 869613 - protein, 121 aa, Homo sapiens
MARYEAGFNRPRREWAAEAGLRAPWTGAASLHSPPQRWQERDTAGADAGRPPGMESGLAGNGTGAGLVMKVKQEKPERLLQTLAPQAMLVEKDKENVLWTTLVFFFACGSFKLLVFKISTF

SEQ ID NO: 869614 - protein, 537 aa, Homo sapiens; identical to SEQ ID NO: 869609

SEQ ID NO: 869615 - protein, 131 aa, Homo sapiens
KVGLNNPAPPLSQGCCEDNGKQFKRNTVSWEEDPLEKQHEGSWVWGCWLGTEGAAQPWARLCCELTQGCLFLGCGLAPLGQKWMSEASGSYLLGAVGASGTPTPTPALQECTEVVVQPGYFYRLLTPAGAD

SEQ ID NO: 869616 - protein, 567 aa, Homo sapiens; identical to SEQ ID NO: 869591

SEQ ID NO: 869617 - protein, 567 aa, Homo sapiens; identical to SEQ ID NO: 869591

SEQ ID NO: 869618 - protein, 597 aa, Homo sapiens; identical to SEQ ID NO: 869593

SEQ ID NO: 869619 - protein, 623 aa, Homo sapiens
TRRGEVGDGPGSCELEPAAVAAAGRGARVGRGGRPSGSMDGRRVPAQPAAEAEEEPMLERRCRGPLAMGLAQPRLLSGPSQESPQTLGKESRGLRQQGTSVAQSGAQAPGRAHRCAHCRRHFPGWVALWLHTRRCQARLPLPCPECGRRFRHAPFLALHRQVHAAATPDLGFACHLCGQSFRGWVALVLHLRAHSAAKRPIACPKCERRFWRRKQLRAHLRRCHPPAPEARPFICGNCGRSFAQWDQLVAHKRVHVAEALEEAAAKALGPRPRGRPAVTAPRPGGDAVDRPFQCACCGKRFRHKPNLIAHRRVHTGERPHQCPECGKRFTNKPYLTSHRRIHTGEKPYPCKECGRRFRHKPNLLSHSKIHKRSEGSAQAAPGPGSPQLPAGPQESAAEPTPAVPLKPAQEPPPGAPPEHPQDPIEAPPSLYSCDDCGRSFRLERFLRAHQRQHTGERPFTCAECGKNFGKKTHLVAHSRVHSGERPFACEECGRRFSQGSHLAAHRRDHAPDRPFVCPDCGKAFRHKPYLAAHRRIHTGEKPYVCPDCGKAFSQKSNLVSHRRIHTGERPYACPDCDRSFSQKSNLITHRKSHIRDGAFCCAICGQTFDDEERLLAHQKKHDV

SEQ ID NO: 869620 - protein, 610 aa, Homo sapiens
MAGACGFVGGGVVAGEDTKLTALEELRASLLFSLPSPQAEEEPMLERRCRGPLAMGLAQPRLLSGPSQESPQTLGKESRGLRQQGTSVAQSGAQAPGRAHRCAHCRRHFPGWVALWLHTRRCQARLPLPCPECGRRFRHAPFLALHRQVHAAATPDLGFACHLCGQSFRGWVALVLHLRAHSAAKRPIACPKCERRFWRRKQLRAHLRRCHPPAPEARPFICGNCGRSFAQWDQLVAHKRVHVAEALEEAAAKALGPRPRGRPAVTAPRPGGDAVDRPFQCACCGKRFRHKPNLIAHRRVHTGERPHQCPECGKRFTNKPYLTSHRRIHTGEKPYPCKECGRRFRHKPNLLSHSKIHKRSEGSAQAAPGPGSPQLPAGPQESAAEPTPAVPLKPAQEPPPGAPPEHPQDPIEAPPSLYSCDDCGRSFRLERFLRAHQRQHTGERPFTCAECGKNFGKKTHLVAHSRVHSGERPFACEECGRRFSQGSHLAAHRRDHAPDRPFVCPDCGKAFRHKPYLAAHRRIHTGEKPYVCPDCGKAFSQKSNLVSHRRIHTGERPYACPDCDRSFSQKSNLITHRKSHIRDGAFCCAICGQTFDDEERLLAHQKKHDV

SEQ ID NO: 869621 - protein, 527 aa, Homo sapiens
MCRLTSALHSECYVDLWILNHTVSRPFVTLNAWLCRMIAPGQSSSDDASHFLRIVSTQSQAPSDYVVCNPPENLGFACHLCGQSFRGWVALVLHLRAHSAAKRPIACPKCERRFWRRKQLRAHLRRCHPPAPEARPFICGNCGRSFAQWDQLVAHKRVHVAEALEEAAAKALGPRPRGRPAVTAPRPGGDAVDRPFQCACCGKRFRHKPNLIAHRRVHTGERPHQCPECGKRFTNKPYLTSHRRIHTGEKPYPCKECGRRFRHKPNLLSHSKIHKRSEGSAQAAPGPGSPQLPAGPQESAAEPTPAVPLKPAQEPPPGAPPEHPQDPIEAPPSLYSCDDCGRSFRLERFLRAHQRQHTGERPFTCAECGKNFGKKTHLVAHSRVHSGERPFACEECGRRFSQGSHLAAHRRDHAPDRPFVCPDCGKAFRHKPYLAAHRRIHTGEKPYVCPDCGKAFSQKSNLVSHRRIHTGERPYACPDCDRSFSQKSNLITHRKSHIRDGAFCCAICGQTFDDEERLLAHQKKHDV

SEQ ID NO: 869622 - protein, 567 aa, Homo sapiens; identical to SEQ ID NO: 869591

SEQ ID NO: 869623 - protein, 567 aa, Homo sapiens; identical to SEQ ID NO: 869591

SEQ ID NO: 869624 - protein, 406 aa, Homo sapiens
MSGALGVHRWQEARPFICGNCGRSFAQWDQLVAHKRVHVAEALEEAAAKALGPRPRGRPAVTAPRPGGDAVDRPFQCACCGKRFRHKPNLIAHRRVHTGERPHQCPECGKRFTNKPYLTSHRRIHTGEKPYPCKECGRRFRHKPNLLSHSKIHKRSEGSAQAAPGPGSPQLPAGPQESAAEPTPAVPLKPAQEPPPGAPPEHPQDPIEAPPSLYSCDDCGRSFRLERFLRAHQRQHTGERPFTCAECGKNFGKKTHLVAHSRVHSGERPFACEECGRRFSQGSHLAAHRRDHAPDRPFVCPDCGKAFRHKPYLAAHRRIHTGEKPYVCPDCGKAFSQKSNLVSHRRIHTGERPYACPDCDRSFSQKSNLITHRKSHIRDGAFCCAICGQTFDDEERLLAHQKKHDV

SEQ ID NO: 869625 - protein, 217 aa, Homo sapiens
MHPGLCSCSPRRAVLTCPPASYGDYSCDDCGRSFRLERFLRAHQRQHTGERPFTCAECGKNFGKKTHLVAHSRVHSGERPFACEECGRRFSQGSHLAAHRRDHAPDRPFVCPDCGKAFRHKPYLAAHRRIHTGEKPYVCPDCGKAFSQKSNLVSHRRIHTGERPYACPDCDRSFSQKSNLITHRKSHIRDGAFCCAICGQTFDDEERLLAHQKKHDV

SEQ ID NO: 869626 - protein, 128 aa, Homo sapiens
FFIVFIWLCICSTTLFYRSFLCSDCCKAFRHKPYLAAHRRIHTGEKPYVCPDCGKAFSQKSNLVSHRRIHTGERPYACPDCDRSFSQKSNLITHRKSHIRDGAFCCAICGQTFDDEERLLAHQKKHDV

SEQ ID NO: 869627 - protein, 203 aa, Homo sapiens; identical to SEQ ID NO: 869606

SEQ ID NO: 869628 - protein, 203 aa, Homo sapiens; identical to SEQ ID NO: 869606

SEQ ID NO: 869629 - protein, 203 aa, Homo sapiens; identical to SEQ ID NO: 869606

SEQ ID NO: 869630 - protein, 605 aa, Homo sapiens
EPGGGRLGTGLAVVNSNLPLSPRRGGEREWAAEAGLRAPWTGAASLHSPPQRWQERDTAGADAGRPPGMESGLAGNGTGAGLVMKVKQEKPERLLQTLAPQAMLVEKDKENIFQQHRGLPPRQTMGRPRALGGQEESGSPRWAPPTEQDAGLAGRAPGSASGPLSPSLSSGEGHFVCLDCGKRFSWWSSLKIHQRTHTGEKPYLCGKCGKSFSQKPNLARHQRHHTGERPFCCPECARRFSQKQHLLKHQKTHSRPATHSCPECERCFRHQVGLRIHQRAHARDRQGSRAGLHELIQDAAARRACRLQPGPPRGRPEWAWLGLCQGWWGQPGARAAVSGPEGPGEPRQFICNECGKSFTWWSSLNIHQRIHTGERPYACPECGRRFSQKPNLTRHLRNHTGERPHPCPHCGRGFRQKQHLLKHLRTHLPGAQAAPCPSCGKSCRSRAALRAHQRAHAVAEPAVPAGEPGDQPQAEAIPGLAARPRSSQRSPGARDTLWGRGQAGLAGPGEPRQFICNECGKSFSWWSALTIHQRIHTGERPYPCPECGRRFSQKPNLTRHRRNHTGERPYLCPACGRGFSQKQHLLKHQRVHRAAPACSPKEEAR

SEQ ID NO: 869631 - protein, 203 aa, Homo sapiens; identical to SEQ ID NO: 869606

SEQ ID NO: 869632 - protein, 103 aa, Homo sapiens [sequence omitted]

SEQ ID NO: 869633 - protein, 103 aa, Homo sapiens
GGLSPGERGEGSARDRVMQVQTGRSLPALQPPAAPRQAKGGRAGVGREREAARLERAVRPTPAASRAPALTLRGPAHCEPGRAPRWQRLRAVLGRRWREPCAA

SEQ ID NO: 869634 - protein, 103 aa, Homo sapiens; identical to SEQ ID NO: 869633

SEQ ID NO: 869635 - protein, 103 aa, Homo sapiens; identical to SEQ ID NO: 869633

SEQ ID NO: 869636 - protein, 103 aa, Homo sapiens; identical to SEQ ID NO: 869633

SEQ ID NO: 869637 - protein, 103 aa, Homo sapiens
MFLSATLHPSISHPNLQKVTTGWARWLTPVIPASWEAKVQPWQKMAGHKGPAARCSWSQLSRTGLNLGPLQKHCSYFLPADLSPSHPSLHPPEYSGDITLTLK

SEQ ID NO: 869638 - protein, 103 aa, Homo sapiens; identical to SEQ ID NO: 869633

SEQ ID NO: 869639 - protein, 103 aa, Homo sapiens; identical to SEQ ID NO: 869633

SEQ ID NO: 869640 - protein, 103 aa, Homo sapiens; identical to SEQ ID NO: 869633

SEQ ID NO: 869641 - protein, 103 aa, Homo sapiens; identical to SEQ ID NO: 869633

SEQ ID NO: 869642 - protein, 103 aa, Homo sapiens; identical to SEQ ID NO: 869633

SEQ ID NO: 869643 - protein, 103 aa, Homo sapiens; identical to SEQ ID NO: 869633

SEQ ID NO: 869644 - protein, 380 aa, Homo sapiens
MTEEVIVIAKWDYTAQQDQELDIKKNERLWLLDDSKTWWRVRNAANRTGYVPSNYVERKNSLKKGSLVKNLKDTLGLGKTRRKTSARDASPTPSTDAEYPANGSGADRIYDLNIPAFVKFAYVAEREDELSLVKGSRVTVMEKCSDGWWRGSYNGQIGWFPSNYVLEEVDEAAAESPSFLSLRKGASLSNGQGSRVLHVVQTLYPFSSVTEEELNFEKGETMEVIEKPENDPEWWKCKNARGQVGLVPKNYVVVLSDGPALHPAHAPQISYTGPSSSGRFAGREWYYGNVTRHQAECALNERGVEGDFLIRDSESSPSDFSVSLKASGKNKHFKVQLVDNVYCIGQRRFHTMDELVEHYKKAPIFTSEHGEKLYLVRALQ

SEQ ID NO: 869645 - protein, 380 aa, Homo sapiens; identical to SEQ ID NO: 869644

SEQ ID NO: 869646 - protein, 380 aa, Homo sapiens; identical to SEQ ID NO: 869644

SEQ ID NO: 869647 - protein, 210 aa, Homo sapiens
MKDDRRSYCDSQVGLHRPAGPGAGHQEERAAVVAGRLQDVVAGEERGQQDGLCTVQLRGAEEQPEEGLPREEPEGHTSPATSPCPLKRQGRTNTSRCSSWTMSTALGSGASTPWTSWWNTTKRRPSSPASTGRSSTSSGPCSDGAPAPHSPPGPHGGAARPALWQRLLPRGRPRRLLCESLFMFRSLGRFVSHLPSRPHTHTRAHPAGQL

SEQ ID NO: 869648 - protein, 236 aa, Homo sapiens
GELVGVSAVSERAGRRLTGLQKQKDSMKDDRRSYCDSQVGLHRPAGPGAGHQEERAAVVAGRLQDVVAGEERGQQDGLCTVQLRGAEEQPEEGLPREEPEGHTSPATSPCPLKRQGRTNTSRCSSWTMSTALGSGASTPWTSWWNTTKRRPSSPASTGRSSTSSGPCSDGAPAPHSPPGPHGGAARPALWQRLLPRGRPRRLLCESLFMFRSLGRFVSHLPSRPHTHTRAHPAGQL

SEQ ID NO: 869649 - protein, 102 aa, Homo sapiens
MTEEVIVIAKWDYTAQQDQELDIKKNERLWLLDDSKTWWRVRNAANRTGYVPSNYVERKNSLKKGSLVKNLKDTLGECFTLERGSLVHFKETLFVFLVSLLF

SEQ ID NO: 869650 - protein, 380 aa, Homo sapiens; identical to SEQ ID NO: 869644

SEQ ID NO: 869651 - protein, 380 aa, Homo sapiens; identical to SEQ ID NO: 869644

SEQ ID NO: 869652 - protein, 324 aa, Homo sapiens
TLSNFATTGGSCQQPYFSHGLGKTRRKTSARDASPTPSTDAEYPANGSGADRIYDLNIPAFVKFAYVAEREDELSLVKGSRVTVMEKCSDGWWRGSYNGQIGWFPSNYVLEEVDEAAAESPSFLSLRKGASLSNGQGSRVLHVVQTLYPFSSVTEEELNFEKGETMEVIEKPENDPEWWKCKNARGQVGLVPKNYVVVLSDGPALHPAHAPQISYTGPSSSGRFAGREWYYGNVTRHQAECALNERGVEGDFLIRDSESSPSDFSVSLKASGKNKHFKVQLVDNVYCIGQRRFHTMDELVEHYKKAPIFTSEHGEKLYLVRALQ

SEQ ID NO: 869653 - protein, 380 aa, Homo sapiens; identical to SEQ ID NO: 869644

SEQ ID NO: 869654 - protein, 110 aa, Homo sapiens
MDILEPVFWGLRVCPCPLCCPLVTADGEREVVEGHKGSQGPDLQVANIISALFPLPRIFHWPTVLPGEIGVGQAEKYTTPVCSGRKYIVSALSGLSVYLLSSVVCFRTRI

SEQ ID NO: 869655 - protein, 193 aa, Homo sapiens
MPVTHRKSDASDMNSDTSPSCRLRAFSRGGSLESRSSSSRSRSFTLDDESLKYLTHEEKDVLLFFEETIDSLDEDFEEPVLCDGGVCCLCSPSLEESTSSPSEPEDVIDLVQPAPGAGEAEGLPEGTQAAGPAPAGKEHRKQDAETPPPPDPPAPETLLAPPPLPSTPDPPRRELRAPSPPVEHPRLLRSVPT

SEQ ID NO: 869656 - protein, 193 aa, Homo sapiens; identical to SEQ ID NO: 869655

SEQ ID NO: 869657 - protein, 50 aa, Homo sapiens
PVEHPRLLRSVPTPLVMAQKISERMAGNEALSPTSPFREGRPGEWRTPAA

SEQ ID NO: 869658 - protein, 43 aa, Homo sapiens
MQRFELRRWYLNPFEVQACCARLGRLLAVLGLEAAALPSCFQG

SEQ ID NO: 869659 - protein, 139 aa, Homo sapiens
MQSLLILTPSPVGCAPGRSDHTNGVPHRGAHTRRVTRGSRALCPRARAAPTRHGPNIRVTTPAPDESDQIPCRAITPMTRDSEWVGLEKPSTIYMCVCVCVCVCVCVCINACAWVCDPSSNTKTLCTGTLEPFQHEQQE

SEQ ID NO: 869660 - protein, 126 aa, Homo sapiens
ARYQGLQFVYLSFVYPNDYTRLTHMETDNKCFYRESPLYLERFGFYKYMKMAAPGEFTKFNSQVSKPRRLMASRRYYFELLHKQDDRGSDHVEVGWRAFLPGLKFEAFSSSSHPTFPRLALGWDLE

SEQ ID NO: 869661 - protein, 2101 aa, Homo sapiens
MTLHATRGAALLSWVNSLHVADPVEAVLQLQDCSIFIKIIDRIHGTEEGQQILKQPVSERLDFVCSFLQKNRKHPSSPECLVSAQKVLEGSELELAKMTMLLLYHSTMSSKSPRDWEQFEYKIQAELAVILKFVLDHEDGLNLNEDLENFLQKAPVPSTCSSTFPEELSPPSHQAKREIRFLELQKVASSSSGNNFLSGSPASPMGDILQTPQFQMRRLKKQLADERSNRDELELELAENRKLLTEKDAQIAMMQQRIDRLALLNEKQAASPLEPKELEELRDKNESLTMRLHETLKQCQDLKTEKSQMDRKINQLSEENGDLSFKLREFASHLQQLQDALNELTEEHSKATQEWLEKQAQLEKELSAALQDKKCLEEKNEILQGKLSQLEEHLSQLQDNPPQEKGEVLGDVLQLETLKQEAATLAANNTQLQARVEMLETERGQQEAKLLAERGHFEEEKQQLSSLITDLQSSISNLSQAKEELEQASQAHGARLTAQVASLTSELTTLNATIQQQDQELAGLKQQAKEKQAQLAQTLQQQEQASQGLRHQVEQLSSSLKQKEQQLKEVAEKQEATRQDHAQQLATAAEEREASLRERDAALKQLEALEKEKAAKLEILQQQLQVANEARDSAQTSVTQAQREKAELSRKVEELQACVETARQEQHEAQAQVAELELQLRSEQQKATEKERVAQEKDQLQEQLQALKESLKVTKGSLEEEKRRAADALEEQQRCISELKAETRSLVEQHKRERKELEEERAGRKGLEARLQQLGEAHQAETEVLRRELAEAMAAQHTAESECEQLVKEVAAWRERYEDSQQEEAQYGAMFQEQLMTLKEECEKARQELQEAKEKVAGIESHSELQISRQQNELAELHANLARALQQVQEKEVRAQKLADDLSTLQEKMAATSKEVARLETLVRKAGEQQETASRELVKEPARAGDRQPEWLEEQQGRQFCSTQAALQAMEREAEQMGNELERLRAALMESQGQQQEERGQQEREVARLTQERGRAQADLALEKAARAELEMRLQNALNEQRVEFATLQEALAHALTEKEGKDQELAKLRGLEAAQIKELEELRQTVKQLKEQLAKKEKEHASGSGAQSEAAGRTEPTGPKLEALRAEVSKLEQQCQKQQEQADSLERSLEAERASRAERDSALETLQGQLEEKAQELGHSQSALASAQRELAAFRTKVQDHSKAEDEWKAQVARGRQEAERKNSLISSLEEEVSILNRQVLEKEGESKELKRLVMAESEKSQKLEERLRLLQAETASNSARAAERSSALREEVQSLREEAEKQRVASENLRQELTSQAERAEELGQELKAWQEKFFQKEQALSTLQLEHTSTQALVSELLPAKHLCQQLQAEQAAAEKRHREELEQSKQAAGGLRAELLRAQRELGELIPLRQKVAEQERTAQQLRAEKASYAEQLSMLKKAHGLLAEENRGLGERANLGRQFLEVELDQAREKYVQELAAVRADAETRLAEVQREAQSTARELEVMTAKYEGAKVKVLEERQRFQEERQKLTAQVEELSKKLADSDQASKVQQQKLKAVQAQGGESQQEAQRLQAQLNELQAQLSQKEQAAEHYKLQMEKAKTHYDAKKQQNQELQEQLRSLEQLQKENKELRAEAERLGHELQQAGLKTKEAEQTCRHLTAQVRSLEAQVAHADQQLRDLGKFQVATDALKSREPQAKPQLDLSIDSLDLSCEEGTPLSITSKLPRTQPDGTSVPGEPASPISQRLPPKVESLESLYFTPIPARSQAPLESSLDSLGDVFLDSGRKTRSARRRTTQIINITMTKKLDVEEPDSANSSFYSTRSAPASQASLRATSSTQSLARLGSPDYGNSALLSLPGYRPTTRSSARRSQAGVSSGAPPGRNSFYMGTCQDEPEQLDDWNRIAELQQRNRVCPPHLKTCYPLESRPSLSLGTITDEEMKTGDPQETLRRASMQPIQIAEGTGITTRQQRKRVSLEPHQGPGTPESKKATSCFPRPMTPRDRHEGRKQSTTEAQKKAAPASTKQADRRQSMAFSILNTPKKLGNSLLRRGASKKALSKASPNTRSGTRRSPRIATTTASAATAAAIGATPRAKGKAKH

SEQ ID NO: 869662 - protein, 2014 aa, Homo sapiens
MLTPHRELAKMTMLLLYHSTMSSKSPRDWEQFEYKIQAELAVILKFVLDHEDGLNLNEDLENFLQKAPVPSTCSSTFPEELSPPSHQAKREIRFLELQKVASSSSGNNFLSGSPASPMGDILQTPQFQMRRLKKQLADERSNRDELELELAENRKLLTEKDAQIAMMQQRIDRLALLNEKQAASPLEPKELEELRDKNESLTMRLHETLKQCQDLKTEKSQMDRKINQLSEENGDLSFKLREFASHLQQLQDALNELTEEHSKATQEWLEKQAQLEKELSAALQDKKCLEEKNEILQGKLSQLEEHLSQLQDNPPQEKGEVLGDVLQLETLKQEAATLAANNTQLQARVEMLETERGQQEAKLLAERGHFEEEKQQLSSLITDLQSSISNLSQAKEELEQASQAHGARLTAQVASLTSELTTLNATIQQQDQELAGLKQQAKEKQAQLAQTLQQQEQASQGLRHQVEQLSSSLKQKEQQLKEVAEKQEATRQDHAQQLATAAEEREASLRERDAALKQLEALEKEKAAKLEILQQQLQVANEARDSAQTSVTQAQREKAELSRKVEELQACVETARQEQHEAQAQVAELELQLRSEQQKATEKERVAQEKDQLQEQLQALKESLKVTKGSLEEEKRRAADALEEQQRCISELKAETRSLVEQHKRERKELEEERAGRKGLEARLQQLGEAHQAETEVLRRELAEAMAAQHTAESECEQLVKEVAAWRERYEDSQQEEAQYGAMFQEQLMTLKEECEKARQELQEAKEKVAGIESHSELQISRQQNELAELHANLARALQQVQEKEVRAQKLADDLSTLQEKMAATSKEVARLETLVRKAGEQQETASRELVKEPARAGDRQPEWLEEQQGRQFCSTQAALQAMEREAEQMGNELERLRAALMESQGQQQEERGQQEREVARLTQERGRAQADLALEKAARAELEMRLQNALNEQRVEFATLQEALAHALTEKEGKDQELAKLRGLEAAQIKELEELRQTVKQLKEQLAKKEKEHASGSGAQSEAAGRTEPTGPKLEALRAEVSKLEQQCQKQQEQADSLERSLEAERASRAERDSALETLQGQLEEKAQELGHSQSALASAQRELAAFRTKVQDHSKAEDEWKAQVARGRQEAERKNSLISSLEEEVSILNRQVLEKEGESKELKRLVMAESEKSQKLEERLRLLQAETASNSARAAERSSALREEVQSLREEAEKQRVASENLRQELTSQAERAEELGQELKAWQEKFFQKEQALSTLQLEHTSTQALVSELLPAKHLCQQLQAEQAAAEKRHREELEQSKQAAGGLRAELLRAQRELGELIPLRQKVAEQERTAQQLRAEKASYAEQLSMLKKAHGLLAEENRGLGERANLGRQFLEVELDQAREKYVQELAAVRADAETRLAEVQREAQSTARELEVMTAKYEGAKVKVLEERQRFQEERQKLTAQVEELSKKLADSDQASKVQQQKLKAVQAQGGESQQEAQRLQAQLNELQAQLSQKEQAAEHYKLQMEKAKTHYDAKKQQNQELQEQLRSLEQLQKENKELRAEAERLGHELQQAGLKTKEAEQTCRHLTAQVRSLEAQVAHADQQLRDLGKFQVATDALKSREPQAKPQLDLSIDSLDLSCEEGTPLSITSKLPRTQPDGTSVPGEPASPISQRLPPKVESLESLYFTPIPARSQAPLESSLDSLGDVFLDSGRKTRSARRRTTQIINITMTKKLDVEEPDSANSSFYSTRSAPASQASLRATSSTQSLARLGSPDYGNSALLSLPGYRPTTRSSARRSQAGVSSGAPPGRNSFYMGTCQDEPEQLDDWNRIAELQQRNRVCPPHLKTCYPLESRPSLSLGTITDEEMKTGDPQETLRRASMQPIQIAEGTGITTRQQRKRVSLEPHQGPGTPESKKATSCFPRPMTPRDRHEGRKQSTTEAQKKAAPASTKQADRRQSMAFSILNTPKKLGNSLLRRGASKKALSKASPNTRSGTRRSPRIATTTASAATAAAIGATPRAKGKAKH

SEQ ID NO: 869663 - protein, 2119 aa, Homo sapiens
MTLHATRGAALLSWVNSLHVADPVEAVLQLQDCSIFIKIIDRIHGTEEGQQILKQPVSERLDFVCSFLQKNRKHPSSPECLVSAQKVLEGSELELAKMTMLLLYHSTMSSKSPRDWEQFEYKIQAELAVILKFVLDHEDGLNLNEDLENFLQKAPVPSTCSSTFPEELSPPSHQAKREIRFLELQKVASSSSGNNFLSGSPASPMGDILQTPQFQMRRLKKQLADERSNRDELELELAENRKLLTEKDAQIAMMQQRIDRLALLNEKQAASPLEPKELEELRDKNESLTMRLHETLKQCQDLKTEKSQMDRKINQLSEENGDLSFKLREFASHLQQLQDALNELTEEHSKATQEWLEKQAQLEKELSAALQDKKCLEEKNEILQGKLSQLEEHLSQLQDNPPQEKGEVLGDVLQLETLKQEAATLAANNTQLQARVEMLETERGQQEAKLLAERGHFEEEKQQLSSLITDLQSSISNLSQAKEELEQASQAHGARLTAQVASLTSELTTLNATIQQQDQELAGLKQQAKEKQAQLAQTLQQQEQASQGLRHQVEQLSSSLKQKEQQLKEVAEKQEATRQDHAQQLATAAEEREASLRERDAALKQLEALEKEKAAKLEILQQQLQVANEARDSAQTSVTQAQREKAELSRKVEELQACVETARQEQHEAQAQVAELELQLRSEQQKATEKERVAQEKDQLQEQLQALKESLKVTKGSLEEEKRRAADALEEQQRCISELKAETRSLVEQHKRERKELEEERAGRKGLEARLQQLGEAHQAETEVLRRELAEAMAAQHTAESECEQLVKEVAAWRERYEDSQQEEAQYGAMFQEQLMTLKEECEKARQELQEAKEKVAGIESHSELQISRQQNELAELHANLARALQQVQEKEVRAQKLADDLSTLQEKMAATSKEVARLETLVRKAGEQQETASRELVKEPARAGDRQPEWLEEQQGRQFCSTQAALQAMEREAEQMGNELERLRAALMESQGQQQEERGQQEREVARLTQERGRAQADLALEKAARAELEMRLQNALNEQRVEFATLQEALAHALTEKEGKDQELAKLRGLEAAQIKELEELRQTVKQLKEQLAKKEKEHASGSGAQSEAAGRTEPTGPKLEALRAEVSKLEQQCQKQQEQADSLERSLEAERASRAERDSALETLQGQLEEKAQELGHSQSALASAQRELAAFRTKVQDHSKAEDEWKAQVARGRQEAERKNSLISSLEEEVSILNRQVLEKEGESKELKRLVMAESEKSQKLEERLRLLQAETASNSARAAERSSALREEVQSLREEAEKQRVASENLRQELTSQAERAEELGQELKAWQEKFFQKEQALSTLQLEHTSTQALVSELLPAKHLCQQLQAEQAAAEKRHREELEQSKQAAGGLRAELLRAQRELGELIPLRQKVAEQERTAQQLRAEKASYAEQLSMLKKAHGLLAEENRGLGERANLGRQFLEVELDQAREKYVQELAAVRADAETRLAEVQREAQSTARELEVMTAKYEGAKVKVLEERQRFQEERQKLTAQVEELSKKLADSDQASKVQQQKLKAVQAQGGESQQEAQRLQAQLNELQAQLSQKEQAAEHYKLQMEKAKTHYDAKKQQNQELQEQLRSLEQLQKENKELRAEAERLGHELQQAGLKTKEAEQTCRHLTAQVRSLEAQVAHADQQLRDLGKFQVATDALKSREPQAKPQLDLSIDSLDLSCEEGTPLSITRHKALMTIIPDLSPNNPLSKLPRTQPDGTSVPGEPASPISQRLPPKVESLESLYFTPIPARSQAPLESSLDSLGDVFLDSGRKTRSARRRTTQIINITMTKKLDVEEPDSANSSFYSTRSAPASQASLRATSSTQSLARLGSPDYGNSALLSLPGYRPTTRSSARRSQAGVSSGAPPGRNSFYMGTCQDEPEQLDDWNRIAELQQRNRVCPPHLKTCYPLESRPSLSLGTITDEEMKTGDPQETLRRASMQPIQIAEGTGITTRQQRKRVSLEPHQGPGTPESKKATSCFPRPMTPRDRHEGRKQSTTEAQKKAAPASTKQADRRQSMAFSILNTPKKLGNSLLRRGASKKALSKASPNTRSGTRRSPRIATTTASAATAAAIGATPRAKGKAKH

SEQ ID NO: 869664 - protein, 1068 aa, Homo sapiens
EILTLTESPTSDRVPTSDRVSLRGLEAAQIKELEELRQTVKQLKEQLAKKEKEHASGSGAQSEAAGRTEPTGPKLEALRAEVSKLEQQCQKQQEQADSLERSLEAERASRAERDSALETLQGQLEEKAQELGHSQSALASAQRELAAFRTKVQDHSKAEDEWKAQVARGRQEAERKNSLISSLEEEVSILNRQVLEKEGESKELKRLVMAESEKSQKLEERLRLLQAETASNSARAAERSSALREEVQSLREEAEKQRVASENLRQELTSQAERAEELGQELKAWQEKFFQKEQALSTLQLEHTSTQALVSELLPAKHLCQQLQAEQAAAEKRHREELEQSKQAAGGLRAELLRAQRELGELIPLRQKVAEQERTAQQLRAEKASYAEQLSMLKKAHGLLAEENRGLGERANLGRQFLEVELDQAREKYVQELAAVRADAETRLAEVQREAQSTARELEVMTAKYEGAKVKVLEERQRFQEERQKLTAQVEQLEVFQREQTKQVEELSKKLADSDQASKVQQQKLKAVQAQGGESQQEAQRLQAQLNELQAQLSQKEQAAEHYKLQMEKAKTHYDAKKQQNQELQEQLRSLEQLQKENKELRAEAERLGHELQQAGLKTKEAEQTCRHLTAQVRSLEAQVAHADQQLRDLGKFQVATDALKSREPQAKPQLDLSIDSLDLSCEEGTPLSITSKLPRTQPDGTSVPGEPASPISQRLPPKVESLESLYFTPIPARSQAPLESSLDSLGDVFLDSGRKTRSARRRTTQIINITMTKKLDVEEPDSANSSFYSTRSAPASQASLRATSSTQSLARLGSPDYGNSALLSLPGYRPTTRSSARRSQAGVSSGAPPGRNSFYMGTCQDEPEQLDDWNRIAELQQRNRVCPPHLKTCYPLESRPSLSLGTITDEEMKTGDPQETLRRASMQPIQIAEGTGITTRQQRKRVSLEPHQGPGTPESKKATSCFPRPMTPRDRHEGRKQSTTEAQKKAAPASTKQADRRQSMAFSILNTPKKLGNSLLRRGASKKALSKASPNTRSGTRRSPRIATTTASAATAAAIGATPRAKGKAKH

SEQ ID NO: 869665 - protein, 876 aa, Homo sapiens
EQREGRISRRSIGKQNDTTGHAKTARCPVELGREAETASNSARAAERSSALREEVQSLREEAEKQRVASENLRQELTSQAERAEELGQELKAWQEKFFQKEQALSTLQLEHTSTQALVSELLPAKHLCQQLQAEQAAAEKRHREELEQSKQAAGGLRAELLRAQRELGELIPLRQKVAEQERTAQQLRAEKASYAEQLSMLKKAHGLLAEENRGLGERANLGRQFLEVELDQAREKYVQELAAVRADAETRLAEVQREAQSTARELEVMTAKYEGAKVKVLEERQRFQEERQKLTAQVEQLEVFQREQTKQVEELSKKLADSDQASKVQQQKLKAVQAQGGESQQEAQRLQAQLNELQAQLSQKEQAAEHYKLQMEKAKTHYDAKKQQNQELQEQLRSLEQLQKENKELRAEAERLGHELQQAGLKTKEAEQTCRHLTAQVRSLEAQVAHADQQLRDLGKFQVATDALKSREPQAKPQLDLSIDSLDLSCEEGTPLSITSKLPRTQPDGTSVPGEPASPISQRLPPKVESLESLYFTPIPARSQAPLESSLDSLGDVFLDSGRKTRSARRRTTQIINITMTKKLDVEEPDSANSSFYSTRSAPASQASLRATSSTQSLARLGSPDYGNSALLSLPGYRPTTRSSARRSQAGVSSGAPPGRNSFYMGTCQDEPEQLDDWNRIAELQQRNRVCPPHLKTCYPLESRPSLSLGTITDEEMKTGDPQETLRRASMQPIQIAEGTGITTRQQRKRVSLEPHQGPGTPESKKATSCFPRPMTPRDRHEGRKQSTTEAQKKAAPASTKQADRRQSMAFSILNTPKKLGNSLLRRGASKKALSKASPNTRSGTRRSPRIATTTASAATAAAIGATPRAKGKAKH

SEQ ID NO: 869666 - protein, 297 aa, Homo sapiens [sequence omitted]

SEQ ID NO: 869667 - protein, 2115 aa, Homo sapiens
MTLHATRGAALLSWVNSLHVADPVEAVLQLQDCSIFIKIIDRIHGTEEGQQILKQPVSERLDFVCSFLQKNRKHPSSPECLVSAQKVLEGSELELAKMTMLLLYHSTMSSKSPRDWEQFEYKIQAELAVILKFVLDHEDGLNLNEDLENFLQKAPVPSTCSSTFPEELSPPSHQAKREIRFLELQKVASSSSGNNFLSGSPASPMGDILQTPQFQMRRLKKQLADERSNRDELELELAENRKLLTEKDAQIAMMQQRIDRLALLNEKQAASPLEPKELEELRDKNESLTMRLHETLKQCQDLKTEKSQMDRKINQLSEENGDLSFKLREFASHLQQLQDALNELTEEHSKATQEWLEKQAQLEKELSAALQDKKCLEEKNEILQGKLSQLEEHLSQLQDNPPQEKGEVLGDVLQLETLKQEAATLAANNTQLQARVEMLETERGQQEAKLLAERGHFEEEKQQLSSLITDLQSSISNLSQAKEELEQASQAHGARLTAQVASLTSELTTLNATIQQQDQELAGLKQQAKEKQAQLAQTLQQQEQASQGLRHQVEQLSSSLKQKEQQLKEVAEKQEATRQDHAQQLATAAEEREASLRERDAALKQLEALEKEKAAKLEILQQQLQVANEARDSAQTSVTQAQREKAELSRKVEELQACVETARQEQHEAQAQVAELELQLRSEQQKATEKERVAQEKDQLQEQLQALKESLKVTKGSLEEEKRRAADALEEQQRCISELKAETRSLVEQHKRERKELEEERAGRKGLEARLQQLGEAHQAETEVLRRELAEAMAAQHTAESECEQLVKEVAAWRERYEDSQQEEAQYGAMFQEQLMTLKEECEKARQELQEAKEKVAGIESHSELQISRQQNELAELHANLARALQQVQEKEVRAQKLADDLSTLQEKMAATSKEVARLETLVRKAGEQQETASRELVKEPARAGDRQPEWLEEQQGRQFCSTQAALQAMEREAEQMGNELERLRAALMESQGQQQEERGQQEREVARLTQERGRAQADLALEKAARAELEMRLQNALNEQRVEFATLQEALAHALTEKEGKDQELAKLRGLEAAQIKELEELRQTVKQLKEQLAKKEKEHASGSGAQSEAAGRTEPTGPKLEALRAEVSKLEQQCQKQQEQADSLERSLEAERASRAERDSALETLQGQLEEKAQELGHSQSALASAQRELAAFRTKVQDHSKAEDEWKAQVARGRQEAERKNSLISSLEEEVSILNRQVLEKEGESKELKRLVMAESEKSQKLEERLRLLQAETASNSARAAERSSALREEVQSLREEAEKQRVASENLRQELTSQAERAEELGQELKAWQEKFFQKEQALSTLQLEHTSTQALVSELLPAKHLCQQLQAEQAAAEKRHREELEQSKQAAGGLRAELLRAQRELGELIPLRQKVAEQERTAQQLRAEKASYAEQLSMLKKAHGLLAEENRGLGERANLGRQFLEVELDQAREKYVQELAAVRADAETRLAEVQREAQSTARELEVMTAKYEGAKVKVLEERQRFQEERQKLTAQVEQLEVFQREQTKQVEELSKKLADSDQASKVQQQKLKAVQAQGGESQQEAQRLQAQLNELQAQLSQKEQAAEHYKLQMEKAKTHYDAKKQQNQELQEQLRSLEQLQKENKELRAEAERLGHELQQAGLKTKEAEQTCRHLTAQVRSLEAQVAHADQQLRDLGKFQVATDALKSREPQAKPQLDLSIDSLDLSCEEGTPLSITSKLPRTQPDGTSVPGEPASPISQRLPPKVESLESLYFTPIPARSQAPLESSLDSLGDVFLDSGRKTRSARRRTTQIINITMTKKLDVEEPDSANSSFYSTRSAPASQASLRATSSTQSLARLGSPDYGNSALLSLPGYRPTTRSSARRSQAGVSSGAPPGRNSFYMGTCQDEPEQLDDWNRIAELQQRNRVCPPHLKTCYPLESRPSLSLGTITDEEMKTGDPQETLRRASMQPIQIAEGTGITTRQQRKRVSLEPHQGPGTPESKKATSCFPRPMTPRDRHEGRKQSTTEAQKKAAPASTKQADRRQSMAFSILNTPKKLGNSLLRRGASKKALSKASPNTRSGTRRSPRIATTTASAATAAAIGATPRAKGKAKH

SEQ ID NO: 869668 - protein, 2097 aa, Homo sapiens
MTLHATRGAALLSWVNSLHVADPVEAVLQLQDCSIFIKIIDRIHGTEEGQQILKQPVSERLDFVCSFLQKNRKHPSSPECLVSAQKVLEGSELELAKMTMLLLYHSTMSSKSPRDWEQFEYKIQAELAVILKFVLDHEDGLNLNEDLENFLQKAPVPSTCSSTFPEELSPPSHQAKREIRFLELQKVASSSSGNNFLSGSPASPMGDILQTPQFQMRRLKKQLADERSNRDELELELAENRKLLTEKDAQIAMMQQRIDRLALLNEKQAASPLEPKELEELRDKNESLTMRLHETLKQCQDLKTEKSQMDRKINQLSEENGDLSFKLREFASHLQQLQDALNELTEEHSKATQEWLEKQAQLEKELSAALQDKKCLEEKNEILQGKLSQLEEHLSQLQDNPPQEKGEVLGDVLQLETLKQEAATLAANNTQLQARVEMLETERGQQEAKLLAERGHFEEEKQQLSSLITDLQSSISNLSQAKEELEQASQAHGARLTAQVASLTSELTTLNATIQQQDQELAGLKQQAKEKQAQLAQTLQQQEQASQGLRHQVEQLSSSLKQKEQQLKEVAEKQEATRQDHAQQLATAAEEREASLRERDAALKQLEALEKEKAAKLEILQQQLQVANEARDSAQTSVTQAQREKAELSRKVEELQACVETARQEQHEAQAQVAELELQLRSEQQKATEKERVAQEKDQLQEQLQALKESLKVTKGSLEEEKRRAADALEEQQRCISELKAETRSLVEQHKRERKELEEERAGRKGLEARLQQLGEAHQAETEVLRRELAEAMAAQHTAESECEQLVKEVAAWRERYEDSQQEEAQYGAMFQEQLMTLKEECEKARQELQEAKEKVAGIESHSELQISRQQNELAELHANLARALQQVQEKEVRAQKLADDLSTLQEKMAATSKEVARLETLVRKAGEQQETASRELVKEPARAGDRQPEWLEEQQGRQFCSTQAALQAMEREAEQMGNELERLRAALMESQGQQQEERGQQEREVARLTQERGRAQADLALEKAARAELEMRLQNALNEQRVEFATLQEALAHALTEKEGKDQELAKLRGLEAAQIKELEELRQTVKQLKEQLAKKEKEHASGSGAQSEAAGRTEPTGPKLEALRAEVSKLEQQCQKQQEQADSLERSLEAERASRAERDSALETLQGQLEEKAQELGHSQSALASAQRELAAFRTKVQDHSKAEDEWKAQVARGRQEAERKNSLISSLEEEVSILNRQVLEKEGESKELKRLVMAESEKSQKLEERLRLLQAETASNSARAAERSSALREEVQSLREEAEKQRVASENLRQELTSQAERAEELGQELKAWQEKFFQKEQALSTLQLEHTSTQALVSELLPAKHLCQQLQAEQAAAEKRHREELEQSKQAAGGLRAELLRAQRELGELIPLRQKVAEQERTAQQLRAEKASYAEQLSMLKKAHGLLAEENRGLGERANLGRQFLEVELDQAREKYVQELAAVRADAETRLAEVQREAQSTARELEVMTAKYEGAKVKVLEERQRFQEERQKLTAQVEQLEVFQREQTKQVEELSKKLADSDQASKVQQQKLKAVQAQGGESQQEAQRLQAQLNELQAQLSQKEQAAEHYKLQMEKAKTHYDAKKQQNQELQEQLRSLEQLQKENKELRAEAERLGHELQQAGLKTKEAEQTCRHLTAQVRSLEAQVAHADQQLRDLGKFQVATDALKSREPQAKPQLDLSIDSLDLSCEEGTPLSITSKLPRTQPDGTSVPGEPASPISQRLPPKVESLESLYFTPIPARSQAPLESSLDSLGDVFLDSGRKTRSARRRTTQIINITMTKKLDVEEPDSANSSFYSTRSAPASQASLRATSSTQSLARLGSPDYGNSALLSLPGYRPTTRSSARRSQAGVSSGAPPGRNSFYMGTCQDEPEQLDDWNRIAELQQRNRVCPPHLKTCYPLESRPSLSLGTITDEEMIAEGTGITTRQQRKRVSLEPHQGPGTPESKKATSCFPRPMTPRDRHEGRKQSTTEAQKKAAPASTKQADRRQSMAFSILNTPKKLGNSLLRRGASKKALSKASPNTRSGTRRSPRIATTTASAATAAAIGATPRAKGKAKH

SEQ ID NO: 869669 - protein, 271 aa, Homo sapiens
MLKAIDWRRSACLEKLELLSYGNSALLSLPGYRPTTRSSARRSQAGVSSGAPPGRNSFYMGTCQDEPEQLDDWNRIAELQQRNRVCPPHLKTCYPLESRPSLSLGTITDEEMKTGDPQETLRRASMQPIQIAEGTGITTRQQRKRVSLEPHQGPGTPESKKATSCFPRPMTPRDRHEGRKQSTTEAQKKAAPASTKQADRRQSMAFSILNTPKKLGNSLLRRGASKKALSKASPNTRSGTRRSPRIATTTASAATAAAIGATPRAKGKAKH

SEQ ID NO: 869670 - protein, 2114 aa, Homo sapiens
MTLHATRGAALLSWVNSLHVADPVEAVLQLQDCSIFIKIIDRIHGTEEGQQILKQPVSERLDFVCSFLQKNRKHPSSPECLVSAQKVLEGSELELAKMTMLLLYHSTMSSKSPRDWEQFEYKIQAELAVILKFVLDHEDGLNLNEDLENFLQKAPVPSTCSSTFPEELSPPSHQAKREIRFLELQKVASSSSGNNFLSGSPASPMGDILQTPQFQMRRLKKQLADERSNRDELELELAENRKLLTEKDAQIAMMQQRIDRLALLNEKQAASPLEPKELEELRDKNESLTMRLHETLKQCQDLKTEKSQMDRKINQLSEENGDLSFKLREFASHLQQLQDALNELTEEHSKATQEWLEKQAQLEKELSAALQDKKCLEEKNEILQGKLSQLEEHLSQLQDNPPQEKGEVLGDVLQLETLKQEAATLAANNTQLQARVEMLETERGQQEAKLLAERGHFEEEKQQLSSLITDLQSSISNLSQAKEELEQASQAHGARLTAQVASLTSELTTLNATIQQQDQELAGLKQQAKEKQAQLAQTLQQQEQASQGLRHQVEQLSSSLKQKEQQLKEVAEKQEATRQDHAQQLATAAEEREASLRERDAALKQLEALEKEKAAKLEILQQQLQVANEARDSAQTSVTQAQREKAELSRKVEELQACVETARQEQHEAQAQVAELELQLRSEQQKATEKERVAQEKDQLQEQLQALKESLKVTKGSLEEEKRRAADALEEQQRCISELKAETRSLVEQHKRERKELEEERAGRKGLEARLQQLGEAHQAETEVLRRELAEAMAAQHTAESECEQLVKEVAAWRERYEDSQQEEAQYGAMFQEQLMTLKEECEKARQELQEAKEKVAGIESHSELQISRQQNELAELHANLARALQQVQEKEVRAQKLADDLSTLQEKMAATSKEVARLETLVRKAGEQQETASRELVKEPARAGDRQPEWLEEQQGRQFCSTQAALQAMEREAEQMGNELERLRAALMESQGQQQEERGQQEREVARLTQERGRAQADLALEKAARAELEMRLQNALNEQRVEFATLQEALAHALTEKEGKDQELAKLRGLEAAQIKELEELRQTVKQLKEQLAKKEKEHASGSGAQSEAAGRTEPTGPKLEALRAEVSKLEQQCQKQQEQADSLERSLEAERASRAERDSALETLQGQLEEKAQELGHSQSALASAQRELAAFRTKVQDHSKAEDEWKAQVARGRQEAERKNSLISSLEEEVSILNRQVLEKEGESKELKRLVMAESEKSQKLEERLRLLQAETASNSARAAERSSALREEVQSLREEAEKQRVASENLRQELTSQAERAEELGQELKAWQEKFFQKEQALSTLQLEHTSTQALVSELLPAKHLCQQLQAEQAAAEKRHREELEQSKQAAGGLRAELLRAQRELGELIPLRQKVAEQERTAQQLRAEKASYAEQLSMLKKAHGLLAEENRGLGERANLGRQFLEVELDQAREKYVQELAAVRADAETRLAEVQREAQSTARELEVMTAKYEGAKVKVLEERQRFQEERQKLTAQVEQLEVFQREQTKQVEELSKKLADSDQASKVQQQKLKAVQAQGGESQQEAQRLQAQLNELQAQLSQKEQAAEHYKLQMEKAKTHYDAKKQQNQELQEQLRSLEQLQKENKELRAEAERLGHELQQAGLKTKEAEQTCRHLTAQVRSLEAQVAHADQQLRDLGKFQVATDALKSREPQAKPQLDLSIDSLDLSCEEGTPLSITSKLPRTQPDGTSVPGEPASPISQRLPPKVESLESLYFTPIPARSQAPLESSLDSLGDVFLDSGRKTRSARRRTTQIINITMTKKLDVEEPDSANSSFYSTRSAPASQASLRATSSTQSLARLGSPDYGNSALLSLPGYRPTTRSSARRSQAGVSSGAPPGRNSFYMGTCQDEPEQLDDWNRIAELQQRNRVCPPHLKTCYPLESRPSLSLGTITDEEMKTGDPQETLRRASMQPIQIAEGTGITTRQQRKRVSLEPHQGPGTPESKKATSCFPRPMTPRDRHEGRKQSTTEAQKKAAPASTKQADRRQSMAFSILNTPKKLGNSLLRRGASKKALSKASPNTRSGTRRSPRIATTTASAATAAAIGATPRAKGKQA

SEQ ID NO: 869671 - protein, 1763 aa, Homo sapiens
MTLHATRGAALLSWVNSLHVADPVEAVLQLQDCSIFIKIIDRIHGTEEGQQILKQPVSERLDFVCSFLQKNRKHPSSPECLVSAQKVLEGSELELAKMTMLLLYHSTMSSKSPRDWEQFEYKIQAELAVILKFVLDHEDGLNLNEDLENFLQKAPVPSTCSSTFPEELSPPSHQAKREIRFLELQKVASSSSGNNFLSGSPASPMGDILQTPQFQMRRLKKQLADERSNRDELELELAENRKLLTEKDAQIAMMQQRIDRLALLNEKQAASPLEPKELEELRDKNESLTMRLHETLKQCQDLKTEKSQMDRKINQLSEENGDLSFKLREFASHLQQLQDALNELTEEHSKATQEWLEKQAQLEKELSAALQDKKCLEEKNEILQGKLSQLEEHLSQLQDNPPQEKGEVLGDVLQLETLKQEAATLAANNTQLQARVEMLETERGQQEAKLLAERGHFEEEKQQLSSLITDLQSSISNLSQAKEELEQASQAHGARLTAQVASLTSELTTLNATIQQQDQELAGLKQQAKEKQAQLAQTLQQQEQASQGLRHQVEQLSSSLKQKEQQLKEVAEKQEATRQDHAQQLATAAEEREASLRERDAALKQLEALEKEKAAKLEILQQQLQVANEARDSAQTSVTQAQREKAELSRKVEELQACVETARQEQHEAQAQVAELELQLRSEQQKATEKERVAQEKDQLQEQLQALKESLKVTKGSLEEEKRRAADALEEQQRCISELKAETRSLVEQHKRERKELEEERAGRKGLEARLQQLGEAHQAETEVLRRELAEAMAAQHTAESECEQLVKEVAAWRERYEDSQQEEAQYGAMFQEQLMTLKEECEKARQELQEAKEKVAGIESHSELQISRQQNELAELHANLARALQQVQEKEVRAQKLADDLSTLQEKMAATSKEVARLETLVRKAGEQQETASRELVKEPARAGDRQPEWLEEQQGRQFCSTQAALQAMEREAEQMGNELERLRAALMESQGQQQEERGQQEREVARLTQERGRAQADLALEKAARAELEMRLQNALNEQRVEFATLQEALAHALTEKEGKDQELAKLRGLEAAQIKELEELRQTVKQLKEQLAKKEKEHASGSGAQSEAAGRTEPTGPKLEALRAEVSKLEQQCQKQQEQADSLERSLEAERASRAERDSALETLQGQLEEKAQELGHSQSALASAQRELAAFRTKVQDHSKAEDEWKAQVARGRQEAERKNSLISSLEEEVSILNRQVLEKEGESKELKRLVMAESEKSQKLEERLRLLQAETASNSARAAERSSALREEVQSLREEAEKQRVASENLRQELTSQAERAEELGQELKAWQEKFFQKEQALSTLQLEHTSTQALVSELLPAKHLCQQLQAEQAAAEKRHREELEQSKQAAGGLRAELLRAQRELGELIPLRQKVAEQERTAQQLRAEKASYAEQLSMLKKAHGLLAEENRGLGERANLGRQFLEVELDQAREKYVQELAAVRADAETRLAEVQREAQSTARELEVMTAKYEGAKVKVLEERQRFQEERQKLTAQVEQLEVFQREQTKQVEELSKKLADSDQASKVQQQKLKAVQAQGGESQQEAQRLQAQLNELQAQLSQKEQAAEHYKLQMEKAKTHYDAKKQQNQELQEQLRSLEQLQKENKELRAEAERLGHELQQAGLKTKEAEQTCRHLTAQVRSLEAQVAHADQQLRDLGKFQVATDALKSREPQAKPQLDLSIDSLDLSCEEGTPLSITRSGGSLPPYVCLWSACCLSGCILVR

SEQ ID NO: 869672 - protein, 2115 aa, Homo sapiens
MTLHATRGAALLSWVNSLHVADPVEAVLQLQDCSIFIKIIDRIHGTEEGQQILKQPVSERLDFVCSFLQKNRKHPSSPECLVSAQKVLEGSELELAKMTMLLLYHSTMSSKSPRDWEQFEYKIQAELAVILKFVLDHEDGLNLNEDLENFLQKAPVPSTCSSTFPEELSPPSHQAKREIRFLELQKVASSSSGNNFLSGSPASPMGDILQTPQFQMRRLKKQLADERSNRDELELELAENRKLLTEKDAQIAMMQQRIDRLALLNEKQAASPLEPKELEELRDKNESLTMRLHETLKQCQDLKTEKSQMDRKINQLSEENGDLSFKLREFASHLQQLQDALNELTEEHSKATQEWLEKQAQLEKELSAALQDKKCLEEKNEILQGKLSQLEEHLSQLQDNPPQEKGEVLGDVLQLETLKQEAATLAANNTQLQARVEMLETERGQQEAKLLAERGHFEEEKQQLSSLITDLQSSISNLSQAKEELEQASQAHGARLTAQVASLTSELTTLNATIQQQDQELAGLKQQAKEKQAQLAQTLQQQEQASQGLRHQVEQLSSSLKQKEQQLKEVAEKQEATRQDHAQQLATAAEEREASLRERDAALKQLEALEKEKAAKLEILQQQLQVANEARDSAQTSVTQAQREKAELSRKVEELQACVETARQEQHEAQAQVAELELQLRSEQQKATEKERVAQEKDQLQEQLQALKESLKVTKGSLEEEKRRAADALEEQQRCISELKAETRSLVEQHKRERKELEEERAGRKGLEARLQQLGEAHQAETEVLRRELAEAMAAQHTAESECEQLVKEVAAWRERYEDSQQEEAQYGAMFQEQLMTLKEECEKARQELQEAKEKVAGIESHSELQISRQQNELAELHANLARALQQVQEKEVRAQKLADDLSTLQEKMAATSKEVARLETLVRKAGEQQETASRELVKEPARAGDRQPEWLEEQQGRQFCSTQAALQAMEREAEQMGNELERLRAALMESQGQQQEERGQQEREVARLTQERGRAQADLALEKAARAELEMRLQNALNEQRVEFATLQEALAHALTEKEGKDQELAKLRGLEAAQIKELEELRQTVKQLKEQLAKKEKEHASGSGAQSEAAGRTEPTGPKLEALRAEVSKLEQQCQKQQEQADSLERSLEAERASRAERDSALETLQGQLEEKAQELGHSQSALASAQRELAAFRTKVQDHSKAEDEWKAQVARGRQEAERKNSLISSLEEEVSILNRQVLEKEGESKELKRLVMAESEKSQKLEERLRLLQAETASNSARAAERSSALREEVQSLREEAEKQRVASENLRQELTSQAERAEELGQELKAWQEKFFQKEQALSTLQLEHTSTQALVSELLPAKHLCQQLQAEQAAAEKRHREELEQSKQAAGGLRAELLRAQRELGELIPLRQKVAEQERTAQQLRAEKASYAEQLSMLKKAHGLLAEENRGLGERANLGRQFLEVELDQAREKYVQELAAVRADAETRLAEVQREAQSTARELEVMTAKYEGAKVKVLEERQRFQEERQKLTAQVEQLEVFQREQTKQVEELSKKLADSDQASKVQQQKLKAVQAQGGESQQEAQRLQAQLNELQAQLSQKEQAAEHYKLQMEKAKTHYDAKKQQNQELQEQLRSLEQLQKENKELRAEAERLGHELQQAGLKTKEAEQTCRHLTAQVRSLEAQVAHADQQLRDLGKFQVATDALKSREPQAKPQLDLSIDSLDLSCEEGTPLSITSKLPRTQPDGTSVPGEPASPISQRLPPKVESLESLYFTPIPARSQAPLESSLDSLGDVFLDSGRKTRSARRRTTQIINITMTKKLDVEEPDSANSSFYSTRSAPASQASLRATSSTQSLARLGSPDYGNSALLSLPGYRPTTRSSARRSQAGVSSGAPPGRNSFYMGTCQDEPEQLDDWNRIAELQQRNRVCPPHLKTCYPLESRPSLSLGTITDEEMKTGDPQETLRRASMQPIQIAEGTGITTRQQRKRVSLEPHQGPGTPESKKATSCFPRPMTPRDRHEGRKQSTTEAQKKAAPASTKQADRRQSMAFSILNTPKKLGNSLLRRGASKKALSKAPTCMTPSRIAPPAARTLRHCHLDQASKHKAVHDAHYPMD

SEQ ID NO: 869673 - protein, 1749 aa, Homo sapiens [sequence omitted]

SEQ ID NO: 869674 - protein, 1749 aa, Homo sapiens [sequence omitted]

SEQ ID NO: 869675 - protein, 1730 aa, Homo sapiens
MTLHATRGAALLSWVNSLHVADPVEAVLQLQDCSIFIKIIDRIHGTEEGQQILKQPVSERLDFVCSFLQKNRKHPSSPECLVSAQKVLEGSELELAKMTMLLLYHSTMSSKSPRDWEQFEYKIQAELAVILKFVLDHEDGLNLNEDLENFLQKAPVPSTCSSTFPEELSPPSHQAKREIRFLELQKVASSSSGNNFLSGSPASPMGDILQTPQFQMRRLKKQLADERSNRDELELELAENRKLLTEKDAQIAMMQQRIDRLALLNEKQAASPLEPKELEELRDKNESLTMRLHETLKQCQDLKTEKSQMDRKINQLSEENGDLSFKLREFASHLQQLQDALNELTEEHSKATQEWLEKQAQLEKELSAALQDKKCLEEKNEILQGKLSQLEEHLSQLQDNPPQEKGEVLGDVLQLETLKQEAATLAANNTQLQARVEMLETERGQQEAKLLAERGHFEEEKQQLSSLITDLQSSISNLSQAKEELEQASQAHGARLTAQVASLTSELTTLNATIQQQDQELAGLKQQAKEKQAQLAQTLQQQEQASQGLRHQVEQLSSSLKQKEQQLKEVAEKQEATRQDHAQQLATAAEEREASLRERDAALKQLEALEKEKAAKLEILQQQLQVANEARDSAQTSVTQAQREKAELSRKVEELQACVETARQEQHEAQAQVAELELQLRSEQQKATEKERVAQEKDQLQEQLQALKESLKVTKGSLEEEKRRAADALEEQQRCISELKAETRSLVEQHKRERKELEEERAGRKGLEARLQQLGEAHQAETEVLRRELAEAMAAQHTAESECEQLVKEVAAWRERYEDSQQEEAQYGAMFQEQLMTLKEECEKARQELQEAKEKVAGIESHSELQISRQQNELAELHANLARALQQVQEKEVRAQKLADDLSTLQEKMAATSKEVARLETLVRKAGEQQETASRELVKEPARAGDRQPEWLEEQQGRQFCSTQAALQAMEREAEQMGNELERLRAALMESQGQQQEERGQQEREVARLTQERGRAQADLALEKAARAELEMRLQNALNEQRVEFATLQEALAHALTEKEGKDQELAKLRGLEAAQIKELEELRQTVKQLKEQLAKKEKEHASGSGAQSEAAGRTEPTGPKLEALRAEVSKLEQQCQKQQEQADSLERSLEAERASRAERDSALETLQGQLEEKAQELGHSQSALASAQRELAAFRTKVQDHSKAEDEWKAQVARGRQEAERKNSLISSLEEEVSILNRQVLEKEGESKELKRLVMAESEKSQKLEERLRLLQAETASNSARAAERSSALREEVQSLREEAEKQRVASENLRQELTSQAERAEELGQELKAWQEKFFQKEQALSTLQLEHTSTQALVSELLPAKHLCQQLQAEQAAAEKRHREELEQSKQAAGGLRAELLRAQRELGELIPLRQKVAEQERTAQQLRAEKASYAEQLSMLKKAHGLLAEENRGLGERANLGRQFLEVELDQAREKYVQELAAVRADAETRLAEVQREAQSTARELEVMTAKYEGAKVKVLEERQRFQEERQKLTAQVEELSKKLADSDQASKVQQQKLKAVQAQGGESQQEAQRLQAQLNELQAQLSQKEQAAEHYKLQMEKAKTHYDAKKQQNQELQEQLRSLEQLQKENKELRAEAERLGHELQQAGLKTKEAEQTCRHLTAQVRSLEAQVRIWLADSPHSYSTGPLCPLLLGHCCLRLFFTLPLALSFSGCPCRPAASRPGQIPGGN

SEQ ID NO: 869676 - protein, 417 aa, Homo sapiens
MTLHATRGAALLSWVNSLHVADPVEAVLQLQDCSIFIKIIDRIHGTEEGQQILKQPVSERLDFVCSFLQKNRKHPSSPECLVSAQKVLEGSELELAKMTMLLLYHSTMSSKSPRDWEQFEYKIQAELAVILKFVLDHEDGLNLNEDLENFLQKAPVPSTCSSTFPEELSPPSHQAKREIRFLELQKVASSSSGNNFLSGSPASPMGDILQTPQFQMRRLKKQLADERSNRDELELELAENRKLLTEKDAQIAMMQQRIDRLALLNEKQAASPLEPKELEELRDKNESLTMRLHETLKQCQDLKTEKSQMDRKINQLSEENGDLSFKLREFASHLQQLQDALNELTEEHSKATQEWLEKQAQLEKELSAALQDKVTLCWGHSHSLDHMCKAESSLPLCSSGPLGIKLLSLQGSIVCCN

SEQ ID NO: 869677 - protein, 307 aa, Homo sapiens
MTLHATRGAALLSWVNSLHVADPVEAVLQLQDCSIFIKIIDRIHGTEEGQQILKQPVSERLDFVCSFLQKNRKHPSSPECLVSAQKVLEGSELELAKMTMLLLYHSTMSSKSPRDWEQFEYKIQAELAVILKFVLDHEDGLNLNEDLENFLQKAPVPSTCSSTFPEELSPPSHQAKREIRFLELQKVASSSSGNNFLSGSPASPMGDILQTPQFQMRRLKKQLADDSFLLASGLMILTFWNSSVSLLCNLTALTSSPGFTKECPPSLQDVWGHAEKGPPQADEPVMIESRTCGIGAMSLSITSALMT

SEQ ID NO: 869678 - protein, 139 aa, Homo sapiens
MTLHATRGAALLSWVNSLHVADPVEAVLQLQDCSIFIKIIDRIHGTEEGQQILKQPVSERLDFVCSFLQKNRKHPSSPECLVSAQKVLEGSELELAKMTMLLLYHSTMSSKSPRDWEQFEYKIQAELAVIRKFVLDQSD

SEQ ID NO: 869679 - protein, 2101 aa, Homo sapiens; identical to SEQ ID NO: 869661

SEQ ID NO: 869680 - protein, 2115 aa, Homo sapiens; identical to SEQ ID NO: 869667

SEQ ID NO: 869681 - protein, 979 aa, Homo sapiens
MTLHATRGAALLSWVNSLHVADPVEAVLQLQDCSIFIKIIDRIHGTEEGQQILKQPVSERLDFVCSFLQKNRKHPSSPECLVSAQKVLEGSELELAKMTMLLLYHSTMSSKSPRDWEQFEYKIQAELAVILKFVLDHEDGLNLNEDLENFLQKAPVPSTCSSTFPEELSPPSHQAKREIRFLELQKVASSSSGNNFLSGSPASPMGDILQTPQFQMRRLKKQLADERSNRDELELELAENRKLLTEKDAQIAMMQQRIDRLALLNEKQAASPLEPKELEELRDKNESLTMRLHETLKQCQDLKTEKSQMDRKINQLSEENGDLSFKLREFASHLQQLQDALNELTEEHSKATQEWLEKQAQLEKELSAALQDKKCLEEKNEILQGKLSQLEEHLSQLQDNPPQEKGEVLGDVLQVEELSKKLADSDQASKVQQQKLKAVQAQGGESQQEAQRLQAQLNELQAQLSQKEQAAEHYKLQMEKAKTHYDAKKQQNQELQEQLRSLEQLQKENKELRAEAERLGHELQQAGLKTKEAEQTCRHLTAQVRSLEAQVAHADQQLRDLGKFQVATDALKSREPQAKPQLDLSIDSLDLSCEEGTPLSITSKLPRTQPDGTSVPGEPASPISQRLPPKVESLESLYFTPIPARSQAPLESSLDSLGDVFLDSGRKTRSARRRTTQIINITMTKKLDVEEPDSANSSFYSTRSAPASQASLRATSSTQSLARLGSPDYGNSALLSLPGYRPTTRSSARRSQAGVSSGAPPGRNSFYMGTCQDEPEQLDDWNRIAELQQRNRVCPPHLKTCYPLESRPSLSLGTITDEEMKTGDPQETLRRASMQPIQIAEGTGITTRQQRKRVSLEPHQGPGTPESKKATSCFPRPMTPRDRHEGRKQSTTEAQKKAAPASTKQADRRQSMAFSILNTPKKLGNSLLRRGASKKALSKASPNTRSGTRRSPRIATTTASAATAAAIGATPRAKGKAKH

SEQ ID NO: 869682 - protein, 2086 aa, Homo sapiens
VVSSWPVVALGLSVAYGYTWVPRHRIRPHGTEEGQQILKQPVSERLDFVCSFLQKNRKHPSSPECLVSAQKVLEGSELELAKMTMLLLYHSTMSSKSPRDWEQFEYKIQAELAVILKFVLDHEDGLNLNEDLENFLQKAPVPSTCSSTFPEELSPPSHQAKREIRFLELQKVASSSSGNNFLSGSPASPMGDILQTPQFQMRRLKKQLADERSNRDELELELAENRKLLTEKDAQIAMMQQRIDRLALLNEKQAASPLEPKELEELRDKNESLTMRLHETLKQCQDLKTEKSQMDRKINQLSEENGDLSFKLREFASHLQQLQDALNELTEEHSKATQEWLEKQAQLEKELSAALQDKKCLEEKNEILQGKLSQLEEHLSQLQDNPPQEKGEVLGDVLQLETLKQEAATLAANNTQLQARVEMLETERGQQEAKLLAERGHFEEEKQQLSSLITDLQSSISNLSQAKEELEQASQAHGARLTAQVASLTSELTTLNATIQQQDQELAGLKQQAKEKQAQLAQTLQQQEQASQGLRHQVEQLSSSLKQKEQQLKEVAEKQEATRQDHAQQLATAAEEREASLRERDAALKQLEALEKEKAAKLEILQQQLQVANEARDSAQTSVTQAQREKAELSRKVEELQACVETARQEQHEAQAQVAELELQLRSEQQKATEKERVAQEKDQLQEQLQALKESLKVTKGSLEEEKRRAADALEEQQRCISELKAETRSLVEQHKRERKELEEERAGRKGLEARLQQLGEAHQAETEVLRRELAEAMAAQHTAESECEQLVKEVAAWRERYEDSQQEEAQYGAMFQEQLMTLKEECEKARQELQEAKEKVAGIESHSELQISRQQNELAELHANLARALQQVQEKEVRAQKLADDLSTLQEKMAATSKEVARLETLVRKAGEQQETASRELVKEPARAGDRQPEWLEEQQGRQFCSTQAALQAMEREAEQMGNELERLRAALMESQGQQQEERGQQEREVARLTQERGRAQADLALEKAARAELEMRLQNALNEQRVEFATLQEALAHALTEKEGKDQELAKLRGLEAAQIKELEELRQTVKQLKEQLAKKEKEHASGSGAQSEAAGRTEPTGPKLEALRAEVSKLEQQCQKQQEQADSLERSLEAERASRAERDSALETLQGQLEEKAQELGHSQSALASAQRELAAFRTKVQDHSKAEDEWKAQVARGRQEAERKNSLISSLEEEVSILNRQVLEKEGESKELKRLVMAESEKSQKLEERLRLLQAETASNSARAAERSSALREEVQSLREEAEKQRVASENLRQELTSQAERAEELGQELKAWQEKFFQKEQALSTLQLEHTSTQALVSELLPAKHLCQQLQAEQAAAEKRHREELEQSKQAAGGLRAELLRAQRELGELIPLRQKVAEQERTAQQLRAEKASYAEQLSMLKKAHGLLAEENRGLGERANLGRQFLEVELDQAREKYVQELAAVRADAETRLAEVQREAQSTARELEVMTAKYEGAKVKVLEERQRFQEERQKLTAQVEELSKKLADSDQASKVQQQKLKAVQAQGGESQQEAQRLQAQLNELQAQLSQKEQAAEHYKLQMEKAKTHYDAKKQQNQELQEQLRSLEQLQKENKELRAEAERLGHELQQAGLKTKEAEQTCRHLTAQVRSLEAQVAHADQQLRDLGKFQVATDALKSREPQAKPQLDLSIDSLDLSCEEGTPLSITSKLPRTQPDGTSVPGEPASPISQRLPPKVESLESLYFTPIPARSQAPLESSLDSLGDVFLDSGRKTRSARRRTTQIINITMTKKLDVEEPDSANSSFYSTRSAPASQASLRATSSTQSLARLGSPDYGNSALLSLPGYRPTTRSSARRSQAGVSSGAPPGRNSFYMGTCQDEPEQLDDWNRIAELQQRNRVCPPHLKTCYPLESRPSLSLGTITDEEMKTGDPQETLRRASMQPIQIAEGTGITTRQQRKRVSLEPHQGPGTPESKKATSCFPRPMTPRDRHEGRKQSTTEAQKKAAPASTKQADRRQSMAFSILNTPKKLGNSLLRRGASKKALSKASPNTRSGTRRSPRIATTTASAATAAAIGATPRAKGKAKH

SEQ ID NO: 869683 - protein, 1749 aa, Homo sapiens [sequence omitted]

SEQ ID NO: 869684 - protein, 995 aa, Homo sapiens
MAPRWANAPCKLEQQCQKQQEQADSLERSLEAERASRAERDSALETLQGQLEEKAQELGHSQSALASAQRELAAFRTKVQDHSKAEDEWKAQVARGRQEAERKNSLISSLEEEVSILNRQVLEKEGESKELKRLVMAESEKSQKLEERLRLLQAETASNSARAAERSSALREEVQSLREEAEKQRVASENLRQELTSQAERAEELGQELKAWQEKFFQKEQALSTLQLEHTSTQALVSELLPAKHLCQQLQAEQAAAEKRHREELEQSKQAAGGLRAELLRAQRELGELIPLRQKVAEQERTAQQLRAEKASYAEQLSMLKKAHGLLAEENRGLGERANLGRQFLEVELDQAREKYVQELAAVRADAETRLAEVQREAQSTARELEVMTAKYEGAKVKVLEERQRFQEERQKLTAQVEQLEVFQREQTKQVEELSKKLADSDQASKVQQQKLKAVQAQGGESQQEAQRLQAQLNELQAQLSQKEQAAEHYKLQMEKAKTHYDAKKQQNQELQEQLRSLEQLQKENKELRAEAERLGHELQQAGLKTKEAEQTCRHLTAQVRSLEAQVAHADQQLRDLGKFQVATDALKSREPQAKPQLDLSIDSLDLSCEEGTPLSITSKLPRTQPDGTSVPGEPASPISQRLPPKVESLESLYFTPIPARSQAPLESSLDSLGDVFLDSGRKTRSARRRTTQIINITMTKKLDVEEPDSANSSFYSTRSAPASQASLRATSSTQSLARLGSPDYGNSALLSLPGYRPTTRSSARRSQAGVSSGAPPGRNSFYMGTCQDEPEQLDDWNRIAELQQRNRVCPPHLKTCYPLESRPSLSLGTITDEEMKTGDPQETLRRASMQPIQIAEGTGITTRQQRKRVSLEPHQGPGTPESKKATSCFPRPMTPRDRHEGRKQSTTEAQKKAAPASTKQADRRQSMAFSILNTPKKLGNSLLRRGASKKALSKASPNTRSGTRRSPRIATTTASAATAAAIGATPRAKGKAKH

SEQ ID NO: 869685 - protein, 1749 aa, Homo sapiens [sequence omitted]

SEQ ID NO: 869686 - protein, 2115 aa, Homo sapiens; identical to SEQ ID NO: 869667

SEQ ID NO: 869687 - protein, 305 aa, Homo sapiens
RHRLAVVGTWITVSVLAWECANSSFYSTRSAPASQASLRATSSTQSLARLGSPDYGNSALLSLPGYRPTTRSSARRSQAGVSSGAPPGRNSFYMGTCQDEPEQLDDWNRIAELQQRNRVCPPHLKTCYPLESRPSLSLGTITDEEMKTGDPQETLRRASMQPIQIAEGTGITTRQQRKRVSLEPHQGPGTPESKKATSCFPRPMTPRDRHEGRKQSTTEAQKKAAPASTKQADRRQSMAFSILNTPKKLGNSLLRRGASKKALSKASPNTRSGTRRSPRIATTTASAATAAAIGATPRAKGKAKH

SEQ ID NO: 869688 - protein, 251 aa, Homo sapiens
MAIKRLSSLPGDRCYHSQFCSTVPRRRCPERPLRRNSFYMGTCQDEPEQLDDWNRIAELQQRNRVCPPHLKTCYPLESRPSLSLGTITDEEMKTGDPQETLRRASMQPIQIAEGTGITTRQQRKRVSLEPHQGPGTPESKKATSCFPRPMTPRDRHEGRKQSTTEAQKKAAPASTKQADRRQSMAFSILNTPKKLGNSLLRRGASKKALSKASPNTRSGTRRSPRIATTTASAATAAAIGATPRAKGKAKH

SEQ ID NO: 869689 - protein, 1775 aa, Homo sapiens
MTLHATRGAALLSWVNSLHVADPVEAVLQLQDCSIFIKIIDRIHGTEEGQQILKQPVSERLDFVCSFLQKNRKHPSSPECLVSAQKVLEGSELELAKMTMLLLYHSTMSSKSPRDWEQFEYKIQAELAVILKFVLDHEDGLNLNEDLENFLQKAPVPSTCSSTFPEELSPPSHQAKREIRFLELQKVASSSSGNNFLSGSPASPMGDILQTPQFQMRRLKKQLADERSNRDELELELAENRKLLTEKDAQIAMMQQRIDRLALLNEKQAASPLEPKELEELRDKNESLTMRLHETLKQCQDLKTEKSQMDRKINQLSEENGDLSFKLREFASHLQQLQDALNELTEEHSKATQEWLEKQAQLEKELSAALQDKKCLEEKNEILQGKLSQLEEHLSQLQDNPPQEKGEVLGDVLQLETLKQEAATLAANNTQLQARVEMLETERGQQEAKLLAERGHFEEEKQQLSSLITDLQSSISNLSQAKEELEQASQAHGARLTAQVASLTSELTTLNATIQQQDQELAGLKQQAKEKQAQLAQTLQQQEQASQGLRHQVEQLSSSLKQKEQQLKEVAEKQEATRQDHAQQLATAAEEREASLRERDAALKQLEALEKEKAAKLEILQQQLQVANEARDSAQTSVTQAQREKAELSRKVEELQACVETARQEQHEAQAQVAELELQLRSEQQKATEKERVAQEKDQLQEQLQALKESLKVTKGSLEEEKRRAADALEEQQRCISELKAETRSLVEQHKRERKELEEERAGRKGLEARLQQLGEAHQAETEVLRRELAEAMAAQHTAESECEQLVKEVAAWRERYEDSQQEEAQYGAMFQEQLMTLKEECEKARQELQEAKEKVAGIESHSELQISRQQNELAELHANLARALQQVQEKEVRAQKLADDLSTLQEKMAATSKEVARLETLVRKAGEQQETASRELVKEPARAGDRQPEWLEEQQGRQFCSTQAALQAMEREAEQMGNELERLRAALMESQGQQQEERGQQEREVARLTQERGRAQADLALEKAARAELEMRLQNALNEQRVEFATLQEALAHALTEKEGKDQELAKLRGLEAAQIKELEELRQTVKQLKEQLAKKEKEHASGSGAQSEAAGRTEPTGPKLEALRAEVSKLEQQCQKQQEQADSLERSLEAERASRAERDSALETLQGQLEEKAQELGHSQSALASAQRELAAFRTKVQDHSKAEDEWKAQVARGRQEAERKNSLISSLEEEVSILNRQVLEKEGESKELKRLVMAESEKSQKLEERLRLLQAETASNSARAAERSSALREEVQSLREEAEKQRVASENLRQELTSQAERAEELGQELKAWQEKFFQKEQALSTLQLEHTSTQALVSELLPAKHLCQQLQAEQAAAEKRHREELEQSKQAAGGLRAELLRAQRELGELIPLRQKVAEQERTAQQLRAEKASYAEQLSMLKKAHGLLAEENRGLGERANLGRQFLEVELDQAREKYVQELAAVRADAETRLAEVQREAQSTARELEVMTAKYEGAKVKVLEERQRFQEERQKLTAQVEQLEVFQREQTKQVEELSKKLADSDQASKVQQQKLKAVQAQGGESQQEAQRLQAQLNELQAQLSQKEQAAEHYKLQMEKAKTHYDAKKQQNQELQEQLRSLEQLQKENKELRAEAERLGHELQQAGLKTKEAEQTCRHLTAQVRSLEAQVAHADQQLRDLGKFQVATDALKSREPQAKPQLDLSIDSQANSSQTPRDSDACPHPGLVPGPSLAPSRSWPRGPGAWTVWALSLPCLLFS

SEQ ID NO: 869690 - protein, 1730 aa, Homo sapiens; identical to SEQ ID NO: 869675

SEQ ID NO: 869691 - protein, 345 aa, Homo sapiens
MTLHATRGAALLSWVNSLHVADPVEAVLQLQDCSIFIKIIDRIHGTEEGQQILKQPVSERLDFVCSFLQKNRKHPSSPECLVSAQKVLEGSELELAKMTMLLLYHSTMSSKSPRDWEQFEYKIQAELAVILKFVLDHEDGLNLNEDLENFLQKAPVPSTCSSTFPEELSPPSHQAKREIRFLELQKVASSSSGNNFLSGSPASPMGDILQTPQFQMRRLKKQLADERSNRDELELELAENRKLLTEKDAQIAMMQQRIDRLALLNEKQAASPLEPKELEELRDKNESLTMRLHETLKQCQDLKTEKSQMDRKINQLSEENGDLSFKLREFASHLQQLAPELAARP

SEQ ID NO: 869692 - protein, 90 aa, Homo sapiens
MDVPWDLRASEGNGKLLYSARDCTLQQIHSVFQKLDVEEPDSANSSFYSTRSAPASQASLRATSSTQSLARLGSPDYGNSALLSLPGYRP

SEQ ID NO: 869693 - protein, 277 aa, Homo sapiens
ANKAHTGQGSCWVATLASAMIPPADSLLKYDTPVLVSRNTEKRSPKARLLKVSPQQPGPSGSAPQPPKTKLPSTPCVPDPTKQAEEILNAILPPREWVEDTQLWIQQVSSTPSTRMDVVHLQEQLDLKLQQRQARETGICPVRRELYSQCFDELIREVTINCAERGLLLLRVRDEIRMTIAAYQTLYESSVAFGMRKALQAEQGKSDMERKIAELETEKRDLERQVNEQKAKCEATEKRESERRQVEEKKHNEEIQFLKRTNQQLKAQLEGIIAPKK

SEQ ID NO: 869694 - protein, 93 aa, Homo sapiens
RERKVGPGDRHSAYGGPAPALVSEFPQYFIDYYFHYLSKRQVNEQKAKCEATEKRESERRQVEEKKHNEEIQFLKRTNQQLKAQLEGIIAPKK

SEQ ID NO: 869695 - protein, 165 aa, Homo sapiens
PLKCTLLYLQEQLDLKLQQRQARETGICPVRRELYSQCFDELIREVTINCAERGLLLLRVRDEIRMTIAAYQTLYESSVAFGMRKALQAEQGKSDMERKIAELETEKRDLERQVNEQKAKCEATEKRESERRQVEEKKHNEEIQFLKRTNQQLKAQLEGIIAPKK

SEQ ID NO: 869696 - protein, 70 aa, Homo sapiens
EKRESERRQVEEKKHNEEIQFLKRTNQQLKVINAQGGVEVPPALRPSPTGQAFGSFSMAFKCLSTCTAKG

SEQ ID NO: 869697 - protein, 95 aa, Homo sapiens
ANKAHTGQGSCWVATLASAMIPPADSLLKYDTPVLVSRNTEKRSPKARLLKVSPQQPGPSGSAPQPPKTKLPSTPCVPDPTKQAEEILNAILPPR

SEQ ID NO: 869698 - protein, 132 aa, Homo sapiens
MPYYPQDELIREVTINCAERGLLLLRVRDEIRMTIAAYQTLYESSVAFGMRKALQAEQGKSDMERKIAELETEKRDLERQVNEQKAKCEATEKRESERRQVEEKKHNEEIQFLKRTNQQLKAQLEGIIAPKK

SEQ ID NO: 869699 - protein, 390 aa, Homo sapiens
MLPGVGVFGTSLTARVIIPLLKDEGFAVKALWGRTQEEAEELAKEMSVPFYTSRIDEVLLHQDVDLVCINLPPPLTRQIAVKTLGIGKNVICDRTATPLDAFRMTSAAHYYPKLMSIMGNVLRFLPAFVRMKQLIEEGYVGEPLVCEVQVHGGSLLGKKYNWSCDDLMGGGGLHSVGTYIIDLLTFLTGQKAVKVHGLLKTFVKQTDHIKGIRQITSDDFCTFQMVLEGGVCCTVTLNFNVPGEFKQDVTVVGSAGRLLAVGTDLYGQRNSAPEQELLVQDATPVSNSLLPEKAFSDIPSPYLRGTIKMMQAVRQAFQDQDDRRTWDGRPLTMAATFDDCLYALCVVDTIKRSSQTGEWQNIAIMTEEPELSPAYLISEAMRRSRMSLYC

SEQ ID NO: 869700 - protein, 134 aa, Homo sapiens
MGDSRRDVLHEPAIALLSSPQTQSRLQIDAFIARRCWGSQWDITGYIHQQDFPTAVFIGFSNEFNICIPHPFTEWLQCVRKYSQSWGVRKGPKAYKIWHVLWRELIIYPEPTHHFWNEKRTSFYGGLTMCQIVV

SEQ ID NO: 869701 - protein, 148 aa, Homo sapiens
MLPGVGVFGTSLTARVIIPLLKDEGFAVKALWGRTQEEAEELAKEMSVPFYTSRIDEVLLHQDVDLVCINLPPPLTRQIAVKTLEPGHQRKKISRQKNTGEKKMPRGSVQLSFCSLQHPHMGHLFTPHDAALGESQGTGFKPLGMQPV

SEQ ID NO: 869702 - protein, 287 aa, Homo sapiens
MTSAAHYYPKLMSIMGNVLRFLPAFVRMKQLIEEGYVGEPLVCEVQVHGGSLLGKKYNWSCDDLMGGGGLHSVGTYIIDLLTFLTGQKAVKVHGLLKTFVKQTDHIKGIRQITSDDFCTFQMVLEGGVCCTVTLNFNVPGEFKQDVTVVGSAGRLLAVGTDLYGQRNSAPEQELLVQDATPVSNSLLPEKAFSDIPSPYLRGTIKMMQAVRQAFQDQDDRRTWDGRPLTMAATFDDCLYALCVVDTIKRSSQTGEWQNIAIMTEEPELSPAYLISEAMRRSRMSLYC

SEQ ID NO: 869703 - protein, 168 aa, Homo sapiens
MLPGVGVFGTSLTARVIIPLLKDEGFAVKALWGRTQEEAEELAKEMSVPFYTSRIDEVLLHQDVDLVCINLPPPLTRQIAVKTLDVILQFSRTRAPWGQVPGWNLSCLSCLEIPTRKAGTRPRLDCQPHTGHTPPLLAPVLDGSGCQATRLSALSRLLSRYRRQACNS

SEQ ID NO: 869704 - protein, 217 aa, Homo sapiens
MPVRTECPPPAGASAASAASLIPPPPINTQQPGVATSLLYSGSKFRGHQKSKGNSYDVEVVLQHVDTGNSYLCGYLKIKGLTEEYPTLTTFFEGEIISKKHPFLTRKWDADEDVDRKHWGKFLAFYQYAKSFNSDDFDYEELKNGDYVFMRWKEQFLVPDHTIKDISGASFAGFYYICFQKSAASIEGYYYHRSSEWYQSLNLTHVPEHSAPIYEFR

SEQ ID NO: 869705 - protein, 217 aa, Homo sapiens; identical to SEQ ID NO: 869704

SEQ ID NO: 869706 - protein, 243 aa, Homo sapiens
GTEAGCFVRGGVPLPLPPALAPGDPAMPVRTECPPPAGASAASAASLIPPPPINTQQPGVATSLLYSGSKFRGHQKSKGNSYDVEVVLQHVDTGNSYLCGYLKIKGLTEEYPTLTTFFEGEIISKKHPFLTRKWDADEDVDRKHWGKFLAFYQYAKSFNSDDFDYEELKNGDYVFMRWKEQFLVPDHTIKDISGASFAGFYYICFQKSAASIEGYYYHRSSEWYQSLNLTHVPEHSAPIYEFR

SEQ ID NO: 869707 - protein, 236 aa, Homo sapiens
MPVRTECPPPAGASAASAASLIPPPPINTQQPGVATSLLYSGSKFRGHQKSKGNSYDVEVVLQHVDTGNSYLCGYLKIKGLTEEYPTLTTFFEGEIISKKHPFLTRKWDADEDVDRKHWNIGRYLDLQTLLDWTETFWGKFLAFYQYAKSFNSDDFDYEELKNGDYVFMRWKEQFLVPDHTIKDISGASFAGFYYICFQKSAASIEGYYYHRSSEWYQSLNLTHVPEHSAPIYEFR

SEQ ID NO: 869708 - protein, 105 aa, Homo sapiens
MLIEKHWGKFLAFYQYAKSFNSDDFDYEELKNGDYVFMRWKEQFLVPDHTIKDISGASFAGFYYICFQKSAASIEGYYYHRSSEWYQSLNLTHVPEHSAPIYEFR

SEQ ID NO: 869709 - protein, 197 aa, Homo sapiens
MPVRTECPPPAGASAASAASLIPPPPINTQQPGVATSLLYSGSKFRGHQKSKGNSYDVEVVLQHVDTGNSYLCGYLKIKGLTEEYPTLTTFFEGEIISKKHPFLTRKWDADEDVDRKHWGKFLAFYQYAKSFNSDDFDYEELKNGDYVFMRWKEQFLVPDHTIKDISGASFAGFYYICFQKSAASIEGYYYHRSSEW

SEQ ID NO: 869710 - protein, 1203 aa, Homo sapiens
MDLRDFYLLAALIACLRLDSAIAQELIYTIREELPENVPIGNIPKDLNISHINAATGTSASLVYRLVSKAGDAPLVKVSSSTGEIFTTSNRIDREKLCAGASYAEENECFFELEVVILPNDFFRLIKIKIIVKDTNDNAPMFPSPVINISIPENTLINSRFPIPSATDPDTGFNGVQHYELLNGQSVFGLDIVETPEGEKWPQLIVQQNLDREQKDTYVMKIKVEDGGTPQKSSTAILQVTVSDVNDNRPVFKEGQVEVHIPENAPVGTSVIQLHATDADIGSNAEIRYIFGAQVAPATKRLFALNNTTGLITVQRSLDREETAIHKVTVLASDGSSTPARATVTINVTDVNDNPPNIDLRYIISPINGTVYLSEKDPVNTKIALITVSDKDTDVNGKVICFIEREVPFHLKAVYDNQYLLETSSLLDYEGTKEFSFKIVASDSGKPSLNQTALVRVKLEDENDNPPIFNQPVIELSVSENNRRGLYLTTISATDEDSGKNADIVYQLGPNASFFDLDRKTGVLTASRVFDREEQERFIFTVTARDNGTPPLQSQAAVIVTVLDENDNSPKFTHNHFQFFVSENLPKYSTVGVITVTDADAGENKAVTLSILNDNDNFVLDPYSGVIKSNVSFDREQQSSYTFDVKATDGGQPPRSSTAKVTINVMDVNDNSPVVISPPSNTSFKLVPLSAIPGSVVAEVFAVDVDTGMNAELKYTIVSGNNKGLFRIDPVTGNITLEEKPAPTDVGLHRLVVNISDLGYPKSLHTLVLVFLYVNDTAGNASYIYDLIRRTMETPLDRNIGDSSQPYQNEDYLTIMIAIIAGAMVVIVVIFVTVLVRCRHASRFKAAQRSKQGAEWMSPNQENKQNKKKKRKKRKSPKSSLLNFVTIEESKPDDAVHEPINGTISLPAELEEQSIGRFDWGPAPPTTFKPNSPDLAKHYKSASPQPAFHLKPDTPVSVKKHHVIQELPLDNTFVGGCDTLSKRSSTSSDHFSASECSSQGGFKTKGPLHTRQSQRRVTFHLPDGSQESCSDSGLGDHEPVGSGTLISHPLPLVQPQDEFYDQASPDKRTEADGNSDPNSDGPLGPRGLAEATEMCTQECLVLGHSDNCWMPPGLGPYQHPKSPLSTFAPQKEWVKKDKLVNGHTLTRAWKEDSNRNQFNDRKQYGSNEGHFNNGSHMTDIPLANLKSYKQAGGATESPKEHQL

SEQ ID NO: 869711 - protein, 102 aa, Homo sapiens
MTRPLRTRGLKQMATLIPTLVSPLQNFDCLELFWFCSALELSKIIVGGKDEHLVIFLLALLLLLYSLRYTFNMFDMILAVKLYDVSSFYEPLKKKKTCYKYN

SEQ ID NO: 869712 - protein, 1180 aa, Homo sapiens
MDLRDFYLLAALIACLRLDSAIAQELIYTIREELPENVPIGNIPKDLNISHINAATGTSASLVYRLVSKAGDAPLVKVSSSTGEIFTTSNRIDREKLCAGASYAEENECFFELEVVILPNDFFRLIKIKIIVKDTNDNAPMFPSPVINISIPENTLINSRFPIPSATDPDTGFNGVQHYELLNGQSVFGLDIVETPEGEKWPQLIVQQNLDREQKDTYVMKIKVEDGGTPQKSSTAILQVTVSDVNDNRPVFKEGQVEVHIPENAPVGTSVIQLHATDADIGSNAEIRYIFGAQVAPATKRLFALNNTTGLITVQRSLDREETAIHKVTVLASDGSSTPARATVTINVTDVNDNPPNIDLRYIISPINGTVYLSEKDPVNTKIALITVSDKDTDVNGKVICFIEREVPFHLKAVYDNQYLLETSSLLDYEGTKEFSFKIVASDSGKPSLNQTALVRVKLEDENDNPPIFNQPVIELSVSENNRRGLYLTTISATDEDSGKNADIVYQLGPNASFFDLDRKTGVLTASRVFDREEQERFIFTVTARDNGTPPLQSQAAVIVTVLDENDNSPKFTHNHFQFFVSENLPKYSTVGVITVTDADAGENKAVTLSILNDNDNFVLDPYSGVIKSNVSFDREQQSSYTFDVKATDGGQPPRSSTAKVTINVMDVNDNSPVVISPPSNTSFKLVPLSAIPGSVVAEVFAVDVDTGMNAELKYTIVSGNNKGLFRIDPVTGNITLEEKPAPTDVGLHRLVVNISDLGYPKSLHTLVLVFLYVNDTAGNASYIYDLIRRTMETPLDRNIGDSSQPYQNEDYLTIMIAIIAGAMVVIVVIFVTVLVRCRHASRFKAAQRSKQGAEWMSPNQENKQNKKKKRKKRKSPKSSLLNFVTIEESKPDDAVHEPINGTISLPAELEEQSIGRFDWGPAPPTTFKPNSPDLAKHYKSASPQPAFHLKPDTPVSVKKHHVIQELPLDNTFVGGCDTLSKRSSTSSDHFSASECSSQGGFKTKGPLHTRQKCPSSTGFHIQENEESHYEPQDEFYDQASPDKRTEADGNSDPNSDGPLGPRGLAEATEMCTQECLVLGHSDNCWMPPGLGPYQHPKSPLSTFAPQKEWVKKDKLVNGHTLTRAWKEDSNRNQFNDRKQYGSNEGHFNNGSHMTDIPLANLKSYKQAGGATESPKEHQL

SEQ ID NO: 869713 - protein, 1032 aa, Homo sapiens
MDLRDFYLLAALIACLRLDSAIAQELIYTIREELPENVPIGNIPKDLNISHINAATGTSASLVYRLVSKAGDAPLVKVSSSTGEIFTTSNRIDREKLCAGASYAEENECFFELEVVILPNDFFRLIKIKIIVKDTNDNAPMFPSPVINISIPENTLINSRFPIPSATDPDTGFNGVQHYELLNGQSVFGLDIVETPEGEKWPQLIVQQNLDREQKDTYVMKIKVEDGGTPQKSSTAILQVTVSDVNDNRPVFKEGQVEVHIPENAPVGTSVIQLHATDADIGSNAEIRYIFGAQVAPATKRLFALNNTTGLITVQRSLDREETAIHKVTVLASDGSSTPARATVTINVTDVNDNPPNIDLRYIISPINGTVYLSEKDPVNTKIALITVSDKDTDVNGKVICFIEREVPFHLKAVYDNQYLLETSSLLDYEGTKEFSFKIVASDSGKPSLNQTALVRVKLEDENDNPPIFNQPVIELSVSENNRRGLYLTTISATDEDSGKNADIVYQLGPNASFFDLDRKTGVLTASRVFDREEQERFIFTVTARDNGTPPLQSQAAVIVTVLDENDNSPKFTHNHFQFFVSENLPKYSTVGVITVTDADAGENKAVTLSILNDNDNFVLDPYSGVIKSNVSFDREQQSSYTFDVKATDGGQPPRSSTAKVTINVMDVNDNSPVVISPPSNTSFKLVPLSAIPGSVVAEVFAVDVDTGMNAELKYTIVSGNNKGLFRIDPVTGNITLEEKPAPTDVGLHRLVVNISDLGYPKSLHTLVLVFLYVNDTAGNASYIYDLIRRTMETPLDRNIGDSSQPYQNEDYLTIMIAIIAGAMVVIVVIFVTVLVRCRHASRFKAAQRSKQGAEWMSPNQENKQNKKKKRKKRKSPKSSLLNFVTIEESKPDDAVHEPINGTISLPAELEEQSIGRFDWGPAPPTTFKPNSPDLAKHYKSASPQPAFHLKPDTPVSVKKHHVIQELPLDNTFVGGCDTLSKRSSTSSDHFSASECSSQGGFKTKGPLHTRQVNEHFYWSISTAYKCPVNQY

SEQ ID NO: 869714 - protein, 1138 aa, Homo sapiens
MDLRDFYLLAALIACLRLDSAIAQELIYTIREELPENVPIGNIPKDLNISHINAATGTSASLVYRLVSKAGDAPLVKVSSSTGEIFTTSNRIDREKLCAGASYAEENECFFELEVVILPNDFFRLIKIKIIVKDTNDNAPMFPSPVINISIPENTLINSRFPIPSATDPDTGFNGVQHYELLNGQSVFGLDIVETPEGEKWPQLIVQQNLDREQKDTYVMKIKVEDGGTPQKSSTAILQVTVSDVNDNRPVFKEGQVEVHIPENAPVGTSVIQLHATDADIGSNAEIRYIFGAQVAPATKRLFALNNTTGLITVQRSLDREETAIHKVTVLASDGSSTPARATVTINVTDVNDNPPNIDLRYIISPINGTVYLSEKDPVNTKIALITVSDKDTDVNGKVICFIEREVPFHLKAVYDNQYLLETSSLLDYEGTKEFSFKIVASDSGKPSLNQTALVRVKLEDENDNPPIFNQPVIELSVSENNRRGLYLTTISATDEDSGKNADIVYQLGPNASFFDLDRKTGVLTASRVFDREEQERFIFTVTARDNGTPPLQSQAAVIVTVLDENDNSPKFTHNHFQFFVSENLPKYSTVGVITVTDADAGENKAVTLSILNDNDNFVLDPYSGVIKSNVSFDREQQSSYTFDVKATDGGQPPRSSTAKVTINVMDVNDNSPVVISPPSNTSFKLVPLSAIPGSVVAEVFAVDVDTGMNAELKYTIVSGNNKGLFRIDPVTGNITLEEKPAPTDVGLHRLVVNISDLGYPKSLHTLVLVFLYVNDTAGNASYIYDLIRRTMETPLDRNIGDSSQPYQNEDYLTIMIAIIAGAMVVIVVIFVTVLVRCRHASRFKAAQRSKQGAEWMSPNQENKQNKKKKRKKRKSPKSSLLNFVTIEESKPDDAVHEPINGTISLPAELEEQSIGRFDWGPAPPTTFKPNSPDLAKHYKSASPQPAFHLKPDTPVSVKKHHVIQELPLDNTFVGGCDTLSKRSSTSSDHFSASECSSQGGFKTKGPLHTRQKCPSSTGFHIQENEESHYEPQDEFYDQASPDKRTEADGNSDPNSGESPSNFDCLELFWFCSALELSKIIVGGKDEHLVIFLLALLLLLYSLRYTFNMFDMILAVKLYDVSSFYEPLKKKKTCYKYN

SEQ ID NO: 869715 - protein, 68 aa, Homo sapiens
MVYYPELFVWVSQEPFPNKDMEGRLPKGRLPVPKEVNRKKNDETNAASLTPLGSSELRSPRISYLHFF

SEQ ID NO: 869716 - protein, 77 aa, Homo sapiens
RFVSPGRRAVQWGRRGERGARGAGAGCRGARACWPLADGAQSRRFLPSVERRESEQGAGLLSVGLPGLKRGRIEAQD

SEQ ID NO: 869717 - protein, 115 aa, Homo sapiens
FPLSLRVSLSLSLSLPPICLSSMLPFFNHICVSGVERRESEQGAGLLSVYYPELFVWVSQEPFPNKDMEGRLPKGRLPVPKEVNRKKNDETNAASLTPLGSSELRSPRISYLHFF

SEQ ID NO: 869718 - protein, 115 aa, Homo sapiens; identical to SEQ ID NO: 869717

SEQ ID NO: 869719 - protein, 77 aa, Homo sapiens; identical to SEQ ID NO: 869716

SEQ ID NO: 869720 - protein, 77 aa, Homo sapiens; identical to SEQ ID NO: 869716

SEQ ID NO: 869721 - protein, 108 aa, Homo sapiens
  misc_feature (34)..(36): Xaa can be any naturally occurring amino acid
  misc_feature (51)..(51): Xaa can be any naturally occurring amino acid
  misc_feature (76)..(76): Xaa can be any naturally occurring amino acid
  misc_feature (86)..(86): Xaa can be any naturally occurring amino acid
  misc_feature (99)..(99): Xaa can be any naturally occurring amino acid
MPTGVIVIRETAVAWSTSLPKESHRPPPDSTVAXXXLAPAYEVFPITGPLXLLGHSWTVMFFKFFLFIKSEGILLXFLLMDVRKSXLLPCDCPVKYLTXAFMCFPNLL

SEQ ID NO: 869722 - protein, 74 aa, Homo sapiens
PTRTPTRRGERVNRERGFVCWSPWTEERENRSPRLRFSKWFITQNSLSGSVKNHFQTRTWREGFLREDFLSQRK

SEQ ID NO: 869723 - protein, 77 aa, Homo sapiens; identical to SEQ ID NO: 869716

SEQ ID NO: 869724 - protein, 115 aa, Homo sapiens; identical to SEQ ID NO: 869717

SEQ ID NO: 869725 - protein, 39 aa, Homo sapiens
MVYYPELFVWVSQEPFPNKDMEGRLPKKLPPKEVPQETD

SEQ ID NO: 869726 - protein, 66 aa, Homo sapiens
MSSTTQTPTALTQPVHSCLFTHTAPDCFLQRLRVPPPPFFSFRCNKPSSLCSSIVCISLYFIHVLF

SEQ ID NO: 869727 - protein, 216 aa, Homo sapiens
MGWIRGRRSRHSWEMSEFHNYNLDLKKSDFSTRWQKQRCPVVKSKCRENASPFFFCCFIAVAMGIRFIIMVAIWSAVFLNSLFNQEVQIPLTESYCGPCPKNWICYKNNCYQFFDESKNWYESQASCMSQNASLLKVYSKEDQDLLKLVKSYHWMGLVHIPTNGSWQWEDGSILSPNLLTIIEMQKGDCALYASSFKGYIENCSTPNTYICMQRTV

SEQ ID NO: 869728 - protein, 216 aa, Homo sapiens; identical to SEQ ID NO: 869727

SEQ ID NO: 869729 - protein, 141 aa, Homo sapiens [sequence omitted]

SEQ ID NO: 869730 - protein, 216 aa, Homo sapiens; identical to SEQ ID NO: 869727

SEQ ID NO: 869731 - protein, 121 aa, Homo sapiens
ENLNFRENLPSHFKFKEYCPQVFRNLRDRFGIDDQDYLVSLTRNPPSESEGSDGRFLISYDRTLVIKEVSSEESTSMTQTSPTRLTCLTPHWGSNFHMSIGWGQTKSKHSISRSSKGKSQR

SEQ ID NO: 869732 - protein, 399 aa, Homo sapiens
MAKSIQAWGKMFDIAALHQNLTPLLGLEPFSGASLPINELSQVPPPVMLLPDDFKASSKIKVNNHLFHRENLPSHFKFKEYCPQVFRNLRDRFGIDDQDYLVSLTRNPPSESEGSDGRFLISYDRTLVIKEVSSEDIADMHSNLSNYHQYIVKCHGNTLLPQFLGMYRVSVDNEDSYMLVMRNMFSHRLPVHRKYDLKGSLVSREASDKEKVKELPTLKDMDFLNKNQKVYIGEEEKKIFLEKLKRDVEFLVQLKIMDYSLLLGIHDIIRGSEPEEEAPVREDESEVDGDCSLTGPPALVGSYGTSPEGIGGYIHSHRPLGPGEFESFIDVYAIRSAEGAPQKEVYFMGLIDILTQYDAKKKAAHAAKTVKHGAGAEISTVHPEQYAKRFLDFITNIFA

SEQ ID NO: 869733 - protein, 421 aa, Homo sapiens
MASSSVPPATVSAATAGPGPGFGFASKTKKKHFVQQKVKVFRAADPLVGVFLWGVAHSINELSQVPPPVMLLPDDFKASSKIKVNNHLFHRENLPSHFKFKEYCPQVFRNLRDRFGIDDQDYLVSLTRNPPSESEGSDGRFLISYDRTLVIKEVSSEDIADMHSNLSNYHQYIVKCHGNTLLPQFLGMYRVSVDNEDSYMLVMRNMFSHRLPVHRKYDLKGSLVSREASDKEKVKELPTLKDMDFLNKNQKVYIGEEEKKIFLEKLKRDVEFLVQLKIMDYSLLLGIHDIIRGSEPEEEAPVREDESEVDGDCSLTGPPALVGSYGTSPEGIGGYIHSHRPLGPGEFESFIDVYAIRSAEGAPQKEVYFMGLIDILTQYDAKKKAAHAAKTVKHGAGAEISTVHPEQYAKRFLDFITNIFA

SEQ ID NO: 869734 - protein, 187 aa, Homo sapiens
MAKSIQAWGKMFDIAALHQNLTPLLGLEPFSGASLPINELSQVPPPVMLLPDDFKASSKIKVNNHLFHRENLPSHFKFKEYCPQVFRNLRDRFGIDDQDYLVSLTRNPPSESEGSDGRFLISYDRTLVIKEVSSEDIADMHSNLSNYHQVRPLSSPILSLSSLLTYSSAIVSNRCQLGRKLIGRENP

SEQ ID NO: 869735 - protein, 421 aa, Homo sapiens; identical to SEQ ID NO: 869733

SEQ ID NO: 869736 - protein, 143 aa, Homo sapiens [sequence omitted]

SEQ ID NO: 869737 - protein, 199 aa, Homo sapiens
ILPDYILPKEKVKELPTLKDMDFLNKNQKVYIGEEEKKIFLEKLKRDVEFLVQLKIMDYSLLLGIHDIIRGSEPEEEAPVREDESEVDGDCSLTGPPALVGSYGTSPEGIGGYIHSHRPLGPGEFESFIDVYAIRSAEGAPQKEVYFMGLIDILTQYDAKKKAAHAAKTVKHGAGAEISTVHPEQYAKRFLDFITNIFA

SEQ ID NO: 869738 - protein, 392 aa, Homo sapiens
MITLITEQLQKQTLDELKCTRFSISLPLPDHADISNCGNSFQLVSEGASWRGLPHCSCAEFQDSLNFSYHPSGLSLHLRPPSRGNSPKEQPFSQVLRPEPPDPEKLPVPPAPPSKRHCRSLSVPVDLSRWQPVWRPAPSKLWTPIKHRGSGGGGGPQVPHQSPPKRVSSLRFLQAPSASSQCAPAHRPYSPPFFSLALAQDSSRPCAASPQSGSWESDAESLSPCPPQRRFSLSPSLGPQASRFLPSARSSPASSPELPWRPRGLRNLPRSRSQPCDLDARKTGVKRRHEEDPRRLRPSLDFDKMNQKPYSGGLCLQETAREGSSISPPWFMACSPPPLSASCSPTGGSSQVLSESEEEEEGAVRWGRQALSKRTLCQRDFGDLDLNLIEEN

SEQ ID NO: 869739 - protein, 170 aa, Homo sapiens
ELLRPRPWELEEPRLGPQASRFLPSARSSPASSPELPWRPRGLRNLPRSRSQPCDLDARKTGVKRRHEEDPRRLRPSLDFDKMNQKPYSGGLCLQETAREGSSISPPWFMACSPPPLSASCSPTGGSSQVLSESEEEEEGAVRWGRQALSKRTLCQRDFGDLDLNLIEEN

SEQ ID NO: 869740 - protein, 392 aa, Homo sapiens; identical to SEQ ID NO: 869738

SEQ ID NO: 869741 - protein, 392 aa, Homo sapiens; identical to SEQ ID NO: 869738

SEQ ID NO: 869742 - protein, 392 aa, Homo sapiens; identical to SEQ ID NO: 869738

SEQ ID NO: 869743 - protein, 392 aa, Homo sapiens; identical to SEQ ID NO: 869738

SEQ ID NO: 869744 - protein, 356 aa, Homo sapiens
MYSYYKCLPEGASWRGLPHCSCAEFQDSLNFSYHPSGLSLHLRPPSRGNSPKEQPFSQVLRPEPPDPEKLPVPPAPPSKRHCRSLSVPVDLSRWQPVWRPAPSKLWTPIKHRGSGGGGGPQVPHQSPPKRVSSLRFLQAPSASSQCAPAHRPYSPPFFSLALAQDSSRPCAASPQSGSWESDAESLSPCPPQRRFSLSPSLGPQASRFLPSARSSPASSPELPWRPRGLRNLPRSRSQPCDLDARKTGVKRRHEEDPRRLRPSLDFDKMNQKPYSGGLCLQETAREGSSISPPWFMACSPPPLSASCSPTGGSSQVLSESEEEEEGAVRWGRQALSKRTLCQRDFGDLDLNLIEEN

SEQ ID NO: 869745 - protein, 173 aa, Homo sapiens
MITLITEQLQKQTLDELKCTRFSISLPLPDHADISNCGNSFQLVSEGASWRGLPHCSCAEFQDSLNFSYHPSGLSLHLRPPSRGNSPKEQPFSQVLRPEPPDPEKLPVPPAPPSKRHCRSLSVPVDLSRWQPVWRPAPSKLWTPIKHRGSGGGGGPQVPHQIPKAGGRAWEWG

SEQ ID NO: 869746 - protein, 392 aa, Homo sapiens; identical to SEQ ID NO: 869738

SEQ ID NO: 869747 - protein, 392 aa, Homo sapiens; identical to SEQ ID NO: 869738

SEQ ID NO: 869748 - protein, 115 aa, Homo sapiens
MWAFLCSPCLGLPPSGSWQDLKDHMREAGDVCYADVQKDGVGMVEYLRKEDMEYALRKLDDTKFRSHEGETSYIRVYPERSTSYGYSRSRSGSRGRDSPYQSRGSPHYFSPFRPY

SEQ ID NO: 869749 - protein, 221 aa, Homo sapiens
MSGWADERGGEGDGRIYVGNLPTDVREKDLEDLFYKYGRIREIELKNRHGLVPFAFVRFEDPRDAEDAIYGRNGYDYGQCRLRVEFPRTYGGRGGWPRGGRNGPPTRRSDFRVLVSGLPPSGSWQDLKDHMREAGDVCYADVQKDGVGMVEYLRKEDMEYALRKLDDTKFRSHEGETSYIRVYPERSTSYGYSRSRSGSRGRDSPYQSRGSPHYFSPFRPY

SEQ ID NO: 869750 - protein, 221 aa, Homo sapiens; identical to SEQ ID NO: 869749

SEQ ID NO: 869751 - protein, 221 aa, Homo sapiens; identical to SEQ ID NO: 869749

SEQ ID NO: 869752 - protein, 190 aa, Homo sapiens
MSGWADERGGEGDGRIYVGNLPTDVREKDLEDLFYKYGRIREIELKNRHGLVPFAFVRFEDPRDAEDAIYGRNGYDYGQCRLRVEFPRTYGGRGGWPRGGRNGPPTRRSDFRVLVSGLPPSGSWQDLKDHMREAGDVCYADVQKDGVGMVEYLRKEDMEYALRKLDDTKFRSHEVGPCLLLRSLYSNHST

SEQ ID NO: 869753 - protein, 125 aa, Homo sapiens
MSGWADERGGEGDGRIYVGNLPTDVREKDLEDLFYKYGRIREIELKNRHGLVPFAFVRFEDPRDAEDAIYGRNGYDYGQCRLRVEFPRTYGGRGGWPRGGRNGPPTRRSDFRVLVSGMFLSNRMR

SEQ ID NO: 869754 - protein, 160 aa, Homo sapiens
MSGWADERGGEGDGRIYVGNLPTDVREKDLEDLFYKYGRIREIELKNRHGLVPFAFVRFEDPREAPAPLPSPPRCLRPPPSLLSPPPGLPSPRPPLPPPPRRPLTAPPHGWRMRQPLLAGPGRPSRRRHFLYFYYSNILLRNPKAEPLEGPSPPAPASGG

SEQ ID NO: 869755 - protein, 182 aa, Homo sapiens
PAQAVSSINSILVHFAFVPCEDPRDAEDAIYGRNGYDYGQCRLRVEFPRTYGGRGGWPRGGRNGPPTRRSDFRVLVSGLPPSGSWQDLKDHMREAGDVCYADVQKDGVGMVEYLRKEDMEYALRKLDDTKFRSHEGETSYIRVYPERSTSYGYSRSRSGSRGRDSPYQSRGSPHYFSPFRPY

SEQ ID NO: 869756 - protein, 221 aa, Homo sapiens; identical to SEQ ID NO: 869749

SEQ ID NO: 869757 - protein, 159 aa, Homo sapiens
MSGWADERGGEGDGRIYVGNLPTDVREKDLEDLFYKYGRIREIELKNRHGLVPFAFVRFEDPRDAEDAIYGRNGYDYGQCRLRVEFPRTYGGRGGWPRGGRNGPPTRRSDFRVLVSGLPPSGSWQDLKDHMREAGDVCYADVQKDGVGMVEYLRKEDMG

SEQ ID NO: 869758 - protein, 125 aa, Homo sapiens; identical to SEQ ID NO: 869753

SEQ ID NO: 869759 - protein, 82 aa, Homo sapiens
TGTPQPALGPSGPWAVGPRAADMWLKWRRRRGLEAEGLVVLKTRGRRARLPGRRPAPLGNRELLAAGWGPSSQWRPPPCLLA

SEQ ID NO: 869760 - protein, 111 aa, Homo sapiens
  misc_feature (63)..(63): Xaa can be any naturally occurring amino acid
  misc_feature (72)..(72): Xaa can be any naturally occurring amino acid
  misc_feature (76)..(76): Xaa can be any naturally occurring amino acid
  misc_feature (80)..(80): Xaa can be any naturally occurring amino acid
  misc_feature (83)..(83): Xaa can be any naturally occurring amino acid
  misc_feature (87)..(87): Xaa can be any naturally occurring amino acid
  misc_feature (98)..(98): Xaa can be any naturally occurring amino acid
MKSEFYTTTSSVVGPRGSSKAVPKAKLAPKKKGPWSTGSRGSCLPPFWIPTYKVFPWKSLGWXNPFTNSWKXRSLXFQGXKIXGLKXWPPPEKKPWPXLTLGLWPLGQFGG

SEQ ID NO: 869761 - protein, 83 aa, Homo sapiens
PSLTRSRLAPAFLLFFYPPLQKKRRLGCDGRQRRTRSGGVKIPAEKEEGTAGGRRRRIRRKGARPAGAISVENKMAALAEGQL

SEQ ID NO: 869762 - protein, 77 aa, Homo sapiens
PKRPRSGSRVCGGRPPARRAGRGEPGLPVSADGGSPGAAGSRGSGRETRRREYAFCLMMLDKKQIWSSFLIRVQNGS

SEQ ID NO: 869763 - protein, 118 aa, Homo sapiens
MGKMSPSTITVKSVLVAGMLPLGMLCLEETGQAGTGQGLTPSTQDDHEPSKCPTSHLGSPACFTSVRAEGTFFCFLKVEGLMLWKTDEKALPEKRGEDSGKLMLTGRSVTERSHMEGR

SEQ ID NO: 869764 - protein, 521 aa, Homo sapiens
MVVTGLGGNPMAVVSKQVNMELAKIKQKCPLYEANGQAVPKEKDEMVEQEFNRLLEATSYLSHQLDFNVLNNKPVSLGQALEVVIQLQEKHVKDEQIEHWKKIVKTQEELKELLNKMVNLKEKIKELHQQYKEASEVKPPRDITAEFLVKSKHRDLTALCKEYDELAETQGKLEEKLQELEANPPSDVYLSSRDRQILDWHFANLEFANATPLSTLSLKHWDQDDDFEFTGSHLTVRNGYSCVPVALAEGLDIKLNTAVRQVRYTASGCEVIAVNTRSTSQTFIYKCDAVLCTLPLGVLKQQPPAVQFVPPLPEWKTSAVQRMGFGNLNKVVLCFDRVFWDPSVNLFGHVGSTTASRGELFLFWNLYKAPILLALVAGEAAGIMENISDDVIVGRCLAILKGIFGSSAVPQPKETVVSRWRADPWARGSYSYVAAGSSGNDYDLMAQPITPGPSIPGAPQPIPRLFFAGEHTIRNYPATVHGALLSGLREAGRIADQFLGAMYTLPRQATPGVPAQQSPSM

SEQ ID NO: 869765 - protein, 273 aa, Homo sapiens
WYGRRVWDLAQALEVVIQLQEKHVKDEQIEHWKKIVKTQEELKELLNKMVNLKEKIKELHQQYKEASEVKPPRDITAEFLVKSKHRDLTALCKEYDELAETQGKLEEKLQELEANPPSDVYLSSRDRQILDWHFANLEFANATPLSTLSLKHWDQDDDFEFTGSHLTVRNGYSCVPVALAEGLDIKLNTAVRQVRYTASGCEVIAVNTRSTSQTFIYKCDAVLCTLPLGVLKQQPPAVQFVPPLPEWKTSAVQRMGFGNLNKVACPRHSCLQI

SEQ ID NO: 869766 - protein, 521 aa, Homo sapiens; identical to SEQ ID NO: 869764

SEQ ID NO: 869767 - protein, 527 aa, Homo sapiens
MVVTGLGGNPMAVVSKQVNMELAKIKQKCPLYEANGQAVPKEKDEMVEQEFNRLLEATSYLSHQLDFNVLNNKPVSLGQALEVVIQLQEKHVKDEQIEHWKKIVKTQEELKELLNKMVNLKEKIKELHQQYKEASEVKPPRDITAEFLVKSKHRDLTALCKEYDELAETQGKLEEKLQELEANPPSPLFFCSDVYLSSRDRQILDWHFANLEFANATPLSTLSLKHWDQDDDFEFTGSHLTVRNGYSCVPVALAEGLDIKLNTAVRQVRYTASGCEVIAVNTRSTSQTFIYKCDAVLCTLPLGVLKQQPPAVQFVPPLPEWKTSAVQRMGFGNLNKVVLCFDRVFWDPSVNLFGHVGSTTASRGELFLFWNLYKAPILLALVAGEAAGIMENISDDVIVGRCLAILKGIFGSSAVPQPKETVVSRWRADPWARGSYSYVAAGSSGNDYDLMAQPITPGPSIPGAPQPIPRLFFAGEHTIRNYPATVHGALLSGLREAGRIADQFLGAMYTLPRQATPGVPAQQSPSM

SEQ ID NO: 869768 - protein, 562 aa, Homo sapiens
VIRGSFLAQTRMDVTLLECRDRVGGRVATFRKGNYVADLGAMVVTGLGGNPMAVVSKQVNMELAKIKQKCPLYEANGQAVPKEKDEMVEQEFNRLLEATSYLSHQLDFNVLNNKPVSLGQALEVVIQLQEKHVKDEQIEHWKKIVKTQEELKELLNKMVNLKEKIKELHQQYKEASEVKPPRDITAEFLVKSKHRDLTALCKEYDELAETQGKLEEKLQELEANPPSDVYLSSRDRQILDWHFANLEFANATPLSTLSLKHWDQDDDFEFTGSHLTVRNGYSCVPVALAEGLDIKLNTAVRQVRYTASGCEVIAVNTRSTSQTFIYKCDAVLCTLPLGVLKQQPPAVQFVPPLPEWKTSAVQRMGFGNLNKVVLCFDRVFWDPSVNLFGHVGSTTASRGELFLFWNLYKAPILLALVAGEAAGIMENISDDVIVGRCLAILKGIFGSSAVPQPKETVVSRWRADPWARGSYSYVAAGSSGNDYDLMAQPITPGPSIPGAPQPIPRLFFAGEHTIRNYPATVHGALLSGLREAGRIADQFLGAMYTLPRQATPGVPAQQSPSM

SEQ ID NO: 869769 - protein, 521 aa, Homo sapiens; identical to SEQ ID NO: 869764

SEQ ID NO: 869770 - protein, 199 aa, Homo sapiens
MGFGNLNKVVLCFDRVFWDPSVNLFGHVGSTTASRGELFLFWNLYKAPILLALVAGEAAGIMENISDDVIVGRCLAILKGIFGSSAVPQPKETVVSRWRADPWARGSYSYVAAGSSGNDYDLMAQPITPGPSIPGAPQPIPRLFFAGEHTIRNYPATVHGALLSGLREAGRIADQFLGAMYTLPRQATPGVPAQQSPSM

SEQ ID NO: 869771 - protein, 199 aa, Homo sapiens; identical to SEQ ID NO: 869770

SEQ ID NO: 869772 - protein, 417 aa, Homo sapiens
MVVTGLGGNPMAVVSKQVNMELAKIKQKCPLYEANGQAVPKEKDEMVEQEFNRLLEATSYLSHQLDFNVLNNKPVSLGQALEVVIQLQEKHVKDEQIEHWKKIVKTQEELKELLNKMVNLKEKIKELHQQYKEASEVKPPRDITAEFLVKSKHRDLTALCKEYDELAETQGKLEEKLQELEANPPSDVYLSSRDRQILDWHFANLEFANATPLSTLSLKHWDQDDDFEFTGSHLTVRNGYSCVPVALAEGLDIKLNTAVRQVRYTASGCEVIAVNTRSTSQTFIYKCDAVLCTLPLGVLKQQPPAVQFVPPLPEWKTSAVQRMGFGNLNKVVLCFDRVFWDPSVNLFGHVGSTTASRGELFLFWNLYKAPILLALVAGEAAGIMENISDTWIPEHPIKTQHHLVRLPNPILWTADVW

SEQ ID NO: 869773 - protein, 376 aa, Homo sapiens
SRRGGSALGACVRDGGWRRAGSVKRGEARLFGPTERQSERPLRPSAARRPEMLSGKKAAAAAAAAAAAATGTEAGPGTAGGSENGSEVAAQPAGLSGPAEVGPGAVGERTPRKKEPPRASPPGGLAEPPGSAGPQAGPTVVPGSATPMETGIAETPEGRRTSRRKRAKVEYREMDESLANLSEDEYYSEEERNAKAEKEKKLPPPPPQAPPEEENESEPEEPSGVEGAAFQSRLPHDRMTSQEAACFPDIISGPQQTQKVFLFIRNRTLQLWLDNPKIQLTFEATLQQLEAPYNSDTVLVHRVHSYLERHGLINFGIYKRIKPLPTKKTGKVIIIGSGVSGLAAARQLQSFGMDVTLLEARIVWVDELPHFAKETM

SEQ ID NO: 869774 - protein, 332 aa, Homo sapiens
SRRGGSALGACVRDGGWRRAGSVKRGEARLFGPTERQSERPLRPSAARRPEMLSGKKAAAAAAAAAAAATGTEAGPGTAGGSENGSEVAAQPAGLSGPAEVGPGAVGERTPRKKEPPRASPPGGLAEPPGSAGPQAGPTVVPGSATPMETGIAETPEGRRTSRRKRAKVEYREMDESLANLSEDEYYSEEERNAKAEKEKKLPPPPPQAPPEEENESEPEEPSGVEGAAFQSRLPHDRMTSQEAACFPDIISGPQQTQKVFLFIRNRTLQLWLDNPKIQLTFEATLQQLEAPYNSDTVLVHRVHSYLERHGLINFGIYKRIKPLPSKDLLPG

SEQ ID NO: 869775 - protein, 521 aa, Homo sapiens; identical to SEQ ID NO: 869764

SEQ ID NO: 869776 - protein, 521 aa, Homo sapiens; identical to SEQ ID NO: 869764

SEQ ID NO: 869777 - protein, 199 aa, Homo sapiens; identical to SEQ ID NO: 869770

SEQ ID NO: 869778 - protein, 175 aa, Homo sapiens
RYRLKANSARLGVIFLFWNLYKAPILLALVAGEAAGIMENISDDVIVGRCLAILKGIFGSSAVPQPKETVVSRWRADPWARGSYSYVAAGSSGNDYDLMAQPITPGPSIPGAPQPIPRLFFAGEHTIRNYPATVHGALLSGLREAGRIADQFLGAMYTLPRQATPGVPAQQSPSM

SEQ ID NO: 869779 - protein, 376 aa, Homo sapiens; identical to SEQ ID NO: 869773

SEQ ID NO: 869780 - protein, 376 aa, Homo sapiens; identical to SEQ ID NO: 869773

SEQ ID NO: 869781 - protein, 376 aa, Homo sapiens; identical to SEQ ID NO: 869773

SEQ ID NO: 869782 - protein, 376 aa, Homo sapiens; identical to SEQ ID NO: 869773

SEQ ID NO: 869783 - protein, 241 aa, Homo sapiens
SRRGGSALGACVRDGGWRRAGSVKRGEARLFGPTERQSERPLRPSAARRPEMLSGKKAAAAAAAAAAAATGTEAGPGTAGGSENGSEVAAQPAGLSGPAEVGPGAVGERTPRKKEPPRASPPGGLAEPPGSAGPQAGPTVVPGSATPMETGIAETPEGRRTSRRKRAKVEYREMDESLANLSEDEYYSEEERNAKAEKEKTIPLPLNLRPTLGSCLAPLFLSFHIPSTSTALLVHQMRPQM

SEQ ID NO: 869784 - protein, 912 aa, Homo sapiens
MATGTGKHKLLSTGPTEPWSIREKLCLASSVMRSGDQNWVSVSRAIKPFAEPGRPPDWFSQKHCASQYSELLETTETPKRKRGEKGEVVETVEDVIVRKLTAERVEELKKVIKETQERYRRLKRDAELIQAGHMDSRLDELCNDIATKKKLEEEEAEVKRKATDAAYQARQAVKTPPRRLPTVMVRSPIDSASPGGDYPLGDLTPTTMEEATSGVTPGTLPSTPVTSFPGIPDTLPPGSAPLEAPMTPVTDDSPQKKMLGQKATPPPSPLLSELLKKGSLLPTSPRLVNESEMAVASGHLNSTGVLLEVGGVLPMIHGGEIQQTPNTVAASPAASESVSQATIVMMPALPAPSSAPAVSTTESVAPVSQPDNCVPMEAVGDPHTVTVSMDSSEISMIINSIKEECFRSGVAEAPVGSKAPSIDGKEELDLAEKMDIAVSYTGEELDFETVGDIIAIIEDKVDDHPEVLDVAAVEAALSFCEENDDPQSLPGPWEHPIQQERDKPVPLPAPEMTVKQERLDFEETENKGIHELVDIREPSAEIKVEPAEPEPVISGAEIVAGVVPATSMEPPELRSQDLDEELGSTAAGEIVEADVAIGKGDETPLTNVKTEASPESMLSPSHGSNPIEDPLEAETQHKFEMSDSLKEESGTIFGSQIKDAPGEDEEEDGVSEAASLEEPKEEDQGEGYLSEMDNEPPVSESDDGFSIHNATLQSHTLADSIPSSPASSQFSVCSEDQEAIQAQKIWKKAIMLVWRAAANHRYANVFLQPVTDDIAPGYHSIVQRPMDLSTIKKNIENGLIRSTAEFQRDIMLMFQNAVMYNSSDHDVYHMAVEMQRDVLEQIQQFLATQLIMQTSESGISAKSLRGRDSTRKQDASEKDSVPMGSPAFLLSLFDGGTRGRRCAIEADMKMKK

SEQ ID NO: 869785 - protein, 878 aa, Homo sapiens
MATGTGKHKLLSTGPTEPWSIREKLCLASSVMRSGDQNWVSVSRAIKPFAEPGRPPDWFSQKHCASQYSELLETTETPKRKRGEKGEVVETVEDVIVRKLTAERVEELKKVIKETQERYRRLKRDAELIQAGHMDSRLDELCNDIATKKKLEEEEAEVKRKATDAAYQARQAVKTPPRRLPTVMVRSPIDSASPGGDYPLGDLTPTTMEEATSGVNESEMAVASGHLNSTGVLLEVGGVLPMIHGGEIQQTPNTVAASPAASGAPTLSRLLEAGPTQFTTPLASFTTVASEPPVKLVPPPVESVSQATIVMMPALPAPSSAPAVSTTESVAPVSQPDNCVPMEAVGDPHTVTVSMDSSEISMIINSIKEECFRSGVAEAPVGSKAPSIDGKEELDLAEKMDIAVSYTGEELDFETVGDIIAIIEDKVDDHPEVLDVAAVEAALSFCEENDDPQSLPGPWEHPIQQERDKPVPLPAPEMTVKQERLDFEETENKGIHELVDIREPSAEIKVEPAEPEPVISGAEIVAGVVPATSMEPPELRSQDLDEELGSTAAGEIVEADVAIGKGDETPLTNVKTEASPESMLSPSHGSNPIEDPLEAETQHKFEMSDSLKEESGTIFGSQIKDAPGEDEEEDGVSEAASLEEPKEEDQGEGYLSEMDNEPPVSESDDGFSIHNATLQSHTLADSIPSSPASSQFSVCSEDQEAIQAQKIWKKAIMLVWRAAANHRYANVFLQPVTDDIAPGYHSIVQRPMDLSTIKKNIENGLIRSTAEFQRDIMLMFQNAVMYNSSDHDVYHMAVEMQRDVLEQIQQFLATQLIMQTSESGISAKSLRGRDSTRKQDASEKDSVPMGSPAFLLSLFDGGTRGRRCAIEADMKMKK

SEQ ID NO: 869786 - protein, 897 aa, Homo sapiens [sequence omitted]

SEQ ID NO: 869787 - protein, 800 aa, Homo sapiens
MATGTGKHKLLSTGPTEPWSIREKLCLASSVMRSGDQNWVSVSRAIKPFAEPGRPPDWFSQKHCASQYSELLETTETPKRKRGEKGEVVETVEDVIVRKLTAERVEELKKVIKETQERYRRLKRDAELIQAGHMDSRLDELCNDIATKKKLEEEEAEVKRKATDAAYQARQAVKTPPRRLPTVMVRSPIDSASPGGDYPLGDLTPTTMEEATSGVTPGTLPSTPVTSFPGIPDTLPPGSAPLEAPMTPVTDDSPQKKMLGQKATPPPSPLLSELLKKGSLLPTSPRLVNESEMAVASGHLNSTGVLLEVGGVLPMIHGGEIQQTPNTVAASPAASGAPTLSRLLEAGPTQFTTPLASFTTVASEPPVKLVPPPVESVSQATIVMMPALPAPSSAPAVSTTESVAPVSQPDNCVPMEAVGDPHTVTVSMDSSEISMIINSIKEECFRSGVAEAPVGSKAPSIDGKEELDLAEKMDIAVSYTGEELDFETVGDIIAIIEDKVDDHPEVLDVAAVEAALSFCEENDDPQSLPGPWEHPIQQERDKPVPLPAPEMTVKQERLDFEETENKGIHELVDIREPSAEIKVEPAEPEPVISGAEIVAGVVPATSMEPPELRSQDLDEELGSTAAGEIVEADVAIGKGDETPLTNVKTEASPESMLSPSHGSNPIEDPLEAETQHKFEMSDSLKEESGTIFGSQIKDAPGEDEEEDGVSEAASLEEPKEEDQGEGYLSEMDNEPPVSESDDGFSIHNATLQSHTLADSIPSSPASSQFSVCSEDQEAIQAQKIWKKAIMLVWRAAANHR

SEQ ID NO: 869788 - protein, 657 aa, Homo sapiens [sequence omitted]

SEQ ID NO: 869789 - protein, 648 aa, Homo sapiens
  misc_feature (5)..(5): Xaa can be any naturally occurring amino acid
  misc_feature (10)..(10): Xaa can be any naturally occurring amino acid
  misc_feature (15)..(15): Xaa can be any naturally occurring amino acid
  misc_feature (21)..(21): Xaa can be any naturally occurring amino acid
  misc_feature (26)..(26): Xaa can be any naturally occurring amino acid
  misc_feature (33)..(33): Xaa can be any naturally occurring amino acid
LLLEXAPGLXLKRCXGMGVVXFHCSXQLGLPFXAPTLSRLLEAGPTQFTTPLASFTTVASEPPVKLVPPPVESVSQATIVMMPALPAPSSAPAVSTTESVAPVSQPDNCVPMEAVGDPHTVTVSMDSSEISMIINSIKEECFRSGVAEAPVGSKAPSIDGKEELDLAEKMDIAVSYTGEELDFETVGDIIAIIEDKVDDHPEVLDVAAVEAALSFCEENDDPQSLPGPWEHPIQQERDKPVPLPAPEMTVKQERLDFEETENKGIHELVDIREPSAEIKVEPAEPEPVISGAEIVAGVVPATSMEPPELRSQDLDEELGSTAAGEIVEADVAIGKGDETPLTNVKTEASPESMLSPSHGSNPIEDPLEAETQHKFEMSDSLKEESGTIFGSQIKDAPGEDEEEDGVSEAASLEEPKEEDQGEGYLSEMDNEPPVSESDDGFSIHNATLQSHTLADSIPSSPASSQFSVCSEDQEAIQAQKIWKKAIMLVWRAAANHRYANVFLQPVTDDIAPGYHSIVQRPMDLSTIKKNIENGLIRSTAEFQRDIMLMFQNAVMYNSSDHDVYHMAVEMQRDVLEQIQQFLATQLIMQTSESGISAKSLRGRDSTRKQDASEKDSVPMGSPAFLLSLFDGGTRGRRCAIEADMKMKK

SEQ ID NO: 869790 - protein, 1235 aa, Homo sapiens
MATGTGKHKLLSTGPTEPWSIREKLCLASSVMRSGDQNWVSVSRAIKPFAEPGRPPDWFSQKHCASQYSELLETTETPKRKRGEKGEVVETVEDVIVRKLTAERVEELKKVIKETQERYRRLKRDAELIQAGHMDSRLDELCNDIATKKKLEEEEAEVKRKATDAAYQARQAVKTPPRRLPTVMVRSPIDSASPGGDYPLGDLTPTTMEEATSGVNESEMAVASGHLNSTGVLLEVGGVLPMIHGGEIQQTPNTVAASPAASGAPTLSRLLEAGPTQFTTPLASFTTVASEPPVKLVPPPVESVSQATIVMMPALPAPSSAPAVSTTESVAPVSQPDNCVPMEAVGDPHTVTVSMDSSEISMIINSIKEECFRSGVAEAPVGSKAPSIDGKEELDLAEKMDIAVSYTGEELDFETVGDIIAIIEDKVDDHPEVLDVAAVEAALSFCEENDDPQSLPGPWEHPIQQERDKPVPLPAPEMTVKQERLDFEETENKGIHELVDIREPSAEIKVEPAEPEPVISGAEIVAGVVPATSMEPPELRSQDLDEELGSTAAGEIVEADVAIGKGDETPLTNVKTEASPESMLSPSHGSNPIEDPLEAETQHKFEMSDSLKEESGTIFGSQIKDAPGEDEEEDGVSEAASLEEPKEEDQGEGYLSEMDNEPPVSESDDGFSIHNATLQSHTLADSIPSSPASSQFSVCSEDQEAIQAQKIWKKAIMLVWRAAANHRYANVFLQPVTDDIAPGYHSIVQRPMDLSTIKKNIENGLIRSTAEFQRDIMLMFQNAVMYNSSDHDVYHMAVEMQRDVLEQIQQFLATQLIMQTSESGISAKSLRGRDSTRKQDASEKDSVPMGSPAFLLSLFMGHEWVWLDSEQDHPNDSELSNDCRSLFSSWDSSLDLDVGNWRETEDPEAEELEESSPEREPSELLVGDGGSEESQEAARKASHQNLLHFLSEVAYLMEPLCISSNESSEGCCPPSGTRQEGREIKASEGERELCRETEELSAKGDPLVAEKPLGENGKPEVASAPSVICTVQGLLTESEEGEAQQESKGEDQGEVYVSEMEDQPPSGECDDAFNIKETPLVDTLFSHATSSKLTDLSQDDPVQDHLLFKKTLLPVWKMIASHRFSSPFLKPVSERQAPGYKDVVKRPMDLTSLKRNLSKGRIRTMAQFLRDLMLMFQNAVMYNDSDHHVYHMAVEMRREVLEQIQVLNIWLDKRKGSSSLEGEPANPVDDGKPVF

SEQ ID NO: 869791 - protein, 969 aa, Homo sapiens
MATGTGKHKLLSTGPTEPWSIREKLCLASSVMRSGDQNWVSVSRAIKPFAEPGRPPDWFSQKHCASQYSELLETTETPKRKRGEKGEVVETVEDVIVRKLTAERVEELKKVIKETQERYRRLKRDAELIQAGHMDSRLDELCNDIATKKKLEEEEAEVKRKATDAAYQARQAVKTPPRRLPTVMVRSPIDSASPGGDYPLGDLTPTTMEEATSGVTPGTLPSTPVTSFPGIPDTLPPGSAPLEAPMTPVTDDSPQKKMLGQKATPPPSPLLSELLKKGSLLPTSPRLVNESEMAVASGHLNSTGVLLEVGGVLPMIHGGEIQQTPNTVAASPAASGAPTLSRLLEAGPTQFTTPLASFTTVASEPPVKLVPPPVESVSQATIVMMPALPAPSSAPAVSTTESVAPVSQPDNCVPMEAVGDPHTVTVSMDSSEISMIINSIKEECFRSGVAEAPVGSKAPSIDGKEELDLAEKMDIAVSYTGEELDFETVGDIIAIIEDKVDDHPEVLDVAAVEAALSFCEENDDPQSLPGPWEHPIQQERDKPVPLPAPEMTVKQERLDFEETENKGIHELVDIREPSAEIKVEPAEPEPVISGAEIVAGVVPATSMEPPELRSQDLDEELGSTAAGEIVEADVAIGKGDETPLTNVKTEASPESMLSPSHGSNPIEDPLEAETQHKFEMSDSLKEESGTIFGSQIKDAPGEDEEEDGVSEAASLEEPKEEDQGEGYLSEMDNEPPVSESDDGFSIHNATLQSHTLADSIPSSPASSQFSVCSEDQEAIQAQKIWKKAIMLVWRAAANHRYANVFLQPVTDDIAPGYHSIVQRPMDLSTIKKNIENGLIRSTAEFQRDIMLMFQNAVMYNSSDHDVYHMAVEMQRDVLEQIQQFLATQLIMQTSESGISAKSLRGRDSTRKQDASEKDSVPMGSPAFLLSLFTAKYCTRGRSWAAGREQQMERSLLIVLISWKTTVRRC

SEQ ID NO: 869792 - protein, 932 aa, Homo sapiens
MATGTGKHKLLSTGPTEPWSIREKLCLASSVMRSGDQNWVSVSRAIKPFAEPGRPPDWFSQKHCASQYSELLETTETPKRKRGEKGEVVETVEDVIVRKLTAERVEELKKVIKETQERYRRLKRDAELIQAGHMDSRLDELCNDIATKKKLEEEEAEVKRKATDAAYQARQAVKTPPRRLPTVMVRSPIDSASPGGDYPLGDLTPTTMEEATSGVTPGTLPSTPVTSFPGIPDTLPPGSAPLEAPMTPVTDDSPQKKMLGQKATPPPSPLLSELLKKGSLLPTSPRLVNESEMAVASGHLNSTGVLLEVGGVLPMIHGGEIQQTPNTVAASPAASGAPTLSRLLEAGPTQFTTPLASFTTVASEPPVKLVPPPVESVSQATIVMMPALPAPSSAPAVSTTESVAPVSQPDNCVPMEAVGDPHTVTVSMDSSEISMIINSIKEECFRSGVAEAPVGSKAPSIDGKEELDLAEKMDIAVSYTGEELDFETVGDIIAIIEDKVDDHPEVLDVAAVEAALSFCEENDDPQSLPGPWEHPIQQERDKPVPLPAPEMTVKQERLDFEETENKGIHELVDIREPSAEIKVEPAEPEPVISGAEIVAGVVPATSMEPPELRSQDLDEELGSTAAGEIVEADVAIGKGDETPLTNVKTEASPESMLSPSHGSNPIEDPLEAETQHKFEMSDSLKEESGTIFGSQIKDAPGEDEEEDGVSEAASLEEPKEEDQGEGYLSEMDNEPPVSESDDGFSIHNATLQSHTLADSIPSSPASSQFSVCSEDQEAIQAQKIWKKAIMLVWRAAANHRYANVFLQPVTDDIAPGYHSIVQRPMDLSTIKKNIENGLIRSTAEFQRDIMLMFQNAVMYNSSDHDVYHMAVEMQRDVLEQIQQFLATQLIMQTSESGISAKSLRGRDSTRKQDASEKDSVPMGSPAFLLSLF

SEQ ID NO: 869793 - protein, 1303 aa, Homo sapiens
MATGTGKHKLLSTGPTEPWSIREKLCLASSVMRSGDQNWVSVSRAIKPFAEPGRPPDWFSQKHCASQYSELLETTETPKRKRGEKGEVVETVEDVIVRKLTAERVEELKKVIKETQERYRRLKRDAELIQAGHMDSRLDELCNDIATKKKLEEEEAEVKRKATDAAYQARQAVKTPPRRLPTVMVRSPIDSASPGGDYPLGDLTPTTMEEATSGVTPGTLPSTPVTSFPGIPDTLPPGSAPLEAPMTPVTDDSPQKKMLGQKATPPPSPLLSELLKKGSLLPTSPRLVNESEMAVASGHLNSTGVLLEVGGVLPMIHGGEIQQTPNTVAASPAASGAPTLSRLLEAGPTQFTTPLASFTTVASEPPVKLVPPPVESVSQATIVMMPALPAPSSAPAVSTTESVAPVSQPDNCVPMEAVGDPHTVTVSMDSSEISMIINSIKEECFRSGVAEAPVGSKAPSIDGKEELDLAEKMDIAVSYTGEELDFETVGDIIAIIEDKVDDHPEVLDVAAVEAALSFCEENDDPQSLPGPWEHPIQQERDKPVPLPAPEMTVKQERLDFEETENKGIHELVDIREPSAEIKVEPAEPEPVISGAEIVAGVVPATSMEPPELRSQDLDEELGSTAAGEIVEADVAIGKGDETPLTNVKTEASPESMLSPSHGSNPIEDPLEAETQHKFEMSDSLKEESGTIFGSQIKDAPGEDEEEDGVSEAASLEEPKEEDQGEGYLSEMDNEPPVSESDDGFSIHNATLQSHTLADSIPSSPASSQFSVCSEDQEAIQAQKIWKKAIMLVWRAAANHRYANVFLQPVTDDIAPGYHSIVQRPMDLSTIKKNIENGLIRSTAEFQRDIMLMFQNAVMYNSSDHDVYHMAVEMQRDVLEQIQQFLATQLIMQTSESGISAKSLRGRDSTRKQDASEKDSVPMGSPAFLLSLFMGHEWVWLDSEQDHPNDSELSNDCRSLFSSWDSSLDLDVGNWRETEDPEAEELEESSPEREPSELLVGDGGSEESQEAARKASHQNLLHFLSEVAYLMEPLCISSNESSEGCCPPSGTRQEGREIKASEGERELCRETEELSAKGDPLVAEKPLGENGKPEVASAPSVICTVQGLLTESEEGEAQQESKGEDQGEVYVSEMEDQPPSGECDDAFNIKETPLVDTLFSHATSSKLTDLSQDDPVQDHLLFKKTLLPVWKMIASHRFSSPFLKPVSERQAPGYKDVVKRPMDLTSLKRNLSKGRIRTMAQFLRDLMLMFQNAVMYNDSDHHVYHMAVEMRREVLEQIQVLYADTCSLWNLDFRTPMRIKVISR

SEQ ID NO: 869794 - protein, 970 aa, Homo sapiens
MATGTGKHKLLSTGPTEPWSIREKLCLASSVMRSGDQNWVSVSRAIKPFAEPGRPPDWFSQKHCASQYSELLETTETPKRKRGEKGEVVETVEDVIVRKLTAERVEELKKVIKETQERYRRLKRDAELIQAGHMDSRLDELCNDIATKKKLEEEEAEVKRKATDAAYQARQAVKTPPRRLPTVMVRSPIDSASPGGDYPLGDLTPTTMEEATSGVTPGTLPSTPVTSFPGIPDTLPPGSAPLEAPMTPVTDDSPQKKMLGQKATPPPSPLLSELLKKGSLLPTSPRLVNESEMAVASGHLNSTGVLLEVGGVLPMIHGGEIQQTPNTVAASPAASGAPTLSRLLEAGPTQFTTPLASFTTVASEPPVKLVPPPVESVSQATIVMMPALPAPSSAPAVSTTESVAPVSQPDNCVPMEAVGDPHTVTVSMDSSEISMIINSIKEECFRSGVAEAPVGSKAPSIDGKEELDLAEKMDIAVSYTGEELDFETVGDIIAIIEDKVDDHPEVLDVAAVEAALSFCEENDDPQSLPGPWEHPIQQERDKPVPLPAPEMTVKQERLDFEETENKGIHELVDIREPSAEIKVEPAEPEPVISGAEIVAGVVPATSMEPPELRSQDLDEELGSTAAGEIVEADVAIGKGDETPLTNVKTEASPESMLSPSHGSNPIEDPLEAETQHKFEMSDSLKEESGTIFGSQIKDAPGEDEEEDGVSEAASLEEPKEEDQGEGYLSEMDNEPPVSESDDGFSIHNATLQSHTLADSIPSSPASSQFSVCSEDQEAIQAQKIWKKAIMLVWRAAANHRYANVFLQPVTDDIAPGYHSIVQRPMDLSTIKKNIENGLIRSTAEFQRDIMLMFQNAVMYNSSDHDVYHMAVEMQRDVLEQIQQFLATQLIMQTSESGISAKSLRGRDSTRKQDASEKDSVPMGSPAFLLSLFNKTNKYPRLQDYFIFHRFACTGITSEIVCTWFQTIAIK

SEQ ID NO: 869795 - protein, 711 aa, Homo sapiens
MATGTGKHKLLSTGPTEPWSIREKLCLASSVMRSGDQNWVSVSRAIKPFAEPGRPPDWFSQKHCASQYSELLETTETPKRKRGEKGEVVETVEDVIVRKLTAERVEELKKVIKETQERYRRLKRDAELIQAGHMDSRLDELCNDIATKKKLEEEEAEVKRKATDAAYQARQAVKTPPRRLPTVMVRSPIDSASPGGDYPLGDLTPTTMEEATSGVTPGTLPSTPVTSFPGIPDTLPPGSAPLEAPMTPVTDDSPQKKMLGQKATPPPSPLLSELLKKGSLLPTSPRLVNESEMAVASGHLNSTGVLLEVGGVLPMIHGGEIQQTPNTVAASPAASGAPTLSRLLEAGPTQFTTPLASFTTVASEPPVKLVPPPVESVSQATIVMMPALPAPSSAPAVSTTESVAPVSQPDNCVPMEAVGDPHTVTVSMDSSEISMIINSIKEECFRSGVAEAPVGSKAPSIDGKEELDLAEKMDIAVSYTGEELDFETVGDIIAIIEDKVDDHPEVLDVAAVEAALSFCEENDDPQSLPGPWEHPIQQERDKPVPLPAPEMTVKQERLDFEETENKGIHELVDIREPSAEIKVEPAEPEPVISGAEIVAGVVPATSMEPPELRSQDLDEELGSTAAGEIVEADVAIGKGDETPLTNVKTEASPESMLSPSHGSNPIEDPLEAETQHKFEMSDSLKEESGTIFGSQIKDAPGPEETRRDPLE

SEQ ID NO: 869796 - protein, 127 aa, Homo sapiens
MDLSTIKKNIENGLIRSTAEFQRDIMLMFQNAVMYNSSDHDVYHMAVEMQRDVLEQIQQFLATQLIMQTSESGISAKSLRGRDSTRKQDASEKDSVPMGSPAFLLSLFDGGTRGRRCAIEADMKMKK

SEQ ID NO: 869797 - protein, 348 aa, Homo sapiens [sequence omitted]

SEQ ID NO: 869798 - protein, 953 aa, Homo sapiens
GTRATGTGKHKLLSTGPTEPWSIREKLCLASSVMRSGDQNWVSVSRAIKPFAEPGRPPDWFSQKHCASQYSELLETTETPKRKRGEKGEVVETVEDVIVRKLTAERVEELKKVIKETQERYRRLKRDAELIQAGHMDSRLDELCNDIATKKKLEEEEAEVKRKATDAAYQARQAVKTPPRRLPTVMVRSPIDSASPGGDYPLGDLTPTTMEEATSGVTPGTLPSTPVTSFPGIPDTLPPGSAPLEAPMTPVTDDSPQKKMLGQKATPPPSPLLSELLKKGSLLPTSPRLVNESEMAVASGHLNSTGVLLEVGGVLPMIHGGEIQQTPNTVAASPAASGAPTLSRLLEAGPTQFTTPLASFTTVASEPPVKLVPPPVESVSQATIVMMPALPAPSSAPAVSTTESVAPVSQPDNCVPMEAVGDPHTVTVSMDSSEISMIINSIKEECFRSGVAEAPVGSKAPSIDGKEELDLAEKMDIAVSYTGEELDFETVGDIIAIIEDKVDDHPEVLDVAAVEAALSFCEENDDPQSLPGPWEHPIQQERDKPVPLPAPEMTVKQERLDFEETENKGIHELVDIREPSAEIKVEPAEPEPVISGAEIVAGVVPATSMEPPELRSQDLDEELGSTAAGEIVEADVAIGKGDETPLTNVKTEASPESMLSPSHGSNPIEDPLEAETQHKFEMSDSLKEESGTIFGSQIKDAPGEDEEEDGVSEAASLEEPKEEDQGEGYLSEMDNEPPVSESDDGFSIHNATLQSHTLADSIPSSPASSQFSVCSEDQEAIQAQKIWKKAIMLVWRAAANHRYANVFLQPVTDDIAPGYHSIVQRPMDLSTIKKNIENGLIRSTAEFQRDIMLMFQNAVMYNSSDHDVYHMAVEMQRDVLEQIQQFLATQLIMQTSESGISAKSLRGRDSTRKQDASEKDSVPMGSPAFLLSLFDGGTRGRRCAIEADMKMKK

SEQ ID NO: 869799 - protein, 951 aa, Homo sapiens
MATGTGKHKLLSTGPTEPWSIREKLCLASSVMRSGDQNWVSVSRAIKPFAEPGRPPDWFSQKHCASQYSELLETTETPKRKRGEKGEVVETVEDVIVRKLTAERVEELKKVIKETQERYRRLKRDAELIQAGHMDSRLDELCNDIATKKKLEEEEAEVKRKATDAAYQARQAVKTPPRRLPTVMVRSPIDSASPGGDYPLGDLTPTTMEEATSGVTPGTLPSTPVTSFPGIPDTLPPGSAPLEAPMTPVTDDSPQKKMLGQKATPPPSPLLSELLKKGSLLPTSPRLVNESEMAVASGHLNSTGVLLEVGGVLPMIHGGEIQQTPNTVAASPAASGAPTLSRLLEAGPTQFTTPLASFTTVASEPPVKLVPPPVESVSQATIVMMPALPAPSSAPAVSTTESVAPVSQPDNCVPMEAVGDPHTVTVSMDSSEISMIINSIKEECFRSGVAEAPVGSKAPSIDGKEELDLAEKMDIAVSYTGEELDFETVGDIIAIIEDKVDDHPEVLDVAAVEAALSFCEENDDPQSLPGPWEHPIQQERDKPVPLPAPEMTVKQERLDFEETENKGIHELVDIREPSAEIKVEPAEPEPVISGAEIVAGVVPATSMEPPELRSQDLDEELGSTAAGEIVEADVAIGKGDETPLTNVKTEASPESMLSPSHGSNPIEDPLEAETQHKFEMSDSLKEESGTIFGSQIKDAPGEDEEEDGVSEAASLEEPKEEDQGEGYLSEMDNEPPVSESDDGFSIHNATLQSHTLADSIPSSPASSQFSVCSEDQEAIQAQKIWKKAIMLVWRAAANHRYANVFLQPVTDDIAPGYHSIVQRPMDLSTIKKNIENGLIRSTAEFQRDIMLMFQNAVMYNSSDHDVYHMAVEMQRDVLEQIQQFLATQLIMQTSESGISAKSLRGRDSTRKQDASEKDSVPMGSPAFLLSLFDGGTRGRRCAIEADMKMKK

SEQ ID NO: 869800 - protein, 881 aa, Homo sapiens
MRTTERDQKRKRGEKGEVVETVEDVIVRKLTAERVEELKKVIKETQERYRRLKRDAELIQAGHMDSRLDELCNDIATKKKLEEEEAEVKRKATDAAYQARQAVKTPPRRLPTVMVRSPIDSASPGGDYPLGDLTPTTMEEATSGVTPGTLPSTPVTSFPGIPDTLPPGSAPLEAPMTPVTDDSPQKKMLGQKATPPPSPLLSELLKKGSLLPTSPRLVNESEMAVASGHLNSTGVLLEVGGVLPMIHGGEIQQTPNTVAASPAASGAPTLSRLLEAGPTQFTTPLASFTTVASEPPVKLVPPPVESVSQATIVMMPALPAPSSAPAVSTTESVAPVSQPDNCVPMEAVGDPHTVTVSMDSSEISMIINSIKEECFRSGVAEAPVGSKAPSIDGKEELDLAEKMDIAVSYTGEELDFETVGDIIAIIEDKVDDHPEVLDVAAVEAALSFCEENDDPQSLPGPWEHPIQQERDKPVPLPAPEMTVKQERLDFEETENKGIHELVDIREPSAEIKVEPAEPEPVISGAEIVAGVVPATSMEPPELRSQDLDEELGSTAAGEIVEADVAIGKGDETPLTNVKTEASPESMLSPSHGSNPIEDPLEAETQHKFEMSDSLKEESGTIFGSQIKDAPGEDEEEDGVSEAASLEEPKEEDQGEGYLSEMDNEPPVSESDDGFSIHNATLQSHTLADSIPSSPASSQFSVCSEDQEAIQAQKIWKKAIMLVWRAAANHRYANVFLQPVTDDIAPGYHSIVQRPMDLSTIKKNIENGLIRSTAEFQRDIMLMFQNAVMYNSSDHDVYHMAVEMQRDVLEQIQQFLATQLIMQTSESGISAKSLRGRDSTRKQDASEKDSVPMGSPAFLLSLFDGGTRGRRCAIEADMKMKK

SEQ ID NO: 869801 - protein, 683 aa, Homo sapiens
SESLEDLIICSMADGLLDLDFPVSLQVITPSFSLIPNLVTIRFYFSGIIKITGSTCCNMVGSKYEAPRAPTLSRLLEAGPTQFTTPLASFTTVASEPPVKLVPPPVESVSQATIVMMPALPAPSSAPAVSTTESVAPVSQPDNCVPMEAVGDPHTVTVSMDSSEISMIINSIKEECFRSGVAEAPVGSKAPSIDGKEELDLAEKMDIAVSYTGEELDFETVGDIIAIIEDKVDDHPEVLDVAAVEAALSFCEENDDPQSLPGPWEHPIQQERDKPVPLPAPEMTVKQERLDFEETENKGIHELVDIREPSAEIKVEPAEPEPVISGAEIVAGVVPATSMEPPELRSQDLDEELGSTAAGEIVEADVAIGKGDETPLTNVKTEASPESMLSPSHGSNPIEDPLEAETQHKFEMSDSLKEESGTIFGSQIKDAPGEDEEEDGVSEAASLEEPKEEDQGEGYLSEMDNEPPVSESDDGFSIHNATLQSHTLADSIPSSPASSQFSVCSEDQEAIQAQKIWKKAIMLVWRAAANHRYANVFLQPVTDDIAPGYHSIVQRPMDLSTIKKNIENGLIRSTAEFQRDIMLMFQNAVMYNSSDHDVYHMAVEMQRDVLEQIQQFLATQLIMQTSESGISAKSLRGRDSTRKQDASEKDSVPMGSPAFLLSLFDGGTRGRRCAIEADMKMKK

SEQ ID NO: 869802 - protein, 932 aa, Homo sapiens; identical to SEQ ID NO: 869792

SEQ ID NO: 869803 - protein, 254 aa, Homo sapiens
SDSLKEIYMPQCEDDRCVSLPKEEDQGEGYLSEMDNEPPVSESDDGFSIHNATLQSHTLADSIPSSPASSQFSVCSEDQEAIQAQKIWKKAIMLVWRAAANHRYANVFLQPVTDDIAPGYHSIVQRPMDLSTIKKNIENGLIRSTAEFQRDIMLMFQNAVMYNSSDHDVYHMAVEMQRDVLEQIQQFLATQLIMQTSESGISAKSLRGRDSTRKQDASEKDSVPMGSPAFLLSLFDGGTRGRRCAIEADMKMKK

SEQ ID NO: 869804 - protein, 509 aa, Homo sapiens
MATGTGKHKLLSTGPTEPWSIREKLCLASSVMRSGDQNWVSVSRAIKPFAEPGRPPDWFSQKHCASQYSELLETTETPKRKRGEKGEVVETVEDVIVRKLTAERVEELKKVIKETQERYRRLKRDAELIQAGHMDSRLDELCNDIATKKKLEEEEAEVKRKATDAAYQARQAVKTPPRRLPTVMVRSPIDSASPGGDYPLGDLTPTTMEEATSGVTPGTLPSTPVTSFPGIPDTLPPGSAPLEAPMTPVTDDSPQKKMLGQKATPPPSPLLSELLKKGSLLPTSPRLVNESEMAVASGHLNSTGVLLEVGGVLPMIHGGEIQQTPNTVAASPAASGAPTLSRLLEAGPTQFTTPLASFTTVASEPPVKLVPPPVESVSQATIVMMPALPAPSSAPAVSTTESVAPVSQPDNCVPMEAVGDPHTVTVSMDSSEISMIINSIKEECFRSGVAEAPVGSKAPSIDGKEELDLAEKMDIAVSYTGEELDFETVGDIIAIIEDKVDDHPIQSLT

SEQ ID NO: 869805 - protein, 275 aa, Homo sapiens
MATGTGKHKLLSTGPTEPWSIREKLCLASSVMRSGDQNWVSVSRAIKPFAEPGRPPDWFSQKHCASQYSELLETTETPKRKRGEKGEVVETVEDVIVRKLTAERVEELKKVIKETQERYRRLKRDAELIQAGHMDSRLDELCNDIATKKKLEEEEAEVKRKATDAAYQARQAVKTPPRRLPTVMVRSPIDSASPGGDYPLGDLTPTTMEEATSGVNESEMAVASGHLNSTGVLLEVGGVLPMIHGGEIQQTPNTVAASPAASGKLPLFLYQPQRC

SEQ ID NO: 869806 - protein, 2414 aa, Homo sapiens
PLSSQPQPLATRRAEHRSRKPPTTMSSTLSPTDFDSLEIQGQYSDINNRWDLPDSDWDNDSSSARLFERSRIKALADEREAVQKKTFTKWVNSHLARVTCRVGDLYSDLRDGRNLLRLLEVLSGEILPKPTKGRMRIHCLENVDKALQFLKEQKVHLENMGSHDIVDGNHRLTLGLVWTIILRFQIQDISVETEDNKEKKSAKDALLLWCQMKTAGYPNVNVHNFTTSWRDGLAFNAIVHKHRPDLLDFESLKKCNAHYNLQNAFNLAEKELGLTKLLDPEDVNVDQPDEKSIITYVATYYHYFSKMKALAVEGKRIGKVLDHAMEAERLVEKYESLASELLQWIEQTIVTLNDRQLANSLSGVQNQLQSFNSYRTVEKPPKFTEKGNLEVLLFTIQSKLRANNQKVYTPREGRLISDINKAWERLEKAEHERELALRTELIRQEKLEQLAARFDRKAAMRETWLSENQRLVSQDNFGLELAAVEAAVRKHEAIETDIVAYSGRVQAVDAVAAELAAERYHDIKRIAARQHNVARLWDFLRQMVAARRERLLLNLELQKVFQDLLYLMDWMEEMKGRLQSQDLGRHLAGVEDLLQLHELVEADIAVQAERVRAVSASALRFCNPGKEYRPCDPQLVSERVAKLEQSYEALCELAAARRARLEESRRLWRFLWEVGEAEAWVREQQHLLASADTGRDLTGALRLLNKHTALRGEMSGRLGPLKLTLEQGQQLVAEGHPGASQASARAAELQAQWERLEALAEERAQRLAQAASLYQFQADANDMEAWLVDALRLVSSPELGHDEFSTQALARQHRALEEEIRSHRPTLDALREQAAALPPTLSRTPEVQGRVPTLERHYEELQARAGERARALEAALALYTMLSEAGACGLWVEEKEQWLNGLALPERLEDLEVVQQRFETLEPEMNTLAAQITAVNDIAEQLLKANPPGKDRIVNTQEQLNHRWQQFRRLADGKKAALTSALSIQNYHLECTETQAWMREKTKVIESTQGLGNDLAGVLALQRKLAGTERDLEAIAARVGELTREANALAAGHPAQAVAINARLREVQTGWEDLRATMRRREESLGEARRLQDFLRSLDDFQAWLGRTQTAVASEEGPATLPEAEALLAQHAALRGEVERAQSEYSRLRALGEEVTRDQADPQCLFLRQRLEALGTGWEELGRMWESRQGRLAQAHGFQGFLRDARQAEGVLSSQEYVLSHTEMPGTLQAADAAIKKLEDFMSTMDANGERIHGLLEAGRQLVSEGNIHADKIREKADSIERRHKKNQDAAQQFLGRLRDNREQQHFLQDCHELKLWIDEKMLTAQDVSYDEARNLHTKWQKHQAFMAELAANKDWLDKVDKEGRELTLEKPELKALVSEKLRDLHRRWDELETTTQAKARSLFDANRAELFAQSCCALESWLESLQAQLHSDDYGKDLTSVNILLKKQQMLEWEMAVREKEVEAIQAQAKALAQEDQGAGEVERTSRAVEEKFRALCQPMRERCRRLQASREQHQFHRDVEDEILWVTERLPMASSMEHGKDLPSVQLLMKKNQTLQKEIQGHEPRIADLRERQRALGAAAAGPELAELQEMWKRLGHELELRGKRLEDALRAQQFYRDAAEAEAWMGEQELHMMGQEKAKDELSAQAEVKKHQVLEQALADYAQTIHQLAASSQDMIDHEHPESTRISIRQAQVDKLYAGLKELAGERRERLQEHLRLCQLRRELDDLEQWIQEREVVAASHELGQDYEHVTMLRDKFREFSRDTSTIGQERVDSANALANGLIAGGHAARATVAEWKDSLNEAWADLLELLDTRGQVLAAAYELQRFLHGARQALARVQHKQQQLPDGTGRDLNAAEALQRRHCAYEHDIQALSPQVQQVQDDGHRLQKAYAGDKAEEIGRHMQAVAEAWAQLQGSSAARRQLLLDTTDKFRFFKAVRELMLWMDEVNLQMDAQERPRDVSSADLVIKNQQGIKAEIEARADRFSSCIDMGKELLARSHYAAEEISEKLSQLQARRQETAEKWQEKMDWLQLVLEVLVFGRDAGMAEAWLCSQEPLVRSAELGCTVDEVESLIKRHEAFQKSAVAWEERFCALEKLTALEEREKERKRKREEEERRKQPPAPEPTASVPPGDLVGGQTASDTTWDGTQPRPPPSTQAPSVNGVCTDGEPSQPLLGQQRLEHSSFPEGPGPGSGDEANGPRGERQTRTRGPAPSAMPQSRSTESAHAATLPPRGPEPSAQEQMEGMLCRKQEMEAFGKKAANRSWQNVYCVLRRGSLGFYKDAKAASAGVPYHGEVPVSLARAQGSVAFDYRKRKHVFKLGLQDGKEYLFQAKDEAEMSSWLRVVNAAIATASSASGEPEEPVVPSTTRGMTRAMTMPPVSPVGAEGPVVLRSKDGREREREKRFSFFKKNK

SEQ ID NO: 869807 - protein, 2407 aa, Homo sapiens
GTEAGSRETSSAVSLEEGSRVSGIRILEEKQNRTRSRKPPTTMSSTLSPTDFDSLEIQGQYSDINNRWDLPDSDWDNDSSSARLFERSRIKALADEREAVQKKTFTKWVNSHLARVTCRVGDLYSDLRDGRNLLRLLEVLSGEILPKPTKGRMRIHCLENVDKALQFLKEQKVHLENMGSHDIVDGNHRLTLGLVWTIILRFQIQDISVETEDNKEKKSAKDALLLWCQMKTAGYPNVNVHNFTTSWRDGLAFNAIVHKHRPDLLDFESLKKCNAHYNLQNAFNLAEKELGLTKLLDPEDVNVDQPDEKSIITYVATYYHYFSKMKALAVEGKRIGKVLDHAMEAERLVEKYESLASELLQWIEQTIVTLNDRQLANSLSGVQNQLQSFNSYRTVEKPPKFTEKGNLEVLLFTIQSKLRANNQKVYTPREGRLISDINKAWERLEKAEHERELALRTELIRQEKLEQLAARFDRKAAMRETWLSENQRLVSQDNFGLELAAVEAAVRKHEAIETDIVAYSGRVQAVDAVAAELAAERYHDIKRIAARQHNVARLWDFLRQMVAARRERLLLNLELQKVFQDLLYLMDWMEEMKGRLQSQDLGRHLAGVEDLLQLHELVEADIAVQAERVRAVSASALRFCNPGKEYRPCDPQLVSERVAKLEQSYEALCELAAARRARLEESRRLWRFLWEVGEAEAWVREQQHLLASADTGRDLTGALRLLNKHTALRGEMSGRLGPLKLTLEQGQQLVAEGHPGASQASARAAELQAQWERLEALAEERAQRLAQAASLYQFQADANDMEAWLVDALRLVSSPELGHDEFSTQALARQHRALEEEIRSHRPTLDALREQAAALPPTLSRTPEVQGRVPTLERHYEELQARAGERARALEAALALYTMLSEAGACGLWVEEKEQWLNGLALPERLEDLEVVQQRFETLEPEMNTLAAQITAVNDIAEQLLKANPPGKDRIVNTQEQLNHRWQQFRRLADGKKAALTSALSIQNYHLECTETQAWMREKTKVIESTQGLGNDLAGVLALQRKLAGTERDLEAIAARVGELTREANALAAGHPAQAVAINARLREVQTGWEDLRATMRRREESLGEARRLQDFLRSLDDFQAWLGRTQTAVASEEGPATLPEAEALLAQHAALRGEVERAQSEYSRLRALGEEVTRDQADPQCLFLRQRLEALGTGWEELGRMWESRQGRLAQAHGFQGFLRDARQAEGVLSSQEYVLSHTEMPGTLQAADAAIKKLEDFMSTMDANGERIHGLLEAGRQLVSEGNIHADKIREKADSIERRHKKNQDAAQQFLGRLRDNREQQHFLQDCHELKLWIDEKMLTAQDVSYDEARNLHTKWQKHQAFMAELAANKDWLDKVDKEGRELTLEKPELKALVSEKLRDLHRRWDELETTTQAKARSLFDANRAELFAQSCCALESWLESLQAQLHSDDYGKDLTSVNILLKKQQMLEWEMAVREKEVEAIQAQAKALAQEDQGAGEVERTSRAVEEKFRALCQPMRERCRRLQASREQHQFHRDVEDEILWVTERLPMASSMEHGKDLPSVQLLMKKNQTLQKEIQGHEPRIADLRERQRALGAAAAGPELAELQEMWKRLGHELELRGKRLEDALRAQQFYRDAAEAEAWMGEQELHMMGQEKAKDELSAQAEVKKHQVLEQALADYAQTIHQLAASSQDMIDHEHPESTRISIRQAQVDKLYAGLKELAGERRERLQEHLRLCQLRRELDDLEQWIQEREVVAASHELGQDYEHVTMLRDKFREFSRDTSTIGQERVDSANALANGLIAGGHAARATVAEWKDSLNEAWADLLELLDTRGQVLAAAYELQRFLHGARQALARVQHKQQQLPDGTGRDLNAAEALQRRHCAYEHDIQALSPQVQQVQDDGHRLQKAYAGDKAEEIGRHMQAVAEAWAQLQGSSAARRQLLLDTTDKFRFFKAVRELMLWMDEVNLQMDAQERPRDVSSADLVIKNQQGIKAEIEARADRFSSCIDMGKELLARSHYAAEEISEKLSQLQARRQETAEKWQEKMDWLQLVLEVLVFGRDAGMAEAWLCSQEPLVRSAELGCTVDEVESLIKRHEAFQKSAVAWEERFCALEKLTALEEREKERKRKREEEERRKQPPAPEPTASVPPGDLVGGQTASDTTWDGTQPRPPPSTQAPSVNGVCTDGEPSQPLLGQQRLEHSSFPEGPGPGSGDEANGPRGERQTRTRGPAPSAMPQSRSTESAHAATLPPRGPEPSAQEQMEGMLCRKQEMEAFGKKAANRSWQNVYCVLRRGSLGFYKDAKAASAGVPYHGEVPVSLARAQGSVAFDYRKRKHVFKLGLQDGKEYLFQAKDEVSCPSCSSLSVPFQKLPAADSPSFPVLPLFPGLVLCGKTGCVRRPHQAALPV

SEQ ID NO: 869808 - protein, 197 aa, Homo sapiens
MPQSRSTESAHAATLPPRGPEPSAQEQMEGMLCRKQEMEAFGKKAANRSWQNVYCVLRRGSLGFYKDAKAASAGVPYHGEVPVSLARAQGSVAFDYRKRKHVFKLGLQDGKEYLFQAKDEAEMSSWLRVVNAAIATASSASGEPEEPVVPSTTRGMTRAMTMPPVSPVGAEGPVVLRSKDGREREREKRFSFFKKNK

SEQ ID NO: 869809 - protein, 2341 aa, Homo sapiens
GTEAGSRETSSAVSLEEGSRVSGIRILEEKQNRTRSRKPPTTMSSTLSPTDFDSLEIQGQYSDINNRWDLPDSDWDNDSSSARLFERSRIKALADEREAVQKKTFTKWVNSHLARVTCRVGDLYSDLRDGRNLLRLLEVLSGEILPKPTKGRMRIHCLENVDKALQFLKEQKVHLENMGSHDIVDGNHRLTLGLVWTIILRFQIQDISVETEDNKEKKSAKDALLLWCQMKTAGYPNVNVHNFTTSWRDGLAFNAIVHKHRPDLLDFESLKKCNAHYNLQNAFNLAEKELGLTKLLDPEDVNVDQPDEKSIITYVATYYHYFSKMKALAVEGKRIGKVLDHAMEAERLVEKYESLASELLQWIEQTIVTLNDRQLANSLSGVQNQLQSFNSYRTVEKPPKFTEKGNLEVLLFTIQSKLRANNQKVYTPREGRLISDINKAWERLEKAEHERELALRTELIRQEKLEQLAARFDRKAAMRETWLSENQRLVSQDNFGLELAAVEAAVRKHEAIETDIVAYSGRVQAVDAVAAELAAERYHDIKRIAARQHNVARLWDFLRQMVAARRERLLLNLELQKVFQDLLYLMDWMEEMKGRLQSQDLGRHLAGVEDLLQLHELVEADIAVQAERVRAVSASALRFCNPGKEYRPCDPQLVSERVAKLEQSYEALCELAAARRARLEESRRLWRFLWEVGEAEAWVREQQHLLASADTGRDLTGALRLLNKHTALRGEMSGRLGPLKLTLEQGQQLVAEGHPGASQASARAAELQAQWERLEALAEERAQRLAQAASLYQFQADANDMEAWLVDALRLVSSPELGHDEFSTQALARQHRALEEEIRSHRPTLDALREQAAALPPTLSRTPEVQGRVPTLERHYEELQARAGERARALEAALALYTMLSEAGACGLWVEEKEQWLNGLALPERLEDLEVVQQRFETLEPEMNTLAAQITAVNDIAEQLLKANPPGKDRIVNTQEQLNHRWQQFRRLADGKKAALTSALSIQNYHLECTETQAWMREKTKVIESTQGLGNDLAGVLALQRKLAGTERDLEAIAARVGELTREANALAAGHPAQAVAINARLREVQTGWEDLRATMRRREESLGEARRLQDFLRSLDDFQAWLGRTQTAVASEEGPATLPEAEALLAQHAALRGEVERAQSEYSRLRALGEEVTRDQADPQCLFLRQRLEALGTGWEELGRMWESRQGRLAQAHGFQGFLRDARQAEGVLSSQEYVLSHTEMPGTLQAADAAIKKLEDFMSTMDANGERIHGLLEAGRQLVSEGNIHADKIREKADSIERRHKKNQDAAQQFLGRLRDNREQQHFLQDCHELKLWIDEKMLTAQDVSYDEARNLHTKWQKHQAFMAELAANKDWLDKVDKEGRELTLEKPELKALVSEKLRDLHRRWDELETTTQAKARSLFDANRAELFAQSCCALESWLESLQAQLHSDDYGKDLTSVNILLKKQQMLEWEMAVREKEVEAIQAQAKALAQEDQGAGEVERTSRAVEEKFRALCQPMRERCRRLQASREQHQFHRDVEDEILWVTERLPMASSMEHGKDLPSVQLLMKKNQTLQKEIQGHEPRIADLRERQRALGAAAAGPELAELQEMWKRLGHELELRGKRLEDALRAQQFYRDAAEAEAWMGEQELHMMGQEKAKDELSAQAEVKKHQVLEQALADYAQTIHQLAASSQDMIDHEHPESTRISIRQAQVDKLYAGLKELAGERRERLQEHLRLCQLRRELDDLEQWIQEREVVAASHELGQDYEHVTMLRDKFREFSRDTSTIGQERVDSANALANGLIAGGHAARATVAEWKDSLNEAWADLLELLDTRGQVLAAAYELQRFLHGARQALARVQHKQQQLPDGTGRDLNAAEALQRRHCAYEHDIQALSPQVQQVQDDGHRLQKAYAGDKAEEIGRHMQAVAEAWAQLQGSSAARRQLLLDTTDKFRFFKAVRELMLWMDEVNLQMDAQERPRDVSSADLVIKNQQGIKAEIEARADRFSSCIDMGKELLARSHYAAEEISEKLSQLQARRQETAEKWQEKMDWLQLVLEVLVFGRDAGMAEAWLCSQEPLVRSAELGCTVDEVESLIKRHEAFQKSAVAWEERFCALEKLTALEEREKERKRKREEEERRKQPPAPEPTASVPPGDLVGGQTASDTTWDGTQPRPPPSTQAPSVNGVCTDGEPSQPLLGQQRLEHSSFPEGPGPGSGDEANGPRGERQTRTRGPAPSAMPQSRSTESAHAATLPPRGPEPSAQEQMEGMLCRKQEMEAFGKKAANRSWQNVYCVLRRGSLGFYKDAKAASAGVPYHGEVPVSLARAQGSVAFDYRKRKHVFKLG

SEQ ID NO: 869810 - protein, 1669 aa, Homo sapiens
GTEAGSRETSSAVSLEEGSRVSGIRILEEKQNRTRSRKPPTTMSSTLSPTDFDSLEIQGQYSDINNRWDLPDSDWDNDSSSARLFERSRIKALADEREAVQKKTFTKWVNSHLARVTCRVGDLYSDLRDGRNLLRLLEVLSGEILPKPTKGRMRIHCLENVDKALQFLKEQKVHLENMGSHDIVDGNHRLTLGLVWTIILRFQIQDISVETEDNKEKKSAKDALLLWCQMKTAGYPNVNVHNFTTSWRDGLAFNAIVHKHRPDLLDFESLKKCNAHYNLQNAFNLAEKELGLTKLLDPEDVNVDQPDEKSIITYVATYYHYFSKMKALAVEGKRIGKVLDHAMEAERLVEKYESLASELLQWIEQTIVTLNDRQLANSLSGVQNQLQSFNSYRTVEKPPKFTEKGNLEVLLFTIQSKLRANNQKVYTPREGRLISDINKAWERLEKAEHERELALRTELIRQEKLEQLAARFDRKAAMRETWLSENQRLVSQDNFGLELAAVEAAVRKHEAIETDIVAYSGRVQAVDAVAAELAAERYHDIKRIAARQHNVARLWDFLRQMVAARRERLLLNLELQKVFQDLLYLMDWMEEMKGRLQSQDLGRHLAGVEDLLQLHELVEADIAVQAERVRAVSASALRFCNPGKEYRPCDPQLVSERVAKLEQSYEALCELAAARRARLEESRRLWRFLWEVGEAEAWVREQQHLLASADTGRDLTGALRLLNKHTALRGEMSGRLGPLKLTLEQGQQLVAEGHPGASQASARAAELQAQWERLEALAEERAQRLAQAASLYQFQADANDMEAWLVDALRLVSSPELGHDEFSTQALARQHRALEEEIRSHRPTLDALREQAAALPPTLSRTPEVQGRVPTLERHYEELQARAGERARALEAALALYTMLSEAGACGLWVEEKEQWLNGLALPERLEDLEVVQQRFETLEPEMNTLAAQITAVNDIAEQLLKANPPGKDRIVNTQEQLNHRWQQFRRLADGKKAALTSALSIQNYHLECTETQAWMREKTKVIESTQGLGNDLAGVLALQRKLAGTERDLEAIAARVGELTREANALAAGHPAQAVAINARLREVQTGWEDLRATMRRREESLGEARRLQDFLRSLDDFQAWLGRTQTAVASEEGPATLPEAEALLAQHAALRGEVERAQSEYSRLRALGEEVTRDQADPQCLFLRQRLEALGTGWEELGRMWESRQGRLAQAHGFQGFLRDARQAEGVLSSQEYVLSHTEMPGTLQAADAAIKKLEDFMSTMDANGERIHGLLEAGRQLVSEGNIHADKIREKADSIERRHKKNQDAAQQFLGRLRDNREQQHFLQDCHELKLWIDEKMLTAQDVSYDEARNLHTKWQKHQAFMAELAANKDWLDKVDKEGRELTLEKPELKALVSEKLRDLHRRWDELETTTQAKARSLFDANRAELFAQSCCALESWLESLQAQLHSDDYGKDLTSVNILLKKQQMLEWEMAVREKEVEAIQAQAKALAQEDQGAGEVERTSRAVEEKFRALCQPMRERCRRLQASREQHQFHRDVEDEILWVTERLPMASSMEHGKDLPSVQLLMKKNQTLQKEIQGHEPRIADLRERQRALGAAAAGPELAELQEMWKRLGHELELRGKRLEDALRAQQFYRDAAEAEAWMGEQELHMMGQEKAKDELLLPRLE

SEQ ID NO: 869811 - protein, 2432 aa, Homo sapiens
GTEAGSRETSSAVSLEEGSRVSGIRILEEKQNRTRSRKPPTTMSSTLSPTDFDSLEIQGQYSDINNRWDLPDSDWDNDSSSARLFERSRIKALADEREAVQKKTFTKWVNSHLARVTCRVGDLYSDLRDGRNLLRLLEVLSGEILPKPTKGRMRIHCLENVDKALQFLKEQKVHLENMGSHDIVDGNHRLTLGLVWTIILRFQIQDISVETEDNKEKKSAKDALLLWCQMKTAGYPNVNVHNFTTSWRDGLAFNAIVHKHRPDLLDFESLKKCNAHYNLQNAFNLAEKELGLTKLLDPEDVNVDQPDEKSIITYVATYYHYFSKMKALAVEGKRIGKVLDHAMEAERLVEKYESLASELLQWIEQTIVTLNDRQLANSLSGVQNQLQSFNSYRTVEKPPKFTEKGNLEVLLFTIQSKLRANNQKVYTPREGRLISDINKAWERLEKAEHERELALRTELIRQEKLEQLAARFDRKAAMRETWLSENQRLVSQDNFGLELAAVEAAVRKHEAIETDIVAYSGRVQAVDAVAAELAAERYHDIKRIAARQHNVARLWDFLRQMVAARRERLLLNLELQKVFQDLLYLMDWMEEMKGRLQSQDLGRHLAGVEDLLQLHELVEADIAVQAERVRAVSASALRFCNPGKEYRPCDPQLVSERVAKLEQSYEALCELAAARRARLEESRRLWRFLWEVGEAEAWVREQQHLLASADTGRDLTGALRLLNKHTALRGEMSGRLGPLKLTLEQGQQLVAEGHPGASQASARAAELQAQWERLEALAEERAQRLAQAASLYQFQADANDMEAWLVDALRLVSSPELGHDEFSTQALARQHRALEEEIRSHRPTLDALREQAAALPPTLSRTPEVQGRVPTLERHYEELQARAGERARALEAALALYTMLSEAGACGLWVEEKEQWLNGLALPERLEDLEVVQQRFETLEPEMNTLAAQITAVNDIAEQLLKANPPGKDRIVNTQEQLNHRWQQFRRLADGKKAALTSALSIQNYHLECTETQAWMREKTKVIESTQGLGNDLAGVLALQRKLAGTERDLEAIAARVGELTREANALAAGHPAQAVAINARLREVQTGWEDLRATMRRREESLGEARRLQDFLRSLDDFQAWLGRTQTAVASEEGPATLPEAEALLAQHAALRGEVERAQSEYSRLRALGEEVTRDQADPQCLFLRQRLEALGTGWEELGRMWESRQGRLAQAHGFQGFLRDARQAEGVLSSQEYVLSHTEMPGTLQAADAAIKKLEDFMSTMDANGERIHGLLEAGRQLVSEGNIHADKIREKADSIERRHKKNQDAAQQFLGRLRDNREQQHFLQDCHELKLWIDEKMLTAQDVSYDEARNLHTKWQKHQAFMAELAANKDWLDKVDKEGRELTLEKPELKALVSEKLRDLHRRWDELETTTQAKARSLFDANRAELFAQSCCALESWLESLQAQLHSDDYGKDLTSVNILLKKQQMLEWEMAVREKEVEAIQAQAKALAQEDQGAGEVERTSRAVEEKFRALCQPMRERCRRLQASREQHQFHRDVEDEILWVTERLPMASSMEHGKDLPSVQLLMKKNQTLQKEIQGHEPRIADLRERQRALGAAAAGPELAELQEMWKRLGHELELRGKRLEDALRAQQFYRDAAEAEAWMGEQELHMMGQEKAKDELSAQAEVKKHQVLEQALADYAQTIHQLAASSQDMIDHEHPESTRISIRQAQVDKLYAGLKELAGERRERLQEHLRLCQLRRELDDLEQWIQEREVVAASHELGQDYEHVTMLRDKFREFSRDTSTIGQERVDSANALANGLIAGGHAARATVAEWKDSLNEAWADLLELLDTRGQVLAAAYELQRFLHGARQALARVQHKQQQLPDGTGRDLNAAEALQRRHCAYEHDIQALSPQVQQVQDDGHRLQKAYAGDKAEEIGRHMQAVAEAWAQLQGSSAARRQLLLDTTDKFRFFKAVRELMLWMDEVNLQMDAQERPRDVSSADLVIKNQQGIKAEIEARADRFSSCIDMGKELLARSHYAAEEISEKLSQLQARRQETAEKWQEKMDWLQLVLEVLVFGRDAGMAEAWLCSQEPLVRSAELGCTVDEVESLIKRHEAFQKSAVAWEERFCALEKLTALEEREKERKRKREEEERRKQPPAPEPTASVPPGDLVGGQTASDTTWDGTQPRPPPSTQAPSVNGVCTDGEPSQPLLGQQRLEHSSFPEGPGPGSGDEANGPRGERQTRTRGPAPSAMPQSRSTESAHAATLPPRGPEPSAQEQMEGMLCRKQEMEAFGKKAANRSWQNVYCVLRRGSLGFYKDAKAASAGVPYHGEVPVSLARAQGSVAFDYRKRKHVFKLGLQDGKEYLFQAKDEAEMSSWLRVVNAAIATASSASGEPEEPVVPSTTRGMTRAMTMPPVSPVGAEGPVVLRSKDGREREREKRFSFFKKNK

SEQ ID NO: 869812 - protein, 2407 aa, Homo sapiens; identical to SEQ ID NO: 869807

SEQ ID NO: 869813 - protein, 109 aa, Homo sapiens
HEAAKTAENESSQLPPSVQETARDSRQGPPSCQDNCLLLGSVAKVNPSPGTVTGDESMFPRAALLFCCLIPDWWWDPGNPLSHPRRLLPFPQPRASVPHHGVDSAAPST

SEQ ID NO: 869814 - protein, 470 aa, Homo sapiens
MAATLLMAGSQAPVTFEDMAMYLTREEWRPLDAAQRDLYRDVMQENYGNVVSLDFEIRSENEVNPKQEISEDVQFGTTSERPAENAEENPESEEGFESGDRSERQWGDLTAEEWVSYPLQPVTDLLVHKEVHTGIRYHICSHCGKAFSQISDLNRHQKTHTGDRPYKCYECGKGFSRSSHLIQHQRTHTGERPYDCNECGKSFGRSSHLIQHQTIHTGEKPHKCNECGKSFCRLSHLIQHQRTHSGEKPYECEECGKSFSRSSHLAQHQRTHTGEKPYECNECGRGFSERSDLIKHYRVHTGERPYKCDECGKNFSQNSDLVRHRRAHTGEKPYHCNECGENFSRISHLVQHQRTHTGEKPYECNACGKSFSRSSHLITHQKIHTGEKPYECNECWRSFGERSDLIKHQRTHTGEKPYECVQCGKGFTQSSNLITHQRVHTGEKPYECTECEKSFSRSSALIKHKRVHTD

SEQ ID NO: 869815 - protein, 470 aa, Homo sapiens; identical to SEQ ID NO: 869814

SEQ ID NO: 869816 - protein, 192 aa, Homo sapiens
MAATLLMAGSQAPVTFEDMAMYLTREEWRPLDAAQRDLYRDVMQENYGNVVSLDFEIRSENEVNPKQEISEDVQFGTTSERPAENAEENPESEEGFESGDRSERQWGDLTAEEWVSYPLQPVTDLLVHKEVHTGIRYHICSHCGKAFSQISDLNRHQKTHTGDRPYKCYECGKGFSRSSHLIQHSSQQGYRA

SEQ ID NO: 869817 - protein, 470 aa, Homo sapiens; identical to SEQ ID NO: 869814

SEQ ID NO: 869818 - protein, 362 aa, Homo sapiens
MAPRSLLLLLSGALALTDTWAGSHSLRYFSTAVSRPGRGEPRYIAVEYVDDTQFLRFDSDAAIPRMEPREPWVEQEGPQYWEWTTGYAKANAQTDRVALRNLLRRYNQSEAGSHTLQGMNGCDMGPDGRLLRGYHQHAYDGKDYISLNEDLRSWTAADTVAQITQRFYEAEEYAEEFRTYLEGECLELLRRYLENGKETLQRADPPKAHVAHHPISDHEATLRCWALGFYPAEITLTWQRDGEEQTQDTELVETRPAGDGTFQKWAAVVVPSGEEQRYTCHVQHEGLPQPLILRWEQSPQPTIPIVGIVAGLVVLGAVVTGAVVAAVMWRKKSSDRNRGSYSQAAVTDSAQGSGVSLTANKV

SEQ ID NO: 869819 - protein, 389 aa, Homo sapiens
MAPRSLLLLLSGALALTDTWAGECGVQRETASVGRSEGPARWGRRTQGAAPEEGLAGLSPSSPPGSHSLRYFSTAVSRPGRGEPRYIAVEYVDDTQFLRFDSDAAIPRMEPREPWVEQEGPQYWEWTTGYAKANAQTDRVALRNLLRRYNQSEAGSHTLQGMNGCDMGPDGRLLRGYHQHAYDGKDYISLNEDLRSWTAADTVAQITQRFYEAEEYAEEFRTYLEGECLELLRRYLENGKETLQRADPPKAHVAHHPISDHEATLRCWALGFYPAEITLTWQRDGEEQTQDTELVETRPAGDGTFQKWAAVVVPSGEEQRYTCHVQHEGLPQPLILRWEQSPQPTIPIVGIVAGLVVLGAVVTGAVVAAVMWRKKSSDRNRGSYSQAAV

SEQ ID NO: 869820 - protein, 353 aa, Homo sapiens
MAPRSLLLLLSGALALTDTWAGSHSLRYFSTAVSRPGRGEPRYIAVEYVDDTQFLRFDSDAAIPRMEPREPWVEQEGPQYWEWTTGYAKANAQTDRVALRNLLRRYNQSEAGSHTLQGMNGCDMGPDGRLLRGYHQHAYDGKDYISLNEDLRSWTAADTVAQITQRFYEAEEYAEEFRTYLEGECLELLRRYLENGKETLQRADPPKAHVAHHPISDHEATLRCWALGFYPAEITLTWQRDGEEQTQDTELVETRPAGDGTFQKWAAVVVPSGEEQRYTCHVQHEGLPQPLILRWEQSPQPTIPIVGIVAGLVVLGAVVTGAVVAAVMWRKKSSDRNRGSYSQAAGKMKEADP

SEQ ID NO: 869821 - protein, 369 aa, Homo sapiens
MAPRSLLLLLSGALALTDTWAGSHSLRYFSTAVSRPGRGEPRYIAVEYVDDTQFLRFDSDAAIPRMEPREPWVEQEGPQYWEWTTGYAKANAQTDRVALRNLLRRYNQSEAGSHTLQGMNGCDMGPDGRLLRGYHQHAYDGKDYISLNEDLRSWTAADTVAQITQRFYEAEEYAEEFRTYLEGECLELLRRYLENGKETLQRADPPKAHVAHHPISDHEATLRCWALGFYPAEITLTWQRDGEEQTQDTELVETRPAGDGTFQKWAAVVVPSGEEQRYTCHVQHEGLPQPLILRWEQSPQPTIPIVGIVAGLVVLGAVVTGAVVAAVMWRKKSSGPAPECLYLSNKYSHPGAIFPPEDISYVWKNVLLP

SEQ ID NO: 869822 - protein, 353 aa, Homo sapiens; identical to SEQ ID NO: 869820

SEQ ID NO: 869823 - protein, 338 aa, Homo sapiens
MAPRSLLLLLSGALALTDTWAGSHSLRYFSTAVSRPGRGEPRYIAVEYVDDTQFLRFDSDAAIPRMEPREPWVEQEGPQYWEWTTGYAKANAQTDRVALRNLLRRYNQSEAGSHTLQGMNGCDMGPDGRLLRGYHQHAYDGKDYISLNEDLRSWTAADTVAQITQRFYEAEEYAEEFRTYLEGECLELLRRYLENGKETLQRADPPKAHVAHHPISDHEATLRCWALGFYPAEITLTWQRDGEEQTQDTELVETRPAGDGTFQKWAAVVVPSGEEQRYTCHVQHEGLPQPLILRWEQSPQPTIPIVGIVAGLVVLGAVVTGAVVAAVMWRKKSSGRKG

SEQ ID NO: 869824 - protein, 442 aa, Homo sapiens
MAPRSLLLLLSGALALTDTWAGSHSLRYFSTAVSRPGRGEPRYIAVEYVDDTQFLRFDSDAAIPRMEPREPWVEQEGPQYWEWTTGYAKANAQTDRVALRNLLRRYNQSEAGSHTLQGMNGCDMGPDGRLLRGYHQHAYDGKDYISLNEDLRSWTAADTVAQITQRFYEAEEYAEEFRTYLEGECLELLRRYLENGKETLQRADPPKAHVAHHPISDHEATLRCWALGFYPAEITLTWQRDGEEQTQDTELVETRPAGDGTFQKWAAVVVPSGEEQRYTCHVQHEGLPQPLILRWEQSPQPTIPIVGIVAGLVVLGAVVTGAVVAAVMWRKKSSDRNRGSYSQAAAYSVVSGNLMITWWSSLFLLGVLFQGYLGCLRSHSVLGRRKVGDMWILFFLWLWTSFNTAFLALQSLRFGFGFRRGRSFLLRSWHHLMKRVQIKIFD

SEQ ID NO: 869825 - protein, 346 aa, Homo sapiens
MAPRSLLLLLSGALALTDTWAGSHSLRYFSTAVSRPGRGEPRYIAVEYVDDTQFLRFDSDAAIPRMEPREPWVEQEGPQYWEWTTGYAKANAQTDRVALRNLLRRYNQSEAGSHTLQGMNGCDMGPDGRLLRGYHQHAYDGKDYISLNEDLRSWTAADTVAQITQRFYEAEEYAEEFRTYLEGECLELLRRYLENGKETLQRADPPKAHVAHHPISDHEATLRCWALGFYPAEITLTWQRDGEEQTQDTELVETRPAGDGTFQKWAAVVVPSGEEQRYTCHVQHEGLPQPLILRWEQSPQPTIPIVGIVAGLVVLGAVVTGAVVAAVMWRKKSSDRNRGSYSQAAV

SEQ ID NO: 869826 - protein, 338 aa, Homo sapiens; identical to SEQ ID NO: 869823

SEQ ID NO: 869827 - protein, 338 aa, Homo sapiens; identical to SEQ ID NO: 869823

SEQ ID NO: 869828 - protein, 431 aa, Homo sapiens
MAPRSLLLLLSGALALTDTWAGSHSLRYFSTAVSRPGRGEPRYIAVEYVDDTQFLRFDSDAAIPRMEPREPWVEQEGPQYWEWTTGYAKANAQTDRVALRNLLRRYNQSEAGSHTLQGMNGCDMGPDGRLLRGYHQHAYDGKDYISLNEDLRSWTAADTVAQITQRFYEAEEYAEEFRTYLEGECLELLRRYLENGKETLQRADPPKAHVAHHPISDHEATLRCWALGFYPAEITLTWQRDGEEQTQDTELVETRPAGDGTFQKWAAVVVPSGEEQRYTCHVQHEGLPQPLILRWEQSPQPTIPIVGIVAGLVVLGAVVTGAVVAAVMWRKKSSAYSVVSGNLMITWWSSLFLLGVLFQGYLGCLRSHSVLGRRKVGDMWILFFLWLWTSFNTAFLALQSLRFGFGFRRGRSFLLRSWHHLMKRVQIKIFD

SEQ ID NO: 869829 - protein, 216 aa, Homo sapiens
MAPRSLLLLLSGALALTDTWAGSHSLRYFSTAVSRPGRGEPRYIAVEYVDDTQFLRFDSDAAIPRMEPREPWVEQEGPQYWEWTTGYAKANAQTDRVALRNLLRRYNQSEAGSHTLQGMNGCDMGPDGRLLRGYHQHAYDGKDYISLNEDLRSWTAADTVAQITQRFYEAEEYAEEFRTYLEGECLELLRRYLENGKETLQRADPPGHSARGVLLG

SEQ ID NO: 869830 - protein, 123 aa, Homo sapiens
KQREPLQKGEPGSVPLGHHDLTALLLPSWFHGKITREQAERLLYPPETGLFLVRESTNYPGDYTLCVSCDGKVEHYRIMYHASKLSIDEEVYFENLMQLVEHYTSDQMDSVALHDLWFNEAST

SEQ ID NO: 869831 - protein, 450 aa, Homo sapiens
MSAIQAAWPSGTECIAKYNFHGTAEQDLPFCKGDVLTIVAVTKDPNWYKAKNKVGREGIIPANYVQKREGVKAGTKLSLMPWFHGKITREQAERLLYPPETGLFLVRESTNYPGDYTLCVSCDGKVEHYRIMYHASKLSIDEEVYFENLMQLVEHYTSDADGLCTRLIKPKVMEGTVAAQDEFYRSGWALNMKELKLLQTIGKGEFGDVMLGDYRGNKVAVKCIKNDATAQAFLAEASVMTQLRHSNLVQLLGVIVEEKGGLYIVTEYMAKGSLVDYLRSRGRSVLGGDCLLKFSLDVCEAMEYLEGNNFVHRDLAARNVLVSEDNVAKVSDFGLTKEASSTQDTGKLPVKWTAPEALREKKFSTKSDVWSFGILLWEIYSFGRVPYPRIPLKDVVPRVEKGYKMDAPDGCPPAVYEVMKNCWHLDAAMRPSFLQLREQLEHIKTHELHL

SEQ ID NO: 869832 - protein, 450 aa, Homo sapiens; identical to SEQ ID NO: 869831

SEQ ID NO: 869833 - protein, 475 aa, Homo sapiens
MSAIQAAWPSGTECIAKYNFHGTAEQDLPFCKGDVLTIVAVTKDPNWYKAKNKVGREGIIPANYVQKREGVKAGTKLSLMPWFHGKITREQAERLLYPPETGLFLVRESTNYPGDYTLCVSCDGKVEHYRIMYHASKLSIDEEVYFENLMQLVEHYTSDADGLCTRLIKPKVMEGTVAAQDEFYRSGWALNMKELKLLQTIGKGEFGGELGRAPGGVLRDSELGNKTTSLPPDVMLGDYRGNKVAVKCIKNDATAQAFLAEASVMTQLRHSNLVQLLGVIVEEKGGLYIVTEYMAKGSLVDYLRSRGRSVLGGDCLLKFSLDVCEAMEYLEGNNFVHRDLAARNVLVSEDNVAKVSDFGLTKEASSTQDTGKLPVKWTAPEALREKKFSTKSDVWSFGILLWEIYSFGRVPYPRIPLKDVVPRVEKGYKMDAPDGCPPAVYEVMKNCWHLDAAMRPSFLQLREQLEHIKTHELHL

SEQ ID NO: 869834 - protein, 211 aa, Homo sapiens
MTQLRHSNLVQLLGVIVEEKGGLYIVTEYMAKGSLVDYLRSRGRSVLGGDCLLKFSLDVCEAMEYLEGNNFVHRDLAARNVLVSEDNVAKVSDFGLTKEASSTQDTGKLPVKWTAPEALREKKFSTKSDVWSFGILLWEIYSFGRVPYPRIPLKDVVPRVEKGYKMDAPDGCPPAVYEVMKNCWHLDAAMRPSFLQLREQLEHIKTHELHL

SEQ ID NO: 869835 - protein, 163 aa, Homo sapiens
AIAGLVMTRNMRSEQDTCMGNNFVHRDLAARNVLVSEDNVAKVSDFGLTKEASSTQDTGKLPVKWTAPEALREKKFSTKSDVWSFGILLWEIYSFGRVPYPRIPLKDVVPRVEKGYKMDAPDGCPPAVYEVMKNCWHLDAAMRPSFLQLREQLEHIKTHELHL

SEQ ID NO: 869836 - protein, 97 aa, Homo sapiens
SCEGVIQGPRAFEERSLASGWHVCRDVLFIGELGALHPLRSSCSSLCIGSGARKKQKMFPFTTAGGPDPKRLSHTEWPSARVGNFGDRMQLPPNKYR

SEQ ID NO: 869837 - protein, 450 aa, Homo sapiens; identical to SEQ ID NO: 869831

SEQ ID NO: 869838 - protein, 434 aa, Homo sapiens
MSAIQAAWPSGTECIAKYNFHGTAEQDLPFCKGDVLTIVAVTKDPNWYKAKNKVGREGIIPANYVQKREGVKAGTKLSLMPWFHGKITREQAERLLYPPETGLFLVRESTNYPGDYTLCVSCDGKVEHYRIMYHASKLSIDEEVYFENLMQLVEHYTSDADGLCTRLIKPKVMEGTVAAQDEFYRSGWALNMKELKLLQTIGKGEFGDVMLGDYRGNKVAVKCIKNDATAQAFLAEASVMTQLRHSNLVQLLGVIVEEKGGLYIVTEYMAKGTCGWPTPRDVCEAMEYLEGNNFVHRDLAARNVLVSEDNVAKVSDFGLTKEASSTQDTGKLPVKWTAPEALREKKFSTKSDVWSFGILLWEIYSFGRVPYPRIPLKDVVPRVEKGYKMDAPDGCPPAVYEVMKNCWHLDAAMRPSFLQLREQLEHIKTHELHL

SEQ ID NO: 869839 - protein, 60 aa, Homo sapiens
MEYLEGNNFVHRDLAARNVLVSEDNVAKVSDFGLTKEASSTQDTGKLPVKWTAPEALREK

SEQ ID NO: 869840 - protein, 289 aa, Homo sapiens
MGYFRCAGAGSFGRRRKMEPSTAARAWALFWLLLPLLGAVCASGPRTLVLLDNLNVRETHSLFFRSLKDRGFELTFKTADDPSLSLIKYGEFLYDNLIIFSPSVEDFGGNINVETISAFIDGGGSVLVAASSDIGDPLRELGSECGIEFDEEKTAVIDHHNYDISDLGQHTLIVADTENLLKAPTIVGKSSLNPILFRGVGMVADPDNPLVLDILTGSSTSYSFFPDKPITQYPHAVGEEHPPHCWAPGQEQCPRHLQRLPRLLQRLLLQLSSAEGGARLPEVFPDRQL

SEQ ID NO: 869841 - protein, 289 aa, Homo sapiens; identical to SEQ ID NO: 869840

SEQ ID NO: 869842 - protein, 289 aa, Homo sapiens; identical to SEQ ID NO: 869840

SEQ ID NO: 869843 - protein, 289 aa, Homo sapiens; identical to SEQ ID NO: 869840

SEQ ID NO: 869844 - protein, 289 aa, Homo sapiens; identical to SEQ ID NO: 869840

SEQ ID NO: 869845 - protein, 289 aa, Homo sapiens; identical to SEQ ID NO: 869840

SEQ ID NO: 869846 - protein, 289 aa, Homo sapiens; identical to SEQ ID NO: 869840

SEQ ID NO: 869847 - protein, 222 aa, Homo sapiens
MRWGKNTLLIAGLQARNNARVIFSGSLDFFSDSFFNSAVQKAAPGSQRYSQTGNYELAVALSRWVFKEEGVLRVGPVSHHRVGETAPPNAYTVTDLVEYSIVIQQLSNGKWVPFDGDDIQLEFVRIDPFVRTFLKKKGGKYSVQFKLPDVYGVFQFKVDYNRLGYTHLYSSTQVSVRPLQHTQYERFIPSAYPYYASAFSMMLGLFIFSIVFLHMKEKEKSD

SEQ ID NO: 869848 - protein, 222 aa, Homo sapiens; identical to SEQ ID NO: 869847

SEQ ID NO: 869849 - protein, 222 aa, Homo sapiens; identical to SEQ ID NO: 869847

SEQ ID NO: 869850 - protein, 273 aa, Homo sapiens
MGYFRCAGAGSFGRRRKMEPSTAARAWALFWLLLPLLGAVCASGPRTLVLLDNLNVRETHSLFFRSLKDRGFELTFKTADDPSLSLIKYGEFLYDNLIIFSPSVEDFGGNINVETISAFIDGGGSVLVAASSDIGDPLRELGSECGIEFDEEKHTLIVADTENLLKAPTIVGKSSLNPILFRGVGMVADPDNPLVLDILTGSSTSYSFFPDKPITQYPHAVGEEHPPHCWAPGQEQCPRHLQRLPRLLQRLLLQLSSAEGGARLPEVFPDRQL

SEQ ID NO: 869851 - protein, 222 aa, Homo sapiens; identical to SEQ ID NO: 869847

SEQ ID NO: 869852 - protein, 287 aa, Homo sapiens
MGYFRCAGAGSFGRRRKMEPSTAARAWALFWLLLPLLGAVCASGPRTLVLLDNLNVRETHSLFFRSLKDRGFELTFKTADDPSLSLIKYGEFLYDNLIIFSPSVEDFGGNINVETISAFIDGGGSVLVAASSDIGDPLRELGSECGIEFDEEKTAVIDHHNYDISDLGQHTLIVADTENLLKAPTIVGKSSLNPILFRGVGMVADPDNPLVLDILTGSSTSYSFFPDKPITQYPHAVGEEHPPHCWAPGQEQCPRHLQRLPRLLQRMLGLFIFSIVFLHMKEKEKSD

SEQ ID NO: 869853 - protein, 287 aa, Homo sapiens; identical to SEQ ID NO: 869852

SEQ ID NO: 869854 - protein, 108 aa, Homo sapiens
ETRLVRARCESAEASTAARAWALFWLLLPLLGAVCASGPRTLVLLDNLNVRETHSLFFRSLKDRGFELTFKTADDPSLSLIKYGEFLYDNLIIFSPSVEGIPRQATMN

SEQ ID NO: 869855 - protein, 281 aa, Homo sapiens
ETTLVRARCESAEASTAARAWALFWLLLPLLGAVCASGPRTLVLLDNLNVRETHSLFFRSLKDRGFELTFKTADDPSLSLIKYGEFLYDNLIIFSPSVEDFGGNINVETISAFIDGGGSVLVAASSDIGDPLRELGSECGIEFDEEKTAVIDHHNYDISDLGQHTLIVADTENLLKAPTIVGKSSLNPILFRGVGMVADPDNPLVLDILTGSSTSYSFFPDKPITQYPHAVGEEHPPHCWAPGQEQCPRHLQRLPRLLQRMLGLFIFSIVFLHMKEKEKSD

SEQ ID NO: 869856 - protein, 163 aa, Homo sapiens
LLGIPAMFVGWELSAALPAGGGRPPVMASPGYPGLLSQEYSIVIQQLSNGKWVPFDGDDIQLEFVRIDPFVRTFLKKKGGKYSVQFKLPDVYGVFQFKVDYNRLGYTHLYSSTQVSVRPLQHTQYERFIPSAYPYYASAFSMMLGLFIFSIVFLHMKEKEKSD

SEQ ID NO: 869857 - protein, 258 aa, Homo sapiens
MGYFRCAGAGSFGRRRKMEPSTAARAWALFWLLLPLLGAVCASGPRTLVLLDNLNVRETHSLFFRSLKDRGFELTFKTADDPSLSLIKYGEFLYDNLIIFSPSVEGDPLRELGSECGIEFDEEKTAVIDHHNYDISDLGQHTLIVADTENLLKAPTIVGKSSLNPILFRGVGMVADPDNPLVLDILTGSSTSYSFFPDKPITQYPHAVGEEHPPHCWAPGQEQCPRHLQRLPRLLQRLLLQLSSAEGGARLPESCQEA

SEQ ID NO: 869858 - protein, 289 aa, Homo sapiens; identical to SEQ ID NO: 869840

SEQ ID NO: 869859 - protein, 289 aa, Homo sapiens; identical to SEQ ID NO: 869840

SEQ ID NO: 869860 - protein, 289 aa, Homo sapiens; identical to SEQ ID NO: 869840

SEQ ID NO: 869861 - protein, 289 aa, Homo sapiens; identical to SEQ ID NO: 869840

SEQ ID NO: 869862 - protein, 289 aa, Homo sapiens; identical to SEQ ID NO: 869840

SEQ ID NO: 869863 - protein, 289 aa, Homo sapiens; identical to SEQ ID NO: 869840

SEQ ID NO: 869864 - protein, 289 aa, Homo sapiens; identical to SEQ ID NO: 869840

SEQ ID NO: 869865 - protein, 289 aa, Homo sapiens; identical to SEQ ID NO: 869840

SEQ ID NO: 869866 - protein, 309 aa, Homo sapiens
MGYFRCAGAGSFGRRRKMEPSTAARAWALFWLLLPLLGAVCASGPRTLVLLDNLNVRETHSLFFRSLKDRGFELTFKTADDPSLSLIKYGEFLYDNLIIFSPSVEDFGGNINVETISAFIDGGGSVLVAASSDIGDPLRELGSECGIEFDEEKTAVIDHHNYDISDLGQHTLIVADTENLLKAPTIVGKSSLNPILFRGVGMVADPDNPLVLDILTGSSTSYSFFPDKPITQYPHAVGEEHPPHCWAPGQEQCPRHLQRLPRLLQRLLLQLSSAEGGARLPERGKMAQLYLCGRCNTESQGVGVGIIFI

SEQ ID NO: 869867 - protein, 222 aa, Homo sapiens; identical to SEQ ID NO: 869847

SEQ ID NO: 869868 - protein, 278 aa, Homo sapiens
MGYFRCAGAGSFGRRRKMEPSTAARAWALFWLLLPLLGAVCASGPRTLVLLDNLNVRETHSLFFRSLKDRGFELTFKTADDPSLSLIKYGEFLYDNLIIFSPSVEDFGGNINVETISAFIDGGGSVLVAASSDIGDPLRELGSECGIEFDEEKTAVIDHHNYDISDLGQHTLIVADTENLLKAPTIVGKSSLNPILFRGVGMVADPDNPLVLDILTGSSTSYSFFPDKPITQYPHAVGEEHPPSPAGCSRRRVSSVWGLCPIIGWARQPHPMPTLSLT

SEQ ID NO: 869869 - protein, 222 aa, Homo sapiens; identical to SEQ ID NO: 869847

SEQ ID NO: 869870 - protein, 203 aa, Homo sapiens
MVDMSGPAHQAPLERWLWCPSCSCFPPAGYSQTGNYELAVALSRWVFKEEGVLRVGPVSHHRVGETAPPNAYTVTDLVEYSIVIQQLSNGKWVPFDGDDIQLEFVRIDPFVRTFLKKKGGKYSVQFKLPDVYGVFQFKVDYNRLGYTHLYSSTQVSVRPLQHTQYERFIPSAYPYYASAFSMMLGLFIFSIVFLHMKEKEKSD

SEQ ID NO: 869871 - protein, 278 aa, Homo sapiens; identical to SEQ ID NO: 869868

SEQ ID NO: 869872 - protein, 201 aa, Homo sapiens
MGYFRCAGAGSFGRRRKMEPSTAARAWALFWLLLPLLGAVCASGPRTLVLLDNLNVRETHSLFFRSLKDRGFELTFKTADDPSLSLIKYGEFLYDNLIIFSPSVEDFGGNINVETISAFIDGGGSVLVAASSDIGDPLRELGSECGIEFDEEKTAVIDHHNYDISDLGQHTLIVADTENLLKAPTIVGKSSLNPILFRGVG

SEQ ID NO: 869873 - protein, 646 aa, Homo sapiens
MEPAAGFLSPRPFQRAAAAPAPPAGPGPPPSALRGPELEMLAGLPTSDPGRLITDPRSGRTYLKGRLLGKGGFARCYEATDTETGSAYAVKVIPQSRVAKPHQREKILNEIELHRDLQHRHIVRFSHHFEDADNIYIFLELCSRKSLAHIWKARHTLLEPEVRYYLRQILSGLKYLHQRGILHRDLKLGNFFITENMELKVGDFGLAARLEPPEQRKKTICGTPNYVAPEVLLRQGHGPEADVWSLGCVMYTLLCGSPPFETADLKETYRCIKQVHYTLPASLSLPARQLLAAILRASPRDRPSIDQILRHDFFTKGYTPDRLPISSCVTVPDLTPPNPARSLFAKVTKSLFGRKKKSKNHAQERDEVSGLVSGLMRTSVGHQDARPEAPAASGPAPVSLVETAPEDSSPRGTLASSGDGFEEGLTVATVVESALCALRNCIAFMPPAEQNPAPLAQPEPLVWVSKWVDYSNKFGFGYQLSSRRVAVLFNDGTHMALSANRKTVHYNPTSTKHFSFSVGAVPRALQPQLGILRYFASYMEQHLMKGGDLPSVEEVEVPAPPLLLQWVKTDQALLMLFSDGTVQVNFYGDHTKLILSGWEPLLVTFVARNRSACTYLASHLRQLGCSPDLRQRLRYALRLLRDRSPA

SEQ ID NO: 869874 - protein, 684 aa, Homo sapiens
MEPAAGFLSPRPFQRAAAAPAPPAGPGPPPSALRGPELEMLAGLPTSDPGRLITDPRSGRTYLKGRLLGKGGFARCYEATDTETGSAYAVKVIPQSRVAKPHQREKILNEIELHRDLQHRHIVRFSHHFEDADNIYIFLELCSRKSLAHIWKARHTLLEPEVRYYLRQILSGLKYLHQRGILHRDLKLGNFFITENMELKVGDFGLAARLEPPEQRKKTICGTPNYVAPEVLLRQGHGPEADVWSLGCVMYTLLCGSPPFETADLKETYRCIKQVHYTLPASLSLPARQLLAAILRASPRDRPSIDQILRHDFFTKVCGSPDLKSICVFPGIERGQVTGPLEPLFSVHMVPLPEGYTPDRLPISSCVTVPDLTPPNPARSLFAKVTKSLFGRKKKSKNHAQERDEVSGLVSGLMRTSVGHQDARPEAPAASGPAPVSLVETAPEDSSPRGTLASSGDGFEEGLTVATVVESALCALRNCIAFMPPAEQNPAPLAQPEPLVWVSKWVDYSNKFGFGYQLSSRRVAVLFNDGTHMALSANRKTVHYNPTSTKHFSFSVGAVPRALQPQLGILRYFASYMEQHLMKGGDLPSVEEVEVPAPPLLLQWVKTDQALLMLFSDGTVQVNFYGDHTKLILSGWEPLLVTFVARNRSACTYLASHLRQLGCSPDLRQRLRYALRLLRDRSPA

SEQ ID NO: 869875 - protein, 511 aa, Homo sapiens
MEPAAGFLSPRPFQRAAAAPAPPAGPGPPPSALRGPELEMLAGLPTSDPGRLITDPRSGRTYLKGRLLGKGGFARCYEATDTETGSAYAVKVIPQSRVAKPHQREKILNEIELHRDLQHRHIVRFSHHFEDADNIYIFLELCSRKSLAHIWKARHTLLEPEVRYYLRQILSGLKYLHQRGILHRDLKLGNFFITENMELKVGDFGLAARLEPPEQRKKTICGTPNYVAPEVLLRQGHGPEADVWSLGCVMYTLLCGSPPFETADLKETYRCIKQVHYTLPASLSLPARQLLAAILRASPRDRPSIDQILRHDFFTKGYTPDRLPISSCVTVPDLTPPNPARSLFAKVTKSLFGRKKKSKNHAQERDEVSGLVSGLMRTSVGHQDARPEAPAASGPAPVSLVETAPEDSSPRGTLASSGDGFEEGLTVATVVESALCALRNCIAFMPPAEQNPAPLAQPEPLVWVSKWVDYSNKFGFGYQLSSRRVAVLFNDGTHMALSANRKVEICPVWKR

SEQ ID NO: 869876 - protein, 776 aa, Homo sapiens
MEPAAGFLSPRPFQRAAAAPAPPAGPGPPPSALRGPELEMLAGLPTSDPGRLITDPRSGRTYLKGRLLGKGGFARCYEATDTETGSAYAVKVIPQSRVAKPHQREKILNEIELHRDLQHRHIVRFSHHFEDADNIYIFLELCSRKSLAHIWKARHTLLEPEVRYYLRQILSGLKYLHQRGILHRDLKLGNFFITENMELKVGDFGLAARLEPPEQRKKTICGTPNYVAPEVLLRQGHGPEADVWSLGCVMYTLLCGSPPFETADLKETYRCIKQVHYTLPASLSLPARQLLAAILRASPRDRPSIDQILRHDFFTKGYTPDRLPISSCVTVPDLTPPNPARSLFAKVTKSLFGRKKKSKNHAQERDEVSGLVSGLMRTSVGHQDARPEVRRSGGHCSPDSPPPQQLREAGDEKRLLKHPASWWPNWLCVTSLAGLTWGALGARAGPGHGLKGLDFGACVTPFPCPTLQAPAASGPAPVSLVETAPEDSSPRGTLASSGDGFEEGLTVATVVESALCALRNCIAFMPPAEQNPAPLAQPEPLVWVSKWVDYSNKFGFGYQLSSRRVAVLFNDGTHMALSANRKYSAVMGCLVFRPLIQQGRTLVSAPGLRGLGFSEEGHWCRAPSGPLPPHSRTVHYNPTSTKHFSFSVGAVPRALQPQLGILRYFASYMEQHLMKGGDLPSVEEVEVPAPPLLLQWVKTDQALLMLFSDGTVQVNFYGDHTKLILSGWEPLLVTFVARNRSACTYLASHLRQLGCSPDLRQRLRYALRLLRDRSPA

SEQ ID NO: 869877 - protein, 102 aa, Homo sapiens
MGGDLPSVEEVEVPAPPLLLQWVKTDQALLMLFSDGTVQVNFYGDHTKLILSGWEPLLVTFVARNRSACTYLASHLRQLGCSPDLRQRLRYALRLLRDRSPA

SEQ ID NO: 869878 - protein, 646 aa, Homo sapiens; identical to SEQ ID NO: 869873

SEQ ID NO: 869879 - protein, 621 aa, Homo sapiens
MEPAAGFLSPRPFQRAAAAPAPPAGPGPPPSALRGPELEMLAGLPTSDPGRLITDPRSGRTYLKGRLLGKGGFARCYEATDTETGSAYAVKVIPQSRVAKPHQREKILNEIELHRDLQHRHIVRFSHHFEDADNIYIFLELCSRKSLAHIWKARHTLLEPEVRYYLRQILSGLKYLHQRGILHRDLKLGNFFITENMELKVGDFGLAARLEPPEQRKKTICGTPNYVAPEVLLRQGHGPEADVWSLGCVMYTLLCGSPPFETADLKETYRCIKQVHYTLPASLSLPARQLLAAILRASPRDRPSIDQILRHDFFTKGYTPDRLPISSCVTVPDLTPPNPARSLFAKVTKSLFGRKKKSKNHAQERDEVSGLVSGLMRTSVGHQDARPEAPAASGPAPVSLVETAPEDSSPRGTLASSGDGFEEGLTVATVVESALCALRNCIAFMPPAEQNPAPLAQPEPLVWVSKWVDYSNKFGFGYQLSSRRVAVLFNDGTHMALSANRKTVHYNPTSTKHFSFSVGAVPRALQPQLGILRYFASYMEQHLMKGGDLPSVEEVEVPAPRAFQELREGLGGPGCWGGSWARSLGPDHCHALCAGELLRGPHQADSQWLGAPPCDFCGPKS

SEQ ID NO: 869880 - protein, 696 aa, Homo sapiens
MEPAAGFLSPRPFQRAAAAPAPPAGPGPPPSALRGPELEMLAGLPTSDPGRLITDPRSGRTYLKGRLLGKGGFARCYEATDTETGSAYAVKVIPQSRVAKPHQREKILNEIELHRDLQHRHIVRFSHHFEDADNIYIFLELCSRKSLAHIWKARHTLLEPEVRYYLRQILSGLKYLHQRGILHRDLKLGNFFITENMELKVGDFGLAARLEPPEQRKKTICGTPNYVAPEVLLRQGHGPEADVWSLGCVMYTLLCGSPPFETADLKETYRCIKQVHYTLPASLSLPARQLLAAILRASPRDRPSIDQILRHDFFTKGYTPDRLPISSCVTVPDLTPPNPARSLFAKVTKSLFGRKKKSKNHAQERDEVSGLVSGLMRTSVGHQDARPEAPAASGPAPVSLVETAPEDSSPRGTLASSGDGFEEGLTVATVVESALCALRNCIAFMPPAEQNPAPLAQPEPLVWVSKWVDYSNKFGFGYQLSSRRVAVLFNDGTHMALSANRKYSAVMGCLVFRPLIQQGRTLVSAPGLRGLGFSEEGHWCRAPSGPLPPHSRTVHYNPTSTKHFSFSVGAVPRALQPQLGILRYFASYMEQHLMKGGDLPSVEEVEVPAPPLLLQWVKTDQALLMLFSDGTVQVNFYGDHTKLILSGWEPLLVTFVARNRSACTYLASHLRQLGCSPDLRQRLRYALRLLRDRSPA

SEQ ID NO: 869881 - protein, 502 aa, Homo sapiens [sequence omitted]

SEQ ID NO: 869882 - protein, 101 aa, Homo sapiens
RQTGEMEERQGEGQTGEMGRDRRGGREMERQERWGETGEMEERQGEGQTDGETWRGGGERDKGRNGRREVLIGSGSVSPPKPHLVAPIIPTCCGRELVEDG

SEQ ID NO: 869883 - protein, 119 aa, Homo sapiens
FNVTEDYRRLKSLLTDFFRGPTVSNICLAGLEYVLHFTALNGKIYFRRYKLLLKKSGCRTPRIELEEIGPSLNLVLRRTHLASDDLYTLSMKMPKALKPKKKKNISNDTFGTTYGRIHM

SEQ ID NO: 869884 - protein, 113 aa, Homo sapiens
DRPTLASQSARITGVSHSAWPPFLYSNLNVVILILHGFLILPQQTAKRLLESHMTFAVICTADGKTLLGSEGQGCHWIPLPSDPSENLTWTKTRVVKSHRESVIPNLLLSCAS

SEQ ID NO: 869885 - protein, 70 aa, Homo sapiens
EEQQSILLAQLESQDGDILRQRDEFDLLVAGEICRFSALIEELEEKNERPARELLTVRPEPEPCPTCAVL

SEQ ID NO: 869886 - protein, 395 aa, Homo sapiens
MASAASVTSLADEVNCPICQGTLREPVTIDCGHNFCRACLTRYCEIPGPDLEESPTCPLCKEPFRPGSFRPNWQLANVVENIERLQLVSTLGLGEEDVCQEHGEKIYFFCEDDEMQLCVVCREAGEHATHTMRFLEDAAAPYREQIHKCLKCLRKEREEIQEIQSRENKRMQVLLTQVSTKRQQVISEFAHLRKFLEEQQSILLAQLESQDGDILRQRDEFDLLVAGEICRFSALIEELEEKNERPARELLTDIRSTLIRCETRKCRKPVAVSPELGQRIRDFPQQALPLQREMKMFLEKLCFELDYEPAHISLDPQTSHPKLLLSEDHQRAQFSYKWQNSPDNPQRFDRATCVLAHTGITGGRHTWVWMARVPGDSGCCQFCSPPSVLGTEVAA

SEQ ID NO: 869887 - protein, 189 aa, Homo sapiens
MTHRTTTWARRTSRAVTPTCATPAGPMPCSRLPPSLRCSLHSACCSGDPASYRLWGAPLQPTLGVVPQASVPLLTDLAQWEPVLVPEAHPNASLTMYVCTPVPHPDPPMALSRTPTRQISSSDTDPPADGPSNPLCCCFHGPAFSTLNPVLRHLFPQEAFPAHPIYDLSQVWSVVSPAPSRGQALRRAQ

SEQ ID NO: 869888 - protein, 70 aa, Homo sapiens
PHPALKALGLLQFWGSHRRPGFRADQPRTVFPVQFLMRGGQCCLPVTRTSAQPACLTPLLSWGPIHTQFR

SEQ ID NO: 869889 - protein, 129 aa, Homo sapiens
HSPPVTMKAVLLALLMAGLALQPGTALLCYSCKAQVSNEDCLQVENCTQLGEQCWTARIRAVGLLTVISKGCSLNCVDDSQDYYVGKKNITCCDTDLCNASGAHALQPAAAILALLPALGLLLWGPGQL

SEQ ID NO: 869890 - protein, 189 aa, Homo sapiens; identical to SEQ ID NO: 869887

SEQ ID NO: 869891 - protein, 129 aa, Homo sapiens; identical to SEQ ID NO: 869889

SEQ ID NO: 869892 - protein, 49 aa, Homo sapiens
MGQPLRPLPLHPTGTALLCYSCKAQVSNEDCLQVENCTQLGEQCWTARI

SEQ ID NO: 869893 - protein, 164 aa, Homo sapiens [sequence omitted]

SEQ ID NO: 869894 - protein, 181 aa, Homo sapiens [sequence omitted]

SEQ ID NO: 869895 - protein, 121 aa, Homo sapiens
MGGGVEIAAASFPRIYLMGMCSRQDRIQKDIDVVIQKSRAEDCLFAGSDCTFSTSFSMAVSLTTCFGPRAEMSILETNQYFRSELEKCKQNFQDLTEKFLTSKATAYSLANHLQKYRYMIP

SEQ ID NO: 869896 - protein, 200 aa, Homo sapiens
MEILEPEGETPETPRSATQPETPGVPREAERPVGSRDGSSGSLCRLHPVKEPVSTLPSRCWAAAELPLPSSDPVFRPGLHQGRDGGEGRSWVPWQGAGSGTHKGARLRTCRMNPLSPLAFSPLKRGSDCTFSTSFSMAVSLTTCFGPRAEMSILETNQYFRSELEKCKQNFQDLTEKFLTSKATAYSLANHLQKYRYMIP

SEQ ID NO: 869897 - protein, 363 aa, Homo sapiens
MRQELKNLKLAVDRERERPVKAGKKKDKKGKKGKKKEKKAKKDKDLTADRTIESLYKELVEEGLLIQALKVNLSDYIGEYSYLGTTLRQVSIEPMPSLLDVRQLITLYGIWPLGSAAVHEKAPLVKSLLLAGPSGVGKKMLVHAICTETGANLFNLSSSNIAGKYPGKNGLQMMLHAVFKVARQLQPSVVWIEDTEKTFYKKVPNAEKMNEPKRLKKHLPQILKLLKPDDRILIVGTTRRPFDAELQSFCKVYQKIILVPRPDYASRYVLWKQIIERNGGVLTSALNVSCLAKVTDGFTQGHIVEVVKGVLTDQRIRRQIHKPLTAVEFITAITSMNPVYKEEEESFKNWYAKTPLGKNVPWR

SEQ ID NO: 869898 - protein, 363 aa, Homo sapiens; identical to SEQ ID NO: 869897

SEQ ID NO: 869899 - protein, 464 aa, Homo sapiens
MSNAMYNKMWHQTQEALGALLDKEPQKMIEPQRNQVFIFQTLATFYVKYVQIFRNLENVYDQFVHPQKRILIRKVLDGVMGRILELKNEMVELELTEFHYFDDILQDLKLAPQQLDIPIPKYFLKEKLEVIKGREKILAQILADSGIDTSDMKYPVKSIPFDEAVKLIQIAERARQGRLRALFMKQIYLQEYRAKQSKMLGKKVTDTWAAALRIQKVWRRFHQRKETEKLREEEMIFLGMNPPPLFNEVSATVIQAEKVDRLRNEVQIKHEEDYREALVTIKNDLKLIEGVDIKENLQDQIRHWFIECRNLTGTFPDYPDVEEGGSAIIFSDKTIQQVIEDIIANQEEEEKNKKKKKKKEKQPKKAKKQKKGTKEKNKEEDEKWKMSPSLFLPAMKEGCNAYKEIWMKKDESWNFSQDYDPELIKEEKRKELQSEIRIQVQLRLWCSNSKSFTSTIVLLYKFPY

SEQ ID NO: 869900 - protein, 476 aa, Homo sapiens
MSNAMYNKMWHQTQEALGALLDKEPQKMIEPQRNQVFIFQTLATFYVKYVQIFRNLENVYDQFVHPQKRILIRKVLDGVMGRILELKNEMVELELTEFHYFDDILQDLKLAPQQLDIPIPKYFLKEKLEVIKGREKILAQILADSGIDTSDMKYPVKSIPFDEAVKLIQIAERARQGRLRALFMKQIYLQEYRAKQSKMLGKKVTDTWAAALRIQKVWRRFHQRKETEKLREEEMIFLGMNPPPLFNEVSATVIQAEKVDRLRNEVQIKHEEDYREALVTIKNDLKLIEGVDIKENLQDQIRHWFIECRNLTGTFPDYPDVEEGGSAIIFSDKTIQQVIEDIIANQEEEEKNKKKKKKKEKQPKKAKKQKKGTKEKNKEEDEKWKMSPSLFLPAMKEGCNAYKEIWMKKDESWNFSQDYDPELIKEEKRKELQSEIRIQVDELMRQELKNLKLAVDRERERPVKAGKKKDKKGKRK

SEQ ID NO: 869901 - protein, 476 aa, Homo sapiens; identical to SEQ ID NO: 869900

SEQ ID NO: 869902 - protein, 124 aa, Homo sapiens [sequence omitted]

SEQ ID NO: 869903 - protein, 124 aa, Homo sapiens [sequence omitted]

SEQ ID NO: 869904 - protein, 124 aa, Homo sapiens [sequence omitted]

SEQ ID NO: 869905 - protein, 732 aa, Homo sapiens
MQQALELALDRAEYVIESARQRPPKRKYLSSGRKSVFQKLYDLYIEECEKEPEVKKLRRNVNLLEKLVMQETLSCLVVNLYPGNEGYSLMLRGKNGSDSETIRLPYEEGELLEYLDAEELPPILVDLLEKSQVNIFHCGCVIAEIRDYRQSSNMKSPGYQSRHILLRPTMQTLICDVHSITSDNHKWTQEDKLLLESQLILATAEPLCLDPSIAVTCTANRLLYNKQKMNTRPMKRCFKRYSRSSLNRQQDLSHCPPPPQLRLLDFLQKRKERKAGQHYDLKISKAGNCVDMWKRSPCNLAIPSEVDVEKYAKVEKSIKSDDSQPTVWPAHDVKDDYVFECEAGTQYQKTKLTILQSLGDPLYYGKIQPCKADEESDSQMSPSHSSTDDHSNWFIIGSKTDAERVVNQYQELVQNEAKCPVKMSHSSSGSASLSQVSPGKETDQTETVSVQSSVLGKGVKHRPPPIKLPSSSGNSSSGNYFTPQQTSSFLKSPTPPPSSKPSSIPRKSSVDLNQVSMLSPAALSPASSSQRTTATQVMANSAGLNFINVVGSVCGAQALMSGSNPMLGCNTGAITPAGINLSGLLPSGGLLPNALPSAMQAASQAGVPFGLKNTSSLRPLNLLQLPGGSLIFNTLQQQQQQLSQFTPQQPQQPTTCSPQQPGEQGSEQGSTSQEQALSAQQAAVINLTGVGSFMQSQAAAVAILAASNGYGSSSSTNSSATSSSAYRQPVKK

SEQ ID NO: 869906 - protein, 732 aa, Homo sapiens; identical to SEQ ID NO: 869905

SEQ ID NO: 869907 - protein, 533 aa, Homo sapiens
MQQALELALDRAEYVIESARQRPPKRKYLSSGRKSVFQKLYDLYIEECEKEPEVKKLRRNVNLLEKLVMQETLSCLVVNLYPGNEGYSLMLRGKNGSDSETIRLPYEEGELLEYLDAEELPPILVDLLEKSQVNIFHCGCVIAEIRDYRQSSNMKSPGYQSRHILLRPTMQTLICDVHSITSDNHKWTQEDKLLLESQLILATAEPLCLDPSIAVTCTANRLLYNKQKMNTRPMKRCFKRYSRSSLNRQQDLSHCPPPPQLRLLDFLQKRKERKAGQHYDLKISKAGNCVDMWKRSPCNLAIPSEVDVEKYAKVEKSIKSDDSQPTVWPAHDVKDDYVFECEAGTQYQKTKLTILQSLGDPLYYGKIQPCKADEESDSQMSPSHSSTDDHSNWFIIGSKTDAERVVNQYQELVQNEAKCPVKMSHSSSGSASLSQVSPGKETDQTETVSVQSSVLGKGVKHRPPPIKLPSSSGNSSSGNYFTPQQTSSFLKSPTPPPSSKPSSIPRKSSVDLNQVSMLSPAALSPASSSQSES

SEQ ID NO: 869908 - protein, 533 aa, Homo sapiens; identical to SEQ ID NO: 869907

SEQ ID NO: 869909 - protein, 533 aa, Homo sapiens; identical to SEQ ID NO: 869907

SEQ ID NO: 869910 - protein, 533 aa, Homo sapiens; identical to SEQ ID NO: 869907

SEQ ID NO: 869911 - protein, 460 aa, Homo sapiens
MQQALELALDRAEYVIESARQRPPKRKYLSSGRKSVFQKLYDLYIEECEKEPEVKKLRRNVNLLEKLVMQETLSCLVVNLYPGNEGYSLMLRGKNGSDSETIRLPYEEGELLEYLDAEELPPILVDLLEKSQVNIFHCGCVIAEIRDYRQSSNMKSPGYQSRHILLRPTMQTLICDVHSITSDNHKWTQEDKLLLESQLILATAEPLCLDPSIAVTCTANRLLYNKQKMNTRPMKRCFKRYSRSSLNRQQDLSHCPPPPQLRLLDFLQKRKERKAGQHYDLKISKAGNCVDMWKRSPCNLAIPSEVDVEKYAKVEKSIKSDDSQPTVWPAHDVKDDYVFECEAGTQYQKTKLTILQSLGDPLYYGKIQPCKADEESDSQMSPSHSSTDDHSNWFIIGSKTDAERVVNQYQELVQNEAKCPVKMSHSSSGSASLSQVSPGKETDVCFINVTSLCPVVSQVI

SEQ ID NO: 869912 - protein, 419 aa, Homo sapiens
MQQALELALDRAEYVIESARQRPPKRKYLSSGRKSVFQKLYDLYIEECEKEPEVKKLRRNVNLLEKLVMQETLSCLVVNLYPGNEGYSLMLRGKNGSDSETIRLPYEEGELLEYLDAEELPPILVDLLEKSQVNIFHCGCVIAEIRDYRQSSNMKSPGYQSRHILLRPTMQTLICDVHSITSDNHKWTQEDKLLLESQLILATAEPLCLDPSIAVTCTANRLLYNKQKMNTRPMKRCFKRYSRSSLNRQQDLSHCPPPPQLRLLDFLQKRKERKAGQHYDLKISKAGNCVDMWKRSPCNLAIPSEVDVEKYAKVEKSIKSDDSQPTVWPAHDVKDDYVFECEAGTQYQKTKLTILQSLGDPLYYGKIQPCKADEESDSQMSPSHSSTDDHSNWFIIGSKTDAESKLKPCQFSLRYWGRV

SEQ ID NO: 869913 - protein, 533 aa, Homo sapiens; identical to SEQ ID NO: 869907

SEQ ID NO: 869914 - protein, 642 aa, Homo sapiens
MQQALELALDRAEYVIESARQRPPKRKYLSSGRKSVFQKLYDLYIEECEKEPEVKKLRRNVNLLEKLVMQETLSCLVVNLYPGNEGYSLMLRGKNGSDSETIRLPYEEGELLEYLDAEELPPILVDLLEKSQVNIFHCGCVIAEIRDYRQSSNMKSPGYQSRHILLRPTMQTLICDVHSITSDNHKWTQEDKLLLESQLILATAEPLCLDPSIAVTCTANRLLYNKQKMNTRPMKRCFKRYSRSSLNRQQDLSHCPPPPQLRLLDFLQKRKERKAGQHYDLKISKAGNCVDMWKRSPCNLAIPSEVDVEKYAKVEKSIKSDDSQPTVWPAHDVKDDYVFECEAGTQYQKTKLTILQSLGDPLYYGKIQPCKADEESDSQMSPSHSSTDDHSNWFIIGSKTDAERVVNQYQELVQNEAKCPVKMSHSSSGSASLSQVSPGKETDQTETVSVQSSVLGKGVKHRPPPIKLPSSSGNSSSGNYFTPQQTSSFLKSPTPPPSSKPSSIPRKSSVDLNQVSMLSPAALSPASSSQRTTATQVMANSAGLNFINVVGSVCGAQALMSGSNPMLGCNTGAITPAGINLSGLLPSGGLLPNALPSAMQAASQAGVPFGLKNTSSLRPLNLLQATAALPVYTTTTSAAHNL

SEQ ID NO: 869915 - protein, 521 aa, Homo sapiens
MYVIESARQRPPKRKYLSSGRKSVFQKLYDLYIEECEKEPEVKKLRRNVNLLEKLVMQETLSCLVVNLYPGNEGYSLMLRGKNGSDSETIRLPYEEGELLEYLDAEELPPILVDLLEKSQVNIFHCGCVIAEIRDYRQSSNMKSPGYQSRHILLRPTMQTLICDVHSITSDNHKWTQEDKLLLESQLILATAEPLCLDPSIAVTCTANRLLYNKQKMNTRPMKRCFKRYSRSSLNRQQDLSHCPPPPQLRLLDFLQKRKERKAGQHYDLKISKAGNCVDMWKRSPCNLAIPSEVDVEKYAKVEKSIKSDDSQPTVWPAHDVKDDYVFECEAGTQYQKTKLTILQSLGDPLYYGKIQPCKADEESDSQMSPSHSSTDDHSNWFIIGSKTDAERVVNQYQELVQNEAKCPVKMSHSSSGSASLSQVSPGKETDQTETVSVQSSVLGKGVKHRPPPIKLPSSSGNSSSGNYFTPQQTSSFLKSPTPPPSSKPSSIPRKSSVDLNQVSMLSPAALSPASSSQSES

SEQ ID NO: 869916 - protein, 251 aa, Homo sapiens
MQQALELALDRAEYVIESARQRPPKRKYLSSGRKSVFQKLYDLYIEECEKEPEVKKLRRNVNLLEKLVMQETLSCLVVNLYPGNEGYSLMLRGKNGSDSETIRLPYEEGELLEYLDAEELPPILVDLLEKSQVNIFHCGCVIAEIRDYRQSSNMKSPGYQSRHILLRPTMQTLICDVHSITSDNHKWTQEDKLLLESQLILATAEPLCLDPSIAVTCTANRLLYNKQKMNTRPMKRKLKPCQFSLRYWGRV

SEQ ID NO: 869917 - protein, 533 aa, Homo sapiens; identical to SEQ ID NO: 869907

SEQ ID NO: 869918 - protein, 779 aa, Homo sapiens
MQQALELALDRAEYVIESARQRPPKRKYLSSGRKSVFQKLYDLYIEECEKEPEVKKLRRNVNLLEKLVMQETLSCLVVNLYPGNEGYSLMLRGKNGSDSETIRLPYEEGELLEYLDAEELPPILVDLLEKSQVNIFHCGCVIAEIRDYRQSSNMKSPGYQSRHILLRPTMQTLICDVHSITSDNHKWTQEDKLLLESQLILATAEPLCLDPSIAVTCTANRLLYNKQKMNTRPMKRCFKRYSRSSLNRQQDLSHCPPPPQLRLLDFLQKRKERKAGQHYDLKISKAGNCVDMWKRSPCNLAIPSEVDVEKYAKVEKSIKSDDSQPTVWPAHDVKDDYVFECEAGTQYQKTKLTILQSLGDPLYYGKIQPCKADEESDSQMSPSHSSTDDHSNWFIIGSKTDAERVVNQYQELVQNEAKCPVKMSHSSSGSASLSQVSPGKETDQTETVSVQSSVLGKGVKHRPPPIKLPSSSGNSSSGNYFTPQQTSSFLKSPTPPPSSKPSSIPRKSSVDLNQVSMLSPAALSPASSSQRTTATQVMANSAGLNFINVVGSVCGAQALMSGSNPMLGCNTGAITPAGINLSGLLPSGGLLPNALPSAMQAASQAGVPFGLKNTSSLRPLNLLQLPGGSLIFNTLQQQQQQLSQFTPQQPQQPTTCSPQQPGEQGSEQGSTSQEQALSAQQAAVINLTGVGSFMQSQAAVLSQLGSAENRPEQSLPQQRFQLSSAFQQQQQQIQQLRFLQHQMAMAAAAAQTAQLHHHRHTGSQSKSKMKRGTPTTPKF

SEQ ID NO: 869919 - protein, 216 aa, Homo sapiens [sequence omitted]

SEQ ID NO: 869920 - protein, 141 aa, Homo sapiens
MLSPAALSPASSSQRTTATQVMANSAGLNFINVVGSVCGAQALMSGSNPMLGCNTGAITPAGINLSGLLPSGGLLPNALPSAMQAASQAGNSSSPSLHHNNLSSPQLVVLNSQGSRVLSKVQPVKNRPYLLSKLLLLTLLE

SEQ ID NO: 869921 - protein, 497 aa, Homo sapiens
MQQALELALDRAEYVIESARQRPPKRKYLSSGRKSVFQKLYDLYIEECEKEPEVKKLRRNVNLLEKLVMQETLSCLVVNLYPGNEGYSLMLRGKNGSDSETIRLPYEEGELLEYLDAEELPPILVDLLEKSQVNIFHCGCVIAEIRDYRQSSNMKSPGYQSRHILLRPTMQTLICDVHSITSDNHKWTQEDKLLLESQLILATAEPLCLDPSIAVTCTANRLLYNKQKMNTRPMKRCFKRYSRSSLNRQQDLSHCPPPPQLRLLDFLQKRKERKAGQHYDLKISKAGNCVDMWKRSPCNLAIPSEVDVEKYAKVEKSIKSDDSQPTVWPAHDVKDDYVFECEAGTQYQKTKLTILQSLGDPLYYGKIQPCKADEESDSQMSPSHSSTDDHSNWFIIGSKTDAERVVNQYQELVQNEAKCPVKMSHSSSGSASLSQVSPGKETDQTETVSVQSSVLGKGVKHRPPPIKLPSSSGNSSSDYFTPRQTNSFLMKRPKDNL

SEQ ID NO: 869922 - protein, 114 aa, Homo sapiens
YLYILKYKLFSCVINFQFCYNHEFYLTGVPFGLKNTSSLRPLNLLQGSEQGSTSQEQALSAQQAAVINLTGVGSFMQSQAAAVAILAASNGYGSSSSTNSSATSSSAYRQPVKK

SEQ ID NO: 869923 - protein, 181 aa, Homo sapiens
MQQALELALDRAEYVIESARQRPPKRKYLSSGRKSVFQKLYDLYIEECEKEPEVKKLRRNVNLLEKLVMQETLSCLVVNLYPGNEGYSLMLRGKNGSDSETIRLPYEEGELLEYLDAEELPPILVDLLEKSQVNIFHCGCVIAEIRDYRQSSNMKSPGYQSRHILLRPTMQNFKFVDGPFQ

SEQ ID NO: 869924 - protein, 533 aa, Homo sapiens; identical to SEQ ID NO: 869907

SEQ ID NO: 869925 - protein, 533 aa, Homo sapiens; identical to SEQ ID NO: 869907

SEQ ID NO: 869926 - protein, 533 aa, Homo sapiens; identical to SEQ ID NO: 869907

SEQ ID NO: 869927 - protein, 534 aa, Homo sapiens
MQQALELALDRAEYVIESARQRPPKRKYLSSGRKSVFQKLYDLYIEECEKEPEVKKLRRNVNLLEKLVMQETLSCLVVNLYPGNEGYSLMLRGKNGSDSETIRLPYEEGELLEYLDAEELPPILVDLLEKSQVNIFHCGCVIAEIRDYRQSSNMKSPGYQSRHILLRPTMQTLICDVHSITSDNHKWTQEDKLLLESQLILATAEPLCLDPSIAVTCTANRLLYNKQKMNTRPMKRCFKRYSRSSLNRQQDLSHCPPPPQLRLLDFLQKRKERKAGQHYDLKISKAGNCVDMWKRSPCNLAIPSEVDVEKYAKVEKSIKSDDSQPTVWPAHDVKDDYVFECEAGTQYQKTKLTILQSLGDPLYYGKIQPCKADEESDSQMSPSHSSTDDHSNWFIIGSKTDAERVVNQYQELVQNEAKCPVKMSHSSSGSASLSQVSPGKETDQTETVSVQSSVLGKGVKHRPPPIKLPSSSGNSSSGNYFTPQQTSSFLKSPTPPPSSKPSSIPRKSSVDLNQVSMLSPAALSPASSSQRHES

SEQ ID NO: 869928 - protein, 533 aa, Homo sapiens; identical to SEQ ID NO: 869907

SEQ ID NO: 869929 - protein, 533 aa, Homo sapiens; identical to SEQ ID NO: 869907

SEQ ID NO: 869930 - protein, 811 aa, Homo sapiens
MQQALELALDRAEYVIESARQRPPKRKYLSSGRKSVFQKLYDLYIEECEKEPEVKKLRRNVNLLEKLVMQETLSCLVVNLYPGNEGYSLMLRGKNGSDSETIRLPYEEGELLEYLDAEELPPILVDLLEKSQVNIFHCGCVIAEIRDYRQSSNMKSPGYQSRHILLRPTMQTLICDVHSITSDNHKWTQEDKLLLESQLILATAEPLCLDPSIAVTCTANRLLYNKQKMNTRPMKRCFKRYSRSSLNRQQDLSHCPPPPQLRLLDFLQKRKERKAGQHYDLKISKAGNCVDMWKRSPCNLAIPSEVDVEKYAKVEKSIKSDDSQPTVWPAHDVKDDYVFECEAGTQYQKTKLTILQSLGDPLYYGKIQPCKADEESDSQMSPSHSSTDDHSNWFIIGSKTDAERVVNQYQELVQNEAKCPVKMSHSSSGSASLSQVSPGKETDQTETVSVQSSVLGKGVKHRPPPIKLPSSSGNSSSGNYFTPQQTSSFLKSPTPPPSSKPSSIPRKSSVDLNQVSMLSPAALSPASSSQRSGTPKPSTPTPTPSSTPHPPDAQSSTPSTPSATPTPQDSGFTPQPTLLTQFAQQQRSLSQAMPVTTIPLSTMVTSITPGTTATQVMANSAGLNFINVVGSVCGAQALMSGSNPMLGCNTGAITPAGINLSGLLPSGGLLPNALPSAMQAASQAGVPFGLKNTSSLRPLNLLQLPGGSLIFNTLQQQQQQLSQFTPQQPQQPTTCSPQQPGEQGSEQGSTSQEQALSAQQAAVINLTGVGSFMQSQAAAVAILAASNGYGSSSSTNSSATSSSAYRQPVKK

SEQ ID NO: 869931 - protein, 521 aa, Homo sapiens; identical to SEQ ID NO: 869915

SEQ ID NO: 869932 - protein, 642 aa, Homo sapiens; identical to SEQ ID NO: 869914

SEQ ID NO: 869933 - protein, 533 aa, Homo sapiens; identical to SEQ ID NO: 869907

SEQ ID NO: 869934 - protein, 169 aa, Homo sapiens
GIEWPCEADEEGDSQMSPSHSSTDDHSNWFIIGSKTDAERVVNQYQELVQNEAKCPVKMSHSSSGSASLSQVSPGKETDQTETVSVQSSVLGKGVKHRPPPIKLPSSSGNSSSGNYFTPQQTSSFLKSPTPPPSSKPSSIPRKSSVDLNQVSMLSPAALSPASSSQSES

SEQ ID NO: 869935 - protein, 695 aa, Homo sapiens
MQQALELALDRAEYVIESARQRPPKRKYLSSGRKSVFQKLYDLYIEECEKEPEVKKLRRNVNLLEKLVMQETLSCLVVNLYPGNEGYSLMLRGKNGSDSETIRLPYEEGELLEYLDAEELPPILVDLLEKSQVNIFHCGCVIAEIRDYRQSSNMKSPGYQSRHILLRPTMQTLICDVHSITSDNHKWTQEDKLLLESQLILATAEPLCLDPSIAVTCTANRLLYNKQKMNTRPMKRCFKRYSRSSLNRQQDLSHCPPPPQLRLLDFLQKRKERKAGQHYDLKISKAGNCVDMWKRSPCNLAIPSEVDVEKYAKVEKSIKSDDSQPTVWPAHDVKDDYVFECEAGTQYQKTKLTILQSLGDPLYYGKIQPCKADEESDSQMSPSHSSTDDHSNWFIIGSKTDAERVVNQYQELVQNEAKCPVKMSHSSSGSASLSQVSPGKETDQTETVSVQSSVLGKGVKHRPPPIKLPSSSGNSSSGNYFTPQQTSSFLKSPTPPPSSKPSSIPRKSSVDLNQVSMLSPAALSPASSSQRTTATQVMANSAGLNFINVVGSVCGAQALMSGSNPMLGCNTGAITPAGINLSGLLPSGGLLPNALPSAMQAASQAGPFVLNNTSSPGLKFYSGSGGSTYFNTLRRRNSSLPRYTQRNLGAKFGCSHARRRFGHVTVRKAHCHTVFNPGERFAPSGGLSTVWGTPI

SEQ ID NO: 869936 - protein, 489 aa, Homo sapiens
MQQALELALDRAEYVIESARQRPPKRKYLSSGRKSVFQKLYDLYIEECEKEPEVKKLRRNVNLLEKLVMQETLSCLVVNLYPGNEGYSLMLRGKNGSDSETIRLPYEEGELLEYLDAEELPPILVDLLEKSQVNIFHCGCVIAEIRDYRQSSNMKSPGYQSRHILLRPTMQTLICDVHSITSDNHKWTQEDKLLLESQLILATAEPLCLDPSIAVTCTANRLLYNKQKMNTRPMKRCFKRYSRSSLNRQQDLSHCPPPPQLRLLDFLQKRKERKAGQHYDLKISKAGNCVDMWKRSPCNLAIPSEVDVEKYAKVEKSIKSDDSQPTVWPAHDVKDDYVFECEAGTQYQKTKLTILQSLGDPLYYGKIQPCKADEESDSQMSPSHSSTDDHSNWFIIGSKTDAERVVNQYQELVQNEAKCPVKMSHSSSGSASLSQVSPGKETDQTETVSVQSSVLGKGVKHRPPPIKLPSSSGNSSSAQVPPVAMFTGL

SEQ ID NO: 869937 - protein, 460 aa, Homo sapiens; identical to SEQ ID NO: 869911

SEQ ID NO: 869938 - protein, 188 aa, Homo sapiens
MTQTPAPSGDCKEPDKCCWRHKQCTGHIIYPFASDCVRHSLHLHSVNHCNCNSRLKDSSEDSSSSRGAGPTCSHVIESPCFELTPEEEHVERFRYGWCKSYRPVSVAVIHHPLYHECGADDLNEEEEEEEEESKPPIPTQVGPATASPDLGTSMATGTPDSTAPITIWRSESPTGKGQGSKVIKKVKK

SEQ ID NO: 869939 - protein, 236 aa, Homo sapiens
GAHPQCLEVEESSSAPQDGEDSVQMSITYVNRLPSWERGHLLAGVASSTDVSTFSEGDCKEPDKCCWRHKQCTGHIIYPFASDCVRHSLHLHSVNHCNCNSRLKDSSEDSSSSRGAGPTCSHVIESPCFELTPEEEHVERFRYGWCKSYRPVSVAVIHHPLYHECGADDLNEEEEEEEEESKPPIPTQVGPATASPDLGTSMATGTPDSTAPITIWRSESPTGKGQGSKVIKKVKK

SEQ ID NO: 869940 - protein, 188 aa, Homo sapiens; identical to SEQ ID NO: 869938

SEQ ID NO: 869941 - protein, 210 aa, Homo sapiens
MWVRTTLTIERWTKEKTEPKARSWDESRCRGDCKEPDKCCWRHKQCTGHIIYPFASDCVRHSLHLHSVNHCNCNSRLKDSSEDSSSSRGAGPTCSHVIESPCFELTPEEEHVERFRYGWCKSYRPVSVAVIHHPLYHECGADDLNEEEEEEEEESKPPIPTQVGPATASPDLGTSMATGTPDSTAPITIWRSESPTGKGQGSKVIKKVKK

SEQ ID NO: 869942 - protein, 34 aa, Homo sapiens
MATGTPDSTAPITIWRSESPTGKGQGSKVIKKVK

SEQ ID NO: 869943 - protein, 591 aa, Homo sapiens
MGKKGKVGKSRRDKFYHLAKETGYRSRSAFKLIQLNRRFQFLQKARALLDLCAAPGGWLQVAAKFMPVSSLIVGVDLVPIKPLPNVVTLQEDITTERCRQALRKELKTWKVDVVLNDGAPNVGASWVHDAYSQAHLTLMALRLACDFLARGGSFITKVFRSRDYQPLLWIFQQLFRRVQATKPQASRHESAEIFVVCQGFLAPDKVDSKFFDPKFAFKEVEVQAKTVTELVTKKKPKAEGYAEGDLTLYHRTSVTDFLRAANPVDFLSKASEIMVDDEELAQHPATTEDIRVCCQDIRVLGRKELRSLLNWRTKLRRYVAKKLKEQAKALDISLSSGEEDEGDEEDSTAGTTKQPSKEEEEEEEEEQLNQTLAEMKAQEVAELKRKKKKLLREQRKQRERVELKMDLPGVSIADEGETGMFSLCTIRGHQLLEEVTQGDMSAADTFLSDLPRDDIYVLIIFLICFLVLYALFLTLTTKLTNTNISDAQEIETVCTILPAIILVLIALPSLRILYITDEVNDPSLTIKSIGHQWYCTYEYTDYGGLIFNSYILPPLFLEPGDLRLLDVDNRVVLPIEAPIRIIITSQDVLHS

SEQ ID NO: 869944 - protein, 847 aa, Homo sapiens
MGKKGKVGKSRRDKFYHLAKETGYRSRSAFKLIQLNRRFQFLQKARALLDLCAAPGGWLQVAAKFMPVSSLIVGVDLVPIKPLPNVVTLQEDITTERCRQALRKELKTWKVDVVLNDGAPNVGASWVHDAYSQAHLTLMALRLACDFLARGGSFITKVFRSRDYQPLLWIFQQLFRRVQATKPQASRHESAEIFVVCQGFLAPDKVDSKFFDPKFAFKEVEVQAKTVTELVTKKKPKAEGYAEGDLTLYHRTSVTDFLRAANPVDFLSKASEIMVDDEELAQHPATTEDIRVCCQDIRVLGRKELRSLLNWRTKLRRYVAKKLKEQAKALDISLSSGEEDEGDEEDSTAGTTKQPSKEEEEEEEEEQLNQTLAEMKAQEVAELKRKKKKLLREQRKQRERVELKMDLPGVSIADEGETGMFSLCTIRGHQLLEEVTQGDMSAADTFLSDLPRDDIYVSDVEDDGDDTSLDSDLDPEELAGVRGHQGLRDQKRMRLTEVQDDKEEEEEENPLLVPLEEKAVLQEEQANLWFSKGSFAGIEDDADEALEISQAQLLFENRRKGRQQQQKQQLPQTPPSCLKTEIMSPLYQDEAPKGTEASSGTEAATGLEGEEKDGISDSDSSTSSEEEESWEPLRGKKRSRGPKSDDDGFEIVPIEDPAKHRILDPEGLALGAVIASSKKAKRDLIDNSFNRYTFNEDEGELPEWFVQEEKQHRIRQLPVGKKEVEHYRKRWREINARPIKKVAEAKARKKRRMLKRLEQTRKKAEAVVNTVDISEREKVAQLRSLYKKAGLGKEKRHVTYVVAKKGVGRKVRRPAGVRGHFKVVDSRMKKDQRAQQRKEQKKKHKRK

SEQ ID NO: 869945 - protein, 782 aa, Homo sapiens [sequence omitted]

SEQ ID NO: 869946 - protein, 847 aa, Homo sapiens; identical to SEQ ID NO: 869944

SEQ ID NO: 869947 - protein, 485 aa, Homo sapiens
MKVMRRTQQLEPQSSPLRRRRKRKKKKLLREQRKQRERVELKMDLPGVSIADEGETGMFSLCTIRGHQLLEEVTQGDMSAADTFLSDLPRDDIYVSDVEDDGDDTSLDSDLDPEELAGVRGHQGLRDQKRMRLTEVQDDKEEEEEENPLLVPLEEKAVLQEEQANLWFSKGSFAGIEDDADEALEISQAQLLFENRRKGRQQQQKQQLPQTPPSCLKTEIMSPLYQDEAPKGTEASSGTEAATGLEGEEKDGISDSDSSTSSEEEESWEPLRGKKRSRGPKSDDDGFEIVPIEDPAKHRILDPEGLALGAVIASSKKAKRDLIDNSFNRYTFNEDEGELPEWFVQEEKQHRIRQLPVGKKEVEHYRKRWREINARPIKKVAEAKARKKRRMLKRLEQTRKKAEAVVNTVDISEREKVAQLRSLYKKAGLGKEKRHVTYVVAKKGVGRKVRRPAGVRGHFKVVDSRMKKDQRAQQRKEQKKKHKRK

SEQ ID NO: 869948 - protein, 754 aa, Homo sapiens
MGKKGKVGKSRRDKFYHLAKETGYRSRSAFKLIQLNRRFQFLQKARALLDLCAAPGGWLQVAAKFMPVSSLIVGVDLVPIKPLPNVVTLQEDITTERCRQALRKELKTWKVDVVLNDGAPNVGASWVHDAYSQAHLTLMALRLACDFLARGGSFITKVFRSRDYQPLLWIFQQLFRRVQATKPQASRHESAEIFVVCQGFLAPDKVDSKFFDPKFAFKEVEVQAKTVTELVTKKKPKAEGYAEGDLTLYHRTSVTDFLRAANPVDFLSKASEIMVDDEELAQHPATTEDIRVCCQDIRVLGRKELRSLLNWRTKLRRYVAKKLKEQAKALDISLSSGEEDEGDEEDSTAGTTKQPSKEEEEEEEEEQLNQTLAEMKAQEVAELKRKKKKLLREQRKQRERVELKMDLPGVSIADEGETGMFSLCTIRGHQLLEEVTQGDMSAADTFLSDLPRDDIYVSDVEDDGDDTSLDSDLDPEELAGVRGHQGLRDQKRMRLTEVQDDKEEEEEENPLLVPLEEKAVLQEEQANLWFSKGSFAGIEDDADEALEISQAQLLFENRRKGRQQQQKQQLPQTPPSCLKTEIMSPLYQDEAPKGTEASSGTEAATGLEGEEKDGISDSDSSTSSEEEESWEPLRGKKRSRGPKSDDDGFEIVPIEDPAKHRILDPEGLALGAVIASSKKAKRDLIDNSFNRYTFNEDEGELPEWFVQEEKQHRIRQLPVGKKEVEHYRKRWREINARPIKKVAEAKARKKRRML

SEQ ID NO: 869949 - protein, 434 aa, Homo sapiens
MGKKGKVGKSRRDKFYHLAKETGYRSRSAFKLIQLNRRFQFLQKARALLDLCAAPGGWLQVAAKFMPVSSLIVGVDLVPIKPLPNVVTLQEDITTERCRQALRKELKTWKVDVVLNDGAPNVGASWVHDAYSQAHLTLMALRLACDFLARGGSFITKVFRSRDYQPLLWIFQQLFRRVQATKPQASRHESAEIFVVCQGFLAPDKVDSKFFDPKFAFKEVEVQAKTVTELVTKKKPKAEGYAEGDLTLYHRTSVTDFLRAANPVDFLSKASEIMVDDEELAQHPATTEDIRVCCQDIRVLGRKELRSLLNWRTKLRRYVAKKLKEQAKALDISLSSGEEDEGDEEDSTAGTTKQPSKEEEEEEEEEQLNQTLAEMKAQEVAELKRKKKKLLREQRKQRERVELKMDLPGVSIADEGETGMFSLCTIRGHQYATY

SEQ ID NO: 869950 - protein, 516 aa, Homo sapiens
MGKKGKVGKSRRDKFYHLAKETGYRSRSAFKLIQLNRRFQFLQKARALLDLCAAPGGWLQVAAKFMPVSSLIVGVDLVPIKPLPNVVTLQEDITTERCRQALRKELKTWKVDVVLNDGAPNVGASWVHDAYSQAHLTLMALRLACDFLARGGSFITKVFRSRDYQPLLWIFQQLFRRVQATKPQASRHESAEIFVVCQGFLAPDKVDSKFFDPKFAFKEVEVQAKTVTELVTKKKPKAEGYAEGDLTLYHRTSVTDFLRAANPVDFLSKASEIMVDDEELAQHPATTEDIRVCCQDIRVLGRKELRSLLNWRTKLRRYVAKKLKEQAKALDISLSSGEEDEGDEEDSTAGTTKQPSKEEEEEEEEEQLNQTLAEMKAQEVAELKRKKKKLLREQRKQRERVELKMDLPGVSIADEGETGMFSLCTIRGHQLLEEVTQGDMSAADTFLSDLPRDDIYVSDVEDDGDDTSLDSDLDPEELAGVRGHQGLRDQKRMRLTEVQDDKEEEEVECLELPWWS

SEQ ID NO: 869951 - protein, 847 aa, Homo sapiens; identical to SEQ ID NO: 869944

SEQ ID NO: 869952 - protein, 847 aa, Homo sapiens; identical to SEQ ID NO: 869944

SEQ ID NO: 869953 - protein, 829 aa, Homo sapiens
MGKKGKVGKSRRDKFYHLAKETGYRSRSAFKLIQLNRRFQFLQKARALLDLCAAPGGWLQVAAKFMPVSSLIVGVDLVPIKPLPNVVTLQEDITTERCRQALRKELKTWKVDVVLNDGAPNVGASWVHDAYSQAHLTLMALRLACDFLARGGSFITKVFRSRDYQPLLWIFQQLFRRVQATKPQASRHESAEIFVVCQGFLAPDKVDSKFFDPKFAFKEVEVQAKTVTELVTKKKPKAEGYAEGDLTLYHRTSVTDFLRAANPVDFLSKASEIMVDDEELAQHPATTEDIRVCCQDIRVLGRKELRSLLNWRTKLRRYVAKKLKEQAKALDISLSSGEEDEGDEEDSTAGTTKQPSKEEEEEEEEEQLNQTLAEMKAQEVAELKRKKKKLLREQRKQRERVELKMDLPGVSIADEGETGMFSLCTIRGHQLLEEVTQGDMSAADTFLSDLPRDDIYVSDVEDDGDDTSLDSDLDPEELAGVRGHQGLRDQKRMRLTEVQDDKEEEEEENPLLVPLEEKAVLQEEQANLWFSKGSFAGIEDDADEALEISQAQLLFENRRKGRQQQQKQQLPQTPPSCLKTEIMSPLYQDEAPKGTEASSGTEAATGLEGEDWEPLRGKKRSRGPKSDDDGFEIVPIEDPAKHRILDPEGLALGAVIASSKKAKRDLIDNSFNRYTFNEDEGELPEWFVQEEKQHRIRQLPVGKKEVEHYRKRWREINARPIKKVAEAKARKKRRMLKRLEQTRKKAEAVVNTVDISEREKVAQLRSLYKKAGLGKEKRHVTYVVAKKGVGRKVRRPAGVRGHFKVVDSRMKKDQRAQQRKEQKKKHKRK

SEQ ID NO: 869954 - protein, 873 aa, Homo sapiens
MGKKGKVGKSRRDKFYHLAKETGYRSRSAFKLIQLNRRFQFLQKARALLDLCAAPGGWLQVAAKFMPVSSLIVGVDLVPIKPLPNVVTLQEDITTERCRQALRKELKTWKVDVVLNDGAPNVGASWVHDAYSQAHLTLMALRLACDFLARGGSFITKVFRSRDYQPLLWIFQQLFRRVQATKPQASRHESAEIFVVCQGFLAPDKVDSKFFDPKFAFKEVEVQAKTVTELVTKKKPKAEGYAEGDLTLYHRTSVTDFLRAANPVDFLSKASEIMVDDEELAQHPATTEDIRVCCQDIRVLGRKELRSLLNWRTKLRRYVAKKLKEQAKALDISLSSGEEDEGDEEDSTAGTTKQPSKEEEEEEEEEQLNQTLAEMKAQEVAELKRKKKKLLREQRKQRERVELKMDLPGVSIADEGETGMFSLCTIRGHQLLEEVTQGDMSAADTFLSDLPRDDIYVSDVEDDGDDTSLDSDLDPEELAGVRGHQGLRDQKRMRLTEVQDDKEEEEEENPLLVPLEEKAVLQEEQANLWFSKVRRGRGQDCGEMSLPWEKGSYVLLSQGSFAGIEDDADEALEISQAQLLFENRRKGRQQQQKQQLPQTPPSCLKTEIMSPLYQDEAPKGTEASSGTEAATGLEGEEKDGISDSDSSTSSEEEESWEPLRGKKRSRGPKSDDDGFEIVPIEDPAKHRILDPEGLALGAVIASSKKAKRDLIDNSFNRYTFNEDEGELPEWFVQEEKQHRIRQLPVGKKEVEHYRKRWREINARPIKKVAEAKARKKRRMLKRLEQTRKKAEAVVNTVDISEREKVAQLRSLYKKAGLGKEKRHVTYVVAKKGVGRKVRRPAGVRGHFKVVDSRMKKDQRAQQRKEQKKKHKRK

SEQ ID NO: 869955 - protein, 603 aa, Homo sapiens
QGKAMMLDLWEEDIAVLKVWDGGLSLLIYVAEARKVGSEPKTEGGGDKEGDGKISNQYLWGRSLLNWRTKLRRYVAKKLKEQAKALDISLSSGEEDEGDEEDSTAGTTKQPSKEEEEEEEEEQLNQTLAEMKAQEVAELKRKKKKLLREQRKQRERVELKMDLPGVSIADEGETGMFSLCTIRGHQLLEEVTQGDMSAADTFLSDLPRDDIYVSDVEDDGDDTSLDSDLDPEELAGVRGHQGLRDQKRMRLTEVQDDKEEEEEENPLLVPLEEKAVLQEEQANLWFSKGSFAGIEDDADEALEISQAQLLFENRRKGRQQQQKQQLPQTPPSCLKTEIMSPLYQDEAPKGTEASSGTEAATGLEGEEKDGISDSDSSTSSEEEESWEPLRGKKRSRGPKSDDDGFEIVPIEDPAKHRILDPEGLALGAVIASSKKAKRDLIDNSFNRYTFNEDEGELPEWFVQEEKQHRIRQLPVGKKEVEHYRKRWREINARPIKKVAEAKARKKRRMLKRLEQTRKKAEAVVNTVDISEREKVAQLRSLYKKAGLGKEKRHVTYVVAKKGVGRKVRRPAGVRGHFKVVDSRMKKDQRAQQRKEQKKKHKRK

SEQ ID NO: 869956 - protein, 119 aa, Homo sapiens
SYCSYHRFQNGNSLPSQRRSLQRAMLKRLEQTRKKAEAVVNTVDISEREKVAQLRSLYKKAGLGKEKRHVTYVVAKKGVGRKVRRPAGVRGHFKVVDSRMKKDQRAQQRKEQKKKHKRK

SEQ ID NO: 869957 - protein, 105 aa, Homo sapiens
MSIRLHQNLGRGRTKSCLKKLVAGANCRDQDDPSQRNQQPRSATFRSTTEARQGEQSCWPQSFLLFRAGEAEAHSLDMFLMVLCSFMAFSQSLPLNSSVTILRTG

SEQ ID NO: 869958 - protein, 257 aa, Homo sapiens
CCLPIMEAMWLLCVALAVLAWGFLWVWDSSERMKSREQGGRLGAESRTLLVIAHPDDEAMFFAPTVLGLARLRHWVYLLCFSAGNYYNQGETRKKELLQSCDVLGIPLSSVMIIDNRDFPDDPGMQWDTEHVARVLLQHIEVNGINLVVTFDAGGVSGHSNHIALYAAVRALHSEGKLPKGCSVLTLQSVNVLRKYISLLDLPLSLLHTQDVLFVLNSKEVAQAKKAMSCHRSQLLWFRRLYIIFSRYMRINSLSFL

SEQ ID NO: 869959 - protein, 257 aa, Homo sapiens; identical to SEQ ID NO: 869958

SEQ ID NO: 869960 - protein, 257 aa, Homo sapiens; identical to SEQ ID NO: 869958

SEQ ID NO: 869961 - protein, 143 aa, Homo sapiens
CCLPIMEAMWLLCVALAVLAWGFLWVWDSSERMKSREQGGRLGAESRTLLVIAHPDDEAMFFAPTVLGLARLRHWVYLLCFSAGNYYNQGETRKKELLQSCDVLGIPLSSVMIIDNRLECNGAISAHCNLRFPGSSDSPASAS

SEQ ID NO: 869962 - protein, 103 aa, Homo sapiens
CCLPIMEAMWLLCVALAVLAWGFLWVWDSSERMKSREQGGRLGAESRTLLVIAHPDDEAMFFAPTVLGLARLRHWVYLLCFSAVFRRELSEYTEGLTSEPLTA

SEQ ID NO: 869963 - protein, 87 aa, Homo sapiens
CCLPIMEAMWLLCVALAVLAWGFLWVWDSSERMKSREQGGRLGAESRTLLVIAHPDDEAMFFAPTVLGLARLRHWVYLLCFSAGRRP

SEQ ID NO: 869964 - protein, 249 aa, Homo sapiens
CCLPIMEAMWLLCVALAVLAWGFLWVWDSSERMKSREQGGRLGAESRTLLVIAHPDDEAMFFAPTVLGLARLRHWVYLLCFSAGNYYNQGETRKKELLQSCDVLGIPLSSVMIIDNRDFPDDPGMQWDTEHVARVLLQHIEVNGINLVVTFDAGGVSGHSNHIALYAAVRVLCAHASVCECAAQVHLPSGSALVSASYAGCPLRAQQQRSGTGQESHVLPPQPAPLVPPPLHYLLPVHENQLTELPLKP

SEQ ID NO: 869965 - protein, 117 aa, Homo sapiens
CCLPIMEAMWLLCVALAVLAWGFLWVWDSSERMKSREQGGRLGAESRTLLVIAHPDDEAMFFAPTVLGLARLRHWVYLLCFSAGNYYNQGETRKKELLQSCDVLGIPLSSVMIIDNR

SEQ ID NO: 869966 - protein, 257 aa, Homo sapiens; identical to SEQ ID NO: 869958

SEQ ID NO: 869967 - protein, 257 aa, Homo sapiens; identical to SEQ ID NO: 869958

SEQ ID NO: 869968 - protein, 199 aa, Homo sapiens
CCLPIMEAMWLLCVALAVLAWGFLWVWDSSERMKSREQGGRLGAESRTLLVIAHPDDEAMFFAPTVLGLARLRHWVYLLCFSAGNYYNQGETRKKELLQSCDVLGIPLSSVMIIDNRDFPDDPGMQWDTEHVARVLLQHIEVNGINLVVTFDAGGVSGHSNHIALYAAVRALHSEGKLPKGKACSFCKGPQDTVPLRNL

SEQ ID NO: 869969 - protein, 199 aa, Homo sapiens; identical to SEQ ID NO: 869968

SEQ ID NO: 869970 - protein, 199 aa, Homo sapiens; identical to SEQ ID NO: 869968

SEQ ID NO: 869971 - protein, 150 aa, Homo sapiens
CCLPIMEAMWLLCVALAVLAWGFLWVWDSSERMKSREQGGRLGAESRTLLVIAHPDDEAMFFAPTVLGLARLRHWVYLLCFSAGNYYNQGETRKKELLQSCDVLGIPLSSVMIIDNRLSYLRLMCLSEAQGPQQHTPVSQSSDYSSLGMG

SEQ ID NO: 869972 - protein, 588 aa, Homo sapiens
MARGGAGAEEASLRSNALSWLACGLLALLANAWIILSISAKQQKHKPLELLLCFLAGTHILMAAVPLTTFAVVQLRRQASSDYDWNESICKVFVSTYYTLALATCFTVASLSYHRMWMVRWPVNYRLSNAKKQALHAVMGIWMVSFILSTLPSIGWHNNGERYYARGCQFIVSKIGLGFGVCFSLLLLGGIVMGLVCVAITFYQTLWARPRRARQARRVGGGGGTKAGGPGALGTRPAFEVPAIVVEDARGKRRSSLDGSESAKTSLQVTNLVSAIVFLYDSLTGVPILVVSFFSLKSDSAPPWMVLAVLWCSMAQTLLLPSFIWSCERYRADVRTVWEQCVAIMSEEDGDDDGGCDDYAEGRVCKVRFDANGATGPGSRDPAQVKLLPGRHMLFPPLERVHYLQVPLSRRLSHDETNIFSTPREPGSFLHKWSSSDDIRVLPAQSRALGGPPEYLGQRHRLEDEEDEEEAEGGGLASLRQFLESGVLGSGGGPPRGPGFFREEITTFIDETPLPSPTASPGHSPRRPRPLGLSPRRLSLGSPESRAVGLPLGLSAGRRCSLTGGEESARAWGGSWGPGNPIFPQLTL

SEQ ID NO: 869973 - protein, 284 aa, Homo sapiens
MVLAVLWCSMAQTLLLPSFIWSCERYRADVRTVWEQCVAIMSEEDGDDDGGCDDYAEGRVCKVRFDANGATGPGSRDPAQVKLLPGRHMLFPPLERVHYLQVPLSRRLSHDETNIFSTPREPGSFLHKWSSSDDIRVLPAQSRALGGPPEYLGQRHRLEDEEDEEEAEGGGLASLRQFLESGVLGSGGGPPRGPGFFREEITTFIDETPLPSPTASPGHSPRRPRPLGLSPRRLSLGSPESRAVGLPLGLSAGRRCSLTGGEESARAWGGSWGPGNPIFPQLTL

SEQ ID NO: 869974 - protein, 139 aa, Homo sapiens
MRQTSSLPLGNQAPSCTSGHPLMTSGSSQPRAGPSGVLLSTWDKDTGWRTRRTRKRLKVGGWPAFANSWRVGFWGQVGDPHGVLASSGRRSPPSSMRHLCLLRLPHQGTLLVGPGHWASHPADSPLGPLRAEPLDFLWD

SEQ ID NO: 869975 - protein, 228 aa, Homo sapiens
PRVAHASVMGLVCVAITFYQTLWARPRRARQARRVGGGGGTKAGGPGALGTRPAFEVPAIVVEDARGKRRSSLDGSESAKTSLQVTNLVSAIVFLYDSLTGVPILVVSFFSLKSDSAPPWMVLAVLWCSMAQTLLLPSFIWSCERYRADVRTVWEQCVAIMSEEDGDDDGGCDDYAEGRVCKVRFDANGATGPGSRDPAQVKLLPGRHMLFPPLERVHYLQSLSGVCP

SEQ ID NO: 869976 - protein, 588 aa, Homo sapiens; identical to SEQ ID NO: 869972

SEQ ID NO: 869977 - protein, 426 aa, Homo sapiens
MARGGAGAEEASLRSNALSWLACGLLALLANAWIILSISAKQQKHKPLELLLCFLAGTHILMAAVPLTTFAVVQLRRQASSDYDWNESICKVFVSTYYTLALATCFTVASLSYHRMWMVRWPVNYRLSNAKKQALHAVMGIWMVSFILSTLPSIGWHNNGERYYARGCQFIVSKIGLGFGVCFSLLLLGGIVMGLVCVAITFYQTLWARPRRARQARRVGGGGGTKAGGPGALGTRPAFEVPAIVVEDARGKRRSSLDGSESAKTSLQVTNLVVSFFSLKSDSAPPWMVLAVLWCSMAQTLLLPSFIWSCERYRADVRTVWEQCVAIMSEEDGDDDGGCDDYAEGRVCKVRFDANGATGPGSRDPAQVKLLPGRHMLFPPLERVHYLQLKKLDLAAAAAHTFFVANPMHLQMREDMAKYRRMSGVR

SEQ ID NO: 869978 - protein, 588 aa, Homo sapiens; identical to SEQ ID NO: 869972

SEQ ID NO: 869979 - protein, 527 aa, Homo sapiens
MAAVPLTTFAVVQLRRQASSDYDWNESICKVFVSTYYTLALATCFTVASLSYHRMWMVRWPVNYRLSNAKKQALHAVMGIWMVSFILSTLPSIGWHNNGERYYARGCQFIVSKIGLGFGVCFSLLLLGGIVMGLVCVAITFYQTLWARPRRARQARRVGGGGGTKAGGPGALGTRPAFEVPAIVVEDARGKRRSSLDGSESAKTSLQVTNLVSAIVFLYDSLTGVPILVVSFFSLKSDSAPPWMVLAVLWCSMAQTLLLPSFIWSCERYRADVRTVWEQCVAIMSEEDGDDDGGCDDYAEGRVCKVRFDANGATGPGSRDPAQVKLLPGRHMLFPPLERVHYLQVPLSRRLSHDETNIFSTPREPGSFLHKWSSSDDIRVLPAQSRALGGPPEYLGQRHRLEDEEDEEEAEGGGLASLRQFLESGVLGSGGGPPRGPGFFREEITTFIDETPLPSPTASPGHSPRRPRPLGLSPRRLSLGSPESRAVGLPLGLSAGRRCSLTGGEESARAWGGSWGPGNPIFPQLTL

SEQ ID NO: 869980 - protein, 304 aa, Homo sapiens
MLSTGVVSFFSLKSDSAPPWMVLAVLWCSMAQTLLLPSFIWSCERYRADVRTVWEQCVAIMSEEDGDDDGGCDDYAEGRVCKVRFDANGATGPGSRDPAQVKLLPGRHMLFPPLERVHYLQVPLSRRLSHDETNIFSTPREPGSFLHKWSSSDDIRVLPAQSRALGGPPEYLGQRHRLEDEEDEEEAEGGGLASLRQFLESGVLGSGGGPPRGPGFFREEITTFIDETPLPSPTASPGHSPRRPRPLGLSPRRLSLGSPESRAVGLPLGLSAGRRCSLTGGEESARAWGGSWGPGNPIFPQLTL

SEQ ID NO: 869981 - protein, 134 aa, Homo sapiens
MVLAVLWCSMAQTLLLPSFIWSCERYRADVRTVWEQCVAIMSEEDGDDGQRRGWALAFLDICLFPFLPLLLSQRMGCPWSAPYWTESAPPWAPLSLSRHPAVHSLLPAALRAPFTGPRLPSRNPHCPALALWGT

SEQ ID NO: 869982 - protein, 571 aa, Homo sapiens
MARGGAGAEEASLRSNALSWLACGLLALLANAWIILSISAKQQKHKPLELLLCFLAGTHILMAAVPLTTFAVVQLRRQASSDYDWNESICKVFVSTYYTLALATCFTVASLSYHRMWMVRWPVNYRLSNAKKQALHAVMGIWMVSFILSTLPSIGWHNNGERYYARGCQFIVSKIGLGFGVCFSLLLLGGIVMGLVCVAITFYQTLWARPRRARQARRVGGGGGTKAGGPGALGTRPAFEVPAIVVEDARGKRRSSLDGSESAKTSLQVTNLVVSFFSLKSDSAPPWMVLAVLWCSMAQTLLLPSFIWSCERYRADVRTVWEQCVAIMSEEDGDDDGGCDDYAEGRVCKVRFDANGATGPGSRDPAQVKLLPGRHMLFPPLERVHYLQVPLSRRLSHDETNIFSTPREPGSFLHKWSSSDDIRVLPAQSRALGGPPEYLGQRHRLEDEEDEEEAEGGGLASLRQFLESGVLGSGGGPPRGPGFFREEITTFIDETPLPSPTASPGHSPRRPRPLGLSPRRLSLGSPESRAVGLPLGLSAGRRCSLTGGEESARAWGGSWGPGNPIFPQLTL

SEQ ID NO: 869983 - protein, 588 aa, Homo sapiens; identical to SEQ ID NO: 869972

SEQ ID NO: 869984 - protein, 399 aa, Homo sapiens [sequence omitted]

SEQ ID NO: 869985 - protein, 284 aa, Homo sapiens; identical to SEQ ID NO: 869973

SEQ ID NO: 869986 - protein, 275 aa, Homo sapiens
MPYANQPTVRITELTDENVKFIIENTDLAVANSIRRVFIAEVPIIAIDWVQIDANSSVLHDEFIAHRLGLIPLISDDIVDKLQYSRDCTCEEFCPECSVEFTLDVRCNEDQTRHVTSRDLISNSPRVIPVTSRNRDNDPNDYVEQDDILIVKLRKGQELRLRAYAKKGFGKEHAKWNPTAGVAFEYDPDNALRHTVYPKPEEWPKSEYSELDEDESQAPYDPNGKPERFYYNVESCGSLRPETIVLSALSGLKKKLSDLQTQLSHEIQSDVLTIN

SEQ ID NO: 869987 - protein, 275 aa, Homo sapiens; identical to SEQ ID NO: 869986

SEQ ID NO: 869988 - protein, 275 aa, Homo sapiens; identical to SEQ ID NO: 869986

SEQ ID NO: 869989 - protein, 275 aa, Homo sapiens; identical to SEQ ID NO: 869986

SEQ ID NO: 869990 - protein, 287 aa, Homo sapiens
MRPGGDAEQTRRLVAPGRDAVRITELTDENVKFIIENTDLAVANSIRRVFIAEVPIIAIDWVQIDANSSVLHDEFIAHRLGLIPLISDDIVDKLQYSRDCTCEEFCPECSVEFTLDVRCNEDQTRHVTSRDLISNSPRVIPVTSRNRDNDPNDYVEQDDILIVKLRKGQELRLRAYAKKGFGKEHAKWNPTAGVAFEYDPDNALRHTVYPKPEEWPKSEYSELDEDESQAPYDPNGKPERFYYNVESCGSLRPETIVLSALSGLKKKLSDLQTQLSHEIQSDVLTIN

SEQ ID NO: 869991 - protein, 219 aa, Homo sapiens [sequence omitted]

SEQ ID NO: 869992 - protein, 275 aa, Homo sapiens; identical to SEQ ID NO: 869986

SEQ ID NO: 869993 - protein, 275 aa, Homo sapiens; identical to SEQ ID NO: 869986

SEQ ID NO: 869994 - protein, 275 aa, Homo sapiens; identical to SEQ ID NO: 869986

SEQ ID NO: 869995 - protein, 275 aa, Homo sapiens; identical to SEQ ID NO: 869986

SEQ ID NO: 869996 - protein, 275 aa, Homo sapiens; identical to SEQ ID NO: 869986

SEQ ID NO: 869997 - protein, 326 aa, Homo sapiens
PLSFSLRGARVRVLTLSSWRACAPPALWAVPAPLLSFPSVLASAVSRPPLVGSLVLLLVRLGRSALSRSAPGPLPPLPSRRCSSRPPPPSPLPLRSSALVAVPASSCRLAASPRVSLGFPCVSPRSVSWPVRLLRSSLSLLLLSSPLASAAAAFPGSLLPPSLGPFAAASAGSRSRRLGRSRGDTPPSRLCRPGGGASLRLRARCAAGRRSPGGRPGRPVFAPPSRRARCLSLARAPPPRGMSCWRLRPRERPTASLSGRGPRRSGFVLVASDSPPVLTFLSAGSSRRSKGPSHIHRRSISFLLNEGSGPNPSALSPDRNMHKAVN

SEQ ID NO: 869998 - protein, 105 aa, Homo sapiens
FSDGVSLCHPDWSAFSPHRVGAAGRHPAPVSLHSKAVTSVASSCLCDDPHEGCRVKGTAGFGLTPRGALGERAWSWGAAQVFYIPWPPSSPARLSSWPCAPGDAC

SEQ ID NO: 869999 - protein, 286 aa, Homo sapiens
LVQPHNVPSIVHSQVYRSSKVEKLPPLYKTLTFSGSSQTITPENQTLNYSSNQQEVLSSVTNENYPAQTRDLSSVSQSQSYSSGHSQGLSPVSQTQVSYSSQSQVLSVVSLSESYASGESLTLTAPSLSYSSASRAQNLPDSSPTQNYISMHSSQNVQTQESSSPQSQKFLPAVQSSSFASSTHCQTLQNNITSPDPKSYAERKLDSDVYPSSKQEDGFPMQELQVLQPQASLESSTQRLSDGEINAQESTYKVSKADDRYSQSVIRSNSRLEDQVIGVALQASKK

SEQ ID NO: 870000 - protein, 809 aa, Homo sapiens
ARRQTSCSRRPESADTMWIQVRTMDGRQTHTVDSLSRLTKVEELRRKIQELFHVEPGLQRLFYRGKQMEDGHTLFDYEVRLNDTIQLLVRQSLVLPHSTKERDSELSDTDSGCCLGQSESDKSSTHGEAAAETDSRPADEDMWDETELGLYKVNEYVDARDTNMGAWFEAQVVRVTRKAPSRDEPCSSTSRPALEEDVIYHVKYDDYPENGVVQMNSRDVRARARTIIKWQDLEVGQVVMLNYNPDNPKERGFWYDAEISRKRETRTARELYANVVLGDDSLNDCRIIFVDEVFKIERPGEGSPMVDNPMRRKSGPSCKHCKDDVNRLCRVCACHLCGGRQDPDKQLMCDECDMAFHIYCLDPPLSSVPSEDEWYCPECRNDASEVVLAGERLRESKKKAKMASATSSSQRDWGKGMACVGRTKECTIVPSNHYGPIPGIPVGTMWRFRVQVSESGVHRPHVAGIHGRSNDGAYSLVLAGGYEDDVDHGNFFTYTGSGGRDLSGNKRTAEQSCDQKLTNTNRALALNCFAPINDQEGAEAKDWRSGKPVRVVRNVKGGKNSKYAPAEGNRYDGIYKVVKYWPEKGKSGFLVWRYLLRRDDDEPGPWTKEGKDRIKKLGLTMQYPEGYLEALANREREKENSKREEEEQQEGGFASPRTGKGKWKRKSAGGGPSRAGSPRRTSKKTKVEPYSLTAQQSSLIREDKSNAKLWNEVLASLKDRPASGSPFQLFLSKVEETFQCICCQELVFRPITTVCQHNVCKDCLDRSFRAQVFSCPACRYDLGRSYAMQVNQPLQTVLNQLFPGYGNGR

SEQ ID NO: 870001 - protein, 807 aa, Homo sapiens
GARAAGGWRSSADTMWIQVRTMDGRQTHTVDSLSRLTKVEELRRKIQELFHVEPGLQRLFYRGKQMEDGHTLFDYEVRLNDTIQLLVRQSLVLPHSTKERDSELSDTDSGCCLGQSESDKSSTHGEAAAETDSRPADEDMWDETELGLYKVNEYVDARDTNMGAWFEAQVVRVTRKAPSRDEPCSSTSRPALEEDVIYHVKYDDYPENGVVQMNSRDVRARARTIIKWQDLEVGQVVMLNYNPDNPKERGFWYDAEISRKRETRTARELYANVVLGDDSLNDCRIIFVDEVFKIERPGEGSPMVDNPMRRKSGPSCKHCKDDVNRLCRVCACHLCGGRQDPDKQLMCDECDMAFHIYCLDPPLSSVPSEDEWYCPECRNDASEVVLAGERLRESKKKAKMASATSSSQRDWGKGMACVGRTKECTIVPSNHYGPIPGIPVGTMWRFRVQVSESGVHRPHVAGIHGRSNDGAYSLVLAGGYEDDVDHGNFFTYTGSGGRDLSGNKRTAEQSCDQKLTNTNRALALNCFAPINDQEGAEAKDWRSGKPVRVVRNVKGGKNSKYAPAEGNRYDGIYKVVKYWPEKGKSGFLVWRYLLRRDDDEPGPWTKEGKDRIKKLGLTMQYPEGYLEALANREREKENSKREEEEQQEGGFASPRTGKGKWKRKSAGGGPSRAGSPRRTSKKTKVEPYSLTAQQSSLIREDKSNAKLWNEVLASLKDRPASGSPFQLFLSKVEETFQCICCQELVFRPITTVCQHNVCKDCLDRSFRAQVFSCPACRYDLGRSYAMQVNQPLQTVLNQLFPGYGNGR

SEQ ID NO: 870002 - protein, 821 aa, Homo sapiens
RLLRAWHGSEVLVKLMGVFAVPPLSADTMWIQVRTMDGRQTHTVDSLSRLTKVEELRRKIQELFHVEPGLQRLFYRGKQMEDGHTLFDYEVRLNDTIQLLVRQSLVLPHSTKERDSELSDTDSGCCLGQSESDKSSTHGEAAAETDSRPADEDMWDETELGLYKVNEYVDARDTNMGAWFEAQVVRVTRKAPSRDEPCSSTSRPALEEDVIYHVKYDDYPENGVVQMNSRDVRARARTIIKWQDLEVGQVVMLNYNPDNPKERGFWYDAEISRKRETRTARELYANVVLGDDSLNDCRIIFVDEVFKIERPGEGSPMVDNPMRRKSGPSCKHCKDDVNRLCRVCACHLCGGRQDPDKQLMCDECDMAFHIYCLDPPLSSVPSEDEWYCPECRNDASEVVLAGERLRESKKKAKMASATSSSQRDWGKGMACVGRTKECTIVPSNHYGPIPGIPVGTMWRFRVQVSESGVHRPHVAGIHGRSNDGAYSLVLAGGYEDDVDHGNFFTYTGSGGRDLSGNKRTAEQSCDQKLTNTNRALALNCFAPINDQEGAEAKDWRSGKPVRVVRNVKGGKNSKYAPAEGNRYDGIYKVVKYWPEKGKSGFLVWRYLLRRDDDEPGPWTKEGKDRIKKLGLTMQYPEGYLEALANREREKENSKREEEEQQEGGFASPRTGKGKWKRKSAGGGPSRAGSPRRTSKKTKVEPYSLTAQQSSLIREDKSNAKLWNEVLASLKDRPASGSPFQLFLSKVEETFQCICCQELVFRPITTVCQHNVCKDCLDRSFRAQVFSCPACRYDLGRSYAMQVNQPLQTVLNQLFPGYGNGR

SEQ ID NO: 870003 - protein, 110 aa, Homo sapiens
QGLPGQILAHVVLAHGRDGPEHQLLTAERVQGLPGQILSGTGVQLPCLPLRPGPQLCHAGEPASADRPQPALPRLRQWPVISKHFSTGVLLKTCRRARSSALILFLVGLT

SEQ ID NO: 870004 - protein, 74 aa, Homo sapiens
  misc_feature (6)..(6): Xaa can be any naturally occurring amino acid
  misc_feature (22)..(22): Xaa can be any naturally occurring amino acid
SMSYKXERPGLLQTVSAQYDGXHKVSDCLDRSFRAQVFSCPACRYDLGRSYAMQVNQPLQTVLNQLFPGYGNGR

SEQ ID NO: 870005 - protein, 124 aa, Homo sapiens
PLHTVGRGRPTSARFPLREGGLVLARGLRPGLSSQLPGERRGPDELQGRPSARPHHHQVAGPGGGPGGHAQLQPRQPQGAGLLVRRGDLQEARDQDGAGTLRQRGAGVSLASWGEPFLSPFLPS

SEQ ID NO: 870006 - protein, 821 aa, Homo sapiens; identical to SEQ ID NO: 870002

SEQ ID NO: 870007 - protein, 821 aa, Homo sapiens; identical to SEQ ID NO: 870002

SEQ ID NO: 870008 - protein, 821 aa, Homo sapiens; identical to SEQ ID NO: 870002

SEQ ID NO: 870009 - protein, 93 aa, Homo sapiens
  misc_feature (3)..(3): Xaa can be any naturally occurring amino acid
PGXGIVDQRRPTCAGLPGQILSGTGVQLPCLPLRPGPQLCHAGEPASADRPQPALPRLRQWPVISKHFSTGVLLKTCRRARSSALILFLVGLT

SEQ ID NO: 870010 - protein, 127 aa, Homo sapiens
ENPALALRRAAECRAYARGASRGLVSICPFCLRVKFAGENPTIRAEPLGGEPPPHPTPSPIPTDGKNDSIGQNRLPASINMDGLRSWCLGRMGASPGNRRRRRHEGRLPLLGLENVDSQRDQTNVVR

SEQ ID NO: 870011 - protein, 140 aa, Homo sapiens
MAQGLIEVERKFLPGPGTEERLQELGGTLEYRVTFRDTYYDTPELSLMQADHWLRRREDSGWELKCPGAAGVLGPHTEYKELTAEPTIVAQLCVPAQETAPAKLIVYLQRFRPQDYQRLLEVNSSRERPQETEDPDHCLG

SEQ ID NO: 870012 - protein, 230 aa, Homo sapiens
MAQGLIEVERKFLPGPGTEERLQELGGTLEYRVTFRDTYYDTPELSLMQADHWLRRREDSGWELKCPGAAGVLGPHTEYKELTAEPTIVAQLCKVLRADGLGAGDVAAVLGPLGLQEVASFVTKRSAWKLVLLGADEEEPQLRVDLDTADFGYAVGEVEALVHEEAEVPTALEKIHRLSSMLGVPAQETAPAKLIVYLQRFRPQDYQRLLEVNSSRERPQETEDPDHCLG

SEQ ID NO: 870013 - protein, 230 aa, Homo sapiens; identical to SEQ ID NO: 870012

SEQ ID NO: 870014 - protein, 99 aa, Homo sapiens
DWCSRGSPLEASVKVLRRSNRKKIDDPIDEEEEFEELKGSEPHMRTRNQGRRTAFYNEDDSEEEQRQLLFEDTSLTFGTSSRGRVRKLTEKAKANLIGW

SEQ ID NO: 870015 - protein, 535 aa, Homo sapiens
MHMAFVFHRQEEWRTAKGEEEIKTYRSEEKRKHLTVPKENKIPTVSKNHAHEHFLDLGESKKQQTNQHNYRTRSALEETPRPSEEIENGSSSSDEGEVVAVSGGTSEEEERAWHSDGSSSDYSSDYSDWTADAGINLQPPKKVPKNKTKKAESSSDEEEESEKQKQKQIKKEKKKVNEEKDGPISPKKKKPKERKQKRLAVGELTENGLTLEEWLPSTWITDTIPRRCPFVPQMGDEVYYFRQGHEAYVEMARKNKIYSINPKKQPWHKMELREQELMKIVGIKYEVGLPTLCCLKLAFLDPDTGKLTGGSFTMKYHDMPDVIDFLVLRQQFDDAKYRRWNIGDRFRSVIDDAWWFGTIESQEPLQLEYPDSLFQCYNVCWDNGDTEKMSPWDMELIPNNAVFPEELGTSVPLTDGECRSLIYKPLDGEWGTNPRDEECERIVAGINQLMTLDIASAFVAPVDLQAYPMYCTVVAYPTDLSTIKQRLENRFYRRVSSLMWEVRYIEHNTRTFNEPGSPIVKSAKFVTDLLLHFIK

SEQ ID NO: 870016 - protein, 845 aa, Homo sapiens
MARKNKIYSINPKKQPWHKMELREQELMKIVGIKYEVGLPTLCCLKLAFLDPDTGKLTGGSFTMKYHDMPDVIDFLVLRQQFDDAKYRRWNIGDRFRSVIDDAWWFGTIESQEPLQLEYPDSLFQCYNVCWDNGDTEKMSPWDMELIPNNAVFPEELGTSVPLTDGECRSLIYKPLDGEWGTNPRDEECERIVAGINQLMTLDIASAFVAPVDLQAYPMYCTVVAYPTDLSTIKQRLENRFYRRVSSLMWEVRYIEHNTRTFNEPGSPIVKSAKFVTDLLLHFIKDQTCYNIIPLYNSMKKKVLSDSEDEEKDADVPGTSTRKRKDHQPRRRLRNRAQSYDIQAWKKQCEELLNLIFQCEDSEPFRQPVDLLEYPDYRDIIDTPMDFATVRETLEAGNYESPMELCKDVRLIFSNSKAYTPSKRSRIYSMSLRLSAFFEEHISSVLSDYKSALRFHKRNTITKRRKKRNRSSSVSSSAASSPERKKRILKPQLKSESSTSAFSTPTRSIPPRHNAAQINGKTESSSVVRTRSNRVVVDPVVTEQPSTSSAAKTFITKANASAIPGKTILENSVKHSKALNTLSSPGQSSFSHGTRNNSAKENMEKEKPVKRKMKSSVLPKASTLSKSSAVIEQGDCKNNALVPGTIQVNGHGGQPSKLVKRGPGRKPKVEVNTNSGEIIHKKRGRKPKKLQYAKPEDLEQNNVHPIRDEVLPSSTCNFLSETNNVKEDLLQKKNRGGRKPKRKMKTQKLDADLLVPASVKVLRRSNRKKIDDPIDEEEEFEELKGSEPHMRTRNQGRRTAFYNEDDSEEEQRQLLFEDTSLTFGTSSRGRVRKLTEKAKANLIGW

SEQ ID NO: 870017 - protein, 1590 aa, Homo sapiens
LLATLRGHAAEISDMAVNYENTMIAAGSCDKMIRVWCLRTCAPLAVLQGHSASITSLQFSPLCSGSKRYLSSTGADGTICFWLWDAGTLKINPRPAKFTERPRPGVQMICSSFSAGGMFLATGSTDHIIRVYFFGSGQPEKISELEFHTDKVDSIQFSNTSNRFVSGSRDGTARIWQFKRREWKSILLDMATRPAGQNLQGIEDKITKMKVTMVAWDRHDNTVITAVNNMTLKVWNSYTGQLIHVLMGHEDEVFVLEPHPFDPRVLFSAGHDGNVIVWDLARGVKIRSYFNMIEGQGHGAVFDCKCSPDGQHFACTDSHGHLLIFGFGSSSKYDKIADQMFFHSDYRPLIRDANNLYVDEQTQQSTSSYASPFLVDVDGNPHPSRYQRLVPGRENCREEQLIPQMGVTSSGLNQVLSQQANQEISPLDSMIQRLQQEQDLRRSGEAGISNTSRLSRGSISSTSEVHSPPNVGLRRSGQIEGVRQMHSNAPRSEIATERDLVAWSRRVVVPELSAGVASRQEEWRTAKGEEEIKTYRSEEKRKHLTVPKENKIPTVSKNHAHEHFLDLGESKKQQTNQHNYRTRSALEETPRPSEEIENGSSSSDEGEVVAVSGGTSEEEERAWHSDGSSSDYSSDYSDWTADAGINLQPPKKVPKNKTKKAESSSDEEEESEKQKQKQIKKEKKKVNEEKDGPISPKKKKPKERKQKRLAVGELTENGLTLEEWLPSTWITDTIPRRCPFVPQMGDEVYYFRQGHEAYVEMARKNKIYSINPKKQPWHKMELREQELMKIVGIKYEVGLPTLCCLKLAFLDPDTGKLTGGSFTMKYHDMPDVIDFLVLRQQFDDAKYRRWNIGDRFRSVIDDAWWFGTIESQEPLQLEYPDSLFQCYNVCWDNGDTEKMSPWDMELIPNNAVFPEELGTSVPLTDGECRSLIYKPLDGEWGTNPRDEECERIVAGINQLMTLDIASAFVAPVDLQAYPMYCTVVAYPTDLSTIKQRLENRFYRRVSSLMWEVRYIEHNTRTFNEPGSPIVKSAKFVTDLLLHFIKDQTCYNIIPLYNSMKKKVLSDSEDEEKDADVPGTSTRKRKDIQAWKKQCEELLNLIFQCEDSEPFRQPVDLLEYPDYRDIIDTPMDFATVRETLEAGNYESPMELCKDVRLIFSNSKAYTPSKRSRIYSMSLRLSAFFEEHISSVLSDYKSALRFHKRNTITKRRKKRNRSSSVSSSAASSPERKKRILKPQLKSESSTSAFSTPTRSIPPRHNAAQINGKTESSSVVRTRSNRVVVDPVVTEQPSTSSAAKTFITKANASAIPGKTILENSVKHSKALNTLSSPGQSSFSHGTRNNSAKENMEKEKPVKRKMKSSVLPKASTLSKSSAVIEQGDCKNNALVPGTIQVNGHGGQPSKLVKRGPGRKPKVEVNTNSGEIIHKKRGRKPKKLQYAKPEDLEQNNVHPIRDEVLPSSTCNFLSETNNVKEDLLQKKNRGGRKPKRKMKTQKLDADLLVPASVKVLRRSNRKKIDDPIDEEEEFEELKGSEPHMRTRNQGRRTAFYNEDDSEEEQRQLLFEDTSLTFGTSSRGRVRKLTEKAKANLIGW

SEQ ID NO: 870018 - protein, 1045 aa, Homo sapiens
LLATLRGHAAEISDMAVNYENTMIAAGSCDKMIRVWCLRTCAPLAVLQGHSASITSLQFSPLCSGSKRYLSSTGADGTICFWLWDAGTLKINPRPAKFTERPRPGVQMICSSFSAGGMFLATGSTDHIIRVYFFGSGQPEKISELEFHTDKVDSIQFSNTSNRFVSGSRDGTARIWQFKRREWKSILLDMATRPAGQNLQGIEDKITKMKVTMVAWDRHDNTVITAVNNMTLKVWNSYTGQLIHVLMGHEDEVFVLEPHPFDPRVLFSAGHDGNVIVWDLARGVKIRSYFNMIEGQGHGAVFDCKCSPDGQHFACTDSHGHLLIFGFGSSSKYDKIADQMFFHSDYRPLIRDANNLYVDEQTQQSTSSYASPFLVDVDGNPHPSRYQRLVPGRENCREEQLIPQMGVTSSGLNQVLSQQANQEISPLDSMIQRLQQEQDLRRSGEAGISNTSRLSRGSISSTSEVHSPPNVGLRRSGQIEGVRQMHSNAPRSEIATERDLVAWSRRVVVPELSAGVASRQEEWRTAKGEEEIKTYRSEEKRKHLTVPKENKIPTVSKNHAHEHFLDLGESKKQQTNQHNYRTRSALEETPRPSEEIENGSSSSDEGEVVAVSGGTSEEEERAWHSDGSSSDYSSDYSDWTADAGINLQPPKKVPKNKTKKAESSSDEEEESEKQKQKQIKKEKKKVNEEKDGPISPKKKKPKERKQKRLAVGELTENGLTLEEWLPSTWITDTIPRRCPFVPQMGDEVYYFRQGHEAYVEMARKNKIYSINPKKQPWHKMELREQELMKIVGIKYEVGLPTLCCLKLAFLDPDTGKLTGGSFTMKYHDMPDVIDFLVLRQQFDDAKYRRWNIGDRFRSVIDDAWWFGTIESQEPLQLEYPDSLFQCYNVCWDNGDTEKMSPWDMELIPNNAVFPEELGTSVPLTDGECRSLIYKPLDGEWGTNPRDEECERIVAGINQLMTLDIASAFVAPVDLQAYPMYCTVVAYPTDLSTIKQRLENRFYRRVSSLMWEVRYIEHNTRTFNEPGSPIVKSAKFVTDLLLHFIK

SEQ ID NO: 870019 - protein, 1051 aa, Homo sapiens
LLATLRGHAAEISDMAVNYENTMIAAGSCDKMIRVWCLRTCAPLAVLQGHSASITSLQFSPLCSGSKRYLSSTGADGTICFWLWDAGTLKINPRPAKFTERPRPGVQMICSSFSAGGMFLATGSTDHIIRVYFFGSGQPEKISELEFHTDKVDSIQFSNTSNRFVSGSRDGTARIWQFKRREWKSILLDMATRPAGQNLQGIEDKITKMKVTMVAWDRHDNTVITAVNNMTLKVWNSYTGQLIHVLMGHEDEVFVLEPHPFDPRVLFSAGHDGNVIVWDLARGVKIRSYFNMIEGQGHGAVFDCKCSPDGQHFACTDSHGHLLIFGFGSSSKYDKIADQMFFHSDYRPLIRDANNLYVDEQTQQSTSSYASPFLVDVDGNPHPSRYQRLVPGRENCREEQLIPQMGVTSSGLNQVLSQQANQEISPLDSMIQRLQQEQDLRRSGEAGISNTSRLSRGSISSTSEVHSPPNVGLRRSGQIEGVRQMHSNAPRSEIATERDLVAWSRRVVVPELSAGVASRQEEWRTAKGEEEIKTYRSEEKRKHLTVPKENKIPTVSKNHAHEHFLDLGESKKQQTNQHNYRTRSALEETPRPSEEIENGSSSSDEGEVVAVSGGTSEEEERAWHSDGSSSDYSSDYSDWTADAGINLQPPKKVPKNKTKKAESSSDEEEESEKQKQKQIKKEKKKVNEEKDGPISPKKKKPKERKQKRLAVGELTENGLTLEEWLPSTWITDTIPRRCPFVPQMGDEVYYFRQGHEAYVEMARKNKIYSINPKKQPWHKMELREQELMKIVGIKYEVGLPTLCCLKLAFLDPDTGKLTGGSFTMKYHDMPDVIDFLVLRQQFDDAKYRRWNIGDRFRSVIDDAWWFGTIESQEPLQLEYPDSLFQCYNVCWDNGDTEKMSPWDMELIPNNAVFPEELGTSVPLTDGECRSLIYKPLDGEWGTNPRDEECERIVAGINQLMTLDIASAFVAPVDLQAYPMYCTVVAYPTDLSTIKQRLENRFYSGDLSTHLLIFSSVSQLFVYRNAHKIMGIMLKCRILFSRFGVGPEILHF

SEQ ID NO: 870020 - protein, 707 aa, Homo sapiens
MSPWDMELIPNNAVFPEELGTSVPLTDGECRSLIYKPLDGEWGTNPRDEECERIVAGINQLMTLDIASAFVAPVDLQAYPMYCTVVAYPTDLSTIKQRLENRFYRRVSSLMWEVRYIEHNTRTFNEPGSPIVKSAKFVTDLLLHFIKDQTCYNIIPLYNSMKKKVLSDSEDEEKDADVPGTSTRKRKDHQPRRRLRNRAQSYDIQAWKKQCEELLNLIFQCEDSEPFRQPVDLLEYPDYRDIIDTPMDFATVRETLEAGNYESPMELCKDVRLIFSNSKAYTPSKRSRIYSMSLRLSAFFEEHISSVLSDYKSALRFHKRNTITKRRKKRNRSSSVSSSAASSPERKKRILKPQLKSESSTSAFSTPTRSIPPRHNAAQINGKTESSSVVRTRSNRVVVDPVVTEQPSTSSAAKTFITKANASAIPGKTILENSVKHSKALNTLSSPGQSSFSHGTRNNSAKENMEKEKPVKRKMKSSVLPKASTLSKSSAVIEQGDCKNNALVPGTIQVNGHGGQPSKLVKRGPGRKPKVEVNTNSGEIIHKKRGRKPKKLQYAKPEDLEQNNVHPIRDEVLPSSTCNFLSETNNVKEDLLQKKNRGGRKPKRKMKTQKLDADLLVPASVKVLRRSNRKKIDDPIDEEEEFEELKGSEPHMRTRNQGRRTAFYNEDDSEEEQRQLLFEDTSLTFGTSSRGRVRKLTEKAKANLIGW

SEQ ID NO: 870021 - protein, 1045 aa, Homo sapiens; identical to SEQ ID NO: 870018

SEQ ID NO: 870022 - protein, 1605 aa, Homo sapiens
LLATLRGHAAEISDMAVNYENTMIAAGSCDKMIRVWCLRTCAPLAVLQGHSASITSLQFSPLCSGSKRYLSSTGADGTICFWLWDAGTLKINPRPAKFTERPRPGVQMICSSFSAGGMFLATGSTDHIIRVYFFGSGQPEKISELEFHTDKVDSIQFSNTSNRFVSGSRDGTARIWQFKRREWKSILLDMATRPAGQNLQGIEDKITKMKVTMVAWDRHDNTVITAVNNMTLKVWNSYTGQLIHVLMGHEDEVFVLEPHPFDPRVLFSAGHDGNVIVWDLARGVKIRSYFNMIEGQGHGAVFDCKCSPDGQHFACTDSHGHLLIFGFGSSSKYDKIADQMFFHSDYRPLIRDANNLYVDEQTQQSTSSYASPFLVDVDGNPHPSRYQRLVPGRENCREEQLIPQMGVTSSGLNQVLSQQANQEISPLDSMIQRLQQEQDLRRSGEAGISNTSRLSRGSISSTSEVHSPPNVGLRRSGQIEGVRQMHSNAPRSEIATERDLVAWSRRVVVPELSAGVASRQEEWRTAKGEEEIKTYRSEEKRKHLTVPKENKIPTVSKNHAHEHFLDLGESKKQQTNQHNYRTRSALEETPRPSEEIENGSSSSDEGEVVAVSGGTSEEEERAWHSDGSSSDYSSDYSDWTADAGINLQPPKKVPKNKTKKAESSSDEEEESEKQKQKQIKKEKKKVNEEKDGPISPKKKKPKERKQKRLAVGELTENGLTLEEWLPSTWITDTIPRRCPFVPQMGDEVYYFRQGHEAYVEMARKNKIYSINPKKQPWHKMELREQELMKIVGIKYEVGLPTLCCLKLAFLDPDTGKLTGGSFTMKYHDMPDVIDFLVLRQQFDDAKYRRWNIGDRFRSVIDDAWWFGTIESQEPLQLEYPDSLFQCYNVCWDNGDTEKMSPWDMELIPNNAVFPEELGTSVPLTDGECRSLIYKPLDGEWGTNPRDEECERIVAGINQLMTLDIASAFVAPVDLQAYPMYCTVVAYPTDLSTIKQRLENRFYRRVSSLMWEVRYIEHNTRTFNEPGSPIVKSAKFVTDLLLHFIKDQTCYNIIPLYNSMKKKVLSDSEDEEKDADVPGTSTRKRKDHQPRRRLRNRAQSYDIQAWKKQCEELLNLIFQCEDSEPFRQPVDLLEYPDYRDIIDTPMDFATVRETLEAGNYESPMELCKDVRLIFSNSKAYTPSKRSRIYSMSLRLSAFFEEHISSVLSDYKSALRFHKRNTITKRRKKRNRSSSVSSSAASSPERKKRILKPQLKSESSTSAFSTPTRSIPPRHNAAQINGKTESSSVVRTRSNRVVVDPVVTEQPSTSSAAKTFITKANASAIPGKTILENSVKHSKALNTLSSPGQSSFSHGTRNNSAKENMEKEKPVKRKMKSSVLPKASTLSKSSAVIEQGDCKNNALVPGTIQVNGHGGQPSKLVKRGPGRKPKVEVNTNSGEIIHKKRGRKPKKLQYAKPEDLEQNNVHPIRDEVLPSSTCNFLSETNNVKEDLLQKKNRGGRKPKRKMKTQKLDADLLVPASVKVLRRSNRKKIDDPIDEEEEFEELKGSEPHMRTRNQGRRTAFYNEDDSEEEQRQLLFEDTSLTFGTSSRGRVRKLTEKAKANLIGW

SEQ ID NO: 870023 - protein, 1045 aa, Homo sapiens; identical to SEQ ID NO: 870018

SEQ ID NO: 870024 - protein, 1024 aa, Homo sapiens
LLATLRGHAAEISDMAVNYENTMIAAGSCDKMIRVWCLRTCAPLAVLQGHSASITSLQFSPLCSGSKRYLSSTGADGTICFWLWDAGTLKINPRPAKFTERPRPGVQMICSSFSAGGMFLATGSTDHIIRVYFFGSGQPEKISELEFHTDKVDSIQFSNTSNRFVSGSRDGTARIWQFKRREWKSILLDMATRPAGQNLQGIEDKITKMKVTMVAWDRHDNTVITAVNNMTLKVWNSYTGQLIHVLMGHEDEVFVLEPHPFDPRVLFSAGHDGNVIVWDLARGVKIRSYFNMIEGQGHGAVFDCKCSPDGQHFACTDSHGHLLIFGFGSSSKYDKIADQMFFHSDYRPLIRDANNLYVDEQTQQSTSSYASPFLVDVDGNPHPSRYQRLVPGRENCREEQLIPQMGVTSSGLNQVLSQQANQEISPLDSMIQRLQQEQDLRRSGEAGISNTSRLSRGSISSTSEVHSPPNVGLRRSGQIEGVRQMHSNAPRSEIATERDLVAWSRRVVVPELSAGVASRQEEWRTAKGEEEIKTYRSEEKRKHLTVPKENKIPTVSKNHAHEHFLDLGESKKQQTNQHNYRTRSALEETPRPSEEIENGSSSSDEGEVVAVSGGTSEEEERAWHSDGSSSDYSSDYSDWTADAGINLQPPKKVPKNKTKKAESSSDEEEESEKQKQKQIKKEKKKVNEEKDGPISPKKKKPKERKQKRLAVGELTENGLTLEEWLPSTWITDTIPRRCPFVPQMGDEVYYFRQGHEAYVEMARKNKIYSINPKKQPWHKMELREQELMKIVGIKYEVGLPTLCCLKLAFLDPDTGKLTGGSFTMKYHDMPDVIDFLVLRQQFDDAKYRRWNIGDRFRSVIDDAWWFGTIESQEPLQLEYPDSLFQCYNVCWDNGDTEKMSPWDMELIPNNAVFPEELGTSVPLTDGECRSLIYKPLDGEWGTNPRDEECERIVAGINQLMTLDIASAFVAPVDLQAYPMYCTVVAYPTDLSTIKQRLENRFYSRLEPFDVATIKGKLVIFPPIY

SEQ ID NO: 870025 - protein, 315 aa, Homo sapiens [sequence omitted]

SEQ ID NO: 870026 - protein, 315 aa, Homo sapiens [sequence omitted]

SEQ ID NO: 870027 - protein, 143 aa, Homo sapiens
MFPVLGWILIAVVIIILLIFTSVTRCLSPVSFLQLKFWKIYLEQEQQILKSKATEHATELAKENIKCFFEGSHPKEYNTPSMKEWQQISSLYTFNPKGQYYSMLHKYVNRKEKTHSIRSTEGDTVIPVLGFVDSSGINSTPEL

SEQ ID NO: 870028 - protein, 284 aa, Homo sapiens
MAPRLCSISVTARRLLGGPGPRAGDVASAAAARFYSKDNEGSWFRSLFVHKVDPRKDAHSTLLSKKETSNLYKIQFHNVKPEYLDAYNSLTEAVLPKLHLDEDYPCSLVGNWNTWYGEQDQAVHLWRFSGGYPALMDCMNKLKNNKEYLEFRRERSQMLLSRRNQLLLEFSFWNEPQPRMGPNIYELRTYKLKPGTMIEWGNNWARAIKYRQENQEAVGGFFSQIGELYVVHHLWAYKDLQSREETRNAAWRKRGWDENVYYTVPLVRHMESRIMIPLKISPLQ

SEQ ID NO: 870029 - protein, 284 aa, Homo sapiens; identical to SEQ ID NO: 870028

SEQ ID NO: 870030 - protein, 254 aa, Homo sapiens
MTGFYSKDNEGSWFRSLFVHKVDPRKDAHSTLLSKKETSNLYKIQFHNVKPEYLDAYNSLTEAVLPKLHLDEDYPCSLVGNWNTWYGEQDQAVHLWRFSGGYPALMDCMNKLKNNKEYLEFRRERSQMLLSRRNQLLLEFSFWNEPQPRMGPNIYELRTYKLKPGTMIEWGNNWARAIKYRQENQEAVGGFFSQIGELYVVHHLWAYKDLQSREETRNAAWRKRGWDENVYYTVPLVRHMESRIMIPLKISPLQ

SEQ ID NO: 870031 - protein, 284 aa, Homo sapiens; identical to SEQ ID NO: 870028

SEQ ID NO: 870032 - protein, 284 aa, Homo sapiens; identical to SEQ ID NO: 870028

SEQ ID NO: 870033 - protein, 147 aa, Homo sapiens
RTNNYVLGTRPGVNLAEANMAPRLCSISVTARRLLGGPGPRAGDVASAAAARFYSKDNEGSWFRSLFVHKVDPRKDAHSTLLSKKETSNLYKIQFHNVKPEYLDAYNSLTEAVLPKLHLDEDYPCSLVGNWNTWSCCLGFVLALGGL

SEQ ID NO: 870034 - protein, 104 aa, Homo sapiens
RTNNYVLGTRPGVNLAEANMAPRLCSISVTARRLLGGPGPRAGDVASAAAARFYSKDNEGSWFRSLFVHKVDPRKDAHSTLPRPFLLSLPASLPLLEVVSDFPE

SEQ ID NO: 870035 - protein, 284 aa, Homo sapiens; identical to SEQ ID NO: 870028

SEQ ID NO: 870036 - protein, 66 aa, Homo sapiens
EDPHYHVVYEELVCHLRIATGALRVACSRYHVFQLPTVSMGSPHPGEAWMRTAQRGWGKGWEPGKI

SEQ ID NO: 870037 - protein, 229 aa, Homo sapiens
MAPRLCSISVTARRLLGGPGPRAGDVASAAAARLPPSEGSGLCMVKEYLPKNFYSKDNEGSWFRSLFVHKVDPRKDAHSTLLSKKETSNLYKIQFHNVKPEYLDAYNSLTEAVLPKLHLDEDYPCSLVGNWNTWYGEQDQAVHLWRFSGGYPALMDCMNKLKNNKEYLEFRRERSQMLLSRRNQLLLEFSFWNEPQPRMGPNIYELRTYKLKPGTMIEWGNNWARAIKY

SEQ ID NO: 870038 - protein, 80 aa, Homo sapiens
PQPRMGPNIYELRTYKLKQDQAVHLWRFSGGYPALMDCMNKLKNNKEYLRSLFVHKVDPRKDAHSTLLSKKETSNLYKIQ

SEQ ID NO: 870039 - protein, 189 aa, Homo sapiens
METPTGNAHLTGFYSKDNEGSWFRSLFVHKVDPRKDAHSTLLSKKETSNLYKIQFHNVKPEYLDAYNSLTEAVLPKLHLDEDYPCSLVGNWNTWYGEQDQAVHLWRFSGGYPALMDCMNKLKNNKEYLEFRRERSQMLLSRRNQLLLEFSFWNEPQPRMGPNIYELRTYKLKPGTMIEWGNNWARAIKY

SEQ ID NO: 870040 - protein, 284 aa, Homo sapiens; identical to SEQ ID NO: 870028

SEQ ID NO: 870041 - protein, 260 aa, Homo sapiens
MVKEYLPKNFYSKDNEGSWFRSLFVHKVDPRKDAHSTLLSKKETSNLYKIQFHNVKPEYLDAYNSLTEAVLPKLHLDEDYPCSLVGNWNTWYGEQDQAVHLWRFSGGYPALMDCMNKLKNNKEYLEFRRERSQMLLSRRNQLLLEFSFWNEPQPRMGPNIYELRTYKLKPGTMIEWGNNWARAIKYRQENQEAVGGFFSQIGELYVVHHLWAYKDLQSREETRNAAWRKRGWDENVYYTVPLVRHMESRIMIPLKISPLQ

SEQ ID NO: 870042 - protein, 264 aa, Homo sapiens
MLPPLSLPESWDYRRELVPNSARVRSLFVHKVDPRKDAHSTLLSKKETSNLYKIQFHNVKPEYLDAYNSLTEAVLPKLHLDEDYPCSLVGNWNTWYGEQDQAVHLWRFSGGYPALMDCMNKLKNNKEYLEFRRERSQMLLSRRNQLLLEFSFWNEPQPRMGPNIYELRTYKLKPGTMIEWGNNWARAIKYRQENQEAVGGFFSQIGELYVVHHLWAYKDLQSREETRNAAWRKRGWDENVYYTVPLVRHMESRIMIPLKISPLQ

SEQ ID NO: 870043 - protein, 147 aa, Homo sapiens
MAPRLCSISVTARRLLGGPGPRAGDVASAAAARFYSKDNEGSWFRSLFVHKVDPRKDAHSTLLSKKETSNLYKIQFHNVKPEYLDAYNSLTEAVLPKLHLDEDYPCSLVGNWNTWYGEQDQAVHLWRFSGGYPAQEKPAAPRVQLLE

SEQ ID NO: 870044 - protein, 95 aa, Homo sapiens
PQPRMGPNIYELRTYKLKQDQAVHLWRFSGGYPALMDCMNKLKNNKEYLRSLFVHKVDPRKDAHSTLLSKKETSNLYKIQFHNVKPEYLEEERLG

SEQ ID NO: 870045 - protein, 325 aa, Homo sapiens
MAPRLCSISVTARRLLGGPGPRAGDVASAAAARFYSKDNEGSWFRSLFVHKVDPRKDAHSTLLSKKETSNLYKIQFHNVKPEYLDAYNSLTEAVLPKLHLDEDYPCSLVGNWNTWYGEQDQAVHLWRFSGGYPALMDCMNKLKNNKEYLEFRRERSQMLLSRRNQLLLEFSFWNEPQPRMGPNIYELRTYKLKPGTMIEWGNNWARAIKYRQENQEAVGGFFSQIGELYVVHHLWAYKDLQSREETRNAAWRKRGWDENVYYTVPLVRHMESRIMIPLKISPCILSPLIDILSAQPSFCRATWCVEVAGGVSDSGGLLSDPHTSS

SEQ ID NO: 870046 - protein, 276 aa, Homo sapiens
MAPRLCSISVTARRLLGGPGPRAGDVASAAAARFYSKDNEGSWFRSLFVHKVDPRKDAHSTLLSKKETSNLYKIQFHNVKPEYLDAYNSLTEAVLPKLHLDEDYPCSLVGNWNTWYGEQDQAVHLWRFSGGYPALMDCMNKLKNNKDVSVHSAHLSGCGMQPSPVLGTTLLPHEAHCQDGAHFLVAMPLPPCPQDSLFVHKVDPRKDAHSTLLSKKETSNLYKIQFHNVKPEYLDAYNSLTEAVLPKLHLDEDYPCSLVGNWNTWSCSSRALPRRP

SEQ ID NO: 870047 - protein, 93 aa, Homo sapiens
EAVLPKLHLDEDYPCSLVGNWNTWYGEQDQAGKALTSLVPLPLPSPGLQHLSHLAVLHSLSTTAPGGALTKTSSPHSPAQIPVLAPLCPQGDP

SEQ ID NO: 870048 - protein, 453 aa, Homo sapiens [sequence omitted]

SEQ ID NO: 870049 - protein, 394 aa, Homo sapiens
MGKAKVKKMNHVTKKKKLPMELCLALPYCKHYGKAKAGKLEARAALNQALEMKRQGKREKAQKLFMHALKMDPDFVDALTEFGIFSEEDKDIIQADYLYTRALTISPYHEKALVNRDRTLPLVEEIDQRYFSIIDSKVKKVMSIPKGNSALRRVMEETYYHHIYHTVAIEGNTLTLSEIRHILETRYAVPGKSLEEQNEVIGMHAAMKYINTTLVSRIGSVTISDVLEIHRRVLGYVDPVEAGRFRTTQVLVGHHIPPHPQDVEKQMQEFVQWLNSEEAMNLHPVEFAALAHYKLVYIHPFIDGNGRTSRLLMNLILMQAGYPPITIRKEQRSDYYHVLEAANEGDVRPFIRFIAKCTETTLDTLLFATTEYSVALPEAQPNHSGFKETLPVKP

SEQ ID NO: 870050 - protein, 105 aa, Homo sapiens
MMLIPMASVMAVTEPKWVSVWSRFLWVTLLSMVLGSLLALLLPLGAVEEQCLAVLKGLYLLRSKPDRAQHAATKCTSPSTELSITSRGATLLVAKTKASPGKCCT

SEQ ID NO: 870051 - protein, 453 aa, Homo sapiens [sequence omitted]

SEQ ID NO: 870052 - protein, 453 aa, Homo sapiens [sequence omitted]

SEQ ID NO: 870053 - protein, 122 aa, Homo sapiens
MASVMAVTEPKWVSVWSRFLWVTLLSMVLGSLLALLLPLGAVEEQCLAVLKGLYLLRSKPDRAQHAATKCTSPSTELSITSRGATLLVAKTKASPETRYWRKLGEGSTQDFSVLFLQLPMTL

SEQ ID NO: 870054 - protein, 98 aa, Homo sapiens
FSTVEKTLLSLLNFHDLFAENQFTINVSVYFWTVGSMPLIYMTVLMPALCCLDYCSFGVSFDIGKSESSNDVCHFQDYFGCSGFMICLSITEKKKARL

SEQ ID NO: 870055 - protein, 125 aa, Homo sapiens
MGAEAPTPACENGVLSHLGEPGAAPRRMHLWLREVFPDPRCCLTIETKSHYVAQAGLELLASSDPPTSASQSVGIIDMSHCTWPTLGKFLNPSKPHFSPITKGKDGNIFPTKFLSDALTELRLCT

SEQ ID NO: 870056 - protein, 456 aa, Homo sapiens
PPLDSGGFVLGLRPRSRGGRGRASGREPRRLRLPGALTAAVMRIPVDPSTSRRFTPPSPAFPCGGGGGKMGENSGALSAQAAVGPGGRARPEVRSMVDVLADHAGELVRTDSPNFLCSVLPSHWRCNKTLPVAFKVVALGDVPDGTVVTVMAGNDENYSAELRNASAVMKNQVARFNDLRFVGRSGRGKSFTLTITVFTNPTQVATYHRAIKVTVDGPREPRRHRQKLEDQTKPFPDRFGDLERLRMRVTPSTPSPRGSLSTTSHFSSQPQTPIQGTSELNPFSDPRQFDRSFPTLPTLTESRFPDPRMHYPGAMSAAFPYSATPSGTSISSLSVAGMPATSRFHHTYLPPPYPGAPQNQSGPFQANPSPYHLYYGTSSGSYQFSMVAGSSSGGDRSPTRMLASCTSSAASVAAGNLMNPSLGGQSDGVEADGSHSNSPTALSTPGRMDEAVWRPY

SEQ ID NO: 870057 - protein, 465 aa, Homo sapiens
PLPPPGPCAGAGWLLVLPTPGRPRTHQSLGSVKERGMASNSIFDSFPTYSPTFIRDPSTSRRFTPPSPAFPCGGGGGKMGENSGALSAQAAVGPGGRARPEVRSMVDVLADHAGELVRTDSPNFLCSVLPSHWRCNKTLPVAFKVVALGDVPDGTVVTVMAGNDENYSAELRNASAVMKNQVARFNDLRFVGRSGRGKSFTLTITVFTNPTQVATYHRAIKVTVDGPREPRRHRQKLEDQTKPFPDRFGDLERLRMRVTPSTPSPRGSLSTTSHFSSQPQTPIQGTSELNPFSDPRQFDRSFPTLPTLTESRFPDPRMHYPGAMSAAFPYSATPSGTSISSLSVAGMPATSRFHHTYLPPPYPGAPQNQSGPFQANPSPYHLYYGTSSGSYQFSMVAGSSSGGDRSPTRMLASCTSSAASVAAGNLMNPSLGGQSDGVEADGSHSNSPTALSTPGRMDEAVWRPY

SEQ ID NO: 870058 - protein, 198 aa, Homo sapiens
GWYASENGIVDGPREPRRTSELNPFSDPRQFDRSFPTLPTLTESRFPDPRMHYPGAMSAAFPYSATPSGTSISSLSVAGMPATSRFHHTYLPPPYPGAPQNQSGPFQANPSPYHLYYGTSSGSYQFSMVAGSSSGGDRSPTRMLASCTSSAASVAAGNLMNPSLGGQSDGVEADGSHSNSPTALSTPGRMDEAVWRPY

SEQ ID NO: 870059 - protein, 415 aa, Homo sapiens
MRIPVDPSTSRRFTPPSPAFPCGGGGGKMGENSGALSAQAAVGPGGRARPEVRSMVDVLADHAGELVRTDSPNFLCSVLPSHWRCNKTLPVAFKVVALGDVPDGTVVTVMAGNDENYSAELRNASAVMKNQVARFNDLRFVGRSGRGKSFTLTITVFTNPTQVATYHRAIKVTVDGPREPRRHRQKLEDQTKPFPDRFGDLERLRMRVTPSTPSPRGSLSTTSHFSSQPQTPIQGTSELNPFSDPRQFDRSFPTLPTLTESRFPDPRMHYPGAMSAAFPYSATPSGTSISSLSVAGMPATSRFHHTYLPPPYPGAPQNQSGPFQANPSPYHLYYGTSSGSYQFSMVAGSSSGGDRSPTRMLASCTSSAASVAAGNLMNPSLGGQSDGVEADGSHSNSPTALSTPGRMDEAVWRPY

SEQ ID NO: 870060 - protein, 415 aa, Homo sapiens; identical to SEQ ID NO: 870059

SEQ ID NO: 870061 - protein, 415 aa, Homo sapiens; identical to SEQ ID NO: 870059

SEQ ID NO: 870062 - protein, 429 aa, Homo sapiens
MASNSIFDSFPTYSPTFIRDPSTSRRFTPPSPAFPCGGGGGKMGENSGALSAQAAVGPGGRARPEVRSMVDVLADHAGELVRTDSPNFLCSVLPSHWRCNKTLPVAFKVVALGDVPDGTVVTVMAGNDENYSAELRNASAVMKNQVARFNDLRFVGRSGRGKSFTLTITVFTNPTQVATYHRAIKVTVDGPREPRRHRQKLEDQTKPFPDRFGDLERLRMRVTPSTPSPRGSLSTTSHFSSQPQTPIQGTSELNPFSDPRQFDRSFPTLPTLTESRFPDPRMHYPGAMSAAFPYSATPSGTSISSLSVAGMPATSRFHHTYLPPPYPGAPQNQSGPFQANPSPYHLYYGTSSGSYQFSMVAGSSSGGDRSPTRMLASCTSSAASVAAGNLMNPSLGGQSDGVEADGSHSNSPTALSTPGRMDEAVWRPY

SEQ ID NO: 870063 - protein, 306 aa, Homo sapiens
MAGNDENYSAELRNASAVMKNQVARFNDLRFVGRSGRGKSFTLTITVFTNPTQVATYHRAIKVTVDGPREPRRHRQKLEDQTKPFPDRFGDLERLRMRVTPSTPSPRGSLSTTSHFSSQPQTPIQGTSELNPFSDPRQFDRSFPTLPTLTESRFPDPRMHYPGAMSAAFPYSATPSGTSISSLSVAGMPATSRFHHTYLPPPYPGAPQNQSGPFQANPSPYHLYYGTSSGSYQFSMVAGSSSGGDRSPTRMLASCTSSAASVAAGNLMNPSLGGQSDGVEADGSHSNSPTALSTPGRMDEAVWRPY

SEQ ID NO: 870064 - protein, 429 aa, Homo sapiens; identical to SEQ ID NO: 870062

SEQ ID NO: 870065 - protein, 137 aa, Homo sapiens
MHYPGAMSAAFPYSATPSGTSISSLSVAGMPATSRFHHTYLPPPYPGAPQNQSGPFQANPSPYHLYYGTSSGSYQFSMVAGSSSGGDRSPTRMLASCTSSAASVAAGNLMNPSLGGQSDGVEADGSHSNSPTALSTP

SEQ ID NO: 870066 - protein, 366 aa, Homo sapiens
GLAISKDFWGTVGYREKPQASESSMPVPCPPLDSLPELQRESSLEDPSRYKPQWECRENSGNLWAFESPVLDLNPELSGTSPECVPPASETPWKGMQSRENIWVPADPVSPPSLPSVPLLESLVMGPQGVLSESKALWETMGQKENLWASDSPDPVHSTPPTTLMEPHRINPGECLATSEATWKDTEHSRNSSASRSPSLALSPPPALAPELLRVRSMGVLSDSEARCGDIQKTKNSWASKHPACNLPQDLHGASPLGVLSDSQSIVGEMEQKENCVPVFPGRGSSPSSNSVSKSHVSEPIADQSNYKPDGEAVEQRKNHWATELPAPSSLSTPLPEPHIDLELVWRNVQQREVPQGPSPLAVDPL

SEQ ID NO: 870067 - protein, 888 aa, Homo sapiens
DSGPRPPAAPAPFPPGPPMMPPPFMPPPGIPPPFPPMGLPPMSQRPPAIPPMPPGILPPMLPPMGAPPPLTQIPGMVPPMMPGMLMPAVPVTAATAPGADTASSAVAGTGPPRALWSEHVAPDGRIYYYNADDKQSVWEKPSVLKSKAELLLSQCPWKEYKSDTGKPYYYNNQSKESRWTRPKDLDDLEVLVKQEAAGKQQQQLPQTLQPQPPQPQPDPPPVPPGPTPVPTGLLEPEPGGSEDCDVLEATQPLEQGFLQQLEEGPSSSGQHQPQQEEEESKPEPERSGLSWSNREKAKQAFKELLRDKAVPSNASWEQAMKMVVTDPRYSALPKLSEKKQAFNAYKAQREKEEKEEARLRAKEAKQTLQHFLEQHERMTSTTRYRRAEQTFGELEVWAVVPERDRKEVYDDVLFFLAKKEKEQAKQLRRRNIQALKSILDGMSSVNFQTTWSQAQQYLMDNPSFAQDHQLQNMDKEDALICFEEHIRALEREEEEERERARLRERRQQRKNREAFQTFLDELHETGQLHSMSTWMELYPAVSTDVRFANMLGQPGSTPLDLFKFYVEELKARFHDEKKIIKDILKDRGFCVEVNTAFEDFAHVISFDKRAAALDAGNIKLTFNSLLEKAEAREREREKEEARRMRRREAAFRSMLRQAVPALELGTAWEEVRERFVCDSAFEQITLESERIRLFREFLQVLETECQHLHTKGRKHGRKGKKHHHKRSHSPSGSESEEEELPPPSLRPPKRRRRNPSESGSEPSSSLDSVESGGAALGGRGSPSSHLLGADHGLRKAKKPKKKTKKRRHKSNSPESETDPEEKAGKESDEKEQEQDKDRELQQAELPNRSPGFGIKKEKTGWDTSESELSEGELERRRRTLLQQLDDHQ

SEQ ID NO: 870068 - protein, 888 aa, Homo sapiens; identical to SEQ ID NO: 870067

SEQ ID NO: 870069 - protein, 356 aa, Homo sapiens
MRTWITWFLMQTQSCGSLPEARAFLTICNVTTLPASFGLRHVVPLLHALLYPQDRGFCVEVNTAFEDFAHVISFDKRAAALDAGNIKLTFNSLLEKAEAREREREKEEARRMRRREAAFRSMLRQAVPALELGTAWEEVRERFVCDSAFEQITLESERIRLFREFLQVLETECQHLHTKGRKHGRKGKKHHHKRSHSPSGSESEEEELPPPSLRPPKRRRRNPSESGSEPSSSLDSVESGGAALGGRGSPSSHLLGADHGLRKAKKPKKKTKKRRHKSNSPESETDPEEKAGKESDEKEQEQDKDRELQQAELPNRSPGFGIKKEKTGWDTSESELSEGELERRRRTLLQQLDDHQ

SEQ ID NO: 870070 - protein, 161 aa, Homo sapiens
MAGKGSESEEEELPPPSLRPPKRRRRNPSESGSEPSSSLDSVESGGAALGGRGSPSSHLLGADHGLRKAKKPKKKTKKRRHKSNSPESETDPEEKAGKESDEKEQEQDKDRELQQAELPNRSPGFGIKKEKTGWDTSESELSEGELERRRRTLLQQLDDHQ

SEQ ID NO: 870071 - protein, 115 aa, Homo sapiens
MRGGPEVILTPPPTCPADFREGRKLKKKKTKKRRHKSNSPESETDPEEKAGKESDEKEQEQDKDRELQQAELPNRSPGFGIKKEKTGWDTSESELSEGELERRRRTLLQQLDDHQ

SEQ ID NO: 870072 - protein, 388 aa, Homo sapiens
  misc_feature (341)..(341): Xaa can be any naturally occurring amino acid
  misc_feature (373)..(373): Xaa can be any naturally occurring amino acid
DSGPRPPAAPAPFPPGPPMMPPPFMPPPGIPPPFPPMGLPPMSQRPPAIPPMPPGILPPMLPPMGAPPPLTQIPGMVPPMMPGMLMPAVPVTAATAPGADTASSAVAGTGPPRALWSEHVAPDGRIYYYNADDKQSVWEKPSVLKSKAELLLSQCPWKEYKSDTGKPYYYNNQSKESRWTRPKDLDDLEVLVKQEAAGKQQQQLPQTLQPQPPQPQPDPPPVPPGPTPVPTGLLEPEPGGSEDCDVLEATQPLEQGFLQQLEEGPSSSGQHQPQQEEEESKPEPERSGLSWSNREKAKQAFKELLRDKAVPSSSSVCFLSPLRQVGPPCQPSPAPICSSLXGWRRVKETEKRAPSLPPAPFPPDPIQVLSQKXRYVIMHFTDEGRGRS

SEQ ID NO: 870073 - protein, 98 aa, Homo sapiens
EEVGSGLLQNSPESETDPEEKAGKESDEKEQEQDKDRELQQAELPNRSPGFGIKKEKVRGRGPRPVSTLVKLPRPLVQAKGELCLCSNRQAGTRQKVS

SEQ ID NO: 870074 - protein, 173 aa, Homo sapiens
SLFPQLGGGSGGGSARGYCRQVSVSLHPGTGLFSPFCSVPLCVFTFSLFALFSAFHLHLFISASLACISSILIVPASSSAIPSLPPQSVALPPCLTLPITGLSLLRPSWTSCMRQGSCTLCPPGWSYIQQSALMSALPTCWASRVRQPGSPFSGLASCPASLSAPPTTGSCPR

SEQ ID NO: 870075 - protein, 888 aa, Homo sapiens; identical to SEQ ID NO: 870067

SEQ ID NO: 870076 - protein, 803 aa, Homo sapiens
NKMEVGARTEYVSFGFFLAAVAGTGPPRALWSEHVAPDGRIYYYNADDKQSVWEKPSVLKSKAELLLSQCPWKEYKSDTGKPYYYNNQSKESRWTRPKDLDDLEVLVKQEAAGKQQQQLPQTLQPQPPQPQPDPPPVPPGPTPVPTGLLEPEPGGSEDCDVLEATQPLEQGFLQQLEEGPSSSGQHQPQQEEEESKPEPERSGLSWSNREKAKQAFKELLRDKAVPSNASWEQAMKMVVTDPRYSALPKLSEKKQAFNAYKAQREKEEKEEARLRAKEAKQTLQHFLEQHERMTSTTRYRRAEQTFGELEVWAVVPERDRKEVYDDVLFFLAKKEKEQAKQLRRRNIQALKSILDGMSSVNFQTTWSQAQQYLMDNPSFAQDHQLQNMDKEDALICFEEHIRALEREEEEERERARLRERRQQRKNREAFQTFLDELHETGQLHSMSTWMELYPAVSTDVRFANMLGQPGSTPLDLFKFYVEELKARFHDEKKIIKDILKDRGFCVEVNTAFEDFAHVISFDKRAAALDAGNIKLTFNSLLEKAEAREREREKEEARRMRRREAAFRSMLRQAVPALELGTAWEEVRERFVCDSAFEQITLESERIRLFREFLQVLETECQHLHTKGRKHGRKGKKHHHKRSHSPSGSESEEEELPPPSLRPPKRRRRNPSESGSEPSSSLDSVESGGAALGGRGSPSSHLLGADHGLRKAKKPKKKTKKRRHKSNSPESETDPEEKAGKESDEKEQEQDKDRELQQAELPNRSPGFGIKKEKTGWDTSESELSEGELERRRRTLLQQLDDHQ

SEQ ID NO: 870077 - protein, 936 aa, Homo sapiens
DSGPRPPAAPAPFPPGPPMMPPPFMPPPGIPPPFPPMGLPPMSQRPPAIPPMPPGILPPMLPPMGAPPPLTQIPGMVPPMMPGMLMPAVPVTAATAPGADTASSAVAGTGPPRALWSEHVAPDGRIYYYNADDKQSVWEKPSVLKSKAELLLSQCPWKEYKSDTGKPYYYNNQSKESRWTRPKDLDDLEVLVKQEAAGKQQQQLPQTLQPQPPQPQPDPPPVPPGPTPVPTGLLEPEPGGSEDCDVLEATQPLEQGFLQQLEEGPSSSGQHQPQQEEEESKPEPERSGLSWSNREKAKQAFKELLRDKAVPSNASWEQAMKMVVTDPRYSALPKLSEKKQAFNAYKAQREKEEKEEARLRAKEAKQTLQHFLEQHERMTSTTRYRRAEQTFGELEVWAVVPERDRKEVYDDVLFFLAKKEKEQAKQLRRRNIQALKSILDGMSSVNFQTTWSQAQQYLMDNPSFAQDHQLQNMDKEDALICFEEHIRALEREEEEERERARLRERRQQRKNREAFQTFLDELHETGQLHSMSTWMELYPAVSTDVRFANMLGQPGKAARLPLLWPGFLPCQPLCTPYYRLLSSAQPPGLGKLAARQAPLPPSGSTPLDLFKFYVEELKARFHDEKKIIKDILKDRGFCVEVNTAFEDFAHVISFDKRAAALDAGNIKLTFNSLLEKAEAREREREKEEARRMRRREAAFRSMLRQAVPALELGTAWEEVRERFVCDSAFEQITLESERIRLFREFLQVLETECQHLHTKGRKHGRKGKKHHHKRSHSPSGSESEEEELPPPSLRPPKRRRRNPSESGSEPSSSLDSVESGGAALGGRGSPSSHLLGADHGLRKAKKPKKKTKKRRHKSNSPESETDPEEKAGKESDEKEQEQDKDRELQQAELPNRSPGFGIKKEKTGWDTSESELSEGELERRRRTLLQQLDDHQ

SEQ ID NO: 870078 - protein, 530 aa, Homo sapiens
DSGPRPPAAPAPFPPGPPMMPPPFMPPPGIPPPFPPMGLPPMSQRPPAIPPMPPGILPPMLPPMGAPPPLTQIPGMVPPMMPGMLMPAVPVTAATAPGADTASSAVAGTGPPRALWSEHVAPDGRIYYYNADDKQSVWEKPSVLKSKAELLLSQCPWKEYKSDTGKPYYYNNQSKESRWTRPKDLDDLEVLVKQEAAGKQQQQLPQTLQPQPPQPQPDPPPVPPGPTPVPTGLLEPEPGGSEDCDVLEATQPLEQGFLQQLEEGPSSSGQHQPQQEEEESKPEPERSGLSWSNREKAKQAFKELLRDKAVPSNASWEQAMKMVVTDPRYSALPKLSEKKQAFNAYKAQREKEEKEEARLRAKEAKQTLQHFLEQHERMTSTTRYRRAEQTFGELEVWAVVPERDRKEVYDDVLFFLAKKEKEQAKQLRRRNIQALKSILDGMSSVNFQTTWSQAQQYLMDNPSFAQDHQLQNMDKEDALICFEEHIRALEREEEEERERARLRERRQQRKNREAFQVSLLSFLDQSSALP

SEQ ID NO: 870079 - protein, 72 aa, Homo sapiens
HALLYPQDRGFCVEVNTAFEDFAHVISFDKRAAALDAGNIKLTFNSVRGWAGRGKFSNSSVSCSIPSHSLSH

SEQ ID NO: 870080 - protein, 154 aa, Homo sapiens
MGSKCCKGGPDEDAVERQRRQKLLLAQLHHRKRVKAAGQIQAWWRGVLVRRTLLVAALRAWMIQCWWRTLVQRRIRQRRQALLRVYVIQEQATVKLQSCIRMWQCRQCYRQMCNALCLFQVPESSLAFQTDGFLQVQYAIPSKQPEFHIEILSI

SEQ ID NO: 870081 - protein, 138 aa, Homo sapiens
SALLGQLLLAQLHHRKRVKAAGQIQAWWRGVLVRRTLLVAALRAWMIQCWWRTLVQRRIRQRRQALLRVYVIQEQATVKLQSCIRMWQCRQCYRQMCNALCLFQVPESSLAFQTDGFLQVQYAIPSKQPEFHIEILSI

SEQ ID NO: 870082 - protein, 551 aa, Homo sapiens
MAAHRPVEWVQAVVSRFDEQLPIKTGQQNTHTKVSTEHNKECLINISKYKFSLVISGLTTILKNVNNMRIFGEAAEKNLYLSQLIILDTLEKCLAGQPKDTMRLDETMLVKQLLPEICHFLHTCREGNQHAAELRNSASGVLFSLSCNNFNAVFSRISTRLQELTVCSEDNVDVHDIELLQYINVDCAKLKRLLKETAFKFKALKKVAQLAVINSLEKAFWNWVENYPDEFTKLYQIPQTDMAECAEKLFDLVDGFAESTKRKAAVWPLQIILLILCPEIIQDISKDVVDENNMNKKLFLDSLRKALAGHGGSRQLTESAAIACVKLCKASTYINWEDNSVIFLLVQSMVVDLKNLLFNPSKPFSRGSQPADVDLMIDCLVSCFRISPHNNQHFKICLAQNSPSTFHYVLVNSLHRIITNSALDWWPKIDAVYCHSVELRNMFGETLHKAVQGCGAHPAIRMAPSLTFKEKVTSLKFKEKPTDLETRSYKYLLLSMVKLIHADPKLLLCNPRKQGPETQGSTAELITGLVQLVPQSHMPEIAQEAMEVRGK

SEQ ID NO: 870083 - protein, 2818 aa, Homo sapiens
MAAHRPVEWVQAVVSRFDEQLPIKTGQQNTHTKVSTEHNKECLINISKYKFSLVISGLTTILKNVNNMRIFGEAAEKNLYLSQLIILDTLEKCLAGQPKDTMRLDETMLVKQLLPEICHFLHTCREGNQHAAELRNSASGVLFSLSCNNFNAVFSRISTRLQELTVCSEDNVDVHDIELLQYINVDCAKLKRLLKETAFKFKALKKVAQLAVINSLEKAFWNWVENYPDEFTKLYQIPQTDMAECAEKLFDLVDGFAESTKRKAAVWPLQIILLILCPEIIQDISKDVVDENNMNKKLFLDSLRKALAGHGGSRQLTESAAIACVKLCKASTYINWEDNSVIFLLVQSMVVDLKNLLFNPSKPFSRGSQPADVDLMIDCLVSCFRISPHNNQHFKICLAQNSPSTFHYVLVNSLHRIITNSALDWWPKIDAVYCHSVELRNMFGETLHKAVQGCGAHPAIRMAPSLTFKEKVTSLKFKEKPTDLETRSYKYLLLSMVKLIHADPKLLLCNPRKQGPETQGSTAELITGLVQLVPQSHMPEIAQEAMEALLVLHQLDSIDLWNPDAPVETFWEISSQMLFYICKKLTSHQMLSSTEILKWLREILICRNKFLLKNKQADRSSCHFLLFYGVGCDIPSSGNTSQMSMDHEELLRTPGASLRKGKGNSSMDSAAGCSGTPPICRQAQTKLEVALYMFLWNPDTEAVLVAMSCFRHLCEEADIRCGVDEVSVHNLLPNYNTFMEFASVSNMMSTGRAALQKRVMALLRRIEHPTAGNTEAWEDTHAKWEQATKLILNYPKAKMEDGQAAESLHKTIVKRRMSHVSGGGSIDLSDTDSLQEWINMTGFLCALGGVCLQQRSNSGLATYSPPMGPVSERKGSMISVMSSEGNADTPVSKFMDRLLSLMVCNHEKVGLQIRTNVKDLVGLELSPALYPMLFNKLKNTISKFFDSQGQVLLTDTNTQFVEQTIAIMKNLLDNHTEGSSEHLGQASIETMMLNLVRYVRVLGNMVHAIQIKTKLCQLVEVMMARRDDLSFCQEMKFRNKMVEYLTDWVMGTSNQAADDDVKCLTRDLDQASMEAVVSLLAGLPLQPEEGDGVELMEAKSQLFLKYFTLFMNLLNDCSEVEDESAQTGGRKRGMSRRLASLRHCTVLAMSNLLNANVDSGLMHSIGLGYHKDLQTRATFMEVLTKILQQGTEFDTLAETVLADRFERLVELVTMMGDQGELPIAMALANVVPCSQWDELARVLVTLFDSRHLLYQLLWNMFSKEVELADSMQTLFRGNSLASKIMTFCFKVYGATYLQKLLDPLLRIVITSSDWQHVSFEVDPTRLEPSESLEENQRNLLQMTEKFFHAIISSSSEFPPQLRSVCHCLYQVVSQRFPQNSIGAVGSAMFLRFINPAIVSPYEAGILDKKPPPRIERGLKLMSKILQSIANHVLFTKEEHMRPFNDFVKSNFDAARRFFLDIASDCPTSDAVNHSLSFISDGNVLALHRLLWNNQEKIGQYLSSNRDHKAVGRRPFDKMATLLAYLGPPEHKPVADTHWSSLNLTSSKFEEFMTRHQVHEKEEFKALKTLSIFYQAGTSKAGNPIFYYVARRFKTGQINGDLLIYHVLLTLKPYYAKPYEIVVDLTHTGPSNRFKTDFLSKWFVVFPGFAYDNVSAVYIYNCNSWVREYTKYHERLLTGLKGSKRLVFIDCPGKLAEHIEHEQQKLPAATLALEEDLKVFHNALKLAHKDTKVSIKVGSTAVQVTSAERTKVLGQSVFLNDIYYASEIEEICLVDENQFTLTIANQGTPLTFMHQECEAIVQSIIHIRTRWELSQPDSIPQHTKIRPKDVPGTLLNIALLNLGSSDPSLRSAAYNLLCALTCTFNLKIEGQLLETSGLCIPANNTLFIVSISKTLAANEPHLTLEFLEECISGFSKSSIELKHLCLEYMTPWLSNLVRFCKHNDDAKRQRVTAILDKLITMTINEKQMYPSIQAKIWGSLGQITDLLDVVLDSFIKTSATGGLGSIKAEVMADTAVALASGNVKLVSSKVIGRMCKIIDKTCLSPTPTLEQHLMWDDIAILARYMLMLSFNNSLDVAAHLPYLFHVVTFLVATGPLSLRASTHGLVINIIHSLCTCSQLHFSEETKQVLRLSLTEFSLPKFYLLFGISKVKSAAVIAFRSSYRDRSFSPGSYERETFALTSLETVTEALLEIMEACMRDIPTCKWLDQWTELAQRFAFQYNPSLQPRALVVFGCISKRVSHGQIKQIIRILSKALESCLKGPDTYNSQVLIEATVIALTKLQPLLNKDSPLHKALFWVAVAVLQLDEVNLYSAGTALLEQNLHTLDSLRIFNDKSPEEVFMAIRNPLEWHCKQMDHFVGLNFNSNFNFALVGHLLKGYRHPSPAIVARTVRILHTLLTLVNKHRNCDKFEVNTQSVAYLAALLTVSEEVRSRCSLKHRKSLLLTDISMENVPMDTYPIHHGDPSYRTLKETQPWSSPKGSEGYLAATYPTVGQTSPRARKSMSLDMGQPSQANTKKLLGTRKSFDHLISDTKAPKRQEMESGITTPPKMRRVAETDYEMETQRISSSQQHPHLRKVSVSESNVLLDEEVLTDPKIQALLLTVLATLVKYTTDEFDQRILYEYLAEASVVFPKVFPVVHNLLDSKINTLLSLCQDPNLLNPIHGIVQSVVYHEESPPQYQTSYLQSFGFNGLWRFAGPFSKQTQIPDYAELIVKFLDALIDTYLPGIDEETSEESLLTPTSPYPPALQSQLSITANLNLSNSMTSLATSQHSPGIDKENVELSPTTGHCNSGRTRHGSASQVQKQRSAGSFKRNSIKKIV

SEQ ID NO: 870084 - protein, 2818 aa, Homo sapiens; identical to SEQ ID NO: 870083

SEQ ID NO: 870085 - protein, 2839 aa, Homo sapiens
MAAHRPVEWVQAVVSRFDEQLPIKTGQQNTHTKVSTEHNKECLINISKYKFSLVISGLTTILKNVNNMRIFGEAAEKNLYLSQLIILDTLEKCLAGQPKDTMRLDETMLVKQLLPEICHFLHTCREGNQHAAELRNSASGVLFSLSCNNFNAVFSRISTRLQELTVCSEDNVDVHDIELLQYINVDCAKLKRLLKETAFKFKALKKVAQLAVINSLEKAFWNWVENYPDEFTKLYQIPQTDMAECAEKLFDLVDGFAESTKRKAAVWPLQIILLILCPEIIQDISKDVVDENNMNKKLFLDSLRKALAGHGGSRQLTESAAIACVKLCKASTYINWEDNSVIFLLVQSMVVDLKNLLFNPSKPFSRGSQPADVDLMIDCLVSCFRISPHNNQHFKICLAQNSPSTFHYVLVNSLHRIITNSALDWWPKIDAVYCHSVELRNMFGETLHKAVQGCGAHPAIRMAPSLTFKEKVTSLKFKEKPTDLETRSYKYLLLSMVKLIHADPKLLLCNPRKQGPETQGSTAELITGLVQLVPQSHMPEIAQEAMEALLVLHQLDSIDLWNPDAPVETFWEISSQMLFYICKKLTSHQMLSSTEILKWLREILICRNKFLLKNKQADRSSCHFLLFYGVGCDIPSSGNTSQMSMDHEELLRTPGASLRKGKGNSSMDSAAGCSGTPPICRQAQTKLEVALYMFLWNPDTEAVLVAMSCFRHLCEEADIRCGVDEVSVHNLLPNYNTFMEFASVSNMMSTGRAALQKRVMALLRRIEHPTAGNTEAWEDTHAKWEQATKLILNYPKAKMEDGQAAESLHKTIVKRRMSHVSGGGSIDLSDTDSLQEWINMTGFLCALGGVCLQQRSNSGLATYSPPMGPVSERKGSMISVMSSEGNADTPVSKFMDRLLSLMVCNHEKVGLQIRTNVKDLVGLELSPALYPMLFNKLKNTISKFFDSQGQVLLTDTNTQFVEQTIAIMKNLLDNHTEGSSEHLGQASIETMMLNLVRYVRVLGNMVHAIQIKTKLCQLVEVMMARRDDLSFCQEMKFRNKMVEYLTDWVMGTSNQAADDDVKCLTRDLDQASMEAVVSLLAGLPLQPEEGDGVELMEAKSQLFLKYFTLFMNLLNDCSEVEDESAQTGGRKRGMSRRLASLRHCTVLAMSNLLNANVDSGLMHSIGLGYHKDLQTRATFMEVLTKILQQGTEFDTLAETVLADRFERLVELVTMMGDQGELPIAMALANVVPCSQWDELARVLVTLFDSRHLLYQLLWNMFSKEVELADSMQTLFRGNSLASKIMTFCFKVYGATYLQKLLDPLLRIVITSSDWQHVSFEVDPTRLEPSESLEENQRNLLQMTEKFFHAIISSSSEFPPQLRSVCHCLYQATCHSLLNKATVKEKKENKKSVVSQRFPQNSIGAVGSAMFLRFINPAIVSPYEAGILDKKPPPRIERGLKLMSKILQSIANHVLFTKEEHMRPFNDFVKSNFDAARRFFLDIASDCPTSDAVNHSLSFISDGNVLALHRLLWNNQEKIGQYLSSNRDHKAVGRRPFDKMATLLAYLGPPEHKPVADTHWSSLNLTSSKFEEFMTRHQVHEKEEFKALKTLSIFYQAGTSKAGNPIFYYVARRFKTGQINGDLLIYHVLLTLKPYYAKPYEIVVDLTHTGPSNRFKTDFLSKWFVVFPGFAYDNVSAVYIYNCNSWVREYTKYHERLLTGLKGSKRLVFIDCPGKLAEHIEHEQQKLPAATLALEEDLKVFHNALKLAHKDTKVSIKVGSTAVQVTSAERTKVLGQSVFLNDIYYASEIEEICLVDENQFTLTIANQGTPLTFMHQECEAIVQSIIHIRTRWELSQPDSIPQHTKIRPKDVPGTLLNIALLNLGSSDPSLRSAAYNLLCALTCTFNLKIEGQLLETSGLCIPANNTLFIVSISKTLAANEPHLTLEFLEECISGFSKSSIELKHLCLEYMTPWLSNLVRFCKHNDDAKRQRVTAILDKLITMTINEKQMYPSIQAKIWGSLGQITDLLDVVLDSFIKTSATGGLGSIKAEVMADTAVALASGNVKLVSSKVIGRMCKIIDKTCLSPTPTLEQHLMWDDIAILARYMLMLSFNNSLDVAAHLPYLFHVVTFLVATGPLSLRASTHGLVINIIHSLCTCSQLHFSEETKQVLRLSLTEFSLPKFYLLFGISKVKSAAVIAFRSSYRDRSFSPGSYERETFALTSLETVTEALLEIMEACMRDIPTCKWLDQWTELAQRFAFQYNPSLQPRALVVFGCISKRVSHGQIKQIIRILSKALESCLKGPDTYNSQVLIEATVIALTKLQPLLNKDSPLHKALFWVAVAVLQLDEVNLYSAGTALLEQNLHTLDSLRIFNDKSPEEVFMAIRNPLEWHCKQMDHFVGLNFNSNFNFALVGHLLKGYRHPSPAIVARTVRILHTLLTLVNKHRNCDKFEVNTQSVAYLAALLTVSEEVRSRCSLKHRKSLLLTDISMENVPMDTYPIHHGDPSYRTLKETQPWSSPKGSEGYLAATYPTVGQTSPRARKSMSLDMGQPSQANTKKLLGTRKSFDHLISDTKAPKRQEMESGITTPPKMRRVAETDYEMETQRISSSQQHPHLRKVSVSESNVLLDEEVLTDPKIQALLLTVLATLVKYTTDEFDQRILYEYLAEASVVFPKVFPVVHNLLDSKINTLLSLCQDPNLLNPIHGIVQSVVYHEESPPQYQTSYLQSFGFNGLWRFAGPFSKQTQIPDYAELIVKFLDALIDTYLPGIDEETSEESLLTPTSPYPPALQSQLSITANLNLSNSMTSLATSQHSPGIDKENVELSPTTGHCNSGRTRHGSASQVQKQRSAGSFKRNSIKKIV

SEQ ID NO: 870086 - protein, 2692 aa, Homo sapiens
WRLPIYSIRNSASGVLFSLSCNNFNAVFSRISTRLQELTVCSEDNVDVHDIELLQYINVDCAKLKRLLKETAFKFKALKKVAQLAVINSLEKAFWNWVENYPDEFTKLYQIPQTDMAECAEKLFDLVDGFAESTKRKAAVWPLQIILLILCPEIIQDISKDVVDENNMNKKLFLDSLRKALAGHGGSRQLTESAAIACVKLCKASTYINWEDNSVIFLLVQSMVVDLKNLLFNPSKPFSRGSQPADVDLMIDCLVSCFRISPHNNQHFKICLAQNSPSTFHYVLVNSLHRIITNSALDWWPKIDAVYCHSVELRNMFGETLHKAVQGCGAHPAIRMAPSLTFKEKVTSLKFKEKPTDLETRSYKYLLLSMVKLIHADPKLLLCNPRKQGPETQGSTAELITGLVQLVPQSHMPEIAQEAMEALLVLHQLDSIDLWNPDAPVETFWEISSQMLFYICKKLTSHQMLSSTEILKWLREILICRNKFLLKNKQADRSSCHFLLFYGVGCDIPSSGNTSQMSMDHEELLRTPGASLRKGKGNSSMDSAAGCSGTPPICRQAQTKLEVALYMFLWNPDTEAVLVAMSCFRHLCEEADIRCGVDEVSVHNLLPNYNTFMEFASVSNMMSTGRAALQKRVMALLRRIEHPTAGNTEAWEDTHAKWEQATKLILNYPKAKMEDGQAAESLHKTIVKRRMSHVSGGGSIDLSDTDSLQEWINMTGFLCALGGVCLQQRSNSGLATYSPPMGPVSERKGSMISVMSSEGNADTPVSKFMDRLLSLMVCNHEKVGLQIRTNVKDLVGLELSPALYPMLFNKLKNTISKFFDSQGQVLLTDTNTQFVEQTIAIMKNLLDNHTEGSSEHLGQASIETMMLNLVRYVRVLGNMVHAIQIKTKLCQLVEVMMARRDDLSFCQEMKFRNKMVEYLTDWVMGTSNQAADDDVKCLTRDLDQASMEAVVSLLAGLPLQPEEGDGVELMEAKSQLFLKYFTLFMNLLNDCSEVEDESAQTGGRKRGMSRRLASLRHCTVLAMSNLLNANVDSGLMHSIGLGYHKDLQTRATFMEVLTKILQQGTEFDTLAETVLADRFERLVELVTMMGDQGELPIAMALANVVPCSQWDELARVLVTLFDSRHLLYQLLWNMFSKEVELADSMQTLFRGNSLASKIMTFCFKVYGATYLQKLLDPLLRIVITSSDWQHVSFEVDPTRLEPSESLEENQRNLLQMTEKFFHAIISSSSEFPPQLRSVCHCLYQVVSQRFPQNSIGAVGSAMFLRFINPAIVSPYEAGILDKKPPPRIERGLKLMSKILQSIANHVLFTKEEHMRPFNDFVKSNFDAARRFFLDIASDCPTSDAVNHSLSFISDGNVLALHRLLWNNQEKIGQYLSSNRDHKAVGRRPFDKMATLLAYLGPPEHKPVADTHWSSLNLTSSKFEEFMTRHQVHEKEEFKALKTLSIFYQAGTSKAGNPIFYYVARRFKTGQINGDLLIYHVLLTLKPYYAKPYEIVVDLTHTGPSNRFKTDFLSKWFVVFPGFAYDNVSAVYIYNCNSWVREYTKYHERLLTGLKGSKRLVFIDCPGKLAEHIEHEQQKLPAATLALEEDLKVFHNALKLAHKDTKVSIKVGSTAVQVTSAERTKVLGQSVFLNDIYYASEIEEICLVDENQFTLTIANQGTPLTFMHQECEAIVQSIIHIRTRWELSQPDSIPQHTKIRPKDVPGTLLNIALLNLGSSDPSLRSAAYNLLCALTCTFNLKIEGQLLETSGLCIPANNTLFIVSISKTLAANEPHLTLEFLEECISGFSKSSIELKHLCLEYMTPWLSNLVRFCKHNDDAKRQRVTAILDKLITMTINEKQMYPSIQAKIWGSLGQITDLLDVVLDSFIKTSATGGLGSIKAEVMADTAVALASGNVKLVSSKVIGRMCKIIDKTCLSPTPTLEQHLMWDDIAILARYMLMLSFNNSLDVAAHLPYLFHVVTFLVATGPLSLRASTHGLVINIIHSLCTCSQLHFSEETKQVLRLSLTEFSLPKFYLLFGISKVKSAAVIAFRSSYRDRSFSPGSYERETFALTSLETVTEALLEIMEACMRDIPTCKWLDQWTELAQRFAFQYNPSLQPRALVVFGCISKRVSHGQIKQIIRILSKALESCLKGPDTYNSQVLIEATVIALTKLQPLLNKDSPLHKALFWVAVAVLQLDEVNLYSAGTALLEQNLHTLDSLRIFNDKSPEEVFMAIRNPLEWHCKQMDHFVGLNFNSNFNFALVGHLLKGYRHPSPAIVARTVRILHTLLTLVNKHRNCDKFEVNTQSVAYLAALLTVSEEVRSRCSLKHRKSLLLTDISMENVPMDTYPIHHGDPSYRTLKETQPWSSPKGSEGYLAATYPTVGQTSPRARKSMSLDMGQPSQANTKKLLGTRKSFDHLISDTKAPKRQEMESGITTPPKMRRVAETDYEMETQRISSSQQHPHLRKVSVSESNVLLDEEVLTDPKIQALLLTVLATLVKYTTDEFDQRILYEYLAEASVVFPKVFPVVHNLLDSKINTLLSLCQDPNLLNPIHGIVQSVVYHEESPPQYQTSYLQSFGFNGLWRFAGPFSKQTQIPDYAELIVKFLDALIDTYLPGIDEETSEESLLTPTSPYPPALQSQLSITANLNLSNSMTSLATSQHSPGIDKENVELSPTTGHCNSGRTRHGSASQVQKQRSAGSFKRNSIKKIV

SEQ ID NO: 870087 - protein, 2263 aa, Homo sapiens
MLFYICKKLTSHQMLSSTEILKWLREILICRNKFLLKNKQADRSSCHFLLFYGVGCDIPSSGNTSQMSMDHEELLRTPGASLRKGKGNSSMDSAAGCSGTPPICRQAQTKLEVALYMFLWNPDTEAVLVAMSCFRHLCEEADIRCGVDEVSVHNLLPNYNTFMEFASVSNMMSTGRAALQKRVMALLRRIEHPTAGNTEAWEDTHAKWEQATKLILNYPKAKMEDGQAAESLHKTIVKRRMSHVSGGGSIDLSDTDSLQEWINMTGFLCALGGVCLQQRSNSGLATYSPPMGPVSERKGSMISVMSSEGNADTPVSKFMDRLLSLMVCNHEKVGLQIRTNVKDLVGLELSPALYPMLFNKLKNTISKFFDSQGQVLLTDTNTQFVEQTIAIMKNLLDNHTEGSSEHLGQASIETMMLNLVRYVRVLGNMVHAIQIKTKLCQLVEVMMARRDDLSFCQEMKFRNKMVEYLTDWVMGTSNQAADDDVKCLTRDLDQASMEAVVSLLAGLPLQPEEGDGVELMEAKSQLFLKYFTLFMNLLNDCSEVEDESAQTGGRKRGMSRRLASLRHCTVLAMSNLLNANVDSGLMHSIGLGYHKDLQTRATFMEVLTKILQQGTEFDTLAETVLADRFERLVELVTMMGDQGELPIAMALANVVPCSQWDELARVLVTLFDSRHLLYQLLWNMFSKEVELADSMQTLFRGNSLASKIMTFCFKVYGATYLQKLLDPLLRIVITSSDWQHVSFEVDPTRLEPSESLEENQRNLLQMTEKFFHAIISSSSEFPPQLRSVCHCLYQATCHSLLNKATVKEKKENKKSVVSQRFPQNSIGAVGSAMFLRFINPAIVSPYEAGILDKKPPPRIERGLKLMSKILQSIANHVLFTKEEHMRPFNDFVKSNFDAARRFFLDIASDCPTSDAVNHSLSFISDGNVLALHRLLWNNQEKIGQYLSSNRDHKAVGRRPFDKMATLLAYLGPPEHKPVADTHWSSLNLTSSKFEEFMTRHQVHEKEEFKALKTLSIFYQAGTSKAGNPIFYYVARRFKTGQINGDLLIYHVLLTLKPYYAKPYEIVVDLTHTGPSNRFKTDFLSKWFVVFPGFAYDNVSAVYIYNCNSWVREYTKYHERLLTGLKGSKRLVFIDCPGKLAEHIEHEQQKLPAATLALEEDLKVFHNALKLAHKDTKVSIKVGSTAVQVTSAERTKVLGQSVFLNDIYYASEIEEICLVDENQFTLTIANQGTPLTFMHQECEAIVQSIIHIRTRWELSQPDSIPQHTKIRPKDVPGTLLNIALLNLGSSDPSLRSAAYNLLCALTCTFNLKIEGQLLETSGLCIPANNTLFIVSISKTLAANEPHLTLEFLEECISGFSKSSIELKHLCLEYMTPWLSNLVRFCKHNDDAKRQRVTAILDKLITMTINEKQMYPSIQAKIWGSLGQITDLLDVVLDSFIKTSATGGLGSIKAEVMADTAVALASGNVKLVSSKVIGRMCKIIDKTCLSPTPTLEQHLMWDDIAILARYMLMLSFNNSLDVAAHLPYLFHVVTFLVATGPLSLRASTHGLVINIIHSLCTCSQLHFSEETKQVLRLSLTEFSLPKFYLLFGISKVKSAAVIAFRSSYRDRSFSPGSYERETFALTSLETVTEALLEIMEACMRDIPTCKWLDQWTELAQRFAFQYNPSLQPRALVVFGCISKRVSHGQIKQIIRILSKALESCLKGPDTYNSQVLIEATVIALTKLQPLLNKDSPLHKALFWVAVAVLQLDEVNLYSAGTALLEQNLHTLDSLRIFNDKSPEEVFMAIRNPLEWHCKQMDHFVGLNFNSNFNFALVGHLLKGYRHPSPAIVARTVRILHTLLTLVNKHRNCDKFEVNTQSVAYLAALLTVSEEVRSRCSLKHRKSLLLTDISMENVPMDTYPIHHGDPSYRTLKETQPWSSPKGSEGYLAATYPTVGQTSPRARKSMSLDMGQPSQANTKKLLGTRKSFDHLISDTKAPKRQEMESGITTPPKMRRVAETDYEMETQRISSSQQHPHLRKVSVSESNVLLDEEVLTDPKIQALLLTVLATLVKYTTDEFDQRILYEYLAEASVVFPKVFPVVHNLLDSKINTLLSLCQDPNLLNPIHGIVQSVVYHEESPPQYQTSYLQSFGFNGLWRFAGPFSKQTQIPDYAELIVKFLDALIDTYLPGIDEETSEESLLTPTSPYPPALQSQLSITANLNLSNSMTSLATSQHSPGIDKENVELSPTTGHCNSGRTRHGSASQVQKQRSAGSFKRNSIKKIV

SEQ ID NO: 870088 - protein, 623 aa, Homo sapiens [sequence omitted]

SEQ ID NO: 870089 - protein, 140 aa, Homo sapiens
MSTTCPSSPCEPMRFAGPFSKQTQIPDYAELIVKFLDALIDTYLPGIDEETSEESLLTPTSPYPPALQSQLSITANLNLSNSMTSLATSQHSPGIDKENVELSPTTGHCNSGRTRHGSASQVQKQRSAGSFKRNSIKKIV

SEQ ID NO: 870090 - protein, 2706 aa, Homo sapiens
MAAHRPVEWVQAVVSRFDEQLPIKTGQQNTHTKVSTEHNKECLINISKYKFSLVISGLTTILKNVNNMRIFGEAAEKNLYLSQLIILDTLEKCLAGQPKDTMRLDETMLVKQLLPEICHFLHTCREGNQHAAELRNSASGVLFSLSCNNFNAVFSRISTRLQELTVCSEDNVDVHDIELLQYINVDCAKLKRLLKETAFKFKALKKVAQLAVINSLEKAFWNWVENYPDEFTKLYQIPQTDMAECAEKLFDLVDGFAESTKRKAAVWPLQIILLILCPEIIQDISKDVVDENNMNKKLFLDSLRKALAGHGGSRQLTESAAIACVKLCKASTYINWEDNSVIFLLVQSMVVDLKNLLFNPSKPFSRGSQPADVDLMIDCLVSCFRISPHNNQHFKICLAQNSPSTFHYVLVNSLHRIITNSALDWWPKIDAVYCHSVELRNMFGETLHKAVQGCGAHPAIRMAPSLTFKEKVTSLKFKEKPTDLETRSYKYLLLSMVKLIHADPKLLLCNPRKQGPETQGSTAELITGLVQLVPQSHMPEIAQEAMEALLVLHQLDSIDLWNPDAPVETFWEISSQMLFYICKKLTSHQMLSSTEILKWLREILICRNKFLLKNKQADRSSCHFLLFYGVGCDIPSSGNTSQMSMDHEELLRTPGASLRKGKGNSSMDSAAGCSGTPPICRQAQTKLEVALYMFLWNPDTEAVLVAMSCFRHLCEEADIRCGVDEVSVHNLLPNYNTFMEFASVSNMMSTGRAALQKRVMALLRRIEHPTAGNTEAWEDTHAKWEQATKLILNYPKAKMEDGQAAESLHKTIVKRRMSHVSGGGSIDLSDTDSLQEWINMTGFLCALGGVCLQQRSNSGLATYSPPMGPVSERKGSMISVMSSEGNADTPVSKFMDRLLSLMVCNHEKVGLQIRTNVKDLVGLELSPALYPMLFNKLKNTISKFFDSQGQVLLTDTNTQFVEQTIAIMKNLLDNHTEGSSEHLGQASIETMMLNLVRYVRVLGNMVHAIQIKTKLCQLVEVMMARRDDLSFCQEMKFRNKMVEYLTDWVMGTSNQAADDDVKCLTRDLDQASMEAVVSLLAGLPLQPEEGDGVELMEAKSQLFLKYFTLFMNLLNDCSEVEDESAQTGGRKRGMSRRLASLRHCTVLAMSNLLNANVDSGLMHSIGLGYHKDLQTRATFMEVLTKILQQGTEFDTLAETVLADRFERLVELVTMMGDQGELPIAMALANVVPCSQWDELARVLVTLFDSRHLLYQLLWNMFSKEVELADSMQTLFRGNSLASKIMTFCFKVYGATYLQKLLDPLLRIVITSSDWQHVSFEVDPTRLEPSESLEENQRNLLQMTEKFFHAIISSSSEFPPQLRSVCHCLYQATCHSLLNKATVKEKKENKKSVVSQRFPQNSIGAVGSAMFLRFINPAIVSPYEAGILDKKPPPRIERGLKLMSKILQSIANHVLFTKEEHMRPFNDFVKSNFDAARRFFLDIASDCPTSDAVNHSLSFISDGNVLALHRLLWNNQEKIGQYLSSNRDHKAVGRRPFDKMATLLAYLGPPEHKPVADTHWSSLNLTSSKFEEFMTRHQVHEKEEFKALKTLSIFYQAGTSKAGNPIFYYVARRFKTGQINGDLLIYHVLLTLKPYYAKPYEIVVDLTHTGPSNRFKTDFLSKWFVVFPGFAYDNVSAVYIYNCNSWVREYTKYHERLLTGLKGSKRLVFIDCPGKLAEHIEHEQQKLPAATLALEEDLKVFHNALKLAHKDTKVSIKVGSTAVQVTSAERTKVLGQSVFLNDIYYASEIEEICLVDENQFTLTIANQGTPLTFMHQECEAIVQSIIHIRTRWELSQPDSIPQHTKIRPKDVPGTLLNIALLNLGSSDPSLRSAAYNLLCALTCTFNLKIEGQLLETSGLCIPANNTLFIVSISKTLAANEPHLTLEFLEECISGFSKSSIELKHLCLEYMTPWLSNLVRFCKHNDDAKRQRVTAILDKLITMTINEKQMYPSIQAKIWGSLGQITDLLDVVLDSFIKTSATGGLGSIKAEVMADTAVALASGNVKLVSSKVIGRMCKIIDKTCLSPTPTLEQHLMWDDIAILARYMLMLSFNNSLDVAAHLPYLFHVVTFLVATGPLSLRASTHGLVINIIHSLCTCSQLHFSEETKQVLRLSLTEFSLPKFYLLFGISKVKSAAVIAFRSSYRDRSFSPGSYERETFALTSLETVTEALLEIMEACMRDIPTCKWLDQWTELAQRFAFQYNPSLQPRALVVFGCISKRVSHGQIKQIIRILSKALESCLKGPDTYNSQVLIEATVIALTKLQPLLNKDSPLHKALFWVAVAVLQLDEVNLYSAGTALLEQNLHTLDSLRIFNDKSPEEVFMAIRNPLEWHCKQMDHFVGLNFNSNFNFALVGHLLKGYRHPSPAIVARTVRILHTLLTLVNKHRNCDKFEVNTQSVAYLAALLTVSEEVRSRCSLKHRKSLLLTDISMENVPMDTYPIHHGDPSYRTLKETQPWSSPKGSEGYLAATYPTVGQTSPRARKSMSLDMGQPSQANTKKLLGTRKSFDHLISDTKAPKRQEMESGITTPPKMRRVAETDYEMETQRISSSQQHPHLRKVSVSESNVLLDEEVLTDPKIQALLLTVLATLVKYTTDEFDQRILYEYLAEASVVFPKVFPVVHNLLDSKINTLLSLCQDPNLLNPIHGIVQSVVYHEESPPQYQTSYLQSK

SEQ ID NO: 870091 - protein, 593 aa, Homo sapiens
MAAHRPVEWVQAVVSRFDEQLPIKTGQQNTHTKVSTEHNKECLINISKYKFSLVISGLTTILKNVNNMRIFGEAAEKNLYLSQLIILDTLEKCLAGQPKDTMRLDETMLVKQLLPEICHFLHTCREGNQHAAELRNSASGVLFSLSCNNFNAVFSRISTRLQELTVCSEDNVDVHDIELLQYINVDCAKLKRLLKETAFKFKALKKVAQLAVINSLEKAFWNWVENYPDEFTKLYQIPQTDMAECAEKLFDLVDGFAESTKRKAAVWPLQIILLILCPEIIQDISKDVVDENNMNKKLFLDSLRKALAGHGGSRQLTESAAIACVKLCKASTYINWEDNSVIFLLVQSMVVDLKNLLFNPSKPFSRGSQPADVDLMIDCLVSCFRISPHNNQHFKICLAQNSPSTFHYVLVNSLHRIITNSALDWWPKIDAVYCHSVELRNMFGETLHKAVQGCGAHPAIRMAPSLTFKEKVTSLKFKEKPTDLETRSYKYLLLSMVKLIHADPKLLLCNPRKQGPETQGSTAELITGLVQLVPQSHMPEIAQEAMEALLVLHQLDSIDLWNPDAPVETFWEIRYMYFYFLNSTFKFYFVFLS

SEQ ID NO: 870092 - protein, 1577 aa, Homo sapiens
MAAHRPVEWVQAVVSRFDEQLPIKTGQQNTHTKVSTEHNKECLINISKYKFSLVISGLTTILKNVNNMRIFGEAAEKNLYLSQLIILDTLEKCLAGQPKDTMRLDETMLVKQLLPEICHFLHTCREGNQHAAELRNSASGVLFSLSCNNFNAVFSRISTRLQELTVCSEDNVDVHDIELLQYINVDCAKLKRLLKETAFKFKALKKVAQLAVINSLEKAFWNWVENYPDEFTKLYQIPQTDMAECAEKLFDLVDGFAESTKRKAAVWPLQIILLILCPEIIQDISKDVVDENNMNKKLFLDSLRKALAGHGGSRQLTESAAIACVKLCKASTYINWEDNSVIFLLVQSMVVDLKNLLFNPSKPFSRGSQPADVDLMIDCLVSCFRISPHNNQHFKICLAQNSPSTFHYVLVNSLHRIITNSALDWWPKIDAVYCHSVELRNMFGETLHKAVQGCGAHPAIRMAPSLTFKEKVTSLKFKEKPTDLETRSYKYLLLSMVKLIHADPKLLLCNPRKQGPETQGSTAELITGLVQLVPQSHMPEIAQEAMEALLVLHQLDSIDLWNPDAPVETFWEISSQMLFYICKKLTSHQMLSSTEILKWLREILICRNKFLLKNKQADRSSCHFLLFYGVGCDIPSSGNTSQMSMDHEELLRTPGASLRKGKGNSSMDSAAGCSGTPPICRQAQTKLEVALYMFLWNPDTEAVLVAMSCFRHLCEEADIRCGVDEVSVHNLLPNYNTFMEFASVSNMMSTGRAALQKRVMALLRRIEHPTAGNTEAWEDTHAKWEQATKLILNYPKAKMEDGQAAESLHKTIVKRRMSHVSGGGSIDLSDTDSLQEWINMTGFLCALGGVCLQQRSNSGLATYSPPMGPVSERKGSMISVMSSEGNADTPVSKFMDRLLSLMVCNHEKVGLQIRTNVKDLVGLELSPALYPMLFNKLKNTISKFFDSQGQVLLTDTNTQFVEQTIAIMKNLLDNHTEGSSEHLGQASIETMMLNLVRYVRVLGNMVHAIQIKTKLCQLVEVMMARRDDLSFCQEMKFRNKMVEYLTDWVMGTSNQAADDDVKCLTRDLDQASMEAVVSLLAGLPLQPEEGDGVELMEAKSQLFLKYFTLFMNLLNDCSEVEDESAQTGGRKRGMSRRLASLRHCTVLAMSNLLNANVDSGLMHSIGLGYHKDLQTRATFMEVLTKILQQGTEFDTLAETVLADRFERLVELVTMMGDQGELPIAMALANVVPCSQWDELARVLVTLFDSRHLLYQLLWNMFSKEVELADSMQTLFRGNSLASKIMTFCFKVYGATYLQKLLDPLLRIVITSSDWQHVSFEVDPTRLEPSESLEENQRNLLQMTEKFFHAIISSSSEFPPQLRSVCHCLYQVVSQRFPQNSIGAVGSAMFLRFINPAIVSPYEAGILDKKPPPRIERGLKLMSKILQSIANHVLFTKEEHMRPFNDFVKSNFDAARRFFLDIASDCPTSDAVNHSLSFISDGNVLALHRLLWNNQEKIGQYLSSNRDHKAVGRRPFDKMATLLAYLGPPEHKPVADTHWSSLNLTSSKFEEFMTRHQVHEKEEFKALKTLTPPPEPET

SEQ ID NO: 870093 - protein, 106 aa, Homo sapiens
QQEITILVKSDKKLKRQFKIKLKGNIGVNVGREKGRELHKNARTMEGRWVEHSSCNGEAFQRNRERESCEDWIDLISHSALFKRVWKCTVFKQTSHTMKAGLSSWW

SEQ ID NO: 870094 - protein, 2818 aa, Homo sapiens; identical to SEQ ID NO: 870083

SEQ ID NO: 870095 - protein, 2818 aa, Homo sapiens; identical to SEQ ID NO: 870083

SEQ ID NO: 870096 - protein, 2836 aa, Homo sapiens
MAAHRPVEWVQAVVSRFDEQLPIKTGQQNTHTKVSTEHNKECLINISKYKFSLVISGLTTILKNVNNMRIFGEAAEKNLYLSQLIILDTLEKCLAGQPKDTMRLDETMLVKQLLPEICHFLHTCREGNQHAAELRNSASGVLFSLSCNNFNAVFSRISTRLQELTVCSEDNVDVHDIELLQYINVDCAKLKRLLKETAFKFKALKKVAQLAVINSLEKAFWNWVENYPDEFTKLYQIPQTDMAECAEKLFDLVDGFAESTKRKAAVWPLQIILLILCPEIIQDISKDVVDENNMNKKLFLDSLRKALAGHGGSRQLTESAAIACVKLCKASTYINWEDNSVIFLLVQSMVVDLKNLLFNPSKPFSRGSQPADVDLMIDCLVSCFRISPHNNQHFKICLAQNSPSTFHYVLVNSLHRIITNSALDWWPKIDAVYCHSVELRNMFGETLHKAVQGCGAHPAIRMAPSLTFKEKVTSLKFKEKPTDLETRSYKYLLLSMVKLIHADPKLLLCNPRKQGPETQGSTAELITGLVQLVPQSHMPEIAQEAMEALLVLHQLDSIDLWNPDAPVETFWEISSQMLFYICKKLTSHQMLSSTEILKWLREILICRNKFLLKNKQADRSSCHFLLFYGVGCDIPSSGNTSQMSMDHEELLRTPGASLRKGKGNSSMDSAAGCSGTPPICRQAQTKLEVALYMFLWNPDTEAVLVAMSCFRHLCEEADIRCGVDEVSVHNLLPNYNTFMEFASVSNMMSTGRAALQKRVMALLRRIEHPTAGNTEAWEDTHAKWEQATKLILNYPKAKMEDGQAAESLHKTIVKRRMSHVSGGGSIDLSDTDSLQEWINMTGFLCALGGVCLQQRSNSGLATYSPPMGPVSERKGSMISVMSSEGNADTPVSKFMDRLLSLMVCNHEKVGLQIRTNVKDLVGLELSPALYPMLFNKLKNTISKFFDSQGQVLLTDTNTQFVEQTIAIMKNLLDNHTEGSSEHLGQASIETMMLNLVRYVRVLGNMVHAIQIKTKLCQLVEVMMARRDDLSFCQEMKFRNKMVEYLTDWVMGTSNQAADDDVKCLTRDLDQASMEAVVSLLAGLPLQPEEGDGVELMEAKSQLFLKYFTLFMNLLNDCSEVEDESAQTGGRKRGMSRRLASLRHCTVLAMSNLLNANVDSGLMHSIGLGYHKDLQTRATFMEVLTKILQQGTEFDTLAETVLADRFERLVELVTMMGDQGELPIAMALANVVPCSQWDELARVLVTLFDSRHLLYQLLWNMFSKEVELADSMQTLFRGNSLASKIMTFCFKVYGATYLQKLLDPLLRIVITSSDWQHVSFEVDPTRLEPSESLEENQRNLLQMTEKFFHAIISSSSEFPPQLRSVCHCLYQVVSQRFPQNSIGAVGSAMFLRFINPAIVSPYEAGILDKKPPPRIERGLKLMSKILQSIANHVLFTKEEHMRPFNDFVKSNFDAARRFFLDIASDCPTSDAVNHSLSFISDGNVLALHRLLWNNQEKIGQYLSSNRDHKAVGRRPFDKMATLLAYLGPPEHKPVADTHWSSLNLTSSKFEEFMTRHQVHEKEEFKALKTLSIFYQAGTSKAGNPIFYYVARRFKTGQINGDLLIYHVLLTLKPYYAKPYEIVVDLTHTGPSNRFKTDFLSKWFVVFPGFAYDNVSAVYIYNCNSWVREYTKYHERLLTGLKGSKRLVFIDCPGKLAEHIEHEQQKLPAATLALEEDLKVFHNALKLAHKDTKVSIKVGSTAVQVTSAERTKVLGQSVFLNDIYYASEIEEICLVDENQFTLTIANQGTPLTFMHQECEAIVQSIIHIRTRWELSQPDSIPQHTKIRPKDVPGTLLNIALLNLGSSDPSLRSAAYNLLCALTCTFNLKIEGQLLETSGLCIPANNTLFIVSISKTLAANEPHLTLEFLEECISGFSKSSIELKHLCLEYMTPWLSNLVRFCKHNDDAKRQRVTAILDKLITMTINEKQMYPSIQAKIWGSLGQITDLLDVVLDSFIKTSATGGLGSIKAEVMADTAVALASGNVKLVSSKVIGRMCKIIDKTCLSPTPTLEQHLMWDDIAILARYMLMLSFNNSLDVAAHLPYLFHVVTFLVATGPLSLRASTHGLVINIIHSLCTCSQLHFSEETKQVLRLSLTEFSLPKFYLLFGISKVKSAAVIAFRSSYRDRSFSPGSYERETFALTSLETVTEALLEIMEACMRDIPTCKWLDQWTELAQRFAFQYNPSLQPRALVVFGCISKRVSHGQIKQIIRILSKALESCLKGPDTYNSQVLIEATVIALTKLQPLLNKDSPLHKALFWVAVAVLQLDEVNLYSAGTALLEQNLHTLDSLRIFNDKSPEEVFMAIRNPLEWHCKQMDHFVGLNFNSNFNFALVGHLLKGYRHPSPAIVARTVRILHTLLTLVNKHRNCDKFEVNTQSVAYLAALLTVSEEVRSRCSLKHRKSLLLTDISMENVPMDTYPIHHGDPSYRTLKETQPWSSPKGSEGYLAATYPTVGQTSPRARKSMSLDMGQPSQANTKKLLGTRKSFDHLISDTKAPKRQEMESGITTPPKMRRVAETDYEMETQRISSSQQHPHLRKVSVSESNVLLDEEVLTDPKIQALLLTVLATLVKYTTDEFDQRILYEYLAEASVVFPKVFPVVHNLLDSKINTLLSLCQDPNLLNPIHGIVQSVVYHEESPPQYQTSYLQSFGFNGLWRFAGPFSKQTQIPDYAELIVKFLDALIDTYLPGIDEETSEESLLTPTSPYPPALQSQLSITANLNLSNSMTSLATSQHSPASLPCSKSAVFMQLFPHQGIDKENVELSPTTGHCNSGRTRHGSASQVQKQRSAGSFKRNSIKKIV

SEQ ID NO: 870097 - protein, 479 aa, Homo sapiens [sequence omitted]

SEQ ID NO: 870098 - protein, 2794 aa, Homo sapiens
MAAHRPVEWVQAVVSRFDEQLPIKTGQQNTHTKVSTEHNKECLINISKYKFSLVISGLTTILKNVNNMRIFGEAAEKNLYLSQLIILDTLEKCLAGQPKDTMRLDETMLVKQLLPEICHFLHTCREGNQHAAELRNSASGVLFSLSCNNFNAVFSRISTRLQELTVCSEDNVDVHDIELLQYINVDCAKLKRLLKETAFKFKALKKVAQLAVINSLEKAFWNWVENYPDEFTKLYQIPQTDMAECAEKLFDLVDGFAESTKRKAAVWPLQIILLILCPEIIQDISKDVVDENNMNKKLFLDSLRKALAGHGGSRQLTESAAIACVKLCKASTYINWEDNSVIFLLVQSMVVDLKNLLFNPSKPFSRGSQPADVDLMIDCLVSCFRISPHNNQHFKICLAQNSPSTFHYVLVNSLHRIITNSALDWWPKIDAVYCHSVELRNMFGETLHKAVQGCGAHPAIRMAPSLTFKEKVTSLKFKEKPTDLETRSYKYLLLSMVKLIHADPKLLLCNPRKQGPETQGSTAELITGLVQLVPQSHMPEIAQEAMEALLVLHQLDSIDLWNPDAPVETFWEISSQMLFYICKKLTSHQMLSSTEILKWLREILICRNKFLLKNKQADRSSCHFLLFYGVGCDIPSSGNTSQMSMDHEELLRTPGASLRKGKGNSSMDSAAGCSGTPPICRQAQTKLEVALYMFLWNPDTEAVLVAMSCFRHLCEEADIRCGVDEVSVHNLLPNYNTFMEFASVSNMMSTGRAALQKRVMALLRRIEHPTAGNTEAWEDTHAKWEQATKLILNYPKAKMEDGQAAESLHKTIVKRRMSHVSGGGSIDLSDTDSLQEWINMTGFLCALGGVCLQQRSNSGLATYSPPMGPVSERKGSMISVMSSEGNADTPVSKFMDRLLSLMVCNHEKVGLQIRTNVKDLVGLELSPALYPMLFNKLKNTISKFFDSQGQVLLTDTNTQFVEQTIAIMKNLLDNHTEGSSEHLGQASIETMMLNLVRYVRVLGNMVHAIQIKTKLCQLVEVMMARRDDLSFCQEMKFRNKMVEYLTDWVMGTSNQAADDDVKCLTRDLDQASMEAVVSLLAGLPLQPEEGDGVELMEAKSQLFLKYFTLFMNLLNDCSEVEDESAQTGGRKRGMSRRLASLRHCTVLAMSNLLNANVDSGLMHSIGLGYHKDLQTRATFMEVLTKILQQGTEFDTLAETVLADRFERLVELVTMMGDQGELPIAMALANVVPCSQWDELARVLVTLFDSRHLLYQLLWNMFSKEVELADSMQTLFRGNSLASKIMTFCFKVYGATYLQKLLDPLLRIVITSSDWQHVSFEVDPTRLEPSESLEENQRNLLQMTEKFFHAIISSSSEFPPQLRSVCHCLYQATCHSLLNKATVKEKKENKKSVVSQRFPQNSIGAVGSAMFLRFINPAIVSPYEAGILDKKPPPRIERGLKLMSKILQSIANHVLFTKEEHMRPFNDFVKSNFDAARRFFLDIASDCPTSDAVNHSLSFISDGNVLALHRLLWNNQEKIGQYLSSNRDHKAVGRRPFDKMATLLAYLGPPEHKPVADTHWSSLNLTSSKFEEFMTRHQVHEKEEFKALKTLSIFYQAGTSKAGNPIFYYVARRFKTGQINGDLLIYHVLLTLKPYYAKPYEIVVDLTHTGPSNRFKTDFLSKWFVVFPGFAYDNVSAVYIYNCNSWVREYTKYHERLLTGLKGSKRLVFIDCPGKLAEHIEHEQQKLPAATLALEEDLKVFHNALKLAHKDTKVSIKVGSTAVQVTSAERTKVLGQSVFLNDIYYASEIEEICLVDENQFTLTIANQGTPLTFMHQECEAIVQSIIHIRTRWELSQPDSIPQHTKIRPKDVPGTLLNIALLNLGSSDPSLRSAAYNLLCALTCTFNLKIEGQLLETSGLCIPANNTLFIVSISKTLAANEPHLTLEFLEECISGFSKSSIELKHLCLEYMTPWLSNLVRFCKHNDDAKRQRVTAILDKLITMTINEKQMYPSIQAKIWGSLGQITDLLDVVLDSFIKTSATGGLGSIKAEVMADTAVALASGNVKLVSSKVIGRMCKIIDKTCLSPTPTLEQHLMWDDIAILARYMLMLSFNNSLDVAAHLPYLFHVVTFLVATGPLSLRASTHGLVINIIHSLCTCSQLHFSEETKQVLRLSLTEFSLPKFYLLFGISKVKSAAVIAFRSSYRDRSFSPGSYERETFALTSLETVTEALLEIMEACMRDIPTCKWLDQWTELAQRFAFQYNPSLQPRALVVFGCISKRVSHGQIKQIIRILSKALESCLKGPDTYNSQVLIEATVIALTKLQPLLNKDSPLHKALFWVAVAVLQLDEVNLYSAGTALLEQNLHTLDSLRIFNDKSPEEVFMAIRNPLEWHCKQMDHFVGLNFNSNFNFALVGHLLKGYRHPSPAIVARTVRILHTLLTLVNKHRNCDKFEVNTQSVAYLAALLTVSEEVRSRCSLKHRKSLLLTDISMENVPMDTYPIHHGDPSYRTLKETQPWSSPKGSEGYLAATYPTVGQTSPRARKSMSLDMGQPSQANTKKLLGTRKSFDHLISDTKAPKRQEMESGITTPPKMRRVAETDYEMETQRISSSQQHPHLRKVSVSESNVLLDEEVLTDPKIQALLLTVLATLVKYTTDEFDQRILYEYLAEASVVFPKVFPVVHNLLDSKINTLLSLCQDPNLLNPIHGIVQSVVYHEESPPQYQTSYLQSFGFNGLWRFAGPFSKQTQIPDYAELIVKFLDALIDTYLPGIDEETSEESLLTPTSPYPPALQSQLSITANLNLSNSMTSLATSQHSPGQ

SEQ ID NO: 870099 - protein, 2418 aa, Homo sapiens
MAAHRPVEWVQAVVSRFDEQLPIKTGQQNTHTKVSTEHNKECLINISKYKFSLVISGLTTILKNVNNMRIFGEAAEKNLYLSQLIILDTLEKCLAGQPKDTMRLDETMLVKQLLPEICHFLHTCREGNQHAAELRNSASGVLFSLSCNNFNAVFSRISTRLQELTVCSEDNVDVHDIELLQYINVDCAKLKRLLKETAFKFKALKKVAQLAVINSLEKAFWNWVENYPDEFTKLYQIPQTDMAECAEKLFDLVDGFAESTKRKAAVWPLQIILLILCPEIIQDISKDVVDENNMNKKLFLDSLRKALAGHGGSRQLTESAAIACVKLCKASTYINWEDNSVIFLLVQSMVVDLKNLLFNPSKPFSRGSQPADVDLMIDCLVSCFRISPHNNQHFKICLAQNSPSTFHYVLVNSLHRIITNSALDWWPKIDAVYCHSVELRNMFGETLHKAVQGCGAHPAIRMAPSLTFKEKVTSLKFKEKPTDLETRSYKYLLLSMVKLIHADPKLLLCNPRKQGPETQGSTAELITGLVQLVPQSHMPEIAQEAMEALLVLHQLDSIDLWNPDAPVETFWEISSQMLFYICKKLTSHQMLSSTEILKWLREILICRNKFLLKNKQADRSSCHFLLFYGVGCDIPSSGNTSQMSMDHEELLRTPGASLRKGKGNSSMDSAAGCSGTPPICRQAQTKLEVALYMFLWNPDTEAVLVAMSCFRHLCEEADIRCGVDEVSVHNLLPNYNTFMEFASVSNMMSTGRAALQKRVMALLRRIEHPTAGNTEAWEDTHAKWEQATKLILNYPKAKMEDGQAAESLHKTIVKRRMSHVSGGGSIDLSDTDSLQEWINMTGFLCALGGVCLQQRSNSGLATYSPPMGPVSERKGSMISVMSSEGNADTPVSKFMDRLLSLMVCNHEKVGLQIRTNVKDLVGLELSPALYPMLFNKLKNTISKFFDSQGQVLLTDTNTQFVEQTIAIMKNLLDNHTEGSSEHLGQASIETMMLNLVRYVRVLGNMVHAIQIKTKLCQLVEVMMARRDDLSFCQEMKFRNKMVEYLTDWVMGTSNQAADDDVKCLTRDLDQASMEAVVSLLAGLPLQPEEGDGVELMEAKSQLFLKYFTLFMNLLNDCSEVEDESAQTGGRKRGMSRRLASLRHCTVLAMSNLLNANVDSGLMHSIGLGYHKDLQTRATFMEVLTKILQQGTEFDTLAETVLADRFERLVELVTMMGDQGELPIAMALANVVPCSQWDELARVLVTLFDSRHLLYQLLWNMFSKEVELADSMQTLFRGNSLASKIMTFCFKVYGATYLQKLLDPLLRIVITSSDWQHVSFEVDPTRLEPSESLEENQRNLLQMTEKFFHAIISSSSEFPPQLRSVCHCLYQATCHSLLNKATVKEKKENKKSVVSQRFPQNSIGAVGSAMFLRFINPAIVSPYEAGILDKKPPPRIERGLKLMSKILQSIANHVLFTKEEHMRPFNDFVKSNFDAARRFFLDIASDCPTSDAVNHSLSFISDGNVLALHRLLWNNQEKIGQYLSSNRDHKAVGRRPFDKMATLLAYLGPPEHKPVADTHWSSLNLTSSKFEEFMTRHQVHEKEEFKALKTLSIFYQAGTSKAGNPIFYYVARRFKTGQINGDLLIYHVLLTLKPYYAKPYEIVVDLTHTGPSNRFKTDFLSKWFVVFPGFAYDNVSAVYIYNCNSWVREYTKYHERLLTGLKGSKRLVFIDCPGKLAEHIEHEQQKLPAATLALEEDLKVFHNALKLAHKDTKVSIKVGSTAVQVTSAERTKVLGQSVFLNDIYYASEIEEICLVDENQFTLTIANQGTPLTFMHQECEAIVQSIIHIRTRWELSQPDSIPQHTKIRPKDVPGTLLNIALLNLGSSDPSLRSAAYNLLCALTCTFNLKIEGQLLETSGLCIPANNTLFIVSISKTLAANEPHLTLEFLEECISGFSKSSIELKHLCLEYMTPWLSNLVRFCKHNDDAKRQRVTAILDKLITMTINEKQMYPSIQAKIWGSLGQITDLLDVVLDSFIKTSATGGLGSIKAEVMADTAVALASGNVKLVSSKVIGRMCKIIDKTCLSPTPTLEQHLMWDDIAILARYMLMLSFNNSLDVAAHLPYLFHVVTFLVATGPLSLRASTHGLVINIIHSLCTCSQLHFSEETKQVLRLSLTEFSLPKFYLLFGISKVKSAAVIAFRSSYRDRSFSPGSYERETFALTSLETVTEALLEIMEACMRDIPTCKWLDQWTELAQRFAFQYNPSLQPRALVVFGCISKRVSHGQIKQIIRILSKALESCLKGPDTYNSQVLIEATVIALTKLQPLLNKDSPLHKALFWVAVAVLQLDEVNLYSAGTALLEQNLHTLDSLRIFNDKVSKLCLEVPRLLKFSTLPSFLVAILLKSQEVHNLSRNLYNVTYCEYISLPAHKELCKLECIFFT

SEQ ID NO: 870100 - protein, 1413 aa, Homo sapiens
MAAHRPVEWVQAVVSRFDEQLPIKTGQQNTHTKVSTEHNKECLINISKYKFSLVISGLTTILKNVNNMRIFGEAAEKNLYLSQLIILDTLEKCLAGQPKDTMRLDETMLVKQLLPEICHFLHTCREGNQHAAELRNSASGVLFSLSCNNFNAVFSRISTRLQELTVCSEDNVDVHDIELLQYINVDCAKLKRLLKETAFKFKALKKVAQLAVINSLEKAFWNWVENYPDEFTKLYQIPQTDMAECAEKLFDLVDGFAESTKRKAAVWPLQIILLILCPEIIQDISKDVVDENNMNKKLFLDSLRKALAGHGGSRQLTESAAIACVKLCKASTYINWEDNSVIFLLVQSMVVDLKNLLFNPSKPFSRGSQPADVDLMIDCLVSCFRISPHNNQHFKICLAQNSPSTFHYVLVNSLHRIITNSALDWWPKIDAVYCHSVELRNMFGETLHKAVQGCGAHPAIRMAPSLTFKEKVTSLKFKEKPTDLETRSYKYLLLSMVKLIHADPKLLLCNPRKQGPETQGSTAELITGLVQLVPQSHMPEIAQEAMEALLVLHQLDSIDLWNPDAPVETFWEISSQMLFYICKKLTSHQMLSSTEILKWLREILICRNKFLLKNKQADRSSCHFLLFYGVGCDIPSSGNTSQMSMDHEELLRTPGASLRKGKGNSSMDSAAGCSGTPPICRQAQTKLEVALYMFLWNPDTEAVLVAMSCFRHLCEEADIRCGVDEVSVHNLLPNYNTFMEFASVSNMMSTGRAALQKRVMALLRRIEHPTAGNTEAWEDTHAKWEQATKLILNYPKAKMEDGQAAESLHKTIVKRRMSHVSGGGSIDLSDTDSLQEWINMTGFLCALGGVCLQQRSNSGLATYSPPMGPVSERKGSMISVMSSEGNADTPVSKFMDRLLSLMVCNHEKVGLQIRTNVKDLVGLELSPALYPMLFNKLKNTISKFFDSQGQVLLTDTNTQFVEQTIAIMKNLLDNHTEGSSEHLGQASIETMMLNLVRYVRVLGNMVHAIQIKTKLCQLVEVMMARRDDLSFCQEMKFRNKMVEYLTDWVMGTSNQAADDDVKCLTRDLDQASMEAVVSLLAGLPLQPEEGDGVELMEAKSQLFLKYFTLFMNLLNDCSEVEDESAQTGGRKRGMSRRLASLRHCTVLAMSNLLNANVDSGLMHSIGLGYHKDLQTRATFMEVLTKILQQGTEFDTLAETVLADRFERLVELVTMMGDQGELPIAMALANVVPCSQWDELARVLVTLFDSRHLLYQLLWNMFSKEVELADSMQTLFRGNSLASKIMTFCFKVYGATYLQKLLDPLLRIVITSSDWQHVSFEVDPTRLEPSESLEENQRNLLQMTEKFFHAIISSSSEFPPQLRSVCHCLYQATCHSLLNKATVKEKKENKKSVSLENFLLAVSFKAKQKSFAVC

SEQ ID NO: 870101 - protein, 350 aa, Homo sapiens
MEYYLVKWKGWPDSTNTWEPLQNLKCPLLLQQFSNDKHNYLSQVKKGKAITPKDNNKTLKPAIAEYIVKKAKQRIALQRWQDELNRRKNHKGMIFVENTVDLEGPPSDFYYINEYKPAPGISLVNEATFGCSCTDCFFQKCCPAEAGVLLAYNKNQQIKIPPGTPIYECNSRCQCGPDCPNRIVQKGTQYSLCIFRTSNGRGWGVKTLVKIKRMSFVMEYVGEVITSEEAERRGQFYDNKGITYLFDLDYESDEFTVDAARYGNVSHFVNHSCDPNLQVFNVFIDNLDTRLPRIALFSTRTINAGEELTFDYQMKGSGDISSDSIDHSPAKKRVRTVCKCGAVTCRGYLN

SEQ ID NO: 870102 - protein, 230 aa, Homo sapiens
MAAVGAEARGAWCVPCLVSLDTLQELCRKEKLTCKSIGITKRNLNNYEVEYLCDYKVVKDMEYYLVKWKGWPDSTNTWEPLQNLKCPLLLQQFSNDKHNYLSQVITSEEAERRGQFYDNKGITYLFDLDYESDEFTVDAARYGNVSHFVNHSCDPNLQVFNVFIDNLDTRLPRIALFSTRTINAGEELTFDYQMKGSGDISSDSIDHSPAKKRVRTVCKCGAVTCRGYLN

SEQ ID NO: 870103 - protein, 263 aa, Homo sapiens [sequence omitted]

SEQ ID NO: 870104 - protein, 263 aa, Homo sapiens [sequence omitted]

SEQ ID NO: 870105 - protein, 263 aa, Homo sapiens [sequence omitted]

SEQ ID NO: 870106 - protein, 263 aa, Homo sapiens [sequence omitted]

SEQ ID NO: 870107 - protein, 350 aa, Homo sapiens; identical to SEQ ID NO: 870101

SEQ ID NO: 870108 - protein, 137 aa, Homo sapiens [sequence omitted]

SEQ ID NO: 870109 - protein, 323 aa, Homo sapiens
MAAVGAEARGAWCVPCLVSLDTLQELCRKEKLTCKSIGITKRNLNNYEVEYLCDYKVVKDMEYYLVKWKGWPDSTNTWEPLQNLKCPLLLQQFSNDKHNYLSQVKKGKAITPKDNNKTLKPAIAEYIVKKAKQRIALQRWQDELNRRKNHKGMIFVENTVDLEGPPSDFYYINEYKPAPGISLVNEATFGCSCTDCFFQKCCPAEAGVLLAYNKNQQIKIPPGTPIYECNSRCQCGPDCPNRIVQKGTQYSLCIFRTSNGRGWGVKTLVKIKRMSFVMEYVGEVCFICHVVNDGHARFILLENYLFISLRDTWYILIFSFADM

SEQ ID NO: 870110 - protein, 263 aa, Homo sapiens [sequence omitted]

SEQ ID NO: 870111 - protein, 311 aa, Homo sapiens
MESRPPPSPPPPSSSSSSSSSSSHPGSLPKPLGLQPLPRPEVSFLTEYLRKLKACEGGGVEIAAASFPRIYLMGMCSRQDRIQKDIDVVIQKSRAEDCLFAGEFLLFQNLGPSAPFSVLRPRRVWLGVGWRVCTSAFRGSFGNSCCNERGSQKREGAPASPLPLPPPPSLGQLPALRAEPAWPERGSRRRGSAWYFQPRVVPEACKHASWVPAAAAERGWLDPPGLRNGLSGGGREWSLLRCARKLRPAPRTPGGQRSAHLRPLRLHLVPSDWQREGIPRIPKAPSAPAWGVAFRPFCSPGREIGFCFRCR

SEQ ID NO: 870112 - protein, 108 aa, Homo sapiens
MESRPPPSPPPPSSSSSSSSSSSHPGSLPKPLGLQPLPRPEVSFLTEYLRKLKACEGGGVEIAAASFPRIYLMGMCSRQDRIQKDIDVVIQKSRAEDCLFAGPAWQDD

SEQ ID NO: 870113 - protein, 108 aa, Homo sapiens; identical to SEQ ID NO: 870112

SEQ ID NO: 870114 - protein, 108 aa, Homo sapiens; identical to SEQ ID NO: 870112

SEQ ID NO: 870115 - protein, 108 aa, Homo sapiens; identical to SEQ ID NO: 870112

SEQ ID NO: 870116 - protein, 108 aa, Homo sapiens; identical to SEQ ID NO: 870112

SEQ ID NO: 870117 - protein, 135 aa, Homo sapiens
MESRPPPSPPPPSSSSSSSSSSSHPGSLPKPLGLQPLPRPEVSFLTEYLRKLKACEGGGVEIAAASFPRIYLMGMCSRQDRIQKDIDVVIQKSRAEDCLFAGRWSGRGAVGRERGKGKQKLEKKQGSCEPDIQTS

SEQ ID NO: 870118 - protein, 128 aa, Homo sapiens
MESRPPPSPPPPSSSSSSSSSSSHPGSLPKPLGLQPLPRPEVSFLTEYLRKLKACEGGGVEIAAASFPRIYLMGMCSRQDRIQKDIDVVIQKSRAEDCLFADFRYSDSTFTFTYVGGPRSFKSSRNFI

SEQ ID NO: 870119 - protein, 128 aa, Homo sapiens; identical to SEQ ID NO: 870118

SEQ ID NO: 870120 - protein, 110 aa, Homo sapiens
MESRPPPSPPPPSSSSSSSSSSSHPGSLPKPLGLQPLPRPEVSFLTEYLRKLKACEGGGVEIAAASFPRIYLMGMCSRQDRIQKDIDVVIQKSRAEDCLFAAVIQSPQDG

SEQ ID NO: 870121 - protein, 70 aa, Homo sapiens
AGAAASPPAASPRKSSRAVGASLGPLVGTESRSCVLGLGWLLDAREASDLACKGARLAGRLSKFLENQRY

SEQ ID NO: 870122 - protein, 70 aa, Homo sapiens; identical to SEQ ID NO: 870121

SEQ ID NO: 870123 - protein, 389 aa, Homo sapiens
MGGERGEGSRSGARPSSAPAAQPVIALRPSPAPSAPHGGWSGRGKEKVRLGFITNPSPEGEEIGIQQRRAAAGRSHLEMESRPPPSPPPPSSSSSSSSSSSHPGSLPKPLGLQPLPRPEVSFLTEYLRKLKACEGGGVEIAAASFPRIYLMGMCSRQDRIQKDIDVVIQKSRAEDCLFAGEFLLFQNLGPSAPFSVLRPRRVWLGVGWRVCTSAFRGSFGNSCCNERGSQKREGAPASPLPLPPPPSLGQLPALRAEPAWPERGSRRRGSAWYFQPRVVPEACKHASWVPAAAAERGWLDPPGLRNGLSGGGREWSLLRCARKLRPAPRTPGGQRSAHLRPLRLHLVPSDWQREGIPRIPKAPSAPAWGVAFRPFCSPGREIGFCFRCR

SEQ ID NO: 870124 - protein, 300 aa, Homo sapiens
MGKITSSSSSSSHPGSLPKPLGLQPLPRPEVSFLTEYLRKLKACEGGGVEIAAASFPRIYLMGMCSRQDRIQKDIDVVIQKSRAEDCLFAGEFLLFQNLGPSAPFSVLRPRRVWLGVGWRVCTSAFRGSFGNSCCNERGSQKREGAPASPLPLPPPPSLGQLPALRAEPAWPERGSRRRGSAWYFQPRVVPEACKHASWVPAAAAERGWLDPPGLRNGLSGGGREWSLLRCARKLRPAPRTPGGQRSAHLRPLRLHLVPSDWQREGIPRIPKAPSAPAWGVAFRPFCSPGREIGFCFRCR

SEQ ID NO: 870125 - protein, 108 aa, Homo sapiens; identical to SEQ ID NO: 870112

SEQ ID NO: 870126 - protein, 135 aa, Homo sapiens
MESRPPPSPPPPPPPPPPPPPPLTQDHFRNHLAFSPCLGQRVTCKRDSIYAGSCEAVRTCAAGRWNIVVLASFIRRHFTFKWRHAGSDGKHPTFRNGYSTVDASQRGSRSMRDVAVRRGARLAGRLSKFLENQRY

SEQ ID NO: 870127 - protein, 108 aa, Homo sapiens; identical to SEQ ID NO: 870112

SEQ ID NO: 870128 - protein, 128 aa, Homo sapiens
MESRPPPSPPPPSSSSSSSSSSSHPGSLPKPLGLQPLPRPEVSFLTEYLRKPGGLPGWFFRFFVPPSPSEGACIHPAQSLLGCCGASAAIFGSCVPPGAPPGQGWCRMGKWRENLKEPQTRGPIAPQE

SEQ ID NO: 870129 - protein, 110 aa, Homo sapiens
MESRPPPSPPPPSSSSSSSSSSSHPGSLPKPLGLQPLPRPEVSFLTEYLRKLKACEGGGVEIAAASFPRIYLMGMCSRQDRIQKDIDVVIQKSRAEDCLFAAEWGNGERT

SEQ ID NO: 870130 - protein, 124 aa, Homo sapiens
MESRPPPSPPPPSSSSSSSSSSSHPGSLPKPLGLQPLPRPEVSFLTEYLRKLKACEGGGVEIAAASFPRIYLMGMCSRQDRIQKDIDVVIQKSRAEDCLFADFRYSDSTFTFTYVGGPRRYLWV

SEQ ID NO: 870131 - protein, 759 aa, Homo sapiens
SGSGGGGAATAGAAGLRGCGAAGRGGRAGPGRAPLTAMLTFFLVSGGSLWLFVEFVLSLLEKMQTQEILRILRLPELGDLGQFFRSLSATTLVSMGALAAILAYWFTHRPKALQPPCNLLMQSEEVEDSGGARRSVIGSGPQLLTHYYDDARTMYQVFRRGLSISGNGPCLGFRKPKQPYQWLSYQEVADRAEFLGSGLLQHNCKACTDQFIGVFAQNRPEWIIVELACYTYSMVVVPLYDTLGPGAIRYIINTADISTVIVDKPQKAVLLLEHVERKETPGLKLIILMDPFEEALKERGQKCGVVIKSMQAVEDCGQENHQAPVPPQPDDLSIVCFTSGTTGNPKGAMLTHGNVVADFSGFLKVTEKVIFPRQDDVLISFLPLAHMFERVIQSVVYCHGGRVGFFQGDIRLLSDDMKALCPTIFPVVPRLLNRMYDKIFSQANTPLKRWLLEFAAKRKQAEVRSGIIRNDSIWDELFFNKIQASLGGCVRMIVTGAAPASPTVLGFLRAALGCQVYEGYGQTECTAGCTFTTPGDWTSGHVGAPLPCNHIKLVDVEELNYWACKGEGEICVRGPNVFKGYLKDPDRTKEALDSDGWLHTGDIGKWLPAGTLKIIDRKKHIFKLAQGEYVAPEKIENIYIRSQPVAQIYVHGDSLKAFLVGIVVPDPEVMPSWAQKRGIEGTYADLCTNKDLKKAILEDMVRLGKESGLHSFEQVKAIHIHSDMFSVQNGLLTPTLKAKRPELREYFKKQIEELYSISM

SEQ ID NO: 870132 - protein, 902 aa, Homo sapiens
PYLTLVFNKFVLSLLEKMQTQEILRILRLPELGDLGQFFRSLSATTLVSMGALAAILAYWFTHRPKALQPPCNLLMQSEEVEDSGGARRSVIGSGPQLLTHYYDDARTMYQVFRRGLSISGNGPCLGFRKPKQPYQWLSYQEVADRAEFLGSGLLQHNCKACTDQFIGVFAQNRPEWIIVELACYTYSMVVVPLYDTLGPGAIRYIINTADISTVIVDKPQKAVLLLEHVERKETPGLKLIILMDPFEEALKERGQKCGVVIKSMQAVEDCGQENHQAPVPPQPDDLSIVCFTSGTTGNPKGAMLTHGNVVADFSGFLKVTESQWAPTCADVHISYLPLAHMFERMVQSVVYCHGGRVGFFQGDIRLLSDDMKALCPTIFPVVPRLLNRMYDKIFSQANTPLKRWLLEFAAKRKQAEVRSGIIRNDSIWDELFFNKIQASLGGCVRMIVTGAAPASPTVLGFLRAALGCQVYEGYGQTECTAGCTFTTPGDWTSGHVGAPLPCNHIKLVDVEELNYWACKGEGEICVRGPNVFKGYLKDPDRTKEALDSDGWLHTGDIGKWLPAGTLKIIDRKKHIFKLAQGEYVAPEKIENIYIRSQPVAQIYVHGDSLKAFLVGIVVPDPEVMPSWAQKRGIEGTYADLCTNKDLKKAILEDMVRLGKESGLHSFEQDLPQCLIQIKVFSKYSFNDSKPEVKPGSKRKGKVHGLSKIAEKAERSRQGGSGSGPFSPRLGVTGEKSLQENRSSEDTQDEKIASLRESVTDDLQVDSSSSNSELVSGLSLHHGMASSLLSYSVTDSYAEYKSFEESFPSPELFRKSDYLDWECPNLEEHMQWKNSTLLDTSKAVAIEKAPQFSNVSAIFSTSSEDYQKCHRKTVMTVADQNVSPKAKCASNSESENKFQYSW

SEQ ID NO: 870133 - protein, 708 aa, Homo sapiens
MPEFVLSLLEKMQTQEILRILRLPELGDLGQFFRSLSATTLVSMGALAAILAYWFTHRPKALQPPCNLLMQSEEVEDSGGARRSVIGSGPQLLTHYYDDARTMYQVFRRGLSISGNGPCLGFRKPKQPYQWLSYQEVADRAEFLGSGLLQHNCKACTDQFIGVFAQNRPEWIIVELACYTYSMVVVPLYDTLGPGAIRYIINTADISTVIVDKPQKAVLLLEHVERKETPGLKLIILMDPFEEALKERGQKCGVVIKSMQAVEDCGQENHQAPVPPQPDDLSIVCFTSGTTGNPKGAMLTHGNVVADFSGFLKVTEKVIFPRQDDVLISFLPLAHMFERVIQSVVYCHGGRVGFFQGDIRLLSDDMKALCPTIFPVVPRLLNRMYDKIFSQANTPLKRWLLEFAAKRKQAEVRSGIIRNDSIWDELFFNKIQASLGGCVRMIVTGAAPASPTVLGFLRAALGCQVYEGYGQTECTAGCTFTTPGDWTSGHVGAPLPCNHIKLVDVEELNYWACKGEGEICVRGPNVFKGYLKDPDRTKEALDSDGWLHTGDIGKWLPAGTLKIIDRKKHIFKLAQGEYVAPEKIENIYIRSQPVAQIYVHGDSLKAFLVGIVVPDPEVMPSWAQKRGIEGTYADLCTNKDLKKAILEDMVRLGKESGLHSFEQVKAIHIHSDMFSVQNGLLTPTLKAKRPELREYFKKQIEELYSISM

SEQ ID NO: 870134 - protein, 697 aa, Homo sapiens
MQTQEILRILRLPELGDLGQFFRSLSATTLVSMGALAAILAYWFTHRPKALQPPCNLLMQSEEVEDSGGARRSVIGSGPQLLTHYYDDARTMYQVFRRGLSISGNGPCLGFRKPKQPYQWLSYQEVADRAEFLGSGLLQHNCKACTDQFIGVFAQNRPEWIIVELACYTYSMVVVPLYDTLGPGAIRYIINTADISTVIVDKPQKAVLLLEHVERKETPGLKLIILMDPFEEALKERGQKCGVVIKSMQAVEDCGQENHQAPVPPQPDDLSIVCFTSGTTGNPKGAMLTHGNVVADFSGFLKVTEKVIFPRQDDVLISFLPLAHMFERVIQSVVYCHGGRVGFFQGDIRLLSDDMKALCPTIFPVVPRLLNRMYDKIFSQANTPLKRWLLEFAAKRKQAEVRSGIIRNDSIWDELFFNKIQASLGGCVRMIVTGAAPASPTVLGFLRAALGCQVYEGYGQTECTAGCTFTTPGDWTSGHVGAPLPCNHIKLVDVEELNYWACKGEGEICVRGPNVFKGYLKDPDRTKEALDSDGWLHTGDIGKWLPAGTLKIIDRKKHIFKLAQGEYVAPEKIENIYIRSQPVAQIYVHGDSLKAFLVGIVVPDPEVMPSWAQKRGIEGTYADLCTNKDLKKAILEDMVRLGKESGLHSFEQVKAIHIHSDMFSVQNGLLTPTLKAKRPELREYFKKQIEELYSISM

SEQ ID NO: 870135 - protein, 699 aa, Homo sapiens
VGERGRRGLVRSAAGPLPRPGAWRFRHREFVLSLLEKMQTQEILRILRLPELGDLGQFFRSLSATTLDSGGARRSVIGSGPQLLTHYYDDARTMYQVFRRGLSISGNGPCLGFRKPKQPYQWLSYQEVADRAEFLGSGLLQHNCKACTDQFIGVFAQNRPEWIIVELACYTYSMVVVPLYDTLGPGAIRYIINTADISTVIVDKPQKAVLLLEHVERKETPGLKLIILMDPFEEALKERGQKCGVVIKSMQAVEDCGQENHQAPVPPQPDDLSIVCFTSGTTGNPKGAMLTHGNVVADFSGFLKVTEKVIFPRQDDVLISFLPLAHMFERVIQSVVYCHGGRVGFFQGDIRLLSDDMKALCPTIFPVVPRLLNRMYDKIFSQANTPLKRWLLEFAAKRKQAEVRSGIIRNDSIWDELFFNKIQASLGGCVRMIVTGAAPASPTVLGFLRAALGCQVYEGYGQTECTAGCTFTTPGDWTSGHVGAPLPCNHIKLVDVEELNYWACKGEGEICVRGPNVFKGYLKDPDRTKEALDSDGWLHTGDIGKWLPAGTLKIIDRKKHIFKLAQGEYVAPEKIENIYIRSQPVAQIYVHGDSLKAFLVGIVVPDPEVMPSWAQKRGIEGTYADLCTNKDLKKAILEDMVRLGKESGLHSFEQVKAIHIHSDMFSVQNGLLTPTLKAKRPELREYFKKQIEELYSISM

SEQ ID NO: 870136 - protein, 228 aa, Homo sapiens
MPSCSGVPGHVGAPLPCNHIKLVDVEELNYWACKGEGEICVRGPNVFKGYLKDPDRTKEALDSDGWLHTGDIGKWLPAGTLKIIDRKKHIFKLAQGEYVAPEKIENIYIRSQPVAQIYVHGDSLKAFLVGIVVPDPEVMPSWAQKRGIEGTYADLCTNKDLKKAILEDMVRLGKESGLHSFEQVKAIHIHSDMFSVQNGLLTPTLKAKRPELREYFKKQIEELYSISM

SEQ ID NO: 870137 - protein, 887 aa, Homo sapiens
MSETPAQCSIKFVLSLLEKMQTQEILRILRLPELGDLGQFFRSLSATTLDSGGARRSVIGSGPQLLTHYYDDARTMYQVFRRGLSISGNGPCLGFRKPKQPYQWLSYQEVADRAEFLGSGLLQHNCKACTDQFIGVFAQNRPEWIIVELACYTYSMVVVPLYDTLGPGAIRYIINTADISTVIVDKPQKAVLLLEHVERKETPGLKLIILMDPFEEALKERGQKCGVVIKSMQAVEDCGQENHQAPVPPQPDDLSIVCFTSGTTGNPKGAMLTHGNVVADFSGFLKVTESQWAPTCADVHISYLPLAHMFERMVQSVVYCHGGRVGFFQGDIRLLSDDMKALCPTIFPVVPRLLNRMYDKIFSQANTPLKRWLLEFAAKRKQAEVRSGIIRNDSIWDELFFNKIQASLGGCVRMIVTGAAPASPTVLGFLRAALGCQVYEGYGQTECTAGCTFTTPGDWTSGHVGAPLPCNHIKLVDVEELNYWACKGEGEICVRGPNVFKGYLKDPDRTKEALDSDGWLHTGDIGKWLPAGTLKIIDRKKHIFKLAQGEYVAPEKIENIYIRSQPVAQIYVHGDSLKAFLVGIVVPDPEVMPSWAQKRGIEGTYADLCTNKDLKKAILEDMVRLGKESGLHSFEQDLPQCLIQIKVFSKYSFNDSKPEVKPGSKRKGKVHGLSKIAEKAERSRQGGSGSGPFSPRLGVTGEKSLQENRSSEDTQDEKIASLRESVTDDLQVDSSSSNSELVSGLSLHHGMASSLLSYSVTDSYAEYKSFEESFPSPELFRKSDYLDWECPNLEEHMQWKNSTLLDTSKAVAIEKAPQFSNVSAIFSTSSEDYQKCHRKTVMTVADQNVSPKAKCASNSESDNAACEILLAEKTCPSTPEKTKKKAN

SEQ ID NO: 870138 - protein, 869 aa, Homo sapiens
MSETPAQCSIKFVLSLLEKMQTQEILRILRLPELGDLGQFFRSLSATTLDSGGARRSVIGSGPQLLTHYYDDARTMYQVFRRGLSISGNGPCLGFRKPKQPYQWLSYQEVADRAEFLGSGLLQHNCKACTDQFIGVFAQNRPEWIIVELACYTYSMVVVPLYDTLGPGAIRYIINTADISTVIVDKPQKAVLLLEHVERKETPGLKLIILMDPFEEALKERGQKCGVVIKSMQAVEDCGQENHQAPVPPQPDDLSIVCFTSGTTGNPKGAMLTHGNVVADFSGFLKVTESQWAPTCADVHISYLPLAHMFERMVQSVVYCHGGRVGFFQGDIRLLSDDMKALCPTIFPVVPRLLNRMYDKIFSQANTPLKRWLLEFAAKRKQAEVRSGIIRNDSIWDELFFNKIQASLGGCVRMIVTGAAPASPTVLGFLRAALGCQVYEGYGQTECTAGCTFTTPGDWTSGHVGAPLPCNHIKLVDVEELNYWACKGEGEICVRGPNVFKGYLKDPDRTKEALDSDGWLHTGDIGKWLPAGTLKIIDRKKHIFKLAQGEYVAPEKIENIYIRSQPVAQIYVHGDSLKAFLVGIVVPDPEVMPSWAQKRGIEGTYADLCTNKDLKKAILEDMVRLGKESGLHSFEQDLPQCLIQIKVFSKYSFNDSKPEVKPGSKRKGKVHGLSKIAEKAERSRQGGSGSGPFSPRLGVTGEKSLQENRSSEDTQDEKIASLRESVTDDLQVDSSSSNSELVSGLSLHHGMASSLLSYSVTDSYAEYKSFEESFPSPELFRKSDYLDWECPNLEEHMQWKNSTLLDTSKAVAIEKAPQFSNVSAIFSTSSEDYQKCHRKTVMTVADQNVSPKAKCASNSESENKFQYSW

SEQ ID NO: 870139 - protein, 187 aa, Homo sapiens
MVQTNCSCLFVSPRLGVTGEKSLQENRSSEDTQDEKIASLRESVTDDLQVDSSSSNSELVSGLSLHHGMASSLLSYSVTDSYAEYKSFEESFPSPELFRKSDYLDWECPNLEEHMQWKNSTLLDTSKAVAIEKAPQFSNVSAIFSTSSEDYQKCHRKTVMTVADQNVSPKAKCASNSESENKFQYSW

SEQ ID NO: 870140 - protein, 734 aa, Homo sapiens
SERHLHLGSAPLLTTMLIASSSVSGGFWEFVLSLLEKMQTQEILRILRLPELGDLGQFFRSLSATTLVSMGALAAILAYWFTHRPKALQPPCNLLMQSEEVEDSGGARRSVIGSGPQLLTHYYDDARTMYQVFRRGLSISGNGPCLGFRKPKQPYQWLSYQEVADRAEFLGSGLLQHNCKACTDQFIGVFAQNRPEWIIVELACYTYSMVVVPLYDTLGPGAIRYIINTADISTVIVDKPQKAVLLLEHVERKETPGLKLIILMDPFEEALKERGQKCGVVIKSMQAVEDCGQENHQAPVPPQPDDLSIVCFTSGTTGNPKGAMLTHGNVVADFSGFLKVTESQWAPTCADVHISYLPLAHMFERMVQSVVYCHGGRVGFFQGDIRLLSDDMKALCPTIFPVVPRLLNRMYDKIFSQANTPLKRWLLEFAAKRKQAEVRSGIIRNDSIWDELFFNKIQASLGGCVRMIVTGAAPASPTVLGFLRAALGCQVYEGYGQTECTAGCTFTTPGDWTSGHVGAPLPCNHIKLVDVEELNYWACKGEGEICVRGPNVFKGYLKDPDRTKEALDSDGWLHTGDIGKWLPAGTLKIIDRKKHIFKLAQGEYVAPEKIENIYIRSQPVAQIYVHGDSLKAFLVGIVVPDPEVMPSWAQKRGIEGTYADLCTNKDLKKAILEDMVRLGKESGLHSFEQVKAIHIHSDMFSVQNGLLTPTLKAKRPELREYFKKQIEELYSISM

SEQ ID NO: 870141 - protein, 681 aa, Homo sapiens
MSETPAQCSIKFVLSLLEKMQTQEILRILRLPELGDLGQFFRSLSATTLDSGGARRSVIGSGPQLLTHYYDDARTMYQVFRRGLSISGNGPCLGFRKPKQPYQWLSYQEVADRAEFLGSGLLQHNCKACTDQFIGVFAQNRPEWIIVELACYTYSMVVVPLYDTLGPGAIRYIINTADISTVIVDKPQKAVLLLEHVERKETPGLKLIILMDPFEEALKERGQKCGVVIKSMQAVEDCGQENHQAPVPPQPDDLSIVCFTSGTTGNPKGAMLTHGNVVADFSGFLKVTESQWAPTCADVHISYLPLAHMFERMVQSVVYCHGGRVGFFQGDIRLLSDDMKALCPTIFPVVPRLLNRMYDKIFSQANTPLKRWLLEFAAKRKQAEVRSGIIRNDSIWDELFFNKIQASLGGCVRMIVTGAAPASPTVLGFLRAALGCQVYEGYGQTECTAGCTFTTPGDWTSGHVGAPLPCNHIKLVDVEELNYWACKGEGEICVRGPNVFKGYLKDPDRTKEALDSDGWLHTGDIGKWLPAGTLKIIDRKKHIFKLAQGEYVAPEKIENIYIRSQPVAQIYVHGDSLKAFLVGIVVPDPEVMPSWAQKRGIEGTYADLCTNKDLKKAILEDMVRLGKESGLHSFEQVKAIHIHSDMFSVQNGLLTPTLKAKRPELREYFKKQIEELYSISM

SEQ ID NO: 870142 - protein, 751 aa, Homo sapiens
VGERGRRGLVRSAAGPLPRPGAWRFRHRGQCGASPRPGRPGCRAGKFVLSLLEKMQTQEILRILRLPELGDLGQFFRSLSATTLVSMGALAAILAYWFTHRPKALQPPCNLLMQSEEVEDSGGARRSVIGSGPQLLTHYYDDARTMYQVFRRGLSISGNGPCLGFRKPKQPYQWLSYQEVADRAEFLGSGLLQHNCKACTDQFIGVFAQNRPEWIIVELACYTYSMVVVPLYDTLGPGAIRYIINTADISTVIVDKPQKAVLLLEHVERKETPGLKLIILMDPFEEALKERGQKCGVVIKSMQAVEDCGQENHQAPVPPQPDDLSIVCFTSGTTGNPKGAMLTHGNVVADFSGFLKVTEKVIFPRQDDVLISFLPLAHMFERVIQSVVYCHGGRVGFFQGDIRLLSDDMKALCPTIFPVVPRLLNRMYDKIFSQANTPLKRWLLEFAAKRKQAEVRSGIIRNDSIWDELFFNKIQASLGGCVRMIVTGAAPASPTVLGFLRAALGCQVYEGYGQTECTAGCTFTTPGDWTSGHVGAPLPCNHIKLVDVEELNYWACKGEGEICVRGPNVFKGYLKDPDRTKEALDSDGWLHTGDIGKWLPAGTLKIIDRKKHIFKLAQGEYVAPEKIENIYIRSQPVAQIYVHGDSLKAFLVGIVVPDPEVMPSWAQKRGIEGTYADLCTNKDLKKAILEDMVRLGKESGLHSFEQVKAIHIHSDMFSVQNGLLTPTLKAKRPELREYFKKQIEELYSISM

SEQ ID NO: 870143 - protein, 578 aa, Homo sapiens
GSPDYSGRFCAENTNKLISACFTIVLEKSGPQKFSPVGHQWIIVELACYTYSMVVVPLYDTLGPGAIRYIINTADISTVIVDKPQKAVLLLEHVERKETPGLKLIILMDPFEEALKERGQKCGVVIKSMQAVEDCGQENHQAPVPPQPDDLSIVCFTSGTTGNPKGAMLTHGNVVADFSGFLKVTEKVIFPRQDDVLISFLPLAHMFERVIQSVVYCHGGRVGFFQGDIRLLSDDMKALCPTIFPVVPRLLNRMYDKIFSQANTPLKRWLLEFAAKRKQAEVRSGIIRNDSIWDELFFNKIQASLGGCVRMIVTGAAPASPTVLGFLRAALGCQVYEGYGQTECTAGCTFTTPGDWTSGHVGAPLPCNHIKLVDVEELNYWACKGEGEICVRGPNVFKGYLKDPDRTKEALDSDGWLHTGDIGKWLPAGTLKIIDRKKHIFKLAQGEYVAPEKIENIYIRSQPVAQIYVHGDSLKAFLVGIVVPDPEVMPSWAQKRGIEGTYADLCTNKDLKKAILEDMVRLGKESGLHSFEQVKAIHIHSDMFSVQNGLLTPTLKAKRPELREYFKKQIEELYSISM

SEQ ID NO: 870144 - protein, 318 aa, Homo sapiens
MPEFVLSLLEKMQTQEILRILRLPELGDLGQFFRSLSATTLVSMGALAAILAYWFTHRPKALQPPCNLLMQSEEVEDSGGARRSVIGSGPQLLTHYYDDARTMYQVFRRGLSISGNGPCLGFRKPKQPYQWLSYQEVADRAEFLGSGLLQHNCKACTDQFIGVFAQNRPEWIIVELACYTYSMVVVPLYDTLGPGAIRYIINTADISTVIVDKPQKAVLLLEHVERKETPGLKLIILMDPFEEALKERGQKCGVVIKSMQAVEDCGQENHQAPVPPQPDDLSIVCFTSGTTGKQRHADPQPWLPAPFPGGLAGDCWSL

SEQ ID NO: 870145 - protein, 891 aa, Homo sapiens
MSETPAQCSIKFVLSLLEKMQTQEILRILRLPELGDLGQFFRSLSATTLDSGGARRSVIGSGPQLLTHYYDDARTMYQVFRRGLSISGNGPCLGFRKPKQPYQWLSYQEVADRAEFLGSGLLQHNCKACTDQFIGVFAQNRPEWIIVELACYTYSMVVVPLYDTLGPGAIRYIINTADISTVIVDKPQKAVLLLEHVERKETPGLKLIILMDPFEEALKERGQKCGVVIKSMQAVEDCGQENHQAPVPPQPDDLSIVCFTSGTTGNPKGAMLTHGNVVADFSGFLKVTESQWAPTCADVHISYLPLAHMFERMVQSVVYCHGGRVGFFQGDIRLLSDDMKALCPTIFPVVPRLLNRMYDKIFSQANTPLKRWLLEFAAKRKQAEVRSGIIRNDSIWDELFFNKIQASLGGCVRMIVTGAAPASPTVLGFLRAALGCQVYEGYGQTECTAGCTFTTPGDWTSGHVGAPLPCNHIKLVDVEELNYWACKGEGEICVRGPNVFKGYLKDPDRTKEALDSDGWLHTGDIGKWLPAGTLKIIDRKKHIFKLAQGEYVAPEKIENIYIRSQPVAQIYVHGDSLKAFLVGIVVPDPEVMPSWAQKRGIEGTYADLCTNKDLKKAILEDMVRLGKESGLHSFEQDLPQCLIQIKVFSKYSFNDSKPEVKPGSKRKGKVHGLSKIAEKAERSRQGGSGSGPFSPRLGVTGEKSLQENRSSEDTQDEKIASLRESVTDDLQVDSSSSNSELVSGLSLHHGMASSLLSYSVTDSYAEYKSFEESFPSPELFRKSDYLDWECPNLEEHMQWKNSTLLDTSKAVAIEKAPQFSNVSAIFSTSSEDYQKCHRKTVMTVADQNVSPKAKCASNSESDNAACEILLAEKTCPSTPEKTKKKASIEAE

SEQ ID NO: 870146 - protein, 212 aa, Homo sapiens
MQPKGVRQCRERQKRSGGEGKVAAATLAAAWRHGRNGTRGRHGKGLRLRPLRRDGRISGDLSLLRQGRPDRSDSRHTQAAGRSATAWGCQLPPPARRARAPRRGSGAADTRTLTARAPPLRGSPPPSARPPPHPARRGAWATSRARALSARRQRRGWGIASSASRFPWRQSWPGRPRLGNYDSGAPGEAKMPSKGKDKKKGKSKGKDTKLKN

SEQ ID NO: 870147 - protein, 319 aa, Homo sapiens
MPSKGKDKKKGKSKGKDTKKLIKTDESVVDRAKANASLWEARLEVTELSRIKYRDTSRILAKSNEDLKKKQCKMEKDIMSVLSYLKKQDQEKDNMIEKLKQQLNETKEKAQEEKDKLEQKYTRQINELEGQFHQKAKEIGMIHTELKAVRQFQKRKIQVERELDDLKENLRNTERIHQETLRRLESRFFEEKHRLEQEAEKKIIMLAERAHHEAIVQLNDAGRNVFKENDYLQKALAYHLKETDALQKNSQKLQESHTLLLHQKVPSHLDLVSFFSLFKDWVGKYQKLGIIMIYKDNETIFICLDDALFLSEKVKYSIL

SEQ ID NO: 870148 - protein, 212 aa, Homo sapiens; identical to SEQ ID NO: 870146

SEQ ID NO: 870149 - protein, 54 aa, Homo sapiens
WKVLPKKVFCFYASTFLVFWLGEQTFFGAFQSITDSTSKMEPSSAPCEEYAGNN

SEQ ID NO: 870150 - protein, 133 aa, Homo sapiens
QTAFRLQETSSQSYVEEQKQLKESFRAFVEDSEDEDGAGEGGSSLLQKRAKTRQEKAQEEADYIEWLKGQKEIRNPDSLKELKKVRPMYLKDYERKVILEKAGKYVDEENSDGETSNHRLQETSSQSYVEEPD

SEQ ID NO: 870151 - protein, 126 aa, Homo sapiens
RFCGGTLRPHQAAIKGWQLPLWAGFISLWLPCGFGLSTEEILAADDKELNRWCSLKKTCMYRSEQEELRDKRAYSQKAQNSWKKRQVFKSLCREEAETPAANLLLLLSWKPQRWLQLQRAGLRLGL

SEQ ID NO: 870152 - protein, 709 aa, Homo sapiens
MGHRTAMPEPRGSSQLRVNAAFAARYNRYREREELQRLKDRYGDRDSSSDSSSESDSSDERVEFDPQQERDFYKTLSLLKKKDPRIYQKDATFYNRTASSSDSEEDPEALEKQKKVRPMYLKDYERKVILEKAGKYVDEENSDGETSNHRLQETSSQSYVEEQKQLKESFRAFVEDSEDEDGAGEGGSSLLQKRAKTRQEKAQEEADYIEWLKGQKEIRNPDSLKELTHLKEYWNDPELDEGERFLRDYILNKRYEEEEEEEEDEEEMEEEKGVHGPPVQLAVDDSSDEGELFLKKQEDFEQKYNFRFEEPDSASVKTYPRSIASSVRRKDERRKEKREETRERKKREKAKKQEELKQLKNLKRKEILAKLEKLRKVTGNEMLGLEEGDLEDDFDPAQHDQLMQKCFGDEYYGAVEEEKPQFEEEEGLEDDWNWDTWDGPEQEGDWSQQELHCEDPNFNMDADYDPSQPRKKKREAPLTGKKKRKSPFAAAVGQEKPVFEPGDKTFEEYLDEYYRLDYEDIIDDLPCRFKYRTVVPCDFGLSTEEILAADDKELNRWCSLKKTCMYRSEQEELRDKRAYSQKAQNSWKKRQVFKSLCREEAETPAEATGKPQRDEAGPQRQLPALDGSLMGPESPPAQEEEAPVSPHKKPAPQKRRRAKKARLLGPTVMLGGCEFSRQRLQAFGLNPKRLHFRQLGRQRRKQQGPKNSS

SEQ ID NO: 870153 - protein, 737 aa, Homo sapiens
MGHRTAMPEPRGSSQLRVNAAFAARYNRYREREELQRLKDRYGDRDSSSDSSSESDSSDERVEFDPQQERDFYKTLSLLKKKDPRIYQKDATFYNRTASSSDSEEDPEALEKQKKVRPMYLKDYERKVILEKAGKYVDEENSDGETSNHRLQETSSQSYVEEQKQLKESFRAFVEDSEDEDGAGEGGSSLLQKRAKTRQEKAQEEADYIEWLKGQKEIRNPDSLKELTHLKEYWNDPELDEGERFLRDYILNKRYEEEEEEEEDEEEMEEEKGVHGPPVQLAVDDSSDEGELFLKKQEDFEQKYNFRFEEPDSASVKTYPRSIASSVRRKDERRKEKREETRERKKREKAKKQEELKQLKNLKRKEILAKLEKLRKVTGNEMLGLEEGDLEDDFDPAQHDQLMQKCFGDEYYGAVEEEKPQFEEEEGLEDDWNWDTWDGPEQEGDWSQQELHCEDPNFNMDADYDPSQPRKKKREAPLTGKKKRKSPFAAAVGQEKPVFEPGEAQVGRPWVGRGHRGAWHEPSSLALSRGDKTFEEYLDEYYRLDYEDIIDDLPCRFKYRTVVPCDFGLSTEEILAADDKELNRWCSLKKTCMYRSEQEELRDKRAYSQKAQNSWKKRQVFKSLCREEAETPAEATGKPQRDEAGPQRQLPALDGSLMGPESPPAQEEEAPVSPHKKPAPQKRRRAKKARLLGPTVMLGGCEFSRQRLQAFGLNPKRLHFRQLGRQRRKQQGPKNSS

SEQ ID NO: 870154 - protein, 738 aa, Homo sapiens
MGHRTAMPEPRGSSQLRVNAAFAARYNRYREREELQRLKDRYGDRDSSSDSSSESDSSDERVEFDPQQERDFYKTLSLLKKKDPRIYQKDATFYNRTASSSDSEEDPEALEKQKKVRPMYLKDYERKVILEKAGKYVDEENSDGETSNHRLQETSSQSYVEEQKQLKESFRAFVEDSEDEDGAGEGGSSLLQKRAKTRQEKGYWGLTGLLGDRVAGGWASADAQCYAFPQAQEEADYIEWLKGQKEIRNPDSLKELTHLKEYWNDPELDEGERFLRDYILNKRYEEEEEEEEDEEEMEEEKGVHGPPVQLAVDDSSDEGELFLKKQEDFEQKYNFRFEEPDSASVKTYPRSIASSVRRKDERRKEKREETRERKKREKAKKQEELKQLKNLKRKEILAKLEKLRKVTGNEMLGLEEGDLEDDFDPAQHDQLMQKCFGDEYYGAVEEEKPQFEEEEGLEDDWNWDTWDGPEQEGDWSQQELHCEDPNFNMDADYDPSQPRKKKREAPLTGKKKRKSPFAAAVGQEKPVFEPGDKTFEEYLDEYYRLDYEDIIDDLPCRFKYRTVVPCDFGLSTEEILAADDKELNRWCSLKKTCMYRSEQEELRDKRAYSQKAQNSWKKRQVFKSLCREEAETPAEATGKPQRDEAGPQRQLPALDGSLMGPESPPAQEEEAPVSPHKKPAPQKRRRAKKARLLGPTVMLGGCEFSRQRLQAFGLNPKRLHFRQLGRQRRKQQGPKNSS

SEQ ID NO: 870155 - protein, 658 aa, Homo sapiens
MGHRTAMPEPRGSSQLRVNAAFAARYNRYREREELQRLKDRYGDRDSSSDSSSESDSSDERVEFDPQQERDFYKTLSLLKKKDPRIYQKDATFYNRTASSSDSEEDPEALEKQKKVRPMYLKDYERKVILEKAGKYVDEENSDGETSNHRLQETSSQSYVEEQKQLKESFRAFVEDSEDEDGAGEGGSSLLQKRAKTRQEKAQEEADYIEWLKGQKEIRNPDSLKELTHLKEYWNDPELDEGERFLRDYILNKRYEEEEEEEEDEEEMEEEKGVHGPPVQLAVDDSSDEGELFLKKQEDFEQKYNFRFEEPDSASVKTYPRSIASSVRRKDERRKEKREETRERKKREKAKKQEELKQLKNLKRKEILAKLEKLRKVTGNEMLGLEEGDLEDDFDPAQHDQLMQKCFGDEYYGAVEEEKPQFEEEEGLEDDWNWDTWDGPEQEGDWSQQELHCEDPNFNMDADYDPSQPRKKKREAPLTGKKKRKSPFAAAVGQEKPVFEPGDKTFEEYLDEYYRLDYEDIIDDLPCRFKYRTVVPCDFGLSTEEILAADDKELNRWCSLKKTCMYRSEQEELRDKRAYSQKAQNSWKKRQVFKSLCREEAETPAEATGKPQRDEAGPQRQLPALDGSLMGPESPPALWEAEVKGSLEPRNWRPAWAT

SEQ ID NO: 870156 - protein, 448 aa, Homo sapiens
MARWRLGVNRPRVHGPPVQLAVDDSSDEGELFLKKQEDFEQKYNFRFEEPDSASVKTYPRSIASSVRRKDERRKEKREETRERKKREKAKKQEELKQLKNLKRKEILAKLEKLRKVTGNEMLGLEEGDLEDDFDPAQHDQLMQKCFGDEYYGAVEEEKPQFEEEEGLEDDWNWDTWDGPEQEGDWSQQELHCEDPNFNMDADYDPSQPRKKKREAPLTGKKKRKSPFAAAVGQEKPVFEPGDKTFEEYLDEYYRLDYEDIIDDLPCRFKYRTVVPCDFGLSTEEILAADDKELNRWCSLKKTCMYRSEQEELRDKRAYSQKAQNSWKKRQVFKSLCREEAETPAEATGKPQRDEAGPQRQLPALDGSLMGPESPPAQEEEAPVSPHKKPAPQKRRRAKKARLLGPTVMLGGCEFSRQRLQAFGLNPKRLHFRQLGRQRRKQQGPKNSS

SEQ ID NO: 870157 - protein, 493 aa, Homo sapiens
SRLPSDSRRHRRKVMWRNRNSSRKASGHLWRTVRTRTALGRAAPVCCRNVPKPGRRRVHGPPVQLAVDDSSDEGELFLKKQEDFEQKYNFRFEEPDSASVKTYPRSIASSVRRKDERRKEKREETRERKKREKAKKQEELKQLKNLKRKEILAKLEKLRKVTGNEMLGLEEGDLEDDFDPAQHDQLMQKCFGDEYYGAVEEEKPQFEEEEGLEDDWNWDTWDGPEQEGDWSQQELHCEDPNFNMDADYDPSQPRKKKREAPLTGKKKRKSPFAAAVGQEKPVFEPGDKTFEEYLDEYYRLDYEDIIDDLPCRFKYRTVVPCDFGLSTEEILAADDKELNRWCSLKKTCMYRSEQEELRDKRAYSQKAQNSWKKRQVFKSLCREEAETPAEATGKPQRDEAGPQRQLPALDGSLMGPESPPAQEEEAPVSPHKKPAPQKRRRAKKARLLGPTVMLGGCEFSRQRLQAFGLNPKRLHFRQLGRQRRKQQGPKNSS

SEQ ID NO: 870158 - protein, 548 aa, Homo sapiens
MGHRTAMPEPRGSSQLRVNAAFAARYNRYREREELQRLKDRYGDRDSSSDSSSESDSSDERVEFDPQQERDFYKTLSLLKKKDPRIYQKDATFYNRTASSSDSEEDPEALEKQKKVRPMYLKDYERKVILEKAGKYVDEENSDGETSNHRLQETSSQSYVEEQKQLKERVHGPPVQLAVDDSSDEGELFLKKQEDFEQKYNFRFEEPDSASVKTYPRSIASSVRRKDERRKEKREETRERKKRKCFGDEYYGAVEEEKPQFEEEEGLEDDWNWDTWDGPEQEGDWSQQELHCEDPNFNMDADYDPSQPRKKKREAPLTGKKKRKSPFAAAVGQEKPVFEPGDKTFEEYLDEYYRLDYEDIIDDLPCRFKYRTVVPCDFGLSTEEILAADDKELNRWCSLKKTCMYRSEQEELRDKRAYSQKAQNSWKKRQVFKSLCREEAETPAEATGKPQRDEAGPQRQLPALDGSLMGPESPPAQEEEAPVSPHKKPAPQKRRRAKKARLLGPTVMLGGCEFSRQRLQAFGLNPKRLHFRQLGRQRRKQQGPKNSS

SEQ ID NO: 870159 - protein, 417 aa, Homo sapiens
MGHRTAMPEPRGSSQLRVNAAFAARYNRYREREELQRLKDRYGDRDSSSDSSSESDSSDERVEFDPQQERDFYKTLSLLKKKDPRIYQKDATFYNRTASSSDSEEDPEALEKQKKVRPMYLKDYERKVILEKAGKYVDEENSDGETSNHRLQETSSQSYVEEQKQLKESFRAFVEDSEDEDGAGEGGSSLLQKRAKTRQEKGYWGLTGLLGDRVAGGWASADAQCYAFPQAQEEADYIEWLKGQKEIRNPDSLKELTHLKEYWNDPELDEGERFLRDYILNKRYEEEEEEEEDEEEMEEEKGVHGPPVQLAVDDSSDEGELFLKKQEDFEQKYNFRFEEPDSASVKTYPRSIASSVRRKDERRKEKREETRERKKRRKTKNDRKSIKQMKNTKRQGEYLRPKTEKKTDRKENRANGE

SEQ ID NO: 870160 - protein, 204 aa, Homo sapiens
MGHRTAMPEPRGSSQLRVNAAFAARYNRYREREELQRLKDRYGDRDSSSDSSSESDSSDERVEFDPQQERDFYKTLSLLKKKDPRIYQKDATFYNRTASSSDSEEDPEALEKQKKVRPMYLKDYERKVILEKAGKYVDEENSDRETSNHRLQGTRRSRSTWMSITGWTTRTSSTTCPVASSTAQWCPVTLASALRRSSLLTIRS

SEQ ID NO: 870161 - protein, 709 aa, Homo sapiens; identical to SEQ ID NO: 870152

SEQ ID NO: 870162 - protein, 613 aa, Homo sapiens
IRLGGGWVGIGRALEKQKKVRPMYLKDYERKVILEKAGKYVDEENSDGETSNHRLQETSSQSYVEEQKQLKESFRAFVEDSEDEDGAGEGGSSLLQKRAKTRQEKAQEEADYIEWLKGQKEIRNPDSLKELTHLKEYWNDPELDEGERFLRDYILNKRYEEEEEEEEDEEEMEEEKGVHGPPVQLAVDDSSDEGELFLKKQEDFEQKYNFRFEEPDSASVKTYPRSIASSVRRKDERRKEKREETRERKKREKAKKQEELKQLKNLKRKEILAKLEKLRKVTGNEMLGLEEGDLEDDFDPAQHDQLMQKCFGDEYYGAVEEEKPQFEEEEGLEDDWNWDTWDGPEQEGDWSQQELHCEDPNFNMDADYDPSQPRKKKREAPLTGKKKRKSPFAAAVGQEKPVFEPGDKTFEEYLDEYYRLDYEDIIDDLPCRFKYRTVVPCDFGLSTEEILAADDKELNRWCSLKKTCMYRSEQEELRDKRAYSQKAQNSWKKRQVFKSLCREEAETPAEATGKPQRDEAGPQRQLPALDGSLMGPESPPAQEEEAPVSPHKKPAPQKRRRAKKARLLGPTVMLGGCEFSRQRLQAFGLNPKRLHFRQLGRQRRKQQGPKNSS

SEQ ID NO: 870163 - protein, 709 aa, Homo sapiens; identical to SEQ ID NO: 870152

SEQ ID NO: 870164 - protein, 629 aa, Homo sapiens
MGHRTAMPEPRGSSQLRVNAAFAARYNRYREREELQRLKDRYGDRDSSSDSSSESDSSDERVEFDPQQERDFYKTLSLLKKKDPRIYQKDATFYNRTASSSDSEEDPEALEKQKKVRPMYLKDYERKVILEKAGKYVDEENSDGETSNHRLQETSSQSYVEEQKQLKESFRAFVEDSEDEDGAGEGGSSLLQKRAKTRQEKAQEEADYIEWLKGQKEIRNPDSLKELTHLKEYWNDPELDEGERFLRDYILNKRYEEEEEEEEDEEEMEEEKGVHGPPVQLAVDDSSDEGELFLKKQEDFEQKYNFRFEEPDSASVKTYPRSIASSVRRKDERRKEKREETRERKKREKAKKQEELKQLKNLKRKEILAKLEKLRKVTGNEMLGLEEGDLEDDFDPAQHDQLMQKCFGDEYYGAVEEEKPQFEEEEGLEDDWNWDTWDGPEQEGDWSQQELHCEDPNFNMDADYDPSQPRKKKREAPLTGKKKRKSPFAAAVGQEKPVFEPGDKTFEEYLDEYYRLDYEDIIDDLPCRFKYRTVVPCDFGLSTEEILAADDKELNRWCSLKKTCMYRSEQEELRDKRAYSQKAQNSWKKRQVFKSLCREEAETPGEATVNPQATVNPQATVNPQATVNP

SEQ ID NO: 870165 - protein, 341 aa, Homo sapiens
MGHRTAMPEPRGSSQLRVNAAFAARYNRYREREELQRLKDRYGDRDSSSDSSSESDSSDERVEFDPQQERDFYKTLSLLKKKDPRIYQKDATFYNRTASSSDSEEDPEALEKQKKVRPMYLKDYERKVILEKAGKYVDEENSDRETSNHRLQETSSQSYVEEQKQLKESFRAFVEDSEDEDGAGEGGSSLLQKRAKTRQEKAQEEADYIEWLKGQKEIRNPDSLKELTHLKEYWNDPELDEGERFLRDFYKTLSLLKKKDPRIYQKDATFYNRTASSSDSEEDPEALEKQKKVRPMYLKDYERKVILEKAGKYVDEENSDGETSNHRLQETSSQSYVEEPD

SEQ ID NO: 870166 - protein, 68 aa, Homo sapiens
SLNYCLLRRKNLTKGHKAEEETEASFRTGVEVHYKALEQKQKEGKCTWKRPSGQLERQVPHPASDVGF

SEQ ID NO: 870167 - protein, 349 aa, Homo sapiens
MAHQTGIHATEELKEFFAKARAGSVRLIKVVIEDEQLVLGASQEPVGRWDQDYDRAVLPLLDAQQPCYLLYRLDSQNAQGFEWLFLAWSPDNSPVRLKMLYAATRATVKKEFGGGHIKDELFGTVKDDLSFAGYQKHLSSCAAPAPLTSAERELQQIRINEVKTEISVESKHQTLQGLAFPLQPEAQRALQQLKQKMVNYIQMKLDLERETIELVHTEPTDVAQLPSRVPRDAARYHFFLYKHTHEGDPLESVVFIYSMPGYKCSIKERMLYSSCKSRLLDSVEQDFHLEIAKKIEIGDGAELTAEFLYDEVHPKQHAFKQAFAKPKGPGGKRGHKRLIRGPGENGDDS

SEQ ID NO: 870168 - protein, 235 aa, Homo sapiens
YLRLGTRLGVESDDLSFAGYQKHLSSCAAPAPLTSAERELQQIRINEVKTEISVESKHQTLQGLAFPLQPEAQRALQQLKQKMVNYIQMKLDLERETIELVHTEPTDVAQLPSRVPRDAARYHFFLYKHTHEGDPLESVVFIYSMPGYKCSIKERMLYSSCKSRLLDSVEQDFHLEIAKKIEIGDGAELTAEFLYDEVHPKQHAFKQAFAKPKGPGGKRGHKRLIRGPGENGDDS

SEQ ID NO: 870169 - protein, 344 aa, Homo sapiens
SSLDPPGPRRRLRARAAPSPRLPAAPVGGGAPLGAGPAAPPGKLREGRQPPPHPPPLLVQRALPGQGQAEGSDGADGAKRRAMAHQTGIHATEELKEFFAKARAGSVRLIKVVIEDEQLVLGASQEPVGRWDQDYDRAVLPLLDAQQPCYLLYRLDSQNAQGFEWLFLAWSPDNSPVRLKMLYAATRATVKKEFGGGHIKDELFGTVKDDLSFAGYQKHLSSCAAPAPLTSAERELQQIRINEVKTEISVESKHQTLQGLAFPLQPEAQRALQQLKQKMVNYIQMKLDLERETIELVHTEPTDVAQLPSRVPRDAAGTPFRLRDPCGGPFVCVCPIQPGPLRPT

SEQ ID NO: 870170 - protein, 249 aa, Homo sapiens
CPVARHTGCRTRRRTEPMRGAEPRVADQTGIQATEELKEFFAKARAGSVRLIKVVIEDEQLVLGASQEPVGRWDQDYDRAVLPLLDAQQPCYLLYRLDSQNAQGFEWLFLAWSPDNSPVRLKMLYAATRATVKKEFGGGHIKDELFGTVKDDLSFAGYQKHLSSCAAPAPLTSAERELQQIRINEVKTEISVESKHQTLQGLAFPLQPEAQRALQQLKQKMVNYIQMTLPGWLKGAGSGAWHEPGLPGS

SEQ ID NO: 870171 - protein, 104 aa, Homo sapiens
MLYSSCKSRLLDSVEQDFHLEIAKKVGALPRASPPQALSLQSPCGALGSWDDGRAGIVAVVLIIGHLRPKEQHAWPKAAQLIGGSEKSKSWLPCHVLSLGLETG

SEQ ID NO: 870172 - protein, 431 aa, Homo sapiens
SSLDPPGPRRRLRARAAPSPRLPAAPVGGGAPLGAGPAAPPGKLREGRQPPPHPPPLLVQRALPGQGQAEGSDGADGAKRRAMAHQTGIHATEELKEFFAKARAGSVRLIKVVIEDEQLVLGASQEPVGRWDQDYDRAVLPLLDAQQPCYLLYRLDSQNAQGFEWLFLAWSPDNSPVRLKMLYAATRATVKKEFGGGHIKDELFGTVKDDLSFAGYQKHLSSCAAPAPLTSAERELQQIRINEVKTEISVESKHQTLQGLAFPLQPEAQRALQQLKQKMVNYIQMKLDLERETIELVHTEPTDVAQLPSRVPRDAARYHFFLYKHTHEGDPLESVVFIYSMPGYKCSIKERMLYSSCKSRLLDSVEQDFHLEIAKKIEIGDGAELTAEFLYDEVHPKQHAFKQAFAKPKGPGGKRGHKRLIRGPGENGDDS

SEQ ID NO: 870173 - protein, 262 aa, Homo sapiens
MAHQTGIHATEELKEFFAKARAGSVRLIKVVIEDEQLVLGASQEPVGRWDQDYDRAVLPLLDAQQPCYLLYRLDSQNAQGFEWLFLAWSPDNSPVRLKMLYAATRATVKKEFGGGHIKDELFGTVKDDLSFAGYQKHLSSCAAPAPLTSAERELQQIRINEVKTEISVESKHQTLQGLAFPLQPEAQRALQQLKQKMVNYIQMKLDLERETIELVHTEPTDVAQLPSRVPRDAAGTPFRLRDPCGGPFVCVCPIQPGPLRPT

SEQ ID NO: 870174 - protein, 431 aa, Homo sapiens; identical to SEQ ID NO: 870172

SEQ ID NO: 870175 - protein, 307 aa, Homo sapiens
SSLDPPGPRRRLRARAAPSPRLPAAPVGGGAPLGAGPAAPPGKLREGRQPPPHPPPLLVQRALPGQGQAEGSDGADGAKRRAMAHQTGIHATEELKEFFAKARAGSVRLIKVVIEDEQLVLGASQEPVGRWDQDYDRAVLPLLDAQQPCYLLYRLDSQNAQGFEWLFLAWSPDNSPVRLKMLYAATRATVKKEFGGGHIKDELFGTVKDDLSFAGYQKHLSSCAAPAPLTSAERELQQIRINEVKTEISVESKHQTLQGLAFPLQPEAQRALQQLKQKMVNYIQMTLPGWLKGAGSGAWHEPGLPGS

SEQ ID NO: 870176 - protein, 218 aa, Homo sapiens
SSLDPPGPRRRLRARAAPSPRLPAAPVGGGAPLGAGPAAPPGKLREGRQPPPHPPPLLVQRALPGQGQAEGSDGADGAKRRAMAHQTGIHATEELKEFFAKARAGSVRLIKVVIEDEQLVLGASQEPVGRWDQDYDRAVLPLLDAQQPCYLLYRLDSQNAQGFEWLFLAWSPDNSPGAVLVMSAWFLLAPLLCVTCWNSMAVLDGGPLVHGLSSSGLF

SEQ ID NO: 870177 - protein, 120 aa, Homo sapiens
LVEGFALLNGRNSSPSPLHARYNQPSGCAAFGITQDLGMGTHPCLHCLVCWLPCSLVLFLHVCFCKLPQCPPSSAVVLLCVPWSPVRRGDTSPRRRCRCRRAAASSAPAAAFPAPWSSPR

SEQ ID NO: 870178 - protein, 95 aa, Homo sapiens
DGRGGPRTLHGCRGTARRAGSGRIHPPPPGGRPRLELESVDPGAGKGGVCRPWGSGDPSPRDGSCSLSGAQWGWGQRKVPVARTCSIDWSGGGLG

SEQ ID NO: 870179 - protein, 181 aa, Homo sapiens
  misc_feature (1)..(1): Xaa can be any naturally occurring amino acid
  misc_feature (7)..(7): Xaa can be any naturally occurring amino acid
XPCTEWXINLTSTFLRKNQCETRTKWLLITRCGWDWPCWGCWATCRQHRRPRSPCSPTSSRTSSWGAGSARASPPTRAGSGRRRRRCPCASPSAPTATGVPDWGSTYSVSVVETDYDQYALLYSQGSKGPGEDFRMATLYSRTQTPRAELKEKFTAFCKAQGFTEDTIVFLPQTDKCMTEQ

SEQ ID NO: 870180 - protein, 228 aa, Homo sapiens
DKEAILRPLLQVLVGCRREQLHGDKDQYLPAPMWNPDCCQDTVILAAPPAHLPRSPTPLAPGPGHPLCCRRMATHHTLWMGLALLGVLGDLQAAPEAQVSVQPNFQQDKFLGRWFSAGLASNSSWLREKKAALSMCKSVVAPATDGGLNLTSTFLRKNQCETRTMLLQPAGSLGSYSYRSPRLGQHLLRVSGGDRLRPVRAAVQPGQQGPWRGLPHGHPLQPNPDPQG

SEQ ID NO: 870181 - protein, 180 aa, Homo sapiens
GWYRSECMDPLAPGPGHPLCCRRMATHHTLWMGLALLGVLGDLQAAPEAQVSVQPNFQQDKFLGRWFSAGLASNSSWLREKKAALSMCKSVVAPATDGGLNLTSTFLRKNQCETRTMLLQPAGSLGSYSYRSPRLGQHLLRVSGGDRLRPVRAAVQPGQQGPWRGLPHGHPLQPNPDPQG

SEQ ID NO: 870182 - protein, 214 aa, Homo sapiens
RGCEGRGHLLGRGCEGRGQLLGRRCEGRGHLLGRGLRGGGQFLGRGVRGVAARGIGRGGGAGLETGGVDGRGAPAGRRRWVRRVLADAGGGRSPQFLGRWFSAGLASNSSWLREKKAALSMCKSVVAPATDGGLNLTSTFLRKNQCETRTMLLQPAGSLGSYSYRSPRLGQHLLRVSGGDRLRPVRAAVQPGQQGPWRGLPHGHPLQPNPDPQG

SEQ ID NO: 870183 - protein, 157 aa, Homo sapiens
MATHHTLWMGLALLGVLGDLQAAPEAQVSVQPNFQQDKFLGRWFSAGLASNSSWLREKKAALSMCKSVVAPATDGGLNLTSTFLRKNQCETRTMLLQPAGSLGSYSYRSPRLGQHLLRVSGGDRLRPVRAAVQPGQQGPWRGLPHGHPLQPNPDPQG

SEQ ID NO: 870184 - protein, 228 aa, Homo sapiens; identical to SEQ ID NO: 870180

SEQ ID NO: 870185 - protein, 228 aa, Homo sapiens; identical to SEQ ID NO: 870180

SEQ ID NO: 870186 - protein, 190 aa, Homo sapiens
RQRSHSASSSPSPSRVTSRTTPRRQGSVSPCSNVESRLLPRYSHSGGSSCTPPSLSHTTGTRPRTPALLQEFLGRWFSAGLASNSSWLREKKAALSMCKSVVAPATDGGLNLTSTFLRKNQCETRTMLLQPAGSLGSYSYRSPRLGQHLLRVSGGDRLRPVRAAVQPGQQGPWRGLPHGHPLQPNPDPQG

SEQ ID NO: 870187 - protein, 228 aa, Homo sapiens; identical to SEQ ID NO: 870180

SEQ ID NO: 870188 - protein, 228 aa, Homo sapiens; identical to SEQ ID NO: 870180

SEQ ID NO: 870189 - protein, 302 aa, Homo sapiens
DKEAILRPLLQVLVGCRREQLHGDKDQYLPAPMWNPDCCQDTVILAAPPAHLPRSPTPLAPGPGHPLCCRRMATHHTLWMGLALLGVLGDLQAAPEAQVSVQPNFQQDKFLGRWFSAGLASNSSWLREKKAALSMCKSVVAPATDGGLNLTSTFLRKNQCETRTMLLQPAGSLGSYSYRSPRLGQHLLRVSGGDRLRPVRAAVQPGQQGPWRGLPHGHPLQVRAPWTPPTRRPDQRGLPKTQGRAHSIPPAEASSVSTLSQGRTQTPRAELKEKFTAFCKAQGFTEDTIVFLPQTDKCMTEQ

SEQ ID NO: 870190 - protein, 445 aa, Homo sapiens
DKEAILRPLLQVLVGCRREQLHGDKDQYLPAPMWNPDCCQDTVILAAPPAHLPRSPTPLAPGPGHPLCCRRMATHHTLWMGLALLGVLGDLQAAPEAQVSVQPNFQQDKFLGRWFSAGLASNSSWLREKKAALSMCKSVVAPATDGGLNLTSTFLRKNQCETRTMLLQPAGSLGSYSYRSPREWGLHRPPGPSLGATLAGTTLGQPPAAEIHGVGGDGCPTSVRGKGQAWAVTTHAQVLGTERPFLQGVGSSLEPTIVLSGPFPALWSFPHISSPPRPLHMPPPNSPPQDPGVSSLPPGEWLPRGNLFTSGSGSDFCGCTRNPGFLSLAPPDSGLGTGFTGCAGESRALAGEQPGGGASRASRGAECPQSPQVHPFPEAEVRFGGLSPRQGCLLGSQTGAAPTPCQWWRPTTTSTRCCTARAARALARTSAWPPSTAEPRPPGLS

SEQ ID NO: 870191 - protein, 285 aa, Homo sapiens
  misc_feature (215)..(215): Xaa can be any naturally occurring amino acid
DKEAILRPLLQVLVGCRREQLHGDKDQYLPAPMWNPDCCQDTVILAAPPAHLPRSPTPLAPGPGHPLCCRRMATHHTLWMGLALLGVLGDLQAAPEAQVSVQPNFQQDKFLGRWFSAGLASNSSWLREKKAALSMCKSVVAPATDGGLNLTSTFLRKNQCETRTMLLQPAGSLGSYSYRSPRLGQHLLRVSGGDRLRPVRAAVQPGQQGGPLGGXREKGGKPFFPLGNWGPPNPPVLNSRKPQDRRTQTPRAELKEKFTAFCKAQGFTEDTIVFLPQTDKCMTEQ

SEQ ID NO: 870192 - protein, 431 aa, Homo sapiens
RGCEGRGHLLGRGCEGRGQLLGRRCEGRGHLLGRGLRGGGQFLGRGVRGVAARGIGRGGGAGLETGGVDGRGAPAGRRRWVRRVLADAGGGRSPQFLGRWFSAGLASNSSWLREKKAALSMCKSVVAPATDGGLNLTSTFLRKNQCETRTMLLQPAGSLGSYSYRSPREWGLHRPPGPSLGATLAGTTLGQPPAAEIHGVGGDGCPTSVRGKGQAWAVTTHAQVLGTERPFLQGVGSSLEPTIVLSGPFPALWSFPHISSPPRPLHMPPPNSPPQDPGVSSLPPGEWLPRGNLFTSGSGSDFCGCTRNPGFLSLAPPDSGLGTGFTGCAGESRALAGEQPGGGASRASRGAECPQSPQVHPFPEAEVRFGGLSPRQGCLLGSQTGAAPTPCQWWRPTTTSTRCCTARAARALARTSAWPPSTAEPRPPGLS

SEQ ID NO: 870193 - protein, 236 aa, Homo sapiens
RQRSHSASSSPSPSRVTSRTTPRRQGSVSPCSNVESRLLPRYSHSGGSSCTPPSLSHTTGTRPRTPALLQENGYSSHAVDGTGPAGGAGRPAGSTGGPGLRAAQLPAGQVPGALVQRGPRLQLELAPGEEGGVVHVQVCGGPCHGWWPQPDLHLPQDWGSTYSVSVVETDYDQYALLYSQGSKGPGEDFRMATLYSRTQTPRAELKEKFTAFCKAQGFTEDTIVFLPQTDKCMTEQ

SEQ ID NO: 870194 - protein, 218 aa, Homo sapiens
DKEAILRPLLQVLVGCRREQLHGDKDQYLPAPMWNPDCCQDTVILAAPPAHLPRSPTPLAPGPGHPLCCRRMATHHTLWMGLALLGVLGDLQAAPEAQVSVQPNFQQDKFLGRWFSAGLASNSSWLREKKAALSMCKSVVAPATDGGLNLTSTFLRKNQCETRTMLLQPAGSLGSYSYRSPRLGQHLLRVSGGDRLDEFRHHHDDSARRRRFRTTTIP

SEQ ID NO: 870195 - protein, 194 aa, Homo sapiens
RQRSHSASSSPSPSRVTSRTTPRRQGSVSPCSNVESRLLPRYSHSGGSSCTPPSLSHTTGTRPRTPALLQENGYSSHAVDGTGPAGGAGRPAGSTGGPGLRAAQLPAGQVPGALVQRGPRLQLELAPGDDQYALLYSQGSKGPGEDFRMATLYSRTQTPRAELKEKFTAFCKAQGFTEDTIVFLPQTDKCMTEQ

SEQ ID NO: 870196 - protein, 232 aa, Homo sapiens
RQRSHSASSSPSPSRVTSRTTPRRKDQYLPAPMWNPDCCQDTVILAAPPAHLPRSPTPLAPGPGHPLCCRRMATHHTLWMGLALLGVLGDLQAAPEAQVSVQPNFQQDKFLGRWFSAGLASNSSWLREKKAALSMCKSVVAPATDGGLNLTSTFLRKTSVKTRTMLLDALSVGREGGREAGASRTYREMLYSRGTLEMARPRRRTKGKKKFAAEARKVRAAGEQVEKRDSCE

SEQ ID NO: 870197 - protein, 230 aa, Homo sapiens
DKEAILRPLLQVLVGCRREQLHGDKDQYLPAPMWNPDCCQDTVILAAPPAHLPRSPTPLAPGPGHPLCCRRMATHHTLWMGLALLGVLGDLQAAPEAQVSVQPNFQQDKDWGSTYSVSVVETDYDQYALLYSQGSKGPGEDFRMATLYKYVPLWTPPTRRPDQRGLPKTQGRAHSIPPAEASSVSTLSQGRTQTPRAELKEKFTAFCKAQGFTEDTIVFLPQTDKCMTEQ

SEQ ID NO: 870198 - protein, 247 aa, Homo sapiens
DKEAILRPLLQVLVGCRREQLHGDKDQYLPAPMWNPDCCQDTVILAAPPAHLPRSPTPLAPGPGHPLCCRRMATHHTLWMGLALLGVLGDLQAAPEAQVSVQPNFQQDKVRGFPASSPRATGPCQGKGTFRLGLPPGRSERSPAVPGSAGQGLSGRAGRRLGSRPRRLPARSPPWAPRPVSPDGPRRHRATHAPTPARHVHPCGHATPRGHTSARSTPGCQDTGGWGTGMATNTPCAVGVGRDAHRT

SEQ ID NO: 870199 - protein, 134 aa, Homo sapiens
RQRSHSASSSPSPSRVTSRTTPRRQGSVSPCSNVESRLLPRYSHSGGSSCTPPSLSHTTGTRPRTPALLQENGYSSHAVDGTGPAGGAGRPAGSTGGPKRPDNPATDQYRLPKSRDDNQRYRQATQSTKRDDLK

SEQ ID NO: 870200 - protein, 157 aa, Homo sapiens; identical to SEQ ID NO: 870183

SEQ ID NO: 870201 - protein, 228 aa, Homo sapiens; identical to SEQ ID NO: 870180

SEQ ID NO: 870202 - protein, 214 aa, Homo sapiens; identical to SEQ ID NO: 870182

SEQ ID NO: 870203 - protein, 191 aa, Homo sapiens
  misc_feature (7)..(7): Xaa can be any naturally occurring amino acid
SWYGRGXWMAPPAHLPRSPTPLAPGPGHPLCCRRMATHHTLWMGLALLGVLGDLQAAPEAQVSVQPNFQQDKFLGRWFSAGLASNSSWLREKKAALSMCKSVVAPATDGGLNLTSTFLRKNQCETRTMLLQPAGSLGSYSYRSPRLGQHLLRVSGGDRLRPVRAAVQPGQQGPWRGLPHGHPLQPNPDPQG

SEQ ID NO: 870204 - protein, 228 aa, Homo sapiens; identical to SEQ ID NO: 870180

SEQ ID NO: 870205 - protein, 228 aa, Homo sapiens; identical to SEQ ID NO: 870180

SEQ ID NO: 870206 - protein, 228 aa, Homo sapiens; identical to SEQ ID NO: 870180

SEQ ID NO: 870207 - protein, 445 aa, Homo sapiens; identical to SEQ ID NO: 870190

SEQ ID NO: 870208 - protein, 262 aa, Homo sapiens
DKEAILRPLLQVLVGCRREQLHGDKDQYLPAPMWNPDCCQDTVILAAPPAHLPRSPTPLAPGPGHPLCCRRMATHHTLWMGLALLGVLGDLQAAPEAQVSVQPNFQQDKFLGRWFSAGLASNSSWLREKKAALSMCKSVVAPATDGGLNLTSTFLRKNQCETRTMLLQPAGSLGSYSYRSPREWGLHRPPGPSLGATLAGTTLGQPPAAEIHGVGGLGQHLLRVSGGDRLRPVRAAVQPGQQGPWRGLPHGHPLQPNPDPQG

SEQ ID NO: 870209 - protein, 221 aa, Homo sapiens
DKEAILRPLLQVLVGCRREQLHGDKDQYLPAPMWNPDCCQDTVILAAPPAHLPRSPTPLAPGPGHPLCCRRMATHHTLWMGLALLGVLGDLQAAPEAQVSVQPNFQQDKFLGRWFSAGLASNSSWLREKKAALSMCKSVVAPATDGGLNLTSTFLRKNQCETRTMLLQPAGSLGSYSYRSPRLGQHLLRVSGGDRLRPVRAAVQPGQQGPWRGLPHGHPLQ

SEQ ID NO: 870210 - protein, 234 aa, Homo sapiens
DKEAILRPLLQVLVGCRREQLHGDKDQYLPAPMWNPDCCQDTVILAAPPAHLPRSPTPLAPGPGHPLCCRRMATHHTLWMGLALLGVLGDLQAAPEAQVSVQPNFQQDKFLGRWFSAGLASNSSWLREKKAALSMCKSVVAPATDGGLNLTSTFLRKNQCETRTMLLQPAGSLGSYSYRSPRLGQHLLRVSGGDRLRPVRAAVQPGQQGPWRGLPHGHPLHIRSPIRSSGQRSS

SEQ ID NO: 870211 - protein, 231 aa, Homo sapiens
DKEAILRPLLQVLVGCRREQLHGDKDQYLPAPMWNPDCCQDTVILAAPPAHLPRSPTPLAPGPGHPLCCRRMATHHTLWMGLALLGVLGDLQAAPEAQVSVQPNFQQDKFLGRWFSAGLASNSSWLREKKAALSMCKSVVAPATDGGLNLTSTFLRKNQCETRTMLLQPAGSLGSYSYRSPREWGLHRPPGPSLGATLAGTTLGQPPAAEIHGVGGDGCPTSVRGKGQAWA

SEQ ID NO: 870212 - protein, 231 aa, Homo sapiens; identical to SEQ ID NO: 870211

SEQ ID NO: 870213 - protein, 190 aa, Homo sapiens; identical to SEQ ID NO: 870186

SEQ ID NO: 870214 - protein, 136 aa, Homo sapiens
MAAVPNGSRSQCGPHALVALAGLVTGIPTHHPRVYNIHSRTVTRYPANSIVVVGGCPVCRVGVLEDCFTFLGIFLAIILFRIGPAAIGQWQPPNGSRTQTPRAELKEKFTAFCKAQGFTEDTIVFLPQTDKCMTEQ

SEQ ID NO: 870215 - protein, 140 aa, Homo sapiens
GVSVQVRTSLPQPLHEEPPPWGTWRPGAHSVPGPSSSQDVGLQPGGGHRVEGAHGGYRGTNHTGLRHSLLGVDSLLLAEVEKDPLFVSSAQGEVGGDGGSVQFGGSVKTSSALREEQEAQWENWPKSGVLTTAPGFFLGR

SEQ ID NO: 870216 - protein, 145 aa, Homo sapiens
MGACMYMQQVSLKIQVSEGHLCHSTVKNLKLNMTFQFIKILWPIWPLEFLPGLTSLQVPVTCQSAQSPLPPPPSTLHVHPPCSNFPQVLMLNRLAINQTVFVLPVFSGYISPLFSYIIYILQYLFFKVPVGIEQVKGGLTLVPEY

SEQ ID NO: 870217 - protein, 141 aa, Homo sapiens
MSFSLNFTLPANTTSSPVTGGKETDCGPSLGLAAGIPLLVATALLVALLFTLIHRRRSSIEAMEESDRPCEISEIDDNPKISENPRRSPTHEKNTMGAQEAHIYVKTVAGSEEPVHDRYRPTIEMERRRGLWWLVPRLSLE

SEQ ID NO: 870218 - protein, 223 aa, Homo sapiens
KGARAPERGGSGGLALPEGQSQGHAGARDSAFRAARRLSASVPRPGAAGGMIRHAGAPARGDPTGPVPVVGKGEEEEEEDGMRLCLPANPKNCLPHRRGISILEKLIKTCPVWLQLSLGQAEVARILHRVVAGMFLVRRDSSSKQLVLCVHFPSLNESSAEVLEYTIKEEKSILYLEGSALVFEDIFRLIAFYCVSRDLLPFTLRLPQAILEASSFTGHSHRR

SEQ ID NO: 870219 - protein, 981 aa, Homo sapiens
KGARAPERGGSGGLALPEGQSQGHAGARDSAFRAARRLSASVPRPGAAGGMIRHAGAPARGDPTGPVPVVGKGEEEEEEDGMRLCLPANPKNCLPHRRGISILEKLIKTCPVWLQLSLGQAEVARILHRVVAGMFLVRRDSSSKQLVLCVHFPSLNESSAEVLEYTIKEEKSILYLEGSALVFEDIFRLIAFYCVSRDLLPFTLRLPQAILEASSFTDLETIANLGLGFWDSSLNPPQERGKPAEPPRDRAPGFPLVSSLRPTAHDANCACEIELSVGNDRLWFVNPIFIEDCSSALPTDQPPLGNCPARPLPPPLMPPHPPPGPPDHPNQPPMMTCERLPCPTAGLGPLREEAMKPGAASSPLQQVPAPPLPAKKNLPTAPPRRRVSERVSLEDQSPGMAAEGDQLSLPPQGTSDGPEDTPRESTEQGQDTEVKASDPHSMPELPRTAKQPPVPPPRKKRISRQLASTLPAPLENAELCTQAMALETPTPGPPREGQSPASQAGTQHPPAQATAHSQSSPEFKGSLASLSDSLGVSVMATDQDSYSTSSTEEELEQFSSPSVKKKPSMILGKARHRLSFASFSSMFHAFLSNNRKLYKKVVELAQDKGSYFGSLVQDYKVYSLEMMARQTSSTEMLQEIRTMMTQLKSYLLQSTELKALVDPALHSEEELEAIVESALYKCVLKPLKEAINSCLHQIHSKDGSLQQLKENQLVILATTTTDLGVTTSVPEVPMMEKILQKFTSMHKAYSPEKKISILLKTCKLIYDSMALGNPGKPYGADDFLPVLMYVLARSNLTEMLLNVEYMMELMDPALQLGEGSYYLTTTYGALEHIKSYDKITVTRQLSVEVQDSIHRWERRRTLNKARASRSSVQDFICVSYLEPEQQARTLASRADTQAQALCAQCAEKFAVERPQAHRLFVLVDGRCFQLADDALPHCIKGYLLRSEPKRDFHFVYRPLDGGGGGGGGSPPCLVVREPNFL

SEQ ID NO: 870220 - protein, 786 aa, Homo sapiens
KGARAPERGGSGGLALPEGQSQGHAGARDSAFRAARRLSASVPRPGAAGGMIRHAGAPARGDPTGPVPVVGKGEEEEEEDGMRLCLPANPKNCLPHRRGISILEKLIKTCPVWLQLSLGQAEVARILHRVVAGMFLVRRDSSSKQLVLCVHFPSLNESSAEVLEYTIKEEKSILYLEGSALVFEDIFRLIAFYCVSRDLLPFTLRLPQAILEASSFTDLETIANLGLGFWDSSLNPPQERGKPAEPPRDRAPGFPLVSSLRPTAHDANCACEIELSVGNDRLWFVNPIFIEDCSSALPTDQPPLGNCPARPLPPPLMPPHPPPGPPDHPNQPPMMTCERLPCPTAGLGPLREEAMKPGAASSPLQQVPAPPLPAKKNLPTAPPRRRVSERVSLEDQSPGMAAEGDQLSLPPQGTSDGPEDTPRESTEQGQDTEVKASDPHSMPELPRTAKQPPVPPPRKKRISRQLASTLPAPLENAELCTQAMALETPTPGPPREGQSPASQAGTQHPPAQATAHSQSSPEFKGSLASLSDSLGVSVMATDQDSYSTSSTEEELEQFSSPSVKKKPSMILGKARHRLSFASFSSMFHAFLSNNRKLYKKVVELAQDKGSYFGSLVQDYKVYSLEMMARQTSSTEMLQEIRTMMTQLKSYLLQSTELKALVDPALHSEEELEAIVESALYKCVLKPLKEAINSCLHQIHSKDGSLQQLKENQLVILATTTTDLGVTTSVPEVPMMEKILQKFTSMHKAYSPEKKISILLKTCKLIYDSMALGNPATSRRCFSMWST

SEQ ID NO: 870221 - protein, 361 aa, Homo sapiens
MGGGRYPHFTAGARRIKATQAVGAKAKPGRCGAGSLGVEDGGRAPCSCCECPAPARRRRLALPALLMPGLPHRLRPASFTRSPPALPIPAPRSSSEPQGSCSPKGLDCVARPHYGMPGRARTSFLSVLPSVPSIAPGVQGTHLEGGREGMNEGMNDGEPVDQQPGDAPAPLCRDSETRLNSSPRTVGPAGKPGREGDGPPAGSRQRRERRRCRTRRQLGARHPLSIQGGAWAGRGRLRRQGPAVTTGPSRLLQDFICVSYLEPEQQARTLASRADTQAQALCAQCAEKFAVERPQAHRLFVLVDGRCFQLADDALPHCIKGYLLRSEPKRDFHFVYRPLDGGGGGGGGSPPCLVVREPNFL

SEQ ID NO: 870222 - protein, 192 aa, Homo sapiens
KGARAPERGGSGGLALPEGQSQGHAGARDSAFRAARRLSASVPRPGAAGGMIRHAGAPARGDPTGPVPVVGKGEEEEEEDGMRLCLPANPKNCLPHRRGISILEKLIKTCPVWLQLSLGQAEVARILHRVVAGMFLVRRDSSSKQLVLCVHFPSLNESSAEVLEYTIKEEKSTFPFSASNTGVGPGKKYIMR

SEQ ID NO: 870223 - protein, 125 aa, Homo sapiens
CLSPRAQFVRCNREDADHQFSAEFVKGSRIPLPMLAFGTLLEQNHCLEREKEKRVSVNMLALGETSMFLVRRDSSSKQLVLCVHFPSLNESSAEVLEYTIKEEKSTFPFSASNTGVGPGKKYIMR

SEQ ID NO: 870224 - protein, 770 aa, Homo sapiens
PSPWHRLTPCPSLASTGFWDSSLNPPQERGKPAEPPRDRAPGFPLVSSLRPTAHDANCACEIELSVGNDRLWFVNPIFIEDCSSALPTDQPPLGNCPARPLPPPLMPPHPPPGPPDHPNQPPMMTCERLPCPTAGLGPLREEAMKPGAASSPLQQVPAPPLPAKKNLPTAPPRRRVSERVSLEDQSPGMAAEGDQLSLPPQGTSDGPEDTPRESTEQGQDTEVKASDPHSMPELPRTAKQPPVPPPRKKRISRQLASTLPAPLENAELCTQAMALETPTPGPPREGQSPASQAGTQHPPAQATAHSQSSPEFKGSLASLSDSLGVSVMATDQDSYSTSSTEEELEQFSSPSVKKKPSMILGKARHRLSFASFSSMFHAFLSNNRKLYKKVVELAQDKGSYFGSLVQDYKVYSLEMMARQTSSTEMLQEIRTMMTQLKSYLLQSTELKALVDPALHSEEELEAIVESALYKCVLKPLKEAINSCLHQIHSKDGSLQQLKENQLVILATTTTDLGVTTSVPEVPMMEKILQKFTSMHKAYSPEKKISILLKTCKLIYDSMALGNPGKPYGADDFLPVLMYVLARSNLTEMLLNVEYMMELMDPALQLGEGSYYLTTTYGALEHIKSYDKITVTRQLSVEVQDSIHRWERRRTLNKARASRSSVQDFICVSYLEPEQQARTLASRADTQAQALCAQCAEKFAVERPQAHRLFVLVDGRCFQLADDALPHCIKGYLLRSEPKRDFHFVYRPLDGGGGGGGGSPPCLVVREPNFL

SEQ ID NO: 870225 - protein, 757 aa, Homo sapiens
KGARAPERGGSGGLALPEGQSQGHAGARDSAFRAARRLSASVPRPGAAGGMIRHAGAPARGDPTGPVPVVGKGEEEEEEDGMRLCLPANPKNCLPHRRGISILEKLIKTCPVWLQLSLGQAEVARILHRVVAGMFLVRRDSSSKQLVLCVHFPSLNESSAEVLEYTIKEEKSILYLEGSALVFEDIFRLIAFYCVSRDLLPFTLRLPQAILEASSFTDLETIANLGLGFWDSSLNPPQERGKPAEPPRDRAPGFPLVSSLRPTAHDANCACEIELSVGNDRLWFVNPIFIEDCSSALPTDQPPLGNCPARPLPPPLMPPHPPPGPPDHPNQPPMMTCERLPCPTAGLGPLREEAMKPGAASSPLQQVPAPPLPAKKNLPTAPPRRRVSERVSLEDQSPGMAAEGDQLSLPPQGTSDGPEDTPRESTEQGQDTEVKASDPHSMPELPRTAKQPPVPPPRKKRISRQLASTLPAPLENAELCTQAMALETPTPGPPREGQSPASQAGTQHPPAQATWPNFPQEASPGSFKGASPWAYPSSKNQLWRGWSCSWATRTKGTSYDSKPGKAREGTELEASFRQAPQAGETQQKPPPMILGPRARATRLEPLARFPRQASVPQLFRPPNNRQGCYKKGWVEPWAARDKGALGTFCGEAWVPVTYPGMYKPWKMNWPAAHEPIPSHWGGNCFGKGSEFSAPSRWNRQAFQESLTKSVHENNAETLYRAPGRVNPAALGTSRSERELRKADCVRGPCLGTPKWYP

SEQ ID NO: 870226 - protein, 154 aa, Homo sapiens
KPYGADDFLPVLMYVLARSNLTEMLLNVEYMMELMDPALQLGEGESPPPAHQVHCTPPTQPRHGHSRWPNKHLLDARLWLSSGPMDANVNPTQVLSCRSSQIRGRDEPVKRLCHLHVTSAGIVGIPEGIGACYPDCAVREGFLEEVTSELSNEG

SEQ ID NO: 870227 - protein, 119 aa, Homo sapiens
SLIKLIPPPPEEEMAESLRSPRRSLYKLVGSPPWKEAFRQRCLERMRNSRDRLLNRYRQAGSSGPGNSQNSFLVQEVMEEEWNALQSVENCPEDLAQLEELIDMAVLEEIQQELINQGL

SEQ ID NO: 870228 - protein, 219 aa, Homo sapiens
MAESLRSPRRSLYKLVGSPPWKEAFRQRCLERMRNSRDRLLNRYRQAGSSGPGNSQNSFLVQEVMEEEWNALQSVENCPEDLAQLEELIDMAVLEEIQQELINQEQSIISEYEKSLQFDEKCLSIMLAEWEANPLICPVCTKYNLRITSGVVVCQCGLSIPSHSSELTEQKLRACLEGSINEHSAHCPHTPEFSVTGGTEEKSSLLMSCLACDTWAVIL

SEQ ID NO: 870229 - protein, 219 aa, Homo sapiens; identical to SEQ ID NO: 870228

SEQ ID NO: 870230 - protein, 142 aa, Homo sapiens
MAESLRSPRRSLYKLVGSPPWKEAFRQRCLERMRNSRDRLLNRYRQAGSSGPGNSQNSFLVQEVMEEEWNALQSVENCPEDLAQLEELIDMAVLEEIQQELINQEQSIISEYEKSLQFDEKCLSIMLAEWEANPLICPVCTK

SEQ ID NO: 870231 - protein, 126 aa, Homo sapiens [sequence omitted]

SEQ ID NO: 870232 - protein, 172 aa, Homo sapiens
MAESLRSPRRSLYKLVGSPPWKEAFRQRCLERMRNSRDRLLNRYRQAGSSGPGNSQNSFLVQEVMEEEWNALQSVENCPEDLAQLEELIDMAVLEEIQQELINQEQSIISEYEKSLQFDEKCLSIMLAEWEANPLICPVCTKYNLRITSGVVVCQCGLSIPSHACDTWAVIL

SEQ ID NO: 870233 - protein, 172 aa, Homo sapiens; identical to SEQ ID NO: 870232

SEQ ID NO: 870234 - protein, 148 aa, Homo sapiens
MAESLRSPRRSLYKLVGSPPWKEAFRQRCLERMRNSRDRLLNRYRQAGSSGPGNSQNSFLVQEVMEEEWNALQSVENCPEDLAQLEELIDMAVLEEIQQELINQEQSIISEYEKSLQFDEKCLSIMLAEWEANPLICPVCTKPVILGL

SEQ ID NO: 870235 - protein, 142 aa, Homo sapiens; identical to SEQ ID NO: 870230

SEQ ID NO: 870236 - protein, 132 aa, Homo sapiens
MAESLRSPRRSLYKLVGSPPWKEAFRQRCLERMRNSRDRLLNRYRQAGSSGPGNSQNSFLVQEVMEEEWNALQSVENCPEDLAQLEELIDMAVLEEIQQELINQEVTPSSSPSLPVFSYWNTVTFPPIRISL

SEQ ID NO: 870237 - protein, 106 aa, Homo sapiens
MAESLRSPRRSLYKLVGSPPWKEAFRQRCLERMRNSRDRLLNRYRQAGSSGPGNSQNSFLVQEVMEEEWNALQSVENCPEDLAQLEELIDMAVLEEIQQELINQGL

SEQ ID NO: 870238 - protein, 145 aa, Homo sapiens
MAESLRSPRRSLYKLVGSPPWKEAFRQRCLERMRNSRDRLLNRYRQAGSSGPGNSQNSFLVQEVMEEEWNALQSVENCPEDLAQLEELIDMAVLEEIQQELINQEQSIISEYEKSLQFDEKCLSIMLAEWEANPLICPVCTNLLS

SEQ ID NO: 870239 - protein, 235 aa, Homo sapiens
MPKSVSTWGRSIKQHFPEYAAIHSRSAPGKYTSQGSVRASRERVLWLCLPRRGDGGVVEVSAPLPVQTGGLAALERGFPAEMPGENEKQPGQAPKQVPPGWKQWAREFSEQLSSSRGDGRRVECFAVSGELSRRLGSAGGADRHGCAGGNSTGADQPRYNLRITSGVVVCQCGLSIPSHSSELTEQKLRACLEGSINEHSAHCPHTPEFSVTGGTEEKSSLLMSCLACDTWAVIL

SEQ ID NO: 870240 - protein, 176 aa, Homo sapiens
MAESLRSPRRSLYKLVGSPPWKEAFRQRCLERMRNSRDRLLNRYRQAGSSGPGNSQNSFLVQEVCFAVSGELSRRLGSAGGADRHGCAGGNSTGADQPRYNLRITSGVVVCQCGLSIPSHSSELTEQKLRACLEGSINEHSAHCPHTPEFSVTGGTEEKSSLLMSCLACDTWAVIL

SEQ ID NO: 870241 - protein, 148 aa, Homo sapiens; identical to SEQ ID NO: 870234

SEQ ID NO: 870242 - protein, 142 aa, Homo sapiens; identical to SEQ ID NO: 870230

SEQ ID NO: 870243 - protein, 537 aa, Homo sapiens
KLHTSHYNPANLKHLPLQLVQMALSQSVPFSATELLLASAIFCLVFWVLKGLRPRVPKGLKSPPEPWGWPLLGHVLTLGKNPHLALSRMSQRYGDVLQIRIGSTPVLVLSRLDTIRQALVRQGDDFKGRPDLYTSTLITDGQSLTFSTDSGPVWAARRRLAQNALNTFSIASDPASSSSCYLEEHVSKEAKALISRLQELMAGPGHFDPYNQVVVSVANVIGAMCFGQHFPESSDEMLSLVKNTHEFVETASSGNPLDFFPILRYLPNPALQRFKAFNQRFLWFLQKTVQEHYQDFDKNSVRDITGALFKHSKKGPRASGNLIPQEKIVNLVNDIFGAGFDTVTTAISWSLMYLVTKPEIQRKIQKELDTVIGRERRPRLSDRPQLPYLEAFILETFRHSSFLPFTIPHSTTRDTTLNGFYIPKKCCVFVNQWQVNHDPELWEDPSEFRPERFLTADGTAINKPLSEKMMLFGMGKRRCIGEVLAKWEIFLFLAILLQQLEFSVPPGVKVDLTPIYGLTMKHARCEHVQARLRFSIN

SEQ ID NO: 870244 - protein, 164 aa, Homo sapiens
ECSELRSHHCTPAWVIGAGGCLKKKKRKNFQSALTLVFSTEVSLPQAPPPRASPALRSHLLCSSCRELWEDPSEFRPERFLTADGTAINKPLSEKMMLFGMGKRRCIGEVLAKWEIFLFLAILLQQLEFSVPPGVKVDLTPIYGLTMKHARCEHVQARLRFSIN

SEQ ID NO: 870245 - protein, 273 aa, Homo sapiens
MKKTQTWILTCIYLQLLLFNPLVKTEGICRNRVTNNVKDVTKLVANLPKDYMITLKYVPGMDVLPSHCWISEMVVQLSDSLTDLLDKFSNISEGLSNYSIIDKLVNIVDDLVECVKENSSKDLKKSFKSPEPRLFTPEEFFRIFNRSIDAFKDFVVASETSDCVVSSTLSPEKDSRVSVTKPFMLPPVAASSLRNDSSSSNRKAKNPPGDSSLHWAAMALPALFSLIIGFAFGALYWKKRQPSLTRAVENIQINEEDNEISMLQEKEREFQEV

SEQ ID NO: 870246 - protein, 245 aa, Homo sapiens
MKKTQTWILTCIYLQLLLFNPLVKTEGICRNRVTNNVKDVTKLVANLPKDYMITLKYVPGMDVLPSHCWISEMVVQLSDSLTDLLDKFSNISEGLSNYSIIDKLVNIVDDLVECVKENSSKDLKKSFKSPEPRLFTPEEFFRIFNRSIDAFKDFVVASETSDCVVSSTLSPEKGKAKNPPGDSSLHWAAMALPALFSLIIGFAFGALYWKKRQPSLTRAVENIQINEEDNEISMLQEKEREFQEV

SEQ ID NO: 870247 - protein, 205 aa, Homo sapiens
TTTKFAAAWTLPSLMSCLYVYTDTYEMHIGMLGMCICIYRERNVLTTWKDYLKTNEVFPLPYSNKKVGSPFNFAIFCYYIYRKAAFYNAEIMVYLRISDQEQISIFSYCFSVCCKRKRESFKKCKLWLVSTLLLSYIGKFFSSFLFFSFFYYTLSSRVHVHNVQVCYVCLHVPCWCAAPINSSFTLGISPNAIPCRRGREFSSSR

SEQ ID NO: 870248 - protein, 245 aa, Homo sapiens; identical to SEQ ID NO: 870246

SEQ ID NO: 870249 - protein, 675 aa, Homo sapiens
EEEGTRRRGLAASLRADFSPMVQRDMSKSPPTAAAAVAQEIQMELLENVAPAGALGAAAQSYGKGARRKNRFKGSDGSTSSDTTSNGSADSYTSRPSDSDVSLEEDREAVRREAERQAQAQLEKAKTKPVAFAVRTNVSYSAAHEDDVPVPGMAISFEAKDFLHVKEKFNNDWWIGRLVKEGCEIGFIPSPVKLENMRLQHEQRAKQGKFYSSKSGGNSSSSLGDIVPSSRKSTPPSSAIDIDATGLDAEENDIPANHRSPKPSANSVTSPHSKEKRMPFFKKTEHTPPYDVVPSMRPVVLVGPSLKGYEVTDMMQKALFDFLKHRFEGRISITRVTADISLAKRSVLNNPSKHAIIERSNTRSSLAEVQSEIERIFELARTLQLVVLDADTINHPAQLSKTSLAPIIVYVKISSPKVLQRLIKSRGKSQAKHLNVQMVAADKLAQCPPELFDVILDENQLEDACEHLADYLEAYWKATHPPSSSLPNPLLSRTLATSSLPLSPTLASNSQGSQGDQRTDRSAPIRSASQAEEEPSVEPVKKSQHRSSSSAPHHNHRSGTSRGLSRQETFDSETQESRDSAYVEPKEDYSHDHVDHYASHRDHNHRDETHGSSDHRHRESRHRSRDVDREQDHNECNKQRSRHKSKDRYCEKDGEVISKKRNEAGEWNRDVYIRQ

SEQ ID NO: 870250 - protein, 605 aa, Homo sapiens
MQCCGLVHRRRVRVSYGSADSYTSRPSDSDVSLEEDREAVRREAERQAQAQLEKAKTKPVAFAVRTNVSYSAAHEDDVPVPGMAISFEAKDFLHVKEKFNNDWWIGRLVKEGCEIGFIPSPVKLENMRLQHEQRAKQGKFYSSKSGGNSSSSLGDIVPSSRKSTPPSSAIDIDATGLDAEENDIPANHRSPKPSANSVTSPHSKEKRMPFFKKTEHTPPYDVVPSMRPVVLVGPSLKGYEVTDMMQKALFDFLKHRFEGRISITRVTADISLAKRSVLNNPSKHAIIERSNTRSSLAEVQSEIERIFELARTLQLVVLDADTINHPAQLSKTSLAPIIVYVKISSPKVLQRLIKSRGKSQAKHLNVQMVAADKLAQCPPELFDVILDENQLEDACEHLADYLEAYWKATHPPSSSLPNPLLSRTLATSSLPLSPTLASNSQGSQGDQRTDRSAPIRSASQAEEEPSVEPVKKSQHRSSSSAPHHNHRSGTSRGLSRQETFDSETQESRDSAYVEPKEDYSHDHVDHYASHRDHNHRDETHGSSDHRHRESRHRSRDVDREQDHNECNKQRSRHKSKDRYCEKDGEVISKKRNEAGEWNRDVYIRQ

SEQ ID NO: 870251 - protein, 605 aa, Homo sapiens; identical to SEQ ID NO: 870250

SEQ ID NO: 870252 - protein, 372 aa, Homo sapiens [sequence omitted]

SEQ ID NO: 870253 - protein, 128 aa, Homo sapiens
MLDRRLIAPQTKYIIPGGSADSYTSRPSDSDVSLEEDREAVRREAERQAQAQLEKAKTKPVAFAVRTNVSYSAAHEDDVPVPGMAISFEAKDFLHVKEVRRIISFSNSMMFHLDIPFLISYSYAVSVK

SEQ ID NO: 870254 - protein, 606 aa, Homo sapiens
MLDRRLIAPQTKYIIPGGSADSYTSRPSDSDVSLEEDREAVRREAERQAQAQLEKAKTKPVAFAVRTNVSYSAAHEDDVPVPGMAISFEAKDFLHVKEKFNNDWWIGRLVKEGCEIGFIPSPVKLENMRLQHEQRAKQGKFYSSKSGGNSSSSLGDIVPSSRKSTPPSSAIDIDATGLDAEENDIPANHRSPKPSANSVTSPHSKEKRMPFFKKTEHTPPYDVVPSMRPVVLVGPSLKGYEVTDMMQKALFDFLKHRFEGRISITRVTADISLAKRSVLNNPSKHAIIERSNTRSSLAEVQSEIERIFELARTLQLVVLDADTINHPAQLSKTSLAPIIVYVKISSPKVLQRLIKSRGKSQAKHLNVQMVAADKLAQCPPELFDVILDENQLEDACEHLADYLEAYWKATHPPSSSLPNPLLSRTLATSSLPLSPTLASNSQGSQGDQRTDRSAPIRSASQAEEEPSVEPVKKSQHRSSSSAPHHNHRSGTSRGLSRQETFDSETQESRDSAYVEPKEDYSHDHVDHYASHRDHNHRDETHGSSDHRHRESRHRSRDVDREQDHNECNKQRSRHKSKDRYCEKDGEVISKKRNEAGEWNRDVYIRQ

SEQ ID NO: 870255 - protein, 104 aa, Homo sapiens
LILIISHLTNKHVHKTTKIPLDISLISYCMIWSENKKQNKNETSVLSSFCLLLSPAKQSPKLVYFSVVSCSVHFSIHYNVFSHHSLKLLAPRSSGLLAAKTIIL

SEQ ID NO: 870256 - protein, 919 aa, Homo sapiens
MKVARFQKIPNGENETMIPVLTSKKASELPVSEVASILQADLQNGLNKCEVSHRRAFHGWNEFDISEDEPLWKKYISQFKNPLIMLLLASAVISVLMHQFDDAVSITVAILIVVTVAFVQEYRSEKSLEELSKLVPPECHCVREGKLEHTLARDLVPGDTVCLSVGDRVPADLRLFEAVDLSIDESSLTGETTPCSKVTAPQPAATNGDLASRSNIAFMGTLVRCGKAKGVVIGTGENSEFGEVFKMMQAEEAPKTPLQKSMDLLGKQLSFYSFGIIGIIMLVGWLLGKDILEMFTISVSLAVAAIPEGLPIVVTVTLALGVMRMVKKRAIVKKLPIVETLGCCNVICSDKTGTLTKNEMTVTHIFTSDGLHAEVTGVGYNQFGEVIVDGDVVHGFYNPAVSRIVEAGCVCNDAVIRNNTLMGKPTEGALIALAMKMGLDGLQQDYIRKAEYPFSSEQKWMAVKCVHRTQQDRPEICFMKGAYEQVIKYCTTYQSKGQTLTLTQQQRDVYQQEKARMGSAGLRVLALASGPELGQLTFLGLVGIIDPPRTGVKEAVTTLIASGVSIKMITGDSQETAVAIASRLGLYSKTSQSVSGEEIDAMDVQQLSQIVPKVAVFYRASPRHKMKIIKSLQKNGSVVAMTGDGVNDAVALKAADIGVAMGQTGTDVCKEAADMILVDDDFQTIMSAIEEGKGIYNNIKNFVRFQLSTSIAALTLISLATLMNFPNPLNAMQILWINIIMDGPPAQSLGVEPVDKDVIRKPPRNWKDSILTKNLILKILVSSIIIVCGTLFVFWRELRDNVITPRDTTMTFTCFVFFDMFNALSSRSQTKSVFEIGLCSNRMFCYAVLGSIMGQLLVIYFPPLQKVFQTESLSILDLLFLLGLTSSVCIVAEIIKKVERSREKIQKHVSSTSSSFLEV

SEQ ID NO: 870257 - protein, 923 aa, Homo sapiens
MIPVLTSKKASELPVSEVASILQADLQNGLNKCEVSHRRAFHGWNEFDISEDEPLWKKYISQFKNPLIMLLLASAVISVLMHQFDDAVSITVAILIVVTVAFVQEYRSEKSLEELSKLVPPECHCVREGKLEHTLARDLVPGDTVCLSVGDRVPADLRLFEAVDLSIDESSLTGETTPCSKVTAPQPAATNGDLASRSNIAFMGTLVRCGKAKGVVIGTGENSEFGEVFKMMQAEEAPKTPLQKSMDLLGKQLSFYSFGIIGIIMLVGWLLGKDILEMFTISVSLAVAAIPEGLPIVVTVTLALGVMRMVKKRAIVKKLPIVETLGCCNVICSDKTGTLTKNEMTVTHIFTSDGLHAEVTGVGYNQFGEVIVDGDVVHGFYNPAVSRIVEAGCVCNDAVIRNNTLMGKPTEGALIALAMKMGLDGLQQDYIRKAEYPFSSEQKWMAVKCVHRTQQDRPEICFMKGAYEQVIKYCTTYQSKGQTLTLTQQQRDVYQQEKARMGSAGLRVLALASGPELGQLTFLGLVGIIDPPRTGVKEAVTTLIASGVSIKMITGDSQETAVAIASRLGLYSKTSQSVSGEEIDAMDVQQLSQIVPKVAVFYRASPRHKMKIIKSLQKNGSVVAMTGDGVNDAVALKAADIGVAMGQTGTDVCKEAADMILVDDDFQTIMSAIEEGKGIYNNIKNFVRFQLSTSIAALTLISLATLMNFPNPLNAMQILWINIIMDGPPAQSLGVEPVDKDVIRKPPRNWKDSILTKNLILKILVSSIIIVCGTLFVFWRELRDNVITPRDTTMTFTCFVFFDMFNALSSRSQTKSVFEIGLCSNRMFCYAVLGSIMGQLLVIYFPPLQKVFQTESLSILDLLFLLGLTSSVCIVAEIIKKVERSREKIQKHVWLWERSGQQLVEIHPHLETGLPLTEDVSCV

SEQ ID NO: 870258 - protein, 903 aa, Homo sapiens
MIPVLTSKKASELPVSEVASILQADLQNGLNKCEVSHRRAFHGWNEFDISEDEPLWKKYISQFKNPLIMLLLASAVISVLMHQFDDAVSITVAILIVVTVAFVQEYRSEKSLEELSKLVPPECHCVREGKLEHTLARDLVPGDTVCLSVGDRVPADLRLFEAVDLSIDESSLTGETTPCSKVTAPQPAATNGDLASRSNIAFMGTLVRCGKAKGVVIGTGENSEFGEVFKMMQAEEAPKTPLQKSMDLLGKQLSFYSFGIIGIIMLVGWLLGKDILEMFTISVSLAVAAIPEGLPIVVTVTLALGVMRMVKKRAIVKKLPIVETLGCCNVICSDKTGTLTKNEMTVTHIFTSDGLHAEVTGVGYNQFGEVIVDGDVVHGFYNPAVSRIVEAGCVCNDAVIRNNTLMGKPTEGALIALAMKMGLDGLQQDYIRKAEYPFSSEQKWMAVKCVHRTQQDRPEICFMKGAYEQVIKYCTTYQSKGQTLTLTQQQRDVYQQEKARMGSAGLRVLALASGPELGQLTFLGLVGIIDPPRTGVKEAVTTLIASGVSIKMITGDSQETAVAIASRLGLYSKTSQSVSGEEIDAMDVQQLSQIVPKVAVFYRASPRHKMKIIKSLQKNGSVVAMTGDGVNDAVALKAADIGVAMGQTGTDVCKEAADMILVDDDFQTIMSAIEEGKGIYNNIKNFVRFQLSTSIAALTLISLATLMNFPNPLNAMQILWINIIMDGPPAQSLGVEPVDKDVIRKPPRNWKDSILTKNLILKILVSSIIIVCGTLFVFWRELRDNVITPRDTTMTFTCFVFFDMFNALSSRSQTKSVFEIGLCSNRMFCYAVLGSIMGQLLVIYFPPLQKVFQTESLSILDLLFLLGLTSSVCIVAEIIKKVERSREKIQKHVSSTSSSFLEV

SEQ ID NO: 870259 - protein, 639 aa, Homo sapiens [sequence omitted]

SEQ ID NO: 870260 - protein, 919 aa, Homo sapiens; identical to SEQ ID NO: 870256

SEQ ID NO: 870261 - protein, 919 aa, Homo sapiens; identical to SEQ ID NO: 870256

SEQ ID NO: 870262 - protein, 888 aa, Homo sapiens
MKVARFQKIPNGENETMIPVLTSKKASELPVSEVASILQADLQNGLNKCEVSHRRAFHGWNEFDISEDEPLWKKYISQFKNPLIMLLLASAVISVLMHQFDDAVSITVAILIVVTVAFVQEYRSEKSLEELSKLVPPECHCVREGKLEHTLARDLVPGDTVCLSVGDRVPADLRLFEAVDLSIDESSLTGETTPCSKVTAPQPAATNGDLASRSNIAFMGTLVRCGKAKGVVIGTGENSEFGEVFKMMQAEEAPKTPLQKSMDLLGKQLSFYSFGIIGIIMLVGWLLGKDILEMFTISVSLAVAAIPEGLPIVVTVTLALGVMRMVKKRAIVKKLPIVETLGCCNVICSDKTGTLTKNEMTVTHIFTSDGLHAEVTGVGYNQFGEVIVDGDVVHGFYNPAVSRIVEAGCVCNDAVIRNNTLMGKPTEGALIALAMKMGLDGLQQDYIRKAEYPFSSEQKWMAVKCVHRTQQDRPEICFMKGAYEQVIKYCTTYQSKGQTLTLTQQQRDVYQQEKARMGSAGLRVLALASGPELGQLTFLGLVGIIDPPRTGVKEAVTTLIASGVSIKMITGDSQETAVAIASRLGLYSKTSQSVSGEEIDAMDVQQLSQIVPKVAVFYRASPRHKMKIIKSLQKNGSVVAMTGDGVNDAVALKAADIGVAMGQTGTDVCKEAADMILVDDDFQTIMSAIEEGKGIYNNIKNFVRFQLSTSIAALTLISLATLMNFPNPLNAMQILWINIIMDGPPAQSLGVEPVDKDVIRKPPRNWKDSILTKNLILKILVSSIIIVCGTLFVFWRELRDNVITPRDTTMTFTCFVFFDMFNALSSRSQTKSVFEIGLCSNRMFCYAVLGSIMGQLLVIYFPPLQKVFQTESLSILGLALGEEWTAAG

SEQ ID NO: 870263 - protein, 424 aa, Homo sapiens
ASRAGCNRPRQRDVYQQEKARMGSAGLRVLALASGPELGQLTFLGLVGIIDPPRTGVKEAVTTLIASGVSIKMITGDSQETAVAIASRLGLYSKTSQSVSGEEIDAMDVQQLSQIVPKVAVFYRASPRHKMKIIKSLQKNGSVVAMTGDGVNDAVALKAADIGVAMGQTGTDVCKEAADMILVDDDFQTIMSAIEEGKGIYNNIKNFVRFQLSTSIAALTLISLATLMNFPNPLNAMQILWINIIMDGPPAQSLGVEPVDKDVIRKPPRNWKDSILTKNLILKILVSSIIIVCGTLFVFWRELRDNVITPRDTTMTFTCFVFFDMFNALSSRSQTKSVFEIGLCSNRMFCYAVLGSIMGQLLVIYFPPLQKVFQTESLSILDLLFLLGLTSSVCIVAEIIKKVERSREKIQKHVSSTSSSFLEV

SEQ ID NO: 870264 - protein, 726 aa, Homo sapiens
MKVARFQKIPNGENETMIPVLTSKKASELPVSEVASILQADLQNGLNKCEVSHRRAFHGWNEFDISEDEPLWKKYISQFKNPLIMLLLASAVISVLMHQFDDAVSITVAILIVVTVAFVQEYRSEKSLEELSKLVPPECHCVREGKLEHTLARDLVPGDTVCLSVGDRVPADLRLFEAVDLSIDESSLTGETTPCSKVTAPQPAATNGDLASRSNIAFMGTLVRCGKAKGVVIGTGENSEFGEVFKMMQAEEAPKTPLQKSMDLLGKQLSFYSFGIIGIIMLVGWLLGKDILEMFTISVSLAVAAIPEGLPIVVTVTLALGVMRMVKKRAIVKKLPIVETLGCCNVICSDKTGTLTKNEMTVTHIFTSDGLHAEVTGVGYNQFGEVIVDGDVVHGFYNPAVSRIVEAGCVCNDAVIRNNTLMGKPTEGALIALAMKMGLDGLQQDYIRKAEYPFSSEQKWMAVKCVHRTQQDRPEICFMKGAYEQVIKYCTTYQSKGQTLTLTQQQRDVYQQEKARMGSAGLRVLALASGPELGQLTFLGLVGIIDPPRTGVKEAVTTLIASGVSIKMITGDSQETAVAIASRLGLYSKTSQSVSGEEIDAMDVQQLSQIVPKVAVFYRASPRHKMKIIKSLQKNGSVVAMTGDGVNDAVALKAADIGVAMGQTGTDVCKEAADMILVDDDFQTIMSAIEEGKGIYNNIKNFVRFQLSTFCGSILLWMDPQLRALE

SEQ ID NO: 870265 - protein, 697 aa, Homo sapiens
MKVARFQKIPNGENETMIPVLTSKKASELPVSEVASILQADLQNGLNKCEVSHRRAFHGWNEFDISEDEPLWKKYISQFKNPLIMLLLASAVISVLMHQFDDAVSITVAILIVVTVAFVQEYRSEKSLEELSKLVPPECHCVREGKLEHTLARDLVPGDTVCLSVGDRVPADLRLFEAVDLSIDESSLTGETTPCSKVTAPQPAATNGDLASRSNIAFMGTLVRCGKAKGVVIGTGENSEFGEVFKMMQAEEAPKTPLQKSMDLLGKQLSFYSFGIIGIIMLVGWLLGKDILEMFTISVSLAVAAIPEGLPIVVTVTLALGVMRMVKKRAIVKKLPIVETLGCCNVICSDKTGTLTKNEMTVTHIFTSDGLHAEVTGVGYNQFGEVIVDGDVVHGFYNPAVSRIVEAGCVCNDAVIRNNTLMGKPTEGALIALAMKMGLDGLQQDYIRKAEYPFSSEQKWMAVKCVHRTQQDRPEICFMKGAYEQVIKYCTTYQSKGQTLTLTQQQRDVYQQEKARMGSAGLRVLALASGPELGQLTFLGLVGIIDPPRTGVKEAVTTLIASGVSIKMITGDSQETAVAIASRLGLYSKTSQSVSGEEIDAMDVQQLSQIVPKVAVFYRASPRHKMKIIKSLQKNGSVVAMTGDGVNDAVALKAADIGVAMGQTGTDVCKEAADMILVDDDFQTIMSAIFGTICESC

SEQ ID NO: 870266 - protein, 453 aa, Homo sapiens
  misc_feature (450)..(450): Xaa can be any naturally occurring amino acid
MKVARFQKIPNGENETMIPVLTSKKASELPVSEVASILQADLQNGLNKCEVSHRRAFHGWNEFDISEDEPLWKKYISQFKNPLIMLLLASAVISVLMHQFDDAVSITVAILIVVTVAFVQEYRSEKSLEELSKLVPPECHCVREGKLEHTLARDLVPGDTVCLSVGDRVPADLRLFEAVDLSIDESSLTGETTPCSKVTAPQPAATNGDLASRSNIAFMGTLVRCGKAKGVVIGTGENSEFGEVFKMMQAEEAPKTPLQKSMDLLGKQLSFYSFGIIGIIMLVGWLLGKDILEMFTISVSLAVAAIPEGLPIVVTVTLALGVMRMVKKRAIVKKLPIVETLGCCNVICSDKTGTLTKNEMTVTHIFTSDGLHAEVTGVGYNQFGEVIVDGDVVHGFYNPAVSRIVEAGCVCNDAVIRNNTLMGKPTEGALIALAMKMGLDGLHKTTSGSXRMM

SEQ ID NO: 870267 - protein, 903 aa, Homo sapiens; identical to SEQ ID NO: 870258

SEQ ID NO: 870268 - protein, 238 aa, Homo sapiens
KAGFAAGPGVRGATGRPAAGRGGAQESEAGADQHGLAEPARRTVTGPLTSSSLPSPPALSPSLPPSRSLLLTPGAGSRLAPLPREQLLFSRGARGAPASPAAETPQPGGGLSGALDGQPEQDKDGDSVHTASEVPLTPRTNSPDGRRSSSDTSKSTYSLTRRISSLESRRPSSPLIDIKPIEFGVLSAKKEPIQPSVLRRTYNPDDYFRKFEPHLYSLDSNSDDVDSLTDEEILSKYQ

SEQ ID NO: 870269 - protein, 919 aa, Homo sapiens; identical to SEQ ID NO: 870256

SEQ ID NO: 870270 - protein, 919 aa, Homo sapiens; identical to SEQ ID NO: 870256

SEQ ID NO: 870271 - protein, 949 aa, Homo sapiens
MKVARFQKIPNGENETMIPVLTSKKASELPVSEVASILQADLQNGLNKCEVSHRRAFHGWNEFDISEDEPLWKKYISQFKNPLIMLLLASAVISVLMHQFDDAVSITVAILIVVTVAFVQEYRSEKSLEELSKLVPPECHCVREGKLEHTLARDLVPGDTVCLSVGDRVPADLRLFEAVDLSIDESSLTGETTPCSKVTAPQPAATNGDLASRSNIAFMGTLVRCGKAKGVVIGTGENSEFGEVFKMMQAEEAPKTPLQKSMDLLGKQLSFYSFGIIGIIMLVGWLLGKDILEMFTISVSLAVAAIPEGLPIVVTVTLALGVMRMVKKRAIVKKLPIVETLGCCNVICSDKTGTLTKNEMTVTHIFTSDGLHAEVTGVGYNQFGEVIVDGDVVHGFYNPAVSRIVEAGCVCNDAVIRNNTLMGKPTEGALIALAMKMGLDGLQQDYIRKAEYPFSSEQKWMAVKCVHRTQQDRPEICFMKGAYEQVIKYCTTYQSKGQTLTLTQQQRDVYQQEKARMGSAGLRVLALASGPELGQLTFLGLVGIIDPPRTGVKEAVTTLIASGVSIKMITGDSQETAVAIASRLGLYSKTSQSVSGEEIDAMDVQQLSQIVPKVAVFYRASPRHKMKIIKSLQKNGSVVAMTGDGVNDAVALKAADIGVAMGQTGTDVCKEAADMILVDDDFQTIMSAIEEGKGIYNNIKNFVRFQLSTSIAALTLISLATLMNFPNPLNAMQILWINIIMDGPPAQSLGVEPVDKDVIRKPPRNWKDSILTKNLILKILVSSIIIVCGTLFVFWRELRDNVITPRDTTMTFTCFVFFDMFNALSSRSQTKSVFEIGLCSNRMFCYAVLGSIMGQLLVIYFPPLQKVFQTESLSILDLLFLLGLTSSVCIVAEIIKKVERSREKIQKHVSSTSSSFLEVWLWERSGQQLVEIHPHLETGLPLTEDVSCV

SEQ ID NO: 870272 - protein, 186 aa, Homo sapiens
MKVARFQKIPNGENETMIPVLTSKKASELPVSEVASILQADLQNGLNKCEVSHRRAFHGWNEFDISEDEPLWKKYISQFKNPLIMLLLASAVISVLMHQFDDAVSITVAILIVVTVAFVQEYRSEKSLEELSKLVPPECHCVREGKLEHTLARDLVPGDTVCLSVGDRVPADLRLFEVNLGSDCNK

SEQ ID NO: 870273 - protein, 34 aa, Homo sapiens
MKASVKEIRRKQSHNSIHKRGQTLTTARSTWATC

SEQ ID NO: 870274 - protein, 101 aa, Homo sapiens
KQAHLGTDSKQGSEERASPLRSGPPGEVAVSFPDARSKQRLMLETSDARGRIPVARGNYLEVIYPCTALWGWVFLAHCMSWYYSKSDRYMFSHAFHVLDTF

SEQ ID NO: 870275 - protein, 45 aa, Homo sapiens
PLCFLTNPGTSPKGPVWCGCLLLLGTDQQGPISQDWKNTPKVSVM

SEQ ID NO: 870276 - protein, 269 aa, Homo sapiens
SNSLPPSRPGQRRPPPPLGRGLQTALPDSQDDQGASLFLSGEEVLGEEKLKEILKERELKIYWGTATTGKPHVAYFVPMSKIADFLKAGCEVTILFADLHAYLDNMKAPWELLELRVSYYENVIKAMLESIGVPLEKLKFIKGTDYQLSKEYTLDVYRLSSVVTQHDSKKAGAEVVKQVEHPLLSGLLYPGLQALDEEYLKVDAQFGGIDQRKIFTFAEKYLPALGYSKRVHLMNPMVPGLTGSKMSSSEEVSCQLRLEFRNLQPQWRD

SEQ ID NO: 870277 - protein, 162 aa, Homo sapiens
VVAEAVKRIPPADTTANGKGVKIEFDEDDGPITVADAWRALKNPSIGESSIEGLTSVLSTSGSPTDGLSVMQGPYSETASFAALSGGTLSGGILSSGKGKYSRLEVQADVQKEIFPKDTASLGAISDNASTRAMAGSIISSYNPQDRECNNMEIQVDIATCG

SEQ ID NO: 870278 - protein, 528 aa, Homo sapiens
MGDAPSPEEKLHLITRNLQEVLGEEKLKEILKERELKIYWGTATTGKPHVAYFVPMSKIADFLKAGCEVTILFADLHAYLDNMKAPWELLELRVSYYENVIKAMLESIGVPLEKLKFIKGTDYQLSKEYTLDVYRLSSVVTQHDSKKAGAEVVKQVEHPLLSGLLYPGLQALDEEYLKVDAQFGGIDQRKIFTFAEKYLPALGYSKRVHLMNPMVPGLTGSKMSSSEEESKIDLLDRKEDVKKKLKKAFCEPGNVENNGVLSFIKHVLFPLKSEFVILRDEKWGGNKTYTAYVDLEKDFAAEVVHPGDLKNSVEVALNKLLDPIREKFNTPALKKLASAAYPDPSKQKPMAKGPAKNSEPEEVIPSRLDIRVGKIITVEKHPDADSLYVEKIDVGEAEPRTVVSGLVQFVPKEELQDRLVVVLCNLKPQKMRGVESQGMLLCASIEGINRQVEPLDPPAGSAPGEHVFVKGYEKGQPDEELKPKKKVFEKLQADFKISEECIAQWKQTNFMTKLGSISCKSLKGGNIS

SEQ ID NO: 870279 - protein, 528 aa, Homo sapiens; identical to SEQ ID NO: 870278

SEQ ID NO: 870280 - protein, 528 aa, Homo sapiens; identical to SEQ ID NO: 870278

SEQ ID NO: 870281 - protein, 440 aa, Homo sapiens
MGDAPSPEEKLHLITRNLQEVLGEEKLKEILKERELKIYWGTATTGKPHVAYFVPMSKIADFLKAGCEVTILFADLHAYLDNMKAPWELLELRVSYYENVIKAMLESIGVPLEKLKFIKGTDYQLSKEYTLDVYRLSSVVTQHDSKKAGAEVVKQVEHPLLSGLLYPGLQALDEEYLKVDAQFGGIDQRKIFTFAEKYLPALGYSKRVHLMNPMVPGLTGSKMSSSEEESKIDLLDRKEDVKKKLKKAFCEPGNVENNGVLSFIKHVLFPLKSEFVILRDEKWGGNKTYTAYVDLEKDFAAEVVHPGDLKNSVEVALNKLLDPIREKFNTPALKKLASAAYPDPSKQKPMAKGPAKNSEPEEVIPSRLDIRVGKIITVEKHPDADSLYVEKIDVGEAEPRTVVSGLVQFVPKEELQDRLVVVLCNLKPQKMRGVESQEKG

SEQ ID NO: 870282 - protein, 528 aa, Homo sapiens; identical to SEQ ID NO: 870278

SEQ ID NO: 870283 - protein, 528 aa, Homo sapiens; identical to SEQ ID NO: 870278

SEQ ID NO: 870284 - protein, 440 aa, Homo sapiens; identical to SEQ ID NO: 870281

SEQ ID NO: 870285 - protein, 412 aa, Homo sapiens
MGDAPSPEEKLHLITRNLQEVLGEEKLKEILKERELKIYWGTATTGKPHVAYFVPMSKIADFLKAGCEVTILFADLHAYLDNMKAPWELLELRVSYYENVIKAMLESIGVPLEKLKFIKGTDYQLSKEYTLDVYRLSSVVTQHDSKKAGAEVVKQVEHPLLSGLLYPGLQALDEEYLKVDAQFGGIDQRKIFTFAEKYLPALGYSKRVHLMNPMVPGLTGSKMSSSEEESKIDLLDRKEDVKKKLKKAFCEPGNVENNGVLSFIKHVLFPLKSEFVILRDEKWGGNKTYTAYVDLEKDFAAEVVHPGDLKNSVEVALNKLLDPIREKFNTPALKKLASAAYPDPSKQKPMAKGPAKNSEPEEVIPSRLDIRVGKIITVEIPMSAYSEAWHWGPGPAPGLLEFPLIQLGWDTP

SEQ ID NO: 870286 - protein, 545 aa, Homo sapiens
MKTILSNQTVDIPENVDITLKGRTEEKLHLITRNLQEVLGEEKLKEILKERELKIYWGTATTGKPHVAYFVPMSKIADFLKAGCEVTILFADLHAYLDNMKAPWELLELRVSYYENVIKAMLESIGVPLEKLKFIKGTDYQLSKEYTLDVYRLSSVVTQHDSKKAGAEVVKQVEHPLLSGLLYPGLQALDEEYLKVDAQFGGIDQRKIFTFAEKYLPALGYSKRVHLMNPMVPGLTGSKMSSSEEESKIDLLDRKEDVKKKLKKAFCEPGNVENNGVLSFIKHVLFPLKSEFVILRDEKWGGNKTYTAYVDLEKDFAAEVVHPGDLKNSVEVALNKLLDPIREKFNTPALKKLASAAYPDPSKQKPMAKGPAKNSEPEEVIPSRLDIRVGKIITVEKHPDADSLYVEKIDVGEAEPRTVVSGLVQFVPKEELQDRLVVVLCNLKPQKMRGVESQGMLLCASIEGINRQVEPLDPPAGSAPGEHVFVKGYEKGQPDEELKPKKKVFEKLQADFKISEECIAQWKQTNFMTKLGSISCKSLKGGNIS

SEQ ID NO: 870287 - protein, 473 aa, Homo sapiens [sequence omitted]

SEQ ID NO: 870288 - protein, 374 aa, Homo sapiens [sequence omitted]

SEQ ID NO: 870289 - protein, 365 aa, Homo sapiens
MGDAPSPEEKLHLITRNLQEVLGEEKLKEILKERELKIYWGTATTGKPHVAYFVPMSKIADFLKAGCEVTILFADLHAYLDNMKAPWELLELRVSYYENVIKAMLESIGVPLEKLKFIKGTDYQLSKEYTLDVYRLSSVVTQHDSKKAGAEVVKQVEHPLLSGLLYPGLQALDEEYLKVDAQFGGIDQRKIFTFAEKYLPALGYSKRVHLMNPMVPGLTGSKMSSSEEESKIDLLDRKEDVKKKLKKAFCEPGNVENNGVLSFIKHVLFPLKSEFVILRDEKWGGNKTYTAYVDLEKDFAAEVVHPGDLKNSVEVALNKLLDPIREKFNTPALKKLASAAYPDPSKQTAPGLLEFPLIQLGWDTP

SEQ ID NO: 870290 - protein, 473 aa, Homo sapiens [sequence omitted]

SEQ ID NO: 870291 - protein, 479 aa, Homo sapiens
MGDAPSPEEKLHLITRNLQVTILFADLHAYLDNMKAPWELLELRVSYYENVIKAMLESIGVPLEKLKFIKGTDYQLSKEYTLDVYRLSSVVTQHDSKKAGAEVVKQVEHPLLSGLLYPGLQALDEEYLKVDAQFGGIDQRKIFTFAEKYLPALGYSKRVHLMNPMVPGLTGSKMSSSEEESKIDLLDRKEDVKKKLKKAFCEPGNVENNGVLSFIKHVLFPLKSEFVILRDEKWGGNKTYTAYVDLEKDFAAEVVHPGDLKNSVEVALNKLLDPIREKFNTPALKKLASAAYPDPSKQKPMAKGPAKNSEPEEVIPSRLDIRVGKIITVEKHPDADSLYVEKIDVGEAEPRTVVSGLVQFVPKEELQDRLVVVLCNLKPQKMRGVESQGMLLCASIEGINRQVEPLDPPAGSAPGEHVFVKGYEKGQPDEELKPKKKVFEKLQADFKISEECIAQWKQTNFMTKLGSISCKSLKGGNIS

SEQ ID NO: 870292 - protein, 315 aa, Homo sapiens
MVPGLTGSKMSSSEEESKIDLLDRKEDVKKKLKKAFCEPGNVENNGVLSFIKHVLFPLKSEFVILRDEKWGGNKTYTAYVDLEKDFAAEVVHPGDLKNSVEVALNKLLDPIREKFNTPALKKLASAAYPDPSKQKPMAKGPAKNSEPEEVIPSRLDIRVGKIITVEKHPDADSLYVEKIDVGEAEPRTVVSGLVQFVPKEELQDRLVVVLCNLKPQKMRGVESQGMLLCASIEGINRQVEPLDPPAGSAPGEHVFVKGYEKGQPDEELKPKKKVFEKLQADFKISEECIAQWKQTNFMTKLGSISCKSLKGGNIS

SEQ ID NO: 870293 - protein, 384 aa, Homo sapiens
MFMFMCFFPQALDEEYLKVDAQFGGIDQRKIFTFAEKMRTLRIEDKKCPISHKYLPALGYSKRVHLMNPMVPGLTGSKMSSSEEESKIDLLDRKEDVKKKLKKAFCEPGNVENNGVLSFIKHVLFPLKSEFVILRDEKWGGNKTYTAYVDLEKDFAAEVVHPGDLKNSVEVALNKLLDPIREKFNTPALKKLASAAYPDPSKQKPMAKGPAKNSEPEEVIPSRLDIRVGKIITVEKHPDADSLYVEKIDVGEAEPRTVVSGLVQFVPKEELQDRLVVVLCNLKPQKMRGVESQGMLLCASIEGINRQVEPLDPPAGSAPGEHVFVKGYEKGQPDEELKPKKKVFEKLQADFKISEECIAQWKQTNFMTKLGSISCKSLKGGNIS

SEQ ID NO: 870294 - protein, 179 aa, Homo sapiens [sequence omitted]

SEQ ID NO: 870295 - protein, 155 aa, Homo sapiens
ESDHSEKHPDADSLYVEKIDVGEAEPRTVVSGLVQFVPKEELQDRLVVVLCNLKPQKMRGVESQGMLLCASIEGINRQVEPLDPPAGSAPGEHVFVKGYEKGQPDEELKPKKKVFEKLQADFKISEECIAQWKQTNFMTKLGSISCKSLKGGNIS

SEQ ID NO: 870296 - protein, 192 aa, Homo sapiens
MGDAPSPEEKLHLITRNLQEVLGEEKLKEILKERELKIYWGTATTGKPHVAYFVPMSKIADFLKAGCEVTILFADLHAYLDNMKAPWELLELRVSYYENVIKAMLESIGVPLEKLKFIKGTDYQLSKEYTLDVYRLSSVVTQHDSKKAGAEVVKQVEHPLLSGLLYPGLQVRSSSRCPKGNFPQRHSQSWCN

SEQ ID NO: 870297 - protein, 192 aa, Homo sapiens; identical to SEQ ID NO: 870296

SEQ ID NO: 870298 - protein, 197 aa, Homo sapiens
MGDAPSPEEKLHLITRNLQEVLGEEKLKEILKERELKIYWGTATTGKPHVAYFVPMSKIADFLKAGCEVTILFADLHAYLDNMKAPWELLELRVSYYENVIKAMLESIGVPLEKLKFIKGTDYQLSKEYTLDVYRLSSVVTQHDSKKAGAEVVKQVEHPLLSGLLYPGLQALDEEYLKVAAPGLLEFPLIQLGWDTP

SEQ ID NO: 870299 - protein, 192 aa, Homo sapiens; identical to SEQ ID NO: 870296

SEQ ID NO: 870300 - protein, 497 aa, Homo sapiens
MARQQRAQTLRVRTKHTSGLSYGQESGPADDIKPCPRCSAYIIKMNDGSCNHMTCAVCGCEFCWLCMKEISDLHYLSPSGCTFWGKKPWSRKKKILWQLGTLIGAPVGISLIAGIAIPAMVIGIPVYVGRKIHSRYEGRKTSKHKRNLAITGGVTLSVIASPVIAAVSVGIGVPIMLAYVYGVVPISLCRGGGCGVSTANGKGVKIEFDEDDGPITVADAWRALKNPSIGESSIEGLTSVLSTSGSPTDGLSVMQGPYSETASFAALSGGTLSGGILSSGKGKYSRLEVQADVQKEIFPKDTASLGAISDNASTRAMAGSIISSYNPQDRFSMIHAVTQQSGFCLHRECNNMEIQVDIEAKPSHYQLVSGSSTEDSLHVHAQMAENEEEGSGGGGSEEDPPCRHQSCEQKDCLASKPWDISLAQPESIRSDLESSDAQSDDVPDITSDECGSPRSHTAACPSTPRAQGAPSPSAHMNLSALAEGQTVLKPEGGEARV

SEQ ID NO: 870301 - protein, 161 aa, Homo sapiens [sequence omitted]

SEQ ID NO: 870302 - protein, 148 aa, Homo sapiens
MGDAPSPEEKLHLITRNLQEVLGEEKLKEILKERELKIYWGTATTGKPHVAYFVPMSKIADFLKAGCEVTILFADLHAYLDNMKAPWELLELRVSYYENVIKAMLESIGVPLEKLKFIKGTDYQLSKEYTLDVYRLSSLGDRQCKTPS

SEQ ID NO: 870303 - protein, 232 aa, Homo sapiens
  misc_feature (222)..(222): Xaa can be any naturally occurring amino acid
  misc_feature (232)..(232): Xaa can be any naturally occurring amino acid
MGDAPSPEEKLHLITRNLQEVLGEEKLKEILKERELKIYWGTATTGKPHVAYFVPMSKIADFLKAGCEVTILFADLHAYLDNMKAPWELLELRVSYYENVIKAMLESIGVPLEKLKFIKGTDYQLSKEYTLDVYRLSSVVTQHDSKKAGAEVVKQVEHPLLSGLLYPGLQALDEEYLKVDAQFGGIDQRKIFTFAEKYLPALGYSKRVHLMNLWSRITAQIXLERSDVLSRX

SEQ ID NO: 870304 - protein, 89 aa, Homo sapiens
SESRVPISCPECSERLNPHDIRLLLADPPLMHKYEEFMLRRYLASDPDCRWCPAPDCGDAGIAIPAMVIGIPVYVGRREILRNSQFLTR

SEQ ID NO: 870305 - protein, 528 aa, Homo sapiens; identical to SEQ ID NO: 870278

SEQ ID NO: 870306 - protein, 528 aa, Homo sapiens; identical to SEQ ID NO: 870278

SEQ ID NO: 870307 - protein, 528 aa, Homo sapiens; identical to SEQ ID NO: 870278

SEQ ID NO: 870308 - protein, 528 aa, Homo sapiens; identical to SEQ ID NO: 870278

SEQ ID NO: 870309 - protein, 537 aa, Homo sapiens
MGDAPSPEEKLHLITRNLQEVLGEEKLKEILKERELKIYWGTATTGKPHVAYFVPMSKIADFLKAGCEVTILFADLHAYLDNMKAPWELLELRVSYYENVIKAMLESIGVPLEKLKFIKGTDYQLSKEYTLDVYRLSSVVTQHDSKKAGAEVVKQVEHPLLSGLLYPGLQALDEEYLKVDAQFGGIDQRKIFTFAEKYLPALGYSKRVHLMNPMVPGLTGSKMSSSEEESKIDLLDRKEDVKKKLKKAFCEPGNVENNGVLSFIKHVLFPLKSEFVILRDEKWGGNKTYTAYVDLEKDFAAEVVHPGDLKNSVEVALNKLLDPIREKFNTPALKKLASAAYPDPSKQKPMAKGPAKNSEPEEVIPSRLDIRVGKIITVEKHPDADSLYVEKIDVGEAEPRTVVSGLVQFVPKEELQDRLVVVLCNLKPQKMRGVESQGMLLCASIEGINRQVEPLDPPAGSAPGEHVFVKGYEKGQPDEELKPKKKVFEKLQSAPSITHLPISQDTEAAGLDSLFGAELGKGQLTLPRTQDHPVWLQ

SEQ ID NO: 870310 - protein, 471 aa, Homo sapiens
MGDAPSPEEKLHLITRNLQEVLGEEKLKEILKERELKIYWGTATTGKPHVAYFVPMSKIADFLKAGCEVTILFADLHAYLDNMKAPWELLELRVSYYENVIKAMLESIGVPLEKLKFIKGTDYQLSKEYTLDVYRLSSVVTQHDSKKAGAEVVKQVEHPLLSGLLYPGLQALDEEYLKVDAQFGGIDQRKIFTFAEKYLPALGYSKRVHLMNPMVPGLTGSKMSSSEEESKIDLLDRKEDVKKKLKKAFCEPGNVENNGVLSFIKHVLFPLKSEFVILRDEKWGGNKTYTAYVDLEKDFAAEVVHPGDLKNSVEVALNKLLDPIREKFNTPALKKLASAAYPDPSKQKPMAKGPAKNSEPEEVIPSRLDIRVGKIITVEKHPDADSLYVEKIDVGEAEPRTVVSGLVQFVPKEELQDRLVVVLCNLKPQNPEPRIILSGCSERPTPNKGWATAGSPALPSSLGSWRNLVSI

SEQ ID NO: 870311 - protein, 528 aa, Homo sapiens; identical to SEQ ID NO: 870278

SEQ ID NO: 870312 - protein, 539 aa, Homo sapiens
TIGLGTRPGGCMGDAPSPEEKLHLITRNLQEVLGEEKLKEILKERELKIYWGTATTGKPHVAYFVPMSKIADFLKAGCEVTILFADLHAYLDNMKAPWELLELRVSYYENVIKAMLESIGVPLEKLKFIKGTDYQLSKEYTLDVYRLSSVVTQHDSKKAGAEVVKQVEHPLLSGLLYPGLQALDEEYLKVDAQFGGIDQRKIFTFAEKYLPALGYSKRVHLMNPMVPGLTGSKMSSSEEESKIDLLDRKEDVKKKLKKAFCEPGNVENNGVLSFIKHVLFPLKSEFVILRDEKWGGNKTYTAYVDLEKDFAAEVVHPGDLKNSVEVALNKLLDPIREKFNTPALKKLASAAYPDPSKQKPMAKGPAKNSEPEEVIPSRLDIRVGKIITVEKHPDADSLYVEKIDVGEAEPRTVVSGLVQFVPKEELQDRLVVVLCNLKPQKMRGVESQGMLLCASIEGINRQVEPLDPPAGSAPGEHVFVKGYEKGQPDEELKPKKKVFEKLQADFKISEECIAQWKQTNFMTKLGSISCKSLKGGNIS

SEQ ID NO: 870313 - protein, 548 aa, Homo sapiens
RGLYVVFSWSVRFYNFTSGAMGDAPSPEEKLHLITRNLQEVLGEEKLKEILKERELKIYWGTATTGKPHVAYFVPMSKIADFLKAGCEVTILFADLHAYLDNMKAPWELLELRVSYYENVIKAMLESIGVPLEKLKFIKGTDYQLSKEYTLDVYRLSSVVTQHDSKKAGAEVVKQVEHPLLSGLLYPGLQALDEEYLKVDAQFGGIDQRKIFTFAEKYLPALGYSKRVHLMNPMVPGLTGSKMSSSEEESKIDLLDRKEDVKKKLKKAFCEPGNVENNGVLSFIKHVLFPLKSEFVILRDEKWGGNKTYTAYVDLEKDFAAEVVHPGDLKNSVEVALNKLLDPIREKFNTPALKKLASAAYPDPSKQKPMAKGPAKNSEPEEVIPSRLDIRVGKIITVEKHPDADSLYVEKIDVGEAEPRTVVSGLVQFVPKEELQDRLVVVLCNLKPQKMRGVESQGMLLCASIEGINRQVEPLDPPAGSAPGEHVFVKGYEKGQPDEELKPKKKVFEKLQADFKISEECIAQWKQTNFMTKLGSISCKSLKGGNIS

SEQ ID NO: 870314 - protein, 366 aa, Homo sapiens
MGDAPSPEEKLHLITRNLQEVLGEEKLKEILKERELKIYWGTATTGKPHVAYFVPMSKIADFLKAGCEVTILFADLHAYLDNMKAPWELLELRVSYYENVIKAMLESIGVPLEKLKFIKGTDYQLSKEYTLDVYRLSSVVTQHDSKKAGAEVVKQVEHPLLSGLLYPGLQALDEEYLKVDAQFGGIDQRKIFTFAEKYLPALGYSKRVHLMNPMVPGLTGSKMSSSEEESKIDLLDRKEDVKKKLKKAFCEPGNVENNGVLSFIKHVLFPLKSEFVILRDEKWGGNKTYTAYVDLEKDFAAEVVHPGDLKNSVEVALNKLLDPIREKFNTPALKKLASAAYPDPSKQTQASGQREWIFRHIKDSKI

SEQ ID NO: 870315 - protein, 509 aa, Homo sapiens
CQYPRLCTRLGGAGRGSGAGLSGGSRGSGAMGDAPSPEEKLHLITRNLQVTILFADLHAYLDNMKAPWELLELRVSYYENVIKAMLESIGVPLEKLKFIKGTDYQLSKEYTLDVYRLSSVVTQHDSKKAGAEVVKQVEHPLLSGLLYPGLQALDEEYLKVDAQFGGIDQRKIFTFAEKYLPALGYSKRVHLMNPMVPGLTGSKMSSSEEESKIDLLDRKEDVKKKLKKAFCEPGNVENNGVLSFIKHVLFPLKSEFVILRDEKWGGNKTYTAYVDLEKDFAAEVVHPGDLKNSVEVALNKLLDPIREKFNTPALKKLASAAYPDPSKQKPMAKGPAKNSEPEEVIPSRLDIRVGKIITVEKHPDADSLYVEKIDVGEAEPRTVVSGLVQFVPKEELQDRLVVVLCNLKPQKMRGVESQGMLLCASIEGINRQVEPLDPPAGSAPGEHVFVKGYEKGQPDEELKPKKKVFEKLQADFKISEECIAQWKQTNFMTKLGSISCKSLKGGNIS

SEQ ID NO: 870316 - protein, 315 aa, Homo sapiens; identical to SEQ ID NO: 870292

SEQ ID NO: 870317 - protein, 281 aa, Homo sapiens
MWARNSHACELGMLSMSLLTWILFLIEFVILRDEKWGGNKTYTAYVDLEKDFAAEVVHPGDLKNSVEVALNKLLDPIREKFNTPALKKLASAAYPDPSKQKPMAKGPAKNSEPEEVIPSRLDIRVGKIITVEKHPDADSLYVEKIDVGEAEPRTVVSGLVQFVPKEELQDRLVVVLCNLKPQKMRGVESQGMLLCASIEGINRQVEPLDPPAGSAPGEHVFVKGYEKGQPDEELKPKKKVFEKLQADFKISEECIAQWKQTNFMTKLGSISCKSLKGGNIS

SEQ ID NO: 870318 - protein, 142 aa, Homo sapiens
TLRIPVDYGEAEPRTVVSGLVQFVPKEELQDRLVVVLCNLKPQKMRGVESQGMLLCASIEGINRQVEPLDPPAGSAPGEHVFVKGYEKGQPDEELKPKKKVFEKLQADFKISEECIAQWKQTNFMTKLGSISCKSLKGGNIS

SEQ ID NO: 870319 - protein, 246 aa, Homo sapiens
MGDAPSPEEKLHLITRNLQEVLGEEKLKEILKERELKIYWGTATTGKPHVAYFVPMSKIADFLKAGCEVTILFADLHAYLDNMKAPWELLELRVSYYENVIKAMLESIGVPLEKLKFIKGTDYQLSKEYTLDVYRLSSVVTQHDSKKAGAEVVKQVEHPLLSGLLYPGLQALDEEYLKVDAQFGGIDQRKIFTFAEKYLPALGYSKRVHLMNPMVPGLTGSKMSSSEEVSCQLRLEFRNLQPQWRD

SEQ ID NO: 870320 - protein, 192 aa, Homo sapiens; identical to SEQ ID NO: 870296

SEQ ID NO: 870321 - protein, 480 aa, Homo sapiens [sequence omitted]

SEQ ID NO: 870322 - protein, 205 aa, Homo sapiens
MGDAPSPEEKLHLITRNLQEVLGEEKLKEILKERELKIYWGTATTGKPHVAYFVPMSKIADFLKAGCEVTILFADLHAYLDNMKAPWELLELRVSYYENVIKAMLESIGVPLEKLKFIKGTDYQLSKEYTLDVYRLSSVVTQHDSKKAGAEVVKQALDEEYLKVDAQFGGIAQRKIFTFAREGECLLSCLFSLAPQRYAAVFIEL

SEQ ID NO: 870323 - protein, 208 aa, Homo sapiens
TEFCYHCKQIWHPNQTCDMARQQRAQTLRVRTKHTSGLSYGQESGPADDIKPCPRCSAYIIKMNDGSCNHMTCAVCGCEFCWLCMKEISDLHYLSPSGCTFWGKKPWSRKKKILWQLGTLIGAPVGISLIAGIAIPAMVIGIPVYVGRKIHSRYEGRKTSKHKRNLAITGGVTLSVIASPVIAAVSVQWQMPGEPSRIPALGKAALKA

SEQ ID NO: 870324 - protein, 107 aa, Homo sapiens
MQSSAILPKVFIPRPPSYIPTQTPSLFPSHHCSPGAPARPLCPVHLTTLLTMQTSLSTPCALPRLPCTPCPLGPGASSCSNYGPPARASAPSSVHPMVLGSGGHSGH

SEQ ID NO: 870325 - protein, 499 aa, Homo sapiens
MNDDPSMEENGVERVCPESLLQSREYSSLPLPRHTSSTDGTITSSDPGLEILNMASCDLDRNSLCKKEEDTRSASPTIEAQGTSPAHDNIAFQDSTSKDKTILNLEAKEEPETIEEHKKEHASGDSVVSPLPVTTVKSVNVRQSENTSANEKEVEAEFLRLSLGFKCDWFTLEKRVKLEERSRDLAEENLKKEITNSLKLLESLTPLCEDDNQAQEIIKKLEKSIKFLSQCAARVASRAEMLGAINQESRVSKAVEVMIQHVENLKRMYAKEHAELEELKQVLLQNERSFNPLEDDDDCQIKKRSASLNSKPSSLRRVTIASLPRNIGNAGMVAGMENNDRFSRRSSSWRILGSKQSEHRPSLPRFISTYSWADAEEEKCELKTKDDSEPSGEETVERTRKPSLSEKKNNPSKWDVSSVYDTIASWATNLKSSIRKANKALWLSIAFIVLFAALMSFLTGQLFQKSVDAAPTQQEDSWTSLEHILWPFTRLRHNGPPPV

SEQ ID NO: 870326 - protein, 499 aa, Homo sapiens; identical to SEQ ID NO: 870325

SEQ ID NO: 870327 - protein, 499 aa, Homo sapiens; identical to SEQ ID NO: 870325

SEQ ID NO: 870328 - protein, 446 aa, Homo sapiens
MASCDLDRNSLCKKEEDTRSASPTIEAQGTSPAHDNIAFQDSTSKDKTILNLEAKEEPETIEEHKKEHASGDSVVSPLPVTTVKSVNVRQSENTSANEKEVEAEFLRLSLGFKCDWFTLEKRVKLEERSRDLAEENLKKEITNSLKLLESLTPLCEDDNQAQEIIKKLEKSIKFLSQCAARVASRAEMLGAINQESRVSKAVEVMIQHVENLKRMYAKEHAELEELKQVLLQNERSFNPLEDDDDCQIKKRSASLNSKPSSLRRVTIASLPRNIGNAGMVAGMENNDRFSRRSSSWRILGSKQSEHRPSLPRFISTYSWADAEEEKCELKTKDDSEPSGEETVERTRKPSLSEKKNNPSKWDVSSVYDTIASWATNLKSSIRKANKALWLSIAFIVLFAALMSFLTGQLFQKSVDAAPTQQEDSWTSLEHILWPFTRLRHNGPPPV

SEQ ID NO: 870329 - protein, 499 aa, Homo sapiens; identical to SEQ ID NO: 870325

SEQ ID NO: 870330 - protein, 348 aa, Homo sapiens
MNDDPSMEENGVERVCPESLLQSREYSSLPLPRHTSSTDGTITSSDPGLEILNMASCDLDRNSLCKKEEDTRSASPTIEAQGTSPAHDNIAFQDSTSKDKTILNLEAKEEPETIEEHKKEHASGDSVVSPLPVTTVKSVNVRQSENTSANEKEVEAEFLRLSLGFKCDWFTLEKRVKLEERSRDLAEENLKKEITNSLKLLESLTPLCEDDNQAQEIIKKLEKSIKFLSQCAARVASRAEMLGAINQESRVSKAVEVMIQHVENLKRMYAKEHAELEELKQVLLQNERSFNPLEDDDDCQIKKRSASLNSKPSSLRRVTIASLPRNIGNAGMVAGMENNDRFSRRSSS

SEQ ID NO: 870331 - protein, 499 aa, Homo sapiens; identical to SEQ ID NO: 870325

SEQ ID NO: 870332 - protein, 499 aa, Homo sapiens; identical to SEQ ID NO: 870325

SEQ ID NO: 870333 - protein, 499 aa, Homo sapiens; identical to SEQ ID NO: 870325

SEQ ID NO: 870334 - protein, 499 aa, Homo sapiens; identical to SEQ ID NO: 870325

SEQ ID NO: 870335 - protein, 499 aa, Homo sapiens; identical to SEQ ID NO: 870325

SEQ ID NO: 870336 - protein, 259 aa, Homo sapiens
MLGAINQESRVSKAVEVMIQHVENLKRMYAKEHAELEELKQVLLQNERSFNPLEDDDDCQIKKRSASLNSKPSSLRRVTIASLPRNIGNAGMVAGMENNDRFSRRSSSWRILGSKQSEHRPSLPRFISTYSWADAEEEKCELKTKDDSEPSGEETVERTRKPSLSEKKNNPSKWDVSSVYDTIASWATNLKSSIRKANKALWLSIAFIVLFAALMSFLTGQLFQKSVDAAPTQQEDSWTSLEHILWPFTRLRHNGPPPV

SEQ ID NO: 870337 - protein, 328 aa, Homo sapiens
MNDDPSMEENGVERVCPESLLQSREYSSLPLPRHTSSTDGTITSSDPGLEILNMASCDLDRNSLCKKEEDTRSASPTIEAQGTSPAHDNIAFQDSTSKDKTILNLEAKEEPETIEEHKKEHASGDSVVSPLPVTTVKSVNVRQSENTSANEKEVEAEFLRLSLGFKCDWFTLEKRVKLEERSRDLAEENLKKEITNSLKLLESLTPLCEDDNQAQEIIKKLEKSIKFLSQCAARVASRAEMLGAINQESRVSKAVEVMIQHVENLKRMYAKEHAELEELKQVLLQNERSFNPLEDDDDCQIKKRSASLNSKVITNSLNKCLANTIRRF

SEQ ID NO: 870338 - protein, 837 aa, Homo sapiens
TRGARLRRLPRAGAGDGHGGRAGGMAAAGPAAGPTGPEPMPSYAQLVQRGWGSALAAARGCTDCGWGLARRGLAEHAHLAPPELLLLALGALGWTALRSAATARLFRPLAKRCCLQPRDAAKMPESAWKFLFYLGSWSYSAYLLFGTDYPFFHDPPSVFYDWTPGMAVPRDIAAAYLLQGSFYGHSIYATLYMDTWRKDSVVMLLHHVVTLILIVSSYAFRYHNVGILVLFLHDISDVQLEFTKLNIYFKSRGGSYHRLHALAADLGCLSFGFSWFWFRLYWFPLKVLYATSHCSLRTVPDIPFYFFFNALLLLLTLMNLYWFLYIVAFAAKVLTGQVHELKDLREYDTAEAQSLKPSKAEKPLRNGLVKDKRFLNPSAPPPWTRPHPEYPGHAPRPWPPLHPLQLCSSRAAATSPGTPPPHPASISRPRPPGPLPLRGHRPRPQPTGPGPPRTLRTLWSSPGRKMPPPQQGPCGHHLLLLLALLLPSLPLTRAPVPPGPAAALLQALGLRDEPQGAPRLRPVPPVMWRLFRRRDPQETRSGSRRTSPGVTLQPCHVEELGVAGNIVRHIPDRGAPTRASEPASAAGHCPEWTVVFDLSAVEPAERPSRARLELRFAAAAAAAPEGGWELSVAQAGQGAGADPGPVLLRQLVPALGPPVRAELLGAAWARNASWPRSLRLALALRPRAPAACARLAEASLLLVTLDPRLCHPLARPRRDAEPVLGGGPGGACRARRLYVSFREVGWHRWVIAPRGFLANYCQGQCALPVALSGSGGPPALNHAVLRALMHAAAPGAADLPCCVPARLSPISVLFFDNSDNVVLRQYEDMVVDECGCR

SEQ ID NO: 870339 - protein, 421 aa, Homo sapiens
TRGARLRRLPRAGAGDGHGGRAGGMAAAGPAAGPTGPEPMPSYAQLVQRGWGSALAAARGCTDCGWGLARRGLAEHAHLAPPELLLLALGALGWTALRSAATARLFRVSVAGGRDEGTPDWGKPGPGTWGRRRVPFFQRWLLRMKGSPDVGGGLGLERPRTLEPQDKPLAKRCCLQPRDAAKMPESAWKFLFYLGSWSYSAYLLFGTDYPFFHDPPSVFYDWTPGMAVPRDIAAAYLLQGSFYGHSIYATLYMDTWRKDSVVMLLHHVVTLILIVSSYAFRYHNVGILVLFLHDISDVQLEFTKLNIYFKSRGGSYHRLHALAADLGCLSFGFSWFWFRLYWFPLKVLYATSHCSLRTVPDIPFYFFFNALLLLLTLMNLYWFLYIVAFAAKVLTGQVHELKDLREYDTAEAQSLKPSKAE

SEQ ID NO: 870340 - protein, 361 aa, Homo sapiens
TRGARLRRLPRAGAGDGHGGRAGGMAAAGPAAGPTGPEPMPSYAQLVQRGWGSALAAARGCTDCGWGLARRGLAEHAHLAPPELLLLALGALGWTALRSAATARLFRPLAKRCCLQPRDAAKMPESAWKFLFYLGSWSYSAYLLFGTDYPFFHDPPSVFYDWTPGMAVPRDIAAAYLLQGSFYGHSIYATLYMDTWRKDSVVMLLHHVVTLILIVSSYAFRYHNVGILVLFLHDISDVQLEFTKLNIYFKSRGGSYHRLHALAADLGCLSFGFSWFWFRLYWFPLKVLYATSHCSLRTVPDIPFYFFFNALLLLLTLMNLYWFLYIVAFAAKVLTGQVHELKDLREYDTAEAQSLKPSKAE

SEQ ID NO: 870341 - protein, 274 aa, Homo sapiens
SEPPGRARGRTEQRHPERGVTWLGRIPSFSPGDSYWSVMHLSGLGHGKTNGILWLKPLGPCRRRCISPFNSALGVLGSAAIGAHIAAAYLLQGSFYGHSIYATLYMDTWRKDSVVMLLHHVVTLILIVSSYAFRYHNVGILVLFLHDISDVQLEFTKLNIYFKSRGGSYHRLHALAADLGCLSFGFSWFWFRLYWFPLKVLYATSHCSLRTVPDIPFYFFFNALLLLLTLMNLYWFLYIVAFAAKVLTGQVHELKDLREYDTAEAQSLKPSKAE

SEQ ID NO: 870342 - protein, 387 aa, Homo sapiens
TRGARLRRLPRAGAGDGHGGRAGGMAAAGPAAGPTGPEPMPSYAQLVQRGWGSALAAARGCTDCGWGLARRGLAEHAHLAPPELLLLALGALGWTALRSAATARLFRPLAKRCCLQPRDAAKMPESAWKFLFYLGSWSYSAYLLFGTDYPFFHDPPSVFYDWTPGMAVPRDIAAAYLLQGSFYGHSIYATLYMDTWRKDSVVMLLHHVVTLILIVSSYAFRYHNVGILVLFLHDISDVQLEFTKLNIYFKSRGGSYHRLHALAADLGCLSFGFSWFWFRLYWFPLKVLYATSHCSLRTVPDIPFYFFFNALLLLLTLMNLYWFLYIVAFAAKVLTGQVHELKDLREYDTAEAQSLKPSKAEEAVAQSSVTFFGTGGARCRHLTHPGL

SEQ ID NO: 870343 - protein, 361 aa, Homo sapiens; identical to SEQ ID NO: 870340

SEQ ID NO: 870344 - protein, 924 aa, Homo sapiens
TRGARLRRLPRAGAGDGHGGRAGGMAAAGPAAGPTGPEPMPSYAQLVQRGWGSALAAARGCTDCGWGLARRGLAEHAHLAPPELLLLALGALGWTALRSAATARLFRVSVAGGRDEGTPDWGKPGPGTWGRRRVPFFQRWLLRMKGRRNVGGGLGLERPRTLEPQDKVSRAAARPLQTVLRGGTGEMRGCGRAGPLAKRCCLQPRDAAKMPESAWKFLFYLGSWSYSAYLLFGTDYPFFHDPPSVFYDWTPGMAVPRDIAAAYLLQGSFYGHSIYATLYMDTWRKDSVVMLLHHVVTLILIVSSYAFRYHNVGILVLFLHDISDVQLEFTKLNIYFKSRGGSYHRLHALAADLGCLSFGFSWFWFRLYWFPLKVLYATSHCSLRTVPDIPFYFFFNALLLLLTLMNLYWFLYIVAFAAKVLTGQVHELKDLREYDTAEAQSLKPSKAEKPLRNGLVKDKRFLNPSAPPPWTRPHPEYPGHAPRPWPPLHPLQLCSSRAAATSPGTPPPHPASISRPRPPGPLPLRGHRPRPQPTGPGPPRTLRTLWSSPGRKMPPPQQGPCGHHLLLLLALLLPSLPLTRAPVPPGPAAALLQALGLRDEPQGAPRLRPVPPVMWRLFRRRDPQETRSGSRRTSPGVTLQPCHVEELGVAGNIVRHIPDRGAPTRASEPVSAAGHCPEWTVVFDLSAVEPAERPSRARLELRFAAAAAAAPEGGWELSVAQAGQGAGADPGPVLLRQLVPALGPPVRAELLGAAWARNASWPRSLRLALALRPRAPAACARLAEASLLLVTLDPRLCHPLARPRRDAEPVLGGGPGGACRARRLYVSFREVGWHRWVIAPRGFLANYCQGQCALPVALSGSGGPPALNHAVLRALMHAAAPGAADLPCCVPARLSPISVLFFDNSDNVVLRQYEDMVVDECGCR

SEQ ID NO: 870345 - protein, 790 aa, Homo sapiens
TRGARLRRLPRAGAGDGHGGRAGGMAAAGPAAGPTGPEPMPSYAQLVQRGWGSALAAARGCTDCGWGLARRGLAEHAHLAPPELLLLALGALGWTALRSAATARLFRPLAKRCCLQPRDAAKMPESAWKFLFYLGSWSYSAYLLFGTDYPFFHDPPSVFYDWTPGMAVPRDIAAAYLLQGSFYGHSIYATLYMDTWRKDSVVMLLHHVVTLILIVSSYAFRYHNVGILVLFLHDISDVQLEFTKLNIYFKSRGGSYHRLHALAADLGCLSFGFSWFWFRLYWFPLKVLYATSHCSLRTVPDIPFYFFFNALLLLLTLMNLYWFLYIVAFAAKVLTGQVHELKDLREYDTAEAQSLKPSKAEKPLRNGLVKDKRFLNPSAPPPWTRPHPEYPGHAPRPWPPLHPLQLCSSRAAATSPGTPPPHPASISRPRPPGPLPLRGHRPRPQPTGPGPPRTLRTLWSSPGRKMPPPQQGPCGHHLLLLLALLLPSLPLTRAPVPPGPAAALLQALGLRDEPQGAPRLRPVPPVMWRLFRRRDPQETRSGSRRTSPGVTLQPCHVEELGVAGNIVRHIPDRGAPTRASEPASAAGHCPEWTVVFDLSAVEPAERPSRARLELRFAAAAAAAPEGGWELSVAQAGQGAGADPGPVLLRQLVPALGPPVRAELLGAAWARNASWPRSLRLALAACRARRLYVSFREVGWHRWVIAPRGFLANYCQGQCALPVALSGSGGPPALNHAVLRALMHAAAPGAADLPCCVPARLSPISVLFFDNSDNVVLRQYEDMVVDECGCR

SEQ ID NO: 870346 - protein, 361 aa, Homo sapiens; identical to SEQ ID NO: 870340

SEQ ID NO: 870347 - protein, 211 aa, Homo sapiens
MECVLKIIAFGVLNYFRDAWNVFDFVTVLGSITDILVTEIAETNNFINLSFLRLFRAARLIKLLRQGYTIRILLWTFVQSFKALPYVCLLIAMLFFIYAIIGMQVFGNIALDDDTSINRHNNFRTFLQALMLLFRSATGEAWHEIMLSCLSNQACDEQANATECGSDFAYFYFVSFIFLCSFLVSPGHCAPPSATSCLGTAQASPTSPADP

SEQ ID NO: 870348 - protein, 1044 aa, Homo sapiens
RRRLRRWGRARSAAVPAAPWLLRSERLARPAPSLPGPLGRGCTRGPGAMVRFGDELGGRYGGPGGGERARGGGAGGAGGPGPGGLQPGQRVLYKQSIAQRARTMALYNPIPVKQNCFTVNRSLFVFSEDNVVRKYAKRITEWPPFEYMILATIIANCIVLALEQHLPDGDKTPMSERLDDTEPYFIGIFCFEAGIKIIALGFVFHKGSYLRNGWNVMDFVVVLTGILATAGTDFDLRTLRAVRVLRPLKLVSGIPSLQVVLKSIMKAMVPLLQIGLLLFFAILMFAIIGLEFYMGKFHKACFPNSTDAEPVGDFPCGKEAPARLCEGDTECREYWPGPNFGITNFDNILFAILTVFQCITMEGWTDILYNTNDAAGNTWNWLYFIPLIIIGSFFMLNLVLGVLSGEFAKERERVENRRAFLKLRRQQQIERELNGYLEWIFKAEEVMLAEEDRNAEEKSPLDVLKRAATKKSRNDLIHAEEGEDRFADLCAVGSPFARASLKSGKTESSSYFRRKEKMFRFFIRRMVKAQSFYWVVLCVVALNTLCVAMVHYNQPRRLTTTLYFAEFVFLGLFLTEMSLKMYGLGPRSYFRSSFNCFDFGVIVGSVFEVVWAAIKPGSSFGISVLRALRLLRIFKVTKYWSSLRNLVVSLLNSMKSIISLLFLLFLFIVVFALLGMQLFGGQFNFQDETPTTNFDTFPAAILTVFQILTGEDWNAVMYHGIESQGGVSKGMFSSFYFIVLTLFGNYTLLNVFLAIAVDNLANAQELTKDEEEMEEAANQKLALQKAKEVAEVSPMSAANISIAARQQNSAKARSVWEQRASQLRLQNLRASCEALYSEMDPEERLRFATTRHLRPDMKTHLDRPLVVELGRDGARGPVGGKARPEAAEAPEGVDPPRRHHRHRDKDKTPAAGDQDRAEAPKAESGEPGAREERPGPGPEGGRRHHRRGSPEEAAEREPRRHRAHRHQDPSKECAGAKGERRARHRGGPRAGPREAESGEEPARRHRARHKAQPAHEAVEKEATEKEAEIVEADKEKELRNHQPR

SEQ ID NO: 870349 - protein, 229 aa, Homo sapiens
MMDVDRGHGEEEKKLSLKGGVTRSGYNIVFTSMFSMECVLKIIAFGVLNYFRDAWNVFDFVTVLGSITDILVTEIAETNNFINLSFLRLFRAARLIKLLRQGYTIRILLWTFVQSFKALPYVCLLIAMLFFIYAIIGMQVFGNIALDDDTSINRHNNFRTFLQALMLLFRSATGEAWHEIMLSACTGVFSVWMSLTHRAMQQKTHLIEVKHTRPLPGLGVQHDCDQTFL

SEQ ID NO: 870350 - protein, 141 aa, Homo sapiens
MMDVDRGHGEEEKKLSLKGGVTRSGYNIVFTSMFSMECVLKIIAFGVLNYFRDAWNVFDFVTVLGSITDILVTEIAETNNFINLSFLRLFRAARLIKLLRQGYTIRILLWTFVQSFKVGQAGGLHAFCRASRGAVGLVGPD

SEQ ID NO: 870351 - protein, 31 aa, Homo sapiens
MVQWEEGQRPILNAPGALCNAERSWQGTPKW

SEQ ID NO: 870352 - protein, 106 aa, Homo sapiens [sequence omitted]

SEQ ID NO: 870353 - protein, 117 aa, Homo sapiens
HASGNVYHLKCFTCSTCRNRLVPGDRFHYINGSLFCEHDRPTALINGHLNSLQSNPLLPDQKVNTQQLLISFIRASWKVQPLNLAREFSWVVVFLHALLKKCRLLVVHRVFRSRIAD

SEQ ID NO: 870354 - protein, 165 aa, Homo sapiens
MVNPGSSSQPPPVTAGSLSWKRCAGCGGKIADRFLLYAMDSYWHSRCLKCSCCQAQLGDIGTSCYTKSGMILCRNDYIRLFGNSGACSACGQSIPASELVMRAQGNVYHLKCFTCSTCRNRLVPGDRFHYINGSLFCEHDRPTALINGHLNSLQSNPLLPDQKVC

SEQ ID NO: 870355 - protein, 165 aa, Homo sapiens; identical to SEQ ID NO: 870354

SEQ ID NO: 870356 - protein, 165 aa, Homo sapiens; identical to SEQ ID NO: 870354

SEQ ID NO: 870357 - protein, 180 aa, Homo sapiens
MVNPGSSSQPPPVTAGSLSWKRCAGCGGKIADRFLLYAMDSYWHSRCLKCSCCQAQLGDIGTSCYTKSGMILCRNDYIRLFGNSGACSACGQSIPASELVMRAQGNVYHLKCFTCSTCRNRLVPGDRFHYINGSLFCEHDRPTALINGHLNSLQSNPLLPDQKSAKRVRVMQRISRYRAD

SEQ ID NO: 870358 - protein, 218 aa, Homo sapiens
MVNPGSSSQPPPVTAGSLSWKRCAGCGGKIADRFLLYAMDSYWHSRCLKCSCCQAQLGDIGTSCYTKSGMILCRNDYIRLFGNSGACSACGQSIPASELVMRAQGNVYHLKCFTCSTCRNRLVPGDRFHYINGSLFCEHDRPTALINGHLNSLQSNPLLPDQKVNTQQLLISFIRASWKVQPLNLAREFSWVVVFLHALLKKCRLLVVHRVFRSRIAD

SEQ ID NO: 870359 - protein, 165 aa, Homo sapiens; identical to SEQ ID NO: 870354

SEQ ID NO: 870360 - protein, 165 aa, Homo sapiens; identical to SEQ ID NO: 870354

SEQ ID NO: 870361 - protein, 90 aa, Homo sapiens
SRSVLSHGGTGSGPSTERLVPGLCTIRTSVITLLFPKRPFSWIRHFLIAAVLIALNNVLVILVPTIKYIFGFIAEGSLGNNSVITDVRIG

SEQ ID NO: 870362 - protein, 405 aa, Homo sapiens
MELRNVNIEPDDESSSGESAPDSYIGIGNSEKAAMSSQFANEDTESQKFLTNGFLGKKKLADYADEHHPGTTSFGMSSFNLSNAIMGSGILGLSYAMANTGIILFIIMLLAVAILSLYSVHLLLKTAKEGGSLIYEKLGEKAFGWPGKIGAFVSITMQNIGAMSSYLFIIKYELPEVIRAFMGLEENTGEWYLNGNYLIIFVSVGIILPLSLLKNLGYLGYTSGFSLTCMVFFVSVVIYKKFQIPCPLPVLDHSVGNLSFNNTLPMHVVMLPNNSESSDVNFMMDYTHRNPAGLDENQAKGSLHDSGVEYEAHSDDKCEPKYFVFNSRTAYAIPILVFAFVCHPEVLPIYSELKDRSRRKMQTVSNISITGMLVMYLLAALFGYLTFYGEVDEMNYFMPTAKCIH

SEQ ID NO: 870363 - protein, 405 aa, Homo sapiens; identical to SEQ ID NO: 870362

SEQ ID NO: 870364 - protein, 662 aa, Homo sapiens
MELRNVNIEPDDESSSGESAPDSYIGIGNSEKAAMSSQFANEDTESQKFLTNGFLGKKKLADYADEHHPGTTSFGMSSFNLSNAIMGSGILGLSYAMANTGIILFIIMLLAVAILSLYSVHLLLKTAKEGGSLIYEKLGEKAFGWPGKIGAFVSITMQNIGAMSSYLFIIKYELPEVIRAFMGLEENTGEWYLNGNYLIIFVSVGIILPLSLLKNLGYLGYTSGFSLTCMVFFVSVVIYKKFQIPCPLPVLDHSVGNLSFNNTLPMHVVMLPNNSESSDVNFMMDYTHRNPAGLDENQAKGSLHDSGVEYEAHSDDKCEPKYFVFNSRTAYAIPILVFAFVCHPEVLPIYSELKDRSRRKMQTVSNISITGMLVMYLLAALFGYLTFYGELRDELLHAYSKVYTLDIPLLMVRLAVLVAVTLTVPIVLFPIRTSVITLLFPKRPFSWIRHFLIAAVLIALNNVLVILVPTIKYIFGFIGASSATMLIFILPAVFYLKLVKKETFRSPQKVGEITGRFQRRLPVISPGTCRRGKSLFLSRMVVYVFKIKPVVHISTQVLLEQCEMMKVYFCCFTSRIRVTACNNHQIVLFPLPSPHPAPPKKVPNICILRTSNKNALVAKLSPFNVFSQSCTKVSGLFTNRGKRHVLGTVSVSVRYMNGQTPV

SEQ ID NO: 870365 - protein, 544 aa, Homo sapiens [sequence omitted]

SEQ ID NO: 870366 - protein, 258 aa, Homo sapiens
MELRNVNIEPDDESSSGESAPDSYIGIGNSEKAAMSSQFANEDTESQKFLTNGFLGKKKLADYADEHHPGTTSFGMSSFNLSNAIMGSGILGLSYAMANTGIILFIIMLLAVAILSLYSVHLLLKTAKEGGSLIYEKLGEKAFGWPGKIGAFVSITMQNIGAMSSYLFIIKYELPEVIRAFMGLEENTGEWYLNGNYLIIFVSVGIILPLSLLKNLGYLGYTSGFSLTCMVFFVSVDDLQENKFLFANFYHTKVVLLI

SEQ ID NO: 870367 - protein, 405 aa, Homo sapiens; identical to SEQ ID NO: 870362

SEQ ID NO: 870368 - protein, 165 aa, Homo sapiens
APPDTDQHHELRSIEITGRFQRRLPVISPGTCRRGKSLFLSRMVVYVFKIKPVVHISTQVLLEQCEMMKVYFCCFTSRIRVTACNNHQIVLFPLPSPHPAPPKKVPNICILRTSNKNALVAKLSPFNVFSQSCTKVSGLFTNRGKRHVLGTVSVSVRYMNGQTPV

SEQ ID NO: 870369 - protein, 271 aa, Homo sapiens
GRPSQPCAALQGPGRRTRTHPPTQPRSAMGKNKQPRGQQRQGGPPAADAAGPDDMEPKKGTGAPKECGEEEPRTCCGCRFPLLLALLQLALGIAVTVVGFLMASISSSLLVRDTPFWAGIIVCLVAYLGLFMLCVSYQVDERTCIQFSMKLLYFLLSALGLTVCVLAVAFAAHHYSQLTQFTCETTLDSCQCKLPSSEPLSRTFVYRDVTDCTSVTGTFKLFLLIQMILNLVCGLVCLLACFVMWKHRYQVFYVGVRICSLTASEGPQQKI

SEQ ID NO: 870370 - protein, 103 aa, Homo sapiens
VKCWGFEHWADEQGFVQFLLISLLRSRAGSAKVWSSYCKSKRCLARPESWSPALSPQAPATASEFSAWCPAAVPGAATGAGGLQSSPRLSAAVHARSFRAPCA

SEQ ID NO: 870371 - protein, 70 aa, Homo sapiens
RQAYALLVLGCVISAWLAQLCQGLGEGYFFPPAAYCVLAESDRNKLDYSLSQTELEGLYCGRIPSIILQK

SEQ ID NO: 870372 - protein, 280 aa, Homo sapiens
MKFRAKIVDGACLNHFTRISNMIAKLAKTCTLRISPDKLNFILCDKLANGGVSMWCELEQENFFNEFQMEGVSAENNEIYLELTSENLSRALKTAQNARALKIKLTNKHFPCLTVSVELLSMSSSSRIVTHDIPIKVIPRKLWKDLQEPVVPDPDVSIYLPVLKTMKSVVEKMKNISNHLVIEANLDGELNLKIETELVCVTTHFKDLGNPPLASESTHEDRNVEHMAEVHIDIRKLLQFLAGQQVNPTKALCNIVNNKMVHFDLLHEDVSLQYFIPALS

SEQ ID NO: 870373 - protein, 280 aa, Homo sapiens; identical to SEQ ID NO: 870372

SEQ ID NO: 870374 - protein, 259 aa, Homo sapiens
MIAKLAKTCTLRISPDKLNFILCDKLANGGVSMWCELEQENFFNEFQMEGVSAENNEIYLELTSENLSRALKTAQNARALKIKLTNKHFPCLTVSVELLSMSSSSRIVTHDIPIKVIPRKLWKDLQEPVVPDPDVSIYLPVLKTMKSVVEKMKNISNHLVIEANLDGELNLKIETELVCVTTHFKDLGNPPLASESTHEDRNVEHMAEVHIDIRKLLQFLAGQQVNPTKALCNIVNNKMVHFDLLHEDVSLQYFIPALS

SEQ ID NO: 870375 - protein, 280 aa, Homo sapiens; identical to SEQ ID NO: 870372

SEQ ID NO: 870376 - protein, 280 aa, Homo sapiens; identical to SEQ ID NO: 870372

SEQ ID NO: 870377 - protein, 86 aa, Homo sapiens
DVCLYYSVFTLLKRYYLRPASESTHEDRNVEHMAEVHIDIRKLLQFLAGQQVNPTKALCNIVNNKMVHFDLLHEDVSLQYFIPALS

SEQ ID NO: 870378 - protein, 105 aa, Homo sapiens
EEPNSSKTESNTLTLPFRWPQASRSREEEENKRNSLALFRGMVTSLGPPQAPGSPLPRSTPPGPSRSGRVCGGGTSAPPESLTEGQQDAAEAQHPQGPHGVRPYL

SEQ ID NO: 870379 - protein, 124 aa, Homo sapiens
MHSVVPKQREMSQKTNENVERYTQFLQKPQKPIQPYICSTLNDFQEERDFLANNIFPQLNELCNSWGTYFKAVDLSWSALKAPKSLPTHLFRQYSCLRSQRLKLCLDYVNSCFPFFICMLGQTY

SEQ ID NO: 870380 - protein, 85 aa, Homo sapiens
GLQLFSNQMAPRAPHTWDRPFAWAALASKGKRPMNVSREHIHPFREVAAELLPDPRERLFRDRGNGSHGNVFFTLSHLCLGFRWK

SEQ ID NO: 870381 - protein, 458 aa, Homo sapiens
MVAAGVTRPRAPLAANTESSVCRLSSREKISLQDLSKERRPGGAGGPPIQDEDEGEEGPTEPPPAEPRTLNGVSSPPHPSPKSPVQLEEAPFSRRFGLLKTGSSGALGPPERRTAEGAPGAGLQRSASSSWLEGTSTQAKELRLARITPTPSPKLPEPSVLSEVTKPPPCLENSSPPSRIPEPESPAKPNVPTASTAPPADSRDRRRSYQMPVRDEESESQRKARSRLMRQSRRSTQGVTLTDLKEAEKAAGKAPESEKPAQSLDPSRRPRVPGVENSDSPAQRAEAPDGQGPGPQAAREHRKVGKEWRGPAEGEEAEPADRSQESSTLEGGPSARRQRWQRDLNPEPEPESEEPDGGFRTLYAELRRENERLREALTETTLRLAQLKVELERATQRQERFAERPALLELERFERRALERKAAELEEELKALSDLRADNQRLKDENAALIRVISKLSK

SEQ ID NO: 870382 - protein, 330 aa, Homo sapiens
MRGKKVPPNHPLQNPEPSMASPPRRTPALRVPWSEVTKPPPCLENSSPPSRIPEPESPAKPNVPTASTAPPADSRDRRRSYQMPVRDEESESQRKARSRLMRQSRRSTQGVTLTDLKEAEKAAGKAPESEKPAQSLDPSRRPRVPGVENSDSPAQRAEAPDGQGPGPQAAREHRKVGKEWRGPAEGEEAEPADRSQESSTLEGGPSARRQRWQRDLNPEPEPESEEPDGGFRTLYAELRRENERLREALTETTLRLAQLKVELERATQRQERFAERPALLELERFERRALERKAAELEEELKALSDLRADNQRLKDENAALIRVISKLSK

SEQ ID NO: 870383 - protein, 130 aa, Homo sapiens
GLGRGLGYIGRWQRDLNPEPEPESEEPDGGFRTLYAELRRENERLREALTETTLRLAQLKVELERATQRQERFAERPALLELERFERRALERKAAELEEELKALSDLRADNQRLKDENAALIRVISKLSK

SEQ ID NO: 870384 - protein, 188 aa, Homo sapiens
GVCVRAGPAPDARSSPAPAPWRAAPRPAGSGGSGTSTQNLSQNRKSQTEALGRCDPTPPSGLCLLGAQLPGFPAPPASPHPPPDPPLPDPQLYAELRRENERLREALTETTLRLAQLKVELERATQRQERFAERPALLELERFERRALERKAAELEEELKALSDLRADNQRLKDENAALIRVISKLSK

SEQ ID NO: 870385 - protein, 529 aa, Homo sapiens
RYLLSHGANIAAVNSDGDLPLAPAPSSTPPRRRPPAPCWTPPTPTVSAPCTRSSVCRLSSREKISLQDLSKERRPGGAGGPPIQDEDEGEEGPTGEGPESGLLGPREEGSGSLNLEATGIFCDLPGVPTITEPPPAEPRTLNGVSSPPHPSPKSPVQLEEAPFSRRFGLLKTGSSGALGPPERRTAEGAPGAGLQRSASSSWLEGTSTQAKELRLARITPTPSPKLPEPSVLSEVTKPPPCLENSSPPSRIPEPESPAKPNVPTASTAPPADSRDRRRSYQMPVRDEESESQRKARSRLMRQSRRSTQGVTLTDLKEAEKAAGKAPESEKPAQSLDPSRRPRVPGVENSDSPAQRAEAPDGQGPGPQAAREHRKVGKEWRGPAEGEEAEPADRSQESSTLEGGPSARRQRWQRDLNPEPEPESEEPDGGFRTLYAELRRENERLREALTETTLRLAQLKVELERATQRQERFAERPALLELERFERRALERKAAELEEELKALSDLRADNQRLKDENAALIRVISKLSK

SEQ ID NO: 870386 - protein, 311 aa, Homo sapiens
MHLGNVCGMNELMQSEVTKPPPCLENSSPPSRIPEPESPAKPNVPTASTAPPADSRDRRRSYQMPVRDEESESQRKARSRLMRQSRRSTQGVTLTDLKEAEKAAGKAPESEKPAQSLDPSRRPRVPGVENSDSPAQRAEAPDGQGPGPQAAREHRKVGKEWRGPAEGEEAEPADRSQESSTLEGGPSARRQRWQRDLNPEPEPESEEPDGGFRTLYAELRRENERLREALTETTLRLAQLKVELERATQRQERFAERPALLELERFERRALERKAAELEEELKALSDLRADNQRLKDENAALIRVISKLSK

SEQ ID NO: 870387 - protein, 242 aa, Homo sapiens
SHSLKFPFSQSCGPSPLPRPSWVTHPERPALALLLSKPHLSLLSFSLAADLVGPLLSPPQVLCRVLLPADAGHGGRLWGEGGSAEDAEGHPDDGPHRPLLLLLPLLSTAAAHQISEGSTALWINTFLGVSTLLALWTLGIISRQARLHLGEQNMGAKFALFQVLLILTALQPSIFSVLANGGQIACSPPYSSKTRSQVMNCHLLILETFLMTVLTRMYYRRKDHKVGYETFSSPDLDLNLKA

SEQ ID NO: 870388 - protein, 98 aa, Homo sapiens
  misc_feature (96)..(96): Xaa can be any naturally occurring amino acid
MLGPFQYAFLKITLTLVGLFLIPDGIYDPADISEGSTALWINTFLGVSTLLALWTLGIISRQARLHLGEQNMGAKFAMFQVLLICLPTALPPPNKXGA

SEQ ID NO: 870389 - protein, 321 aa, Homo sapiens
MEVEDNYGSLQLVLSASHSSPTPQRALGPVELALTSILTLLALGSIAIFLEDAVYLYKNTLCPIKRRTLLWKSSAPTVVSVLCCFGLWIPRSLVLVEMTITSFYAVCFYLLMLVMVEGFGGKEAVLRTLRDTPMMVHTGPCCCCCPCCPRLLLTRKKLQLLMLGPFQYAFLKITLTLVGLFLIPDGIYDPADISEGSTALWINTFLGVSTLLALWTLGIISRQARLHLGEQNMGAKFALFQVLLILTALQPSIFSVLANGGQIACSPPYSSKTRSQVMNCHLLILETFLMTVLTRMYYRRKDHKVGYETFSSPDLDLNLKA

SEQ ID NO: 870390 - protein, 321 aa, Homo sapiens; identical to SEQ ID NO: 870389

SEQ ID NO: 870391 - protein, 52 aa, Homo sapiens
ARQWAGCVLCREGRPSPPLPLFYVPQVLLILTALQPSIFSVLANGGQIACSP

SEQ ID NO: 870392 - protein, 142 aa, Homo sapiens
PPIPIDMLSNTPHISEGSTALWINTFLGVSTLLALWTLGIISRQARLHLGEQNMGAKFALFQVLLILTALQPSIFSVLANGGQIACSPPYSSKTRSQVMNCHLLILETFLMTVLTRMYYRRKDHKVGYETFSSPDLDLNLKA

SEQ ID NO: 870393 - protein, 210 aa, Homo sapiens
MLVMVEGFGGKEAVLRTLRDTPMMVHTGPCCCCCPCCPRLLLTRKKLQLLMLGPFQYAFLKITLTLVGLFLIPDGIYDPADISEGSTALWINTFLGVSTLLALWTLGIISRQARLHLGEQNMGAKFALFQVLLILTALQPSIFSVLANGGQIACSPPYSSKTRSQVMNCHLLILETFLMTVLTRMYYRRKDHKVGYETFSSPDLDLNLKA

SEQ ID NO: 870394 - protein, 289 aa, Homo sapiens
MEVEDNYGSLQLVLSASHSSPTPQRALGPVELALTSILTLLALGSIAIFLEDAVYLYKNTLCPIKRRTLLWKSSAPTVVSVLCCFGLWIPRSLVLVEMTITSFYAVCFYLLMLVMVEGFGGKEAVLRTLRDTPMMVHTGPCCCCCPCCPRLLLTRKKLQLLMLGPFQYAFLKITLTLVGLFLIPDGIYDPADISEGSTALWINTFLGVSTLLALWTLGIISRQARLHLGEQNMGAKFALFQVLLILTALQPSIFSVLANGGQIACSPPYSSKTRSQGEHVKPPVPSWDG

SEQ ID NO: 870395 - protein, 289 aa, Homo sapiens; identical to SEQ ID NO: 870394

SEQ ID NO: 870396 - protein, 140 aa, Homo sapiens
MHRGVGPAFRVVRKMAASGAEPQVLVQYLVLRKDLSQAPFSWPAGALVAQACHAATAALHTHRDHPHTAAYLQELGRMRKVVLEAPDETTLKELAETLQQKNIDHMLWLEQPENIATCIALRPYPKEEVGQYLKKFRLFK

SEQ ID NO: 870397 - protein, 140 aa, Homo sapiens
AAPTTTKFAAVRRKMAASGAEPQVLVQYLVLRKDLSQAPFSWPAGALVAQACHAATAALHTHRDHPHTAAYLQELGRMRKVVLEAPDETTLKELAETLQQKNIDHMLWLEQPENIATCIALRPYPKEEVGQYLKKFRLFK

SEQ ID NO: 870398 - protein, 140 aa, Homo sapiens; identical to SEQ ID NO: 870396

SEQ ID NO: 870399 - protein, 392 aa, Homo sapiens
SICAASCLHATPDCTGMALTAHPSCLLALLVAGLAQGIRGPLRAQDLGPQPLELKEAFKLFQIQFNRSYLSPEEHAHRLDIFAHNLAQAQRLQEEDLGTAEFGVTPFSDLTEEEFGQLYGYRRAAGGVPSMGREIRSEEPEESVPFSCDWRKVAGAISPIKDQKNCNCCWAMAAAGNIETLWRISFWDFVDVSVQELLDCGRCGDGCHGGFVWDAFITVLNNSGLASEKDYPFQGKVRAHRCHPKKYQKVAWIQDFIMLQNNEHRIAQYLATYGPITVTINMKPLQLYRKGVIKATPTTCDPQLVDHSVLLVGFGSVKSEEGIWAETVSSQSQPQPPHPTPYWILKNSWGAQWGEKGYFRLHRGSNTCGITKFPLTARVQKPDMKPRVSCPP

SEQ ID NO: 870400 - protein, 380 aa, Homo sapiens
SICAASCLHATPDCTGMALTAHPSCLLALLVAGLAQGIRGPLRAQDLGPQPLELKEAFKLFQIQFNRSYLSPEEHAHRLDIFAHNLAQAQRLQEEDLGTAEFGVTPFSDLTEEEFGQLYGYRRAAGGVPSMGREIRSEEPEESVPFSCDWRKVAGAISPIKDQKNCNCCWAMAAAGNIETLWRISFWDFVDVSVQELLDCGRCGDGCHGGFVWDAFITVLNNSGLASEKDYPFQGKVRAHRCHPKKYQKVAWIQDFIMLQNNEHRIAQYLATYGPITVTINMKPLQLYRKGVIKATPTTCDPQLVDHSVLLVGFGSVKSEEGIWAETVSSQSQPQPPHPTPYWILKNSWGAQWGEKVSVIYWGRGQGRTGLFPPSRPYVP

SEQ ID NO: 870401 - protein, 365 aa, Homo sapiens
SICAASCLHATPDCTGMALTAHPSCLLALLVAGLAQGIRGPLRAQDLGPQPLELKEAFKLFQIQFNRSYLSPEEHAHRLDIFAHNLAQAQRLQEEDLGTAEFGVTPFSDLTEEEFGQLYGYRRAAGGVPSMGREIRSEEPEESVPFSCDWRKVAGAISPIKDQKNCNCCWAMAAAGNIETLWRISFWDFVDVSVQGGLASEKDYPFQGKVRAHRCHPKKYQKVAWIQDFIMLQNNEHRIAQYLATYGPITVTINMKPLQLYRKGVIKATPTTCDPQLVDHSVLLVGFGSVKSEEGIWAETVSSQSQPQPPHPTPYWILKNSWGAQWGEKGYFRLHRGSNTCGITKFPLTARVQKPDMKPRVSCPP

SEQ ID NO: 870402 - protein, 290 aa, Homo sapiens
SICAASCLHATPDCTGMALTAHPSCLLALLVAGLAQGIRGPLRAQDLGPQPLELKEAFKLFQIQFNRSYLSPEEHAHRLDIFAHNLAQAQRLQEEDLGTAEFGVTPFSDLTEEEFGQLYGYRRAAGGVPSMGREIRSEEPEESVPFSCDWRKVAGAISPIKDQKNCNCCWAMAAAGNIETLWRISFWDFVDVSVQELLDCGRCGDGCHGGFVWDAFITVLNNSGLASEKDYPFQGKVRAHRCHPKKYQKVAWIQDFIMLQNNEHSAGRAGTRADGRDRHRGRGRHAGLLG

SEQ ID NO: 870403 - protein, 116 aa, Homo sapiens
SICAASCLHATPDCTGMALTAHPSCLLALLVAGLAQGIRGPLRAQDLGPQPLELKEAFKLFQIQFNRSYLSPEEHAHRLDIFAHNLAQAQRLQEEDLGTAEFGVTPFSDLTAALSC

SEQ ID NO: 870404 - protein, 380 aa, Homo sapiens; identical to SEQ ID NO: 870400

SEQ ID NO: 870405 - protein, 262 aa, Homo sapiens
MGREIRSEEPEESVPFSCDWRKVAGAISPIKDQKNCNCCWAMAAAGNIETLWRISFWDFVDVSVQELLDCGRCGDGCHGGFVWDAFITVLNNSGLASEKDYPFQGKVRAHRCHPKKYQKVAWIQDFIMLQNNEHRIAQYLATYGPITVTINMKPLQLYRKGVIKATPTTCDPQLVDHSVLLVGFGSVKSEEGIWAETVSSQSQPQPPHPTPYWILKNSWGAQWGEKGYFRLHRGSNTCGITKFPLTARVQKPDMKPRVSCPP

SEQ ID NO: 870406 - protein, 176 aa, Homo sapiens
SICAASCLHATPDCTGMALTAHPSCLLALLVAGLAQGIRGPLRAQDLGPQPLELKEAFKLFQIQFNRSYLSPEEHAHRLDIFAHNLAQAQRLQEEDLGTAEFGVTPFSDLTEEEFGQLYGYRRAAGGVPSMGREIRSEETPGGPNGERRAISGCTEGAIPVASPSSRSLPVCRNRI

SEQ ID NO: 870407 - protein, 343 aa, Homo sapiens
KSRFRPLPLSGRAWAAWRILFAMPTGDFDSKPSWADQVEEEGEDDKCVTSELLKGIPLATGDTSPEPELLPGAPLPPPKEVINGNIKTVTEYKIDEDGKKFKIVRTFRIETRKASKAVARRKNWKKFGNSEFDPPGPNVATTTVSDDVSMTFITSKEDLNCQEEEDPMNKLKGQKIVSCRICKGDHWTTRCPYKDTLGPMQKGAGRAAGPVYWREGEAAGRARAGAGHAEPRQGSMCRRACATGPAAAGKSMQPNRRADDNATIRVTNLSEDTRETDLQELFRPFGSISRIYLAKDKTTGQSKGFAFISFHRREDAARAIAGVSGFGYDHLILNVEWAKPSTN

SEQ ID NO: 870408 - protein, 171 aa, Homo sapiens
SCQIRQQRICKGDHWTTRCPYKDTLGPMQKGAGRAAGPVYWREGEAAGRARAGAGHAEPRQGSMCRRACATGPAAAGKSMQPNRRADDNATIRVTNLSEDTRETDLQELFRPFGSISRIYLAKDKTTGQSKGFAFISFHRREDAARAIAGVSGFGYDHLILNVEWAKPSTN

SEQ ID NO: 870409 - protein, 75 aa, Homo sapiens
SQEMREMEPKGRKSSCRSVSRVSSDKLVTRMVALEGFAFISFHRREDAARAIAGVSGFGYDHLILNVEWAKPSTN

SEQ ID NO: 870410 - protein, 343 aa, Homo sapiens; identical to SEQ ID NO: 870407

SEQ ID NO: 870411 - protein, 343 aa, Homo sapiens; identical to SEQ ID NO: 870407

SEQ ID NO: 870412 - protein, 326 aa, Homo sapiens
KSRFRPLPLSGRAWAAWRILFAMPTGDFDSKPSWADQVEEEGEDDKCVTSELLKGIPLATGDTSPEPELLPGAPLPPPKEVINGNIKTVTEYKIDEDGKKFKIVRTFRIETRKASKAVARRKNWKKFGNSEFDPPGPNVATTTVSDDVSMTFITSKEDLNCQEEEDPMNKLKGQKIVSCRICKGDHWTTRCPYKDTLGPMQKGAGRAAGPVYWREGEAAGRARAGAGHAEPRQGSMCRRACATGPAAAGKSMQEDTRETDLQELFRPFGSISRIYLAKDKTTGQSKGFAFISFHRREDAARAIAGVSGFGYDHLILNVEWAKPSTN

SEQ ID NO: 870413 - protein, 212 aa, Homo sapiens
KSRFRPLPLSGRAWAAWRILFAMPTGDFDSKPSWADQVEEEGEDDKCVTSELLKGIPLATGDTSPEPELLPGAPLPPPKEVINGNIKTVTEYKIDEDGKKFKIVRTFRIETRKASKAVARRKNWKKFGNSEFDPPGPNVATTTVSDDVSMTFITSKEDLNCQEEEDPMNKLKGQKIVSCRICKGDHWTTRCPYKDTLGPMQKGAGRAAGPVY

SEQ ID NO: 870414 - protein, 252 aa, Homo sapiens
KSRFRPLPLSGRAWAAWRILFAMPTGDFDSKPSWADQVEEEGEDDKCVTSELLKGIPLATGDTSPEPELLPGAPLPPPKEVINGNIKTVTEYKIDEDGKKFKIVRTFRIETRKASKAVARRKNWKKFGNSEFDPPGPNVATTTVSDDVSMTFITSKEDLNCQEEEDPMNKLKGQKIVSCRICKGDHWTTRCPYKDTLGPMQKGAGRAAGPVYWREGEAAGRCGGGRVLLSVHGFCPHCCLRAVISRTTVQRV

SEQ ID NO: 870415 - protein, 194 aa, Homo sapiens
MTFITSKEDLNCQEEEDPMNKLKGQKIVSCRICKGDHWTTRCPYKDTLGPMQKGAGRAAGPVYWREGEAAGRARAGAGHAEPRQGSMCRRACATGPAAAGKSMQPNRRADDNATIRVTNLSEDTRETDLQELFRPFGSISRIYLAKDKTTGQSKGFAFISFHRREDAARAIAGVSGFGYDHLILNVEWAKPSTN

SEQ ID NO: 870416 - protein, 269 aa, Homo sapiens
KSRFRPLPLSGRAWAAWRILFAMPTGDFDSKPSWADQVEEEGEDDKCVTSELLKGIPLATGDTSPEPELLPGAPLPPPKEVINGNIKTVTEYKIDEDGKKFKIVRTFRIETRKASKAVARRKNWKKFGNSEFDPPGPNVATTTVSDDVSMTFITSKEDLNCQEEEDPMNKLKGQKIVSCPNRRADDNATIRVTNLSEDTRETDLQELFRPFGSISRIYLAKDKTTGQSKGFAFISFHRREDAARAIAGVSGFGYDHLILNVEWAKPSTN

SEQ ID NO: 870417 - protein, 127 aa, Homo sapiens
MHWAPMDQLRRARQSWSSRSTGNTDSGHPTPPPHLAPLEASSPKSSPSKACRLHFRSVPSKAPWGSSPHSALTLAPAAAQSLFSPWPPESTRERWSPAPSFCFQVLTLGQGVAAKKPDSPHKVPQER

SEQ ID NO: 870418 - protein, 437 aa, Homo sapiens
VVFARFRFSGRAWAAWRILFAMPTGDFDSKPSWADQVEEEGEDDKCVTSELLKGIPLATGDTSPEPELLPGAPLPPPKEVINGNIKTVTRTPTHAYALHATAHTHTLPRHSAPPPSQRTLTTPRTRLHHRAASPPRTHPTLRNHPLRATHASSLHPTRAPTLPAPTHPLPPLHPPALLPARSTHPPPRHATLHTLPPTEAGPLCNTHLNAAPHALVLHARTLPPAPPPGTTPPAPLHRHYACGAPCPPRAALPRPPPAALLSLRPAPPPPPRPQPSPPPPGHPPPPPTHPCSPPPPAPTAPSPPRRTSPSAPPPHPPPTPPPPGPPLRHTHTPVTTAPSPQPLPALSGPPLPPTPRALRAPTPRPLPPPALPPPRPPPPPHPPPLPHPPPPPPPPPPPLPPPPPPPPPPTPPPPPPPPPPPPPPPPPPPPPPPPPPP

SEQ ID NO: 870419 - protein, 343 aa, Homo sapiens; identical to SEQ ID NO: 870407

SEQ ID NO: 870420 - protein, 108 aa, Homo sapiens
MCRRACATGPAAAGKSMQPNRRADDNATIRVTNLSEDTRETDLQELFRPFGSISRIYLAKDKTTGQSKGFAFISFHRREDAARAIAGVSGFGYDHLILNVEWAKPSTN

SEQ ID NO: 870421 - protein, 237 aa, Homo sapiens
MPTGDFDSKPSWADQVEEEGEDTEIRITLTSRNVKSLEKVCADLIRGAKEKNLKVKGPVRMPTKTLRITTRKTPCGEGSKTWDRFQMRIHKRLIDLHSPSEIVKQITSISIEPGVEVEVTIADAEVNYFNKLMTSGLEKNNNTTQTKKNVCGPTGAPEKRFLKQFGVWGPGAPWVYRCTGGTTGGPRGEKPGLQKQKAGTESAHTKVERTTARGGTPEERFLRQQHSNGGEPSRGRH

SEQ ID NO: 870422 - protein, 343 aa, Homo sapiens; identical to SEQ ID NO: 870407

SEQ ID NO: 870423 - protein, 252 aa, Homo sapiens; identical to SEQ ID NO: 870414

SEQ ID NO: 870424 - protein, 194 aa, Homo sapiens; identical to SEQ ID NO: 870415

SEQ ID NO: 870425 - protein, 194 aa, Homo sapiens; identical to SEQ ID NO: 870415

SEQ ID NO: 870426 - protein, 166 aa, Homo sapiens
RFRPLPLSGRAWAAWRILFAMPTGDFDSKPSWADQVEEEGEDDKCVTSELLKGIPLATGDTSPEPELLPGAPLPPPKEVINGNIKTVTEYKIDEDGKKFKIVRTFRIETRKASKAVARRKSVALSPRLKCSGTISTHCNLRLLGSSDSPASASRVAGVTGMCHHAS

SEQ ID NO: 870427 - protein, 223 aa, Homo sapiens
KSRFRPLPLSGRAWAAWRILFAMPTGDFDSKPSWADQVEEEGEDDKCVTSELLKGIPLATGDTSPEPELLPGAPLPPPKEVINGNIKTVTEYKIDEDGKKFKIVRTFRIETRKASKAVARRKNWKKFGNSEFDPNRRADDNATIRVTNLSEDTRETDLQELFRPFGSISRIYLAKDKTTGQSKGFAFISFHRREDAARAIAGVSGFGYDHLILNVEWAKPSTN

SEQ ID NO: 870428 - protein, 444 aa, Homo sapiens; identical to SEQ ID NO: 813977

SEQ ID NO: 870429 - protein, 108 aa, Homo sapiens
MGVQVETISPGDGRTFPKRGQTCVVHYTGMLEDGKKFDSSRDRNKPFKFMLGKQEVIRGWEEGVAQMSVGQRAKLTISPDYAYGATGHPGIIPPHATLVFDVELLKLE

SEQ ID NO: 870430 - protein, 108 aa, Homo sapiens; identical to SEQ ID NO: 870429

SEQ ID NO: 870431 - protein, 108 aa, Homo sapiens; identical to SEQ ID NO: 870429

SEQ ID NO: 870432 - protein, 108 aa, Homo sapiens; identical to SEQ ID NO: 870429

SEQ ID NO: 870433 - protein, 108 aa, Homo sapiens; identical to SEQ ID NO: 870429

SEQ ID NO: 870434 - protein, 108 aa, Homo sapiens; identical to SEQ ID NO: 870429

SEQ ID NO: 870435 - protein, 108 aa, Homo sapiens; identical to SEQ ID NO: 870429

SEQ ID NO: 870436 - protein, 108 aa, Homo sapiens; identical to SEQ ID NO: 870429

SEQ ID NO: 870437 - protein, 108 aa, Homo sapiens; identical to SEQ ID NO: 870429

SEQ ID NO: 870438 - protein, 108 aa, Homo sapiens; identical to SEQ ID NO: 870429

SEQ ID NO: 870439 - protein, 108 aa, Homo sapiens; identical to SEQ ID NO: 870429

SEQ ID NO: 870440 - protein, 108 aa, Homo sapiens; identical to SEQ ID NO: 870429

SEQ ID NO: 870441 - protein, 134 aa, Homo sapiens
MRNRGAPKAHSKKGHNTRDTQAKTQGEGDKQRGQGAQRDAKMRTTGQKERGTRRRKNASNNREQKGEPQRETKHTPGEQHHHKRTGQKRGNKKAPTPASPLPPEQVAEPHQTQRRTKNKKEEAQNTRPNTTKAN

SEQ ID NO: 870442 - protein, 108 aa, Homo sapiens; identical to SEQ ID NO: 870429

SEQ ID NO: 870443 - protein, 108 aa, Homo sapiens; identical to SEQ ID NO: 870429

SEQ ID NO: 870444 - protein, 181 aa, Homo sapiens
ELGLQNFNNRGAHLGDVNRRVAYSYYIYELVKAWRSSRTVRSDASLEDVEPPPGRCWSTPPVAPPARSASAAAMGVQVETISPGDGRTFPKRGQTCVVHYTGMLEDGKKFDSSRDRNKPFKFMLGKQEVIRGWEEGVAQMSVGQRAKLTISPDYAYGATGHPGIIPPHATLVFDVELLKLE

SEQ ID NO: 870445 - protein, 108 aa, Homo sapiens; identical to SEQ ID NO: 870429

SEQ ID NO: 870446 - protein, 103 aa, Homo sapiens
MPVSVSSGRTFPKRGQTCVVHYTGMLEDGKKFDSSRDRNKPFKFMLGKQEVIRGWEEGVAQMSVGQRAKLTISPDYAYGATGHPGIIPPHATLVFDVELLKLE

SEQ ID NO: 870447 - protein, 108 aa, Homo sapiens; identical to SEQ ID NO: 870429

SEQ ID NO: 870448 - protein, 111 aa, Homo sapiens
MAIISNGAQRRESRTPWNRRQVAVGPRRPSRRPPAQRPPPPWECRWKPSPQETGAPSPSAARPAWCTTPMSVGQRAKLTISPDYAYGATGHPGIIPPHATLVFDVELLKLE

SEQ ID NO: 870449 - protein, 114 aa, Homo sapiens
MGVQVETISPGDGRTFPKRGQTCVVHYTGMLEDGKKFDSSRDRNKPFKFMLGKQEVIRGWEEGVAQMSVGQRAKLTISPDYAYGATGHPGIIPPHATLVFDLPWRDLVPPDMCT

SEQ ID NO: 870450 - protein, 112 aa, Homo sapiens
MGVQVETISPGDGRTFPKRGQTCVVHYTGMLEDGKKFDSSRDRNKPFKFMLGKQEVIRGWEEGVAQMSVGQRAKLTISPDYAYGATGHPGIIPPHATLVFDGAFPDVPLHFV

SEQ ID NO: 870451 - protein, 108 aa, Homo sapiens; identical to SEQ ID NO: 870429

SEQ ID NO: 870452 - protein, 444 aa, Homo sapiens; identical to SEQ ID NO: 813977

SEQ ID NO: 870453 - protein, 134 aa, Homo sapiens; identical to SEQ ID NO: 870441

SEQ ID NO: 870454 - protein, 103 aa, Homo sapiens; identical to SEQ ID NO: 870446

SEQ ID NO: 870455 - protein, 112 aa, Homo sapiens
RPLSPASRPDSPQGDGQILKTSVGLPCLDGWHVQESRRNRSFHAQVGTFLGENTLYVPFVESWHTSAGYLLHSYSGNLNSDLSAFCLLFQTKSCCTSELGSPPPSPEDPPPL

SEQ ID NO: 870456 - protein, 447 aa, Homo sapiens
MRSVSYVQRVALEFSGSLFPHAICLGDVDNDTLNELVVGDTSGKVSVYKNDDSRPWLTCSCQGMLTCVGVGDVCNKGKNLLVAVSAEGWFHLFDLTPAKVLDASGHHETLIGEEQRPVFKQHIPANTKVMLISDIDGDGCRELVVGYTDRVVRAFRWEELGEGPEHLTGQLVSLKKWMLEGQVDSLSVTLGPLGLPELMVSQPGCAYAILLCTWKKDTGSPPASEGPTDGSRETPAARDVVLHQTSGRIHNKNVSTHLIGNIKQGHGTESSGSGLFALCTLDGTLKLMEEMEEADKLLWSVQVDHQLFALEKLDVTGNGHEEVVACAWDGQTYIIDHNRTVVRFQVDENIRAFCAGLYACKEGRNSPCLVYVTFNQKIYVYWEVQLERMESTNLVKLLETKPEYHSLLQELGVDPDDLPVTRALLHQTLYHPDQPPQCAPSSLQDPT

SEQ ID NO: 870457 - protein, 438 aa, Homo sapiens
MRSVSYVQRVALEFSGSLFPHAICLGDVDNDTLNELVVGDTSGKVSVYKNDDSRPWLTCSCQGMLTCVGVGDVCNKGKNLLVAVSAEGWFHLFDLTPAKVLDASGHHETLIGEEQRPVFKQHIPANTKVMLISDIDGDGCRELVVGYTDRVVRAFRWEELGEGPEHLTGQLVSLKKWMLEGQVDSLSVTLGPLGLPELMVSQPGCAYAILLCTWKKDTGSPPASEGPTDGSRETPAARDVVLHQTSGRIHNKNVSTHLIGNIKQGHGTESSGSGLFALCTLDGTLKLMEEMEEADKLLWSVQVDHQLFALEKLDVTGNGHEEVVACAWDGQTYIIDHNRTVVRFQVDENIRAFCAGLYACKEGRNSPCLVYVTFNQKIYVYWEVQLERMESTNLVKLLETKPEYHSLLQELGVGESQKSQWPECPGDPQHAAGAGRGS

SEQ ID NO: 870458 - protein, 429 aa, Homo sapiens
MRSVSYVQRVALEFSGSLFPHAICLGDVDNDTLNELVVGDTSGKVSVYKNDDSRPWLTCSCQGMLTCVGVGDVCNKGKNLLVAVSAEGWFHLFDLTPAKVLDASGHHETLIGEEQRPVFKQHIPANTKVMLISDIDGDGCRELVVGYTDRVVRAFRWEELGEGPEHLTGQLVSLKKWMLEGQVDSLSVTLGPLGLPELMVSQPGCAYAILLCTWKKDTGSPPASEGPTDGSRETPAARDVVLHQTSGRIHNKNVSTHLIGNIKQGTLKLMEEMEEADKLLWSVQVDHQLFALEKLDVTGNGHEEVVACAWDGQTYIIDHNRTVVRFQVDENIRAFCAGLYACKEGRNSPCLVYVTFNQKIYVYWEVQLERMESTNLVKLLETKPEYHSLLQELGVDPDDLPVTRALLHQTLYHPDQPPQCAPSSLQDPT

SEQ ID NO: 870459 - protein, 270 aa, Homo sapiens
MLEGQVDSLSVTLGPLGLPELMVSQPGCAYAILLCTWKKDTGSPPASEGPTDGSRETPAARDVVLHQTSGRIHNKNVSTHLIGNIKQGHGTESSGSGLFALCTLDGTLKLMEEMEEADKLLWSVQVDHQLFALEKLDVTGNGHEEVVACAWDGQTYIIDHNRTVVRFQVDENIRAFCAGLYACKEGRNSPCLVYVTFNQKIYVYWEVQLERMESTNLVKLLETKPEYHSLLQELGVDPDDLPVTRALLHQTLYHPDQPPQCAPSSLQDPT

SEQ ID NO: 870460 - protein, 447 aa, Homo sapiens; identical to SEQ ID NO: 870456

SEQ ID NO: 870461 - protein, 158 aa, Homo sapiens
MRSVSYVQRVALEFSGSLFPHAICLGDVDNDTLNELVVGDTSGKVSVYKNDDSRPWLTCSCQGMLTCVGVGDVCNKGKNLLVAVSAEGWFHLFDLTPAKVLDASGHHETLIGEEQRPVFKQHIPANTKVMLISDIEMGVVSWWWATQTVWCELSAGRS

SEQ ID NO: 870462 - protein, 178 aa, Homo sapiens
MRSVSYVQRVALEFSGSLFPHAICLGDVDNDTLNELVVGDTSGKVSVYKNDDSRPWLTCSCQGMLTCVGVGDVCNKGKNLLVAVSAEGWFHLFDLTPAKVLDASGHHETLIGEEQRPVFKQHIPANTKVMLISDIVGMPTFAGSQESRSQWILEHIPRDWGERENPYSCMHLLCAELP

SEQ ID NO: 870463 - protein, 87 aa, Homo sapiens
RSAALWRKGVARGPVTHIRVGKPASKPGRPASSVRLKEEEAEIGGSGSDVTCCLRWPSALAAVATGVQGIFTGPLRSLCSWRCHEVS

SEQ ID NO: 870464 - protein, 448 aa, Homo sapiens
MRSVSYVQRVALEFSGSLFPHAICLGDVDNDTLNELVVGDTSGKVSVYKNDDSRPWLTCSCQGMLTCVGVGDVCNKGKNLLVAVSAEGWFHLFDLTPAKVLDASGHHETLIGEEQRPVFKQHIPANTKVMLISDIDGDGCRELVVGYTDRVVRAFRWEELGEGPEHLTGQLVSLKKWMLEGQVDSLSVTLGPLGLPELMVSQPGCAYAILLCTWKKDTGSPPASEGPTDGSRETPAARDVVLHQTSGRIHNKNVSTHLIGNIKQGHGTESSGSGLFALCTLDGTLKLMEEMEEADKLLWSVQVDHQLFALEKLDVTGNGHEEVVACAWDGQTYIIDHNRTVVRFQVDENWKTKFPPGVATFLGVAGLYACKEGRNSPCLVYVTFNQKIYVYWEVQLERMESTNLVKLLETKPEYHSLLQELGVGESQKSQWPECPGDPQHAAGAGRGS

SEQ ID NO: 870465 - protein, 472 aa, Homo sapiens
MRSVSYVQRVALEFSGSLFPHAICLGDVDNDTLNELVVGDTSGKVSVYKNDDSRPWLTCSCQGMLTCVGVGDVCNKGKNLLVAVSAEGWFHLFDLTPAKVLDASGHHETLIGEEQRPVFKQHIPANTKVMLISDIVGMPTFAGSQESRSQWILEHIPRDWDGDGCRELVVGYTDRVVRAFRWEELGEGPEHLTGQLVSLKKWMLEGQVDSLSVTLGPLGLPELMVSQPGCAYAILLCTWKKDTGSPPASEGPTDGSRETPAARDVVLHQTSGRIHNKNVSTHLIGNIKQGHGTESSGSGLFALCTLDGTLKLMEEMEEADKLLWSVQVDHQLFALEKLDVTGNGHEEVVACAWDGQTYIIDHNRTVVRFQVDENIRAFCAGLYACKEGRNSPCLVYVTFNQKIYVYWEVQLERMESTNLVKLLETKPEYHSLLQELGVDPDDLPVTRALLHQTLYHPDQPPQCAPSSLQDPT

SEQ ID NO: 870466 - protein, 315 aa, Homo sapiens [sequence omitted]

SEQ ID NO: 870467 - protein, 112 aa, Homo sapiens; identical to SEQ ID NO: 870455

SEQ ID NO: 870468 - protein, 152 aa, Homo sapiens
MKSPDEVLREGELEKRSDSLFQLWKKKRGVLTSDRLSLFPASPRARPKELRFHSILKVDCVERTGKYVYFTIVTTDHKEIDFRCAGESCWNAAIALALIDFQNRRALQDFRSRQERTAPAAPAEDAVAAAAAAPSEPSEPSRPSPQPKPRTP

SEQ ID NO: 870469 - protein, 152 aa, Homo sapiens; identical to SEQ ID NO: 870468

SEQ ID NO: 870470 - protein, 6620 aa, Homo sapiens
MDQPQFSGAPRFLTRPKAFVVSVGKDATLSCQIVGNPTPQVSWEKDQQPVTAGARFRLAQDGDLYRLTILDLALGDSGQYVCRARNAIGEAFAAVGLQVDAEAACAEQAPHFLLRPTSIRVREGSEATFRCRVGGSPRPAVSWSKDGRRLGEPDGPRVRVEELGEASALRIRAARPRDGGTYEVRAENPLGAASAAAALVVDSDAADTASRPGTSTAALLAHLQRRREAMRAEGAPASPPSTGTRTCTVTEGKHARLSCYVTGEPKPETVWKKDGQLVTEGRRHVVYEDAQENFVLKILFCKQSDRGLYTCTASNLVGQTYSSVLVVVREPAVPFKKRLQDLEVREKESATFLCEVPQPSTEAAWFKEETRLWASAKYGIEEEGTERRLTVRNVSADDDAVYICETPEGSRTVAELAVQGNLLRKLPRKTAVRVGDTAMFCVELAVPVGPVHWLRNQEEVVAGGRVAISAEGTRHTLTISQCCLEDVGQVAFMAGDCQTSTRFCVSAPRKPPLQPPVDPVVKARMESSVILSWSPPPHGERPVTIDGYLVEKKKLGTYTWIRCHEAEWVATPELTVADVAEEGNFQFRVSALNSFGQSPYLEFPGTVHLAPKLAVRTPLKAVQAVEGGEVTFSVDLTVASAGEWFLDGQALKASSVYEIHCDRTRHTLTIREVPASLHGAQLKFVANGIESSIRMEVRAAPGLTANKPPAAAAREVLARLHEEAQLLAELSDQAAAVTWLKDGRTLSPGPKYEVQASAGRRVLLVRDVARDDAGLYECVSRGGRIAYQLSVQGLARFLHKDMAGSCVDAVAGGPAQFECETSEAHVHVHWYKDGMELGHSGERFLQEDVGTRHRLVAATVTRQDEGTYSCRVGEDSVDFRLRVSEPKVVFAKEQLARRKLQAEAGASATLSCEVAQAQTEVTWYKDGKKLSSSSKVCMEATGCTRRLVVQQAGQADAGEYSCEAGGQRLSFHLDVKEPKVVFAKDQVAHSEVQAEAGANATLSCEVAQAQAEVMWYKDGKKLSSSLKVHVEAKGCRRRLVVQQAGKTDAGDYSCEARGQRVSFRLHITEPKMMFAKEQSVHNEVQAEAGASAMLSCEVAQAQTEVTWYKDGKKLSSSSKVGMEVKGCTRRLVLPQAGKADAGEYSCEAGGQRVSFHLHITEPKGVFAKEQSVHNEVQAEAGTTAMLSCEVAQPQTEVTWYKDGKKLSSSSKVRMEVKGCTRRLVVQQVGKADAGEYSCEAGGQRVSFQLHITEPKAVFAKEQLVHNEVRTEAGASATLSCEVAQAQTEVTWYKDGKKLSSSSKVRIEAAGCMRQLVVQQAGQADAGEYTCEAGGQRLSFHLDVSEPKAVFAKEQLAHRKVQAEAGAIATLSCEVAQAQTEVTWYKDGKKLSSSSKVRMEAVGCTRRLVVQQACQADTGEYSCEAGGQRLSFSLDVAEPKVVFAKEQPVHREVQAQAGASTTLSCEVAQAQTEVMWYKDGKKLSFSSKVRMEAVGCTRRLVVQQAGQADAGEYSCEAGSQRLSFHLHVAEPKAVFAKEQPASREVQAEAGTSATLSCEVAQAQTEVTWYKDGKKLSSSSKVRMEAVGCTRRLVVQEAGQADAGEYSCKAGDQRLSFHLHVAEPKVVFAKEQPAHREVQAEAGASATLSCEVAQAQTEVTWYKDGKKLSSSSKVRVEAVGCTRRLVVQQAGQADAGEYSCEAGGQRLSFRLHVAELEPQISERPCRREPLVVKEHEDIILTATLATPSAATVTWLKDGVEIRRSKRHETASQGDTHTLTVHGAQVLDSAIYSCRVGAEGQDFPVQVEEVAAKFCRLLEPVCGELGGTVTLACELSPACAEVVWRCGNTQPRVGKRFQMVAEGPVRSLTVLGLRAEDAGEYVCESRDDHTSAQLTVSVPRVVKFMSGLSTVVAEEGGEATFQCVVSPSDVAVVWFRDGALLQPSEKFAISQSGASHSLTISDLVLEDAGQITVEAEGASSSAALRVREAPVLFKKKLEPQTVEERSSVTLEVELTRPWPELRWTRNATALAPGKNVEIHAEGARHRLVLHNVGFADRGFFGCETPDDKTQAKLTVEMRQVRLVRGLQAVEAREQGTATMEVQLSHADVDGSWTRDGLRFQQGPTCHLAVRGPMHTLTLSGLRPEDSGLMVFKAEGVHTSARLVVTELPVSFSRPLQDVVTTEKEKVTLECELSRPNVDVRWLKDGVELRAGKTMAIAAQGACRSLTIYRCEFADQGVYVCDAHDAQSSASVKVQGRTYTLIYRRVLAEDAGEIQFVAENAESRAQLRVKELPVTLVRPLRDKIAMEKHRGVLECQVSRASAQVRWFKGSQELQPGPKYELVSDGLYRKLIISDVHAEDEDTYTCDAGDVKTSAQFFVEEQSITIVRGLQDVTVMEPAPAWFECETSIPSVRPPKWLLGKTVLQAGGNVGLEQEGTVHRLMLRRTCSTMTGPVHFTVGKSRSSARLVVSDIPVVLTRPLEPKTGRELQSVVLSCDFRPAPKAVQWYKDDTPLSPSEKFKMSLEGQMAELRILRLMPADAGVYRCQAGSAHSSTEVTVEAREVTVTGPLQDAEATEEGWASFSCELSHEDEEVEWSLNGMPLYNDSFHEISHKGRRHTLVLKSIQRADAGIVRASSLKVSTSARLEVRVKPVVFLKALDDLSAEERGTLALQCEVSDPEAHVVWRKDGVQLGPSDKYDFLHTAGTRGLVVHDVSPEDAGLYTCHVGSEETRARVRVHDLHVGITKRLKTMEVLEGESCSFECVLSHESASDPAMWTVGGKTVGSSSRFQATRQGRKYILVVREAAPSDAGEVVFSVRGLTSKASLIVRERPAAIIKPLEDQWVAPGEDVELRCELSRAGTPVHWLKDRKAIRKSQKYDVVCEGTMAMLVIRGASLKDAGEYTCEVEASKSTASLHVEEKANCFTEELTNLQVEEKGTAVFTCKTEHPAATVTWRKGLLELRASGKHQPSQEGLTLRLTISALEKADSDTYTCDIGQAQSRAQLLVQGRRVHIIEDLEDVDVQEGSSATFRCRISPANYEPVHWFLDKTPLHANELNEIDAQPGGYHVLTLRQLALKDSGTIYFEAGDQRASAALRVTEKPSVFSRELTDATITEGEDLTLVCETSTCDIPMCWTKDGKTLRGSARCQLSHEGHRAQLLITGATLQDSGRYKCEAGGACSSSIVRVHARPVRFQEALKDLEVLEGGAATLRCVLSSVAAPVKWCYGNNVLRPGDKYSLRQEGAMLELVVRNLRPQDSGRYSCSFGDQTTSATLTVTALPAQFIGKLRNKEATEGATATLRCELSKTAPVEWRKGSETLRDGDRYCLRQDGAMCELQIRGLAMVDAAEYSCVCGEERTSASLTIRPMPAHFIGRLRHQESIEGATATLRCELSKAAPVEWRKGRESLRDGDRHSLRQDGAVCELQICGLAVADAGEYSCVCGEERTSATLTVKALPAKFTEGLRNEEAVEGATAMLWCELSKVAPVEWRKGPENLRDGDRYILRQEGTRCELQICGLAMADAGEYLCVCGQERTSATLTIRALPARFIEDVKNQEAREGATAVLQCELNSAAPVEWRKGSETLRDGDRYSLRQDGTKCELQIRGLAMADTGEYSCVCGQERTSAMLTVRALPIKFTEGLRNEEATEGATAVLRCELSKMAPVEWWKGHETLRDGDRHSLRQDGARCELQIRGLVAEDAGEYLCMCGKERTSAMLTVRAMPSKFIEGLRNEEATEGDTATLWCELSKAAPVEWRKGHETLRDGDRHSLRQDGSRCELQIRGLAVVDAGEYSCVCGQERTSATLTVRALPARFIEDVKNQEAREGATAVLQCELSKAAPVEWRKGSETLRGGDRYSLRQDGTRCELQIHGLSVADTGEYSCVCGQERTSATLTVRAPQPVFREPLQSLQAEEGSTATLQCELSEPTATVVWSKGGLQLQANGRREPRLQGCTAELVLQDLQREDTGEYTCTCGSQATSATLTVTAAPVRFLRELQHQEVDEGGTAHLCCELSRAGASVEWRKGSLQLFPCAKYQMVQDGAAAELLVRGVEQEDAGDYTCDTGHTQSMASLSVRVPRPKFKTRLQSLEQETGDIARLCCQLSDAESGAVVQWLKEGVELHAGPKYEMRSQGATRELLIHQLEAKDTGEYACVTGGQKTAASLRVTEPEVTIVRGLVDAEVTADEDVEFSCEVSRAGATGVQWCLQGLPLQSNEVTEVAVRDGRIHTLRLKGVTPEDAGTVSFHLGNHASSAQLTVRAPEVTILEPLQDVQLSEGQDASFQCRLSRASGQEARWALGGVPLQANEMNDITVEQGTLHLLTLHKVTLEDAGTVSFHVGTCSSEAQLKVTAKNTVVRGLENVEALEGGEALFECQLSQPEVAAHTWLLDDEPVRTSENAEVVFFENGLRHLLLLKNLRPQDSCRVTFLAGDMVTSAFLTVRGWRLEILEPLKNAAVRAGAQARFTCTLSEAVPVGEASWYINGAAVQPDDSDWTVTADGSHQALLLRSAQPHHAGEVTFACRDAVASARLTVLGLPDPPEDAEVVAHSSHTVTLSWAAPMSDGGGGLCGYRVEVKEGATGQWRLCHELVPGPECVVDGLAPGETYRFRVAAVGPVGAGEPVHLPQTVRLAEPPKPVPPQPSAPESRQVAAGEDVSLELEVVAEAGEVIWHKGMERIQPGGRFEVVSQGRQQMLVIKGFTAEDQGEYHCGLAQGSICPAAATFQVALSPASVDEAPQPSLPPEAAQEGDLHLLWEALARKRRMSREPTLDSISELPEEDGRSQRLPQEAEEVAPDLSEGYSTADELARTGDADLSHTSSDDESRAGTPSLVTYLKKAGRPGTSPLASKVGAPAAPSVKPQQQQEPLAAVRPPLGDLSTKDLGDPSMDKAAVKIQAAFKGYKVRKEMKQQEGPMFSHTFGDTEAQVGDALRLECVVASKADVRARWLKDGVELTDGRHHHIDQLGDGTCSLLIAGLDRADAGCYTCQVSNKFGQVTHSACVVVSGSESEAESSSGGELDDAFRRAARRLHRLFRTKSPAEVSDEELFLSADEGPAEPEEPADWQTYREDEHFICIRFEALTEARQAVTRFQEMFATLGIGVEIKLVEQGPRRVEMCISKETPAPVVPPEPLPSLLTSDAAPVFLTELQNQEVQDGYPVSFDCVVTGQPMPSVRWFKDGKLLEEDDHYMINEDQQGGHQLIITAVVPADMGVYRCLAENSMGVSSTKAELRVDLTSTDYDTAADATESSSYFSAQGYLSSREQEGTESTTDEGQLPQVVEELRDLQVAPGTRLAKFQLKVKGYPAPRLYWFKDGQPLTASAHIRMTDKKILHTLEIISVTREDSGQYAAYISNAMGAAYSSARLLVRGPDEPEEKPASDVHEQLVPPRMLERFTPKKVKKGSSITFSVKVEGRPVPTVHWLREEAERGVLWIGPDTPGYTVASSAQQHSLVLLDVGRQHQGTYTCIASNAAGQALCSASLHVSGLPKVEEQEKVKEALISTFLQGTTQAISAQGFQTASFADLGGQRKEEPLAAKEALGHLSLAEVGTEEFLQKLTSQITEMVSAKITQAKLQVPGGDSDEDSKTPSASPRHGRSRPSSSIQESSSESEDGDARGEIFDIYVVTADYLPLGAEQDAITLREGQYVEVLDAAHPLRWLVRTKPTKSSPSRQGWVSPAYLDRRLKLSPEWGAAEAPEFPGEAVSEDEYKARLSSVIQELLSSEQAFVEELQFLQSHHLQHLERCPHVPIAVAGQKAVIFRNVRDIGRFHSSFLQELQQCDTDDDVAMCFIKNQAAFEQYLEFLVGRVQAESVVVSTAIQEFYKKYAEEALLAGDPSQPPPPPLQHYLEQPVERVQRYQALLKELIRNKARNRQNCALLEQAYAVVSALPQRAENKLHVSLMENYPGTLQALGEPIRQGHFIVWEGAPGARMPWKGHNRHVFLFRNHLVICKPRRDSRTDTVSYVFRNMMKLSSIDLNDQVEGDDRAFEVWQEREDSVRKYLLQARTAIIKSSWVKEICGIQQRLALPVWRPPDFEEELADCTAELGETVKLACRVTGTPKPVISWYKDGKAVQVDPHHILIEDPDGSCALILDSLTGVDSGQYMCFAASAAGNCSTLGKILVQVPPRFVNKVLASPFVEGEDAQFTCTIEGAPYPQIRWYKDGALLTTGNKFQTLSEPRSGLLVLVIRAASKEDLGLYECELVNRLGSARASAELRIQSPMLQAQEQCHREQLVAAVEVTEQETKVPKKTVIIEETITTVVKSPRGQRRSPSKSPSRSPSRCSASPLRPGLLAPDLLYLPGAGQPRRPEAEPGQKPVVPTLYVTEAEAHSPALPGLSGPQPKWVEVEETIEVRVKKMGPQGVSPTTEVPRSSSGHLFTLPGATPGGDPNSNNSNNKLLAQEAWAQGTAMVGVREPLVFRVDARGSVDWAASGMGSLEEEGTMEEAGEEEGEDGDAFVTEESQDTHSLGDRDPKILTHNGRMLTLADLEDYVPGEGETFHCGGPGPGAPDDPPCEVSVIQREIGEPTVGQPVLLSVGHALGPRGPLGLFRPEPRGASPPGPQVRSLEGTSFLLREAPARPVGSAPWTQSFCTRIRRSADSGQSSFTTELSTQTVNFGTVGETVTLHICPDRDGDEAAQP

SEQ ID NO: 870471 - protein, 166 aa, Homo sapiens
MALHSGWRNCDSCAGRWWGFSQLHGQCQAWEGSVSPTFSSRPSYPRVVFLTWAVSLTSCVPPCPSPEPKVVFAKEQPAHREVQAEAGASATLSCEVAQAQTEVTWYKDGKKLSSSSKVRVEAVGCTRRLVVQQAGQAEAGEYSCEAGGQQLSFRLQVAGQCFGDAE

SEQ ID NO: 870472 - protein, 2765 aa, Homo sapiens
MALHSGWRNCDSCAGRWWGFSQLHGQCQAWEGSVSPTFSSRPSYPRVVFLTWAVSLTSCVPPCPSPEPKVVFAKEQPAHREVQAEAGASATLSCEVAQAQTEVTWYKDGKKLSSSSKVRVEAVGCTRRLVVQQAGQAEAGEYSCEAGGQQLSFRLQVAELEPQISERPCRREPLVVKEHEDIILTATLATPSAATVTWLKDGVEIRRSKRHETASQGDTHTLTVHGAQVLDSAIYSCRVGAEGQDFPVQVEEVAAKFCRLLEPVCGELGGTVTLACELSPACAEVVWRCGNTQLRVGKRFQMVAEGPVRSLTVLGLRAEDAGEYVCESRDDHTSAQLTVSVPRVVKFMSGLSTVVAEEGGEATFQCVVSPSDVAVVWFRDGALLQPSEKFAISQSGASHSLTISDLVLEDAGQITVEAEGASSSAALRVREAPVLFKKKLDPQTVEERSSVTLEVELTRPWPELRWTRNATAWAPGKNVEIHAEGARHRLVLHNVGFADRGFFGCETPDDKTQAKLTVEMRQVRLVRGLQAVEAREQGTATMEVQLSHADVDGSWTRDGLRFQQGPTCHLAVRGPMHTLTLSGLRPEDSGLMVFKAEGVHTSARLVVTELPVSFSRPLQDVVTTEKEKVTLECELSRPNVDVRWLKDGVELRAGKTMAIAAQGACRSLTIYRCEFADQGVYVCDAHDAQSSASVKVQGRTYTLIYRRVLAEDAGEIQFVAENAESRAQLRVKELPVTLVRPLRDKIAMEKHRGVLECQVSRASAQVRWFKGSQELQPGPKYELVSDGLYRKLIISDVHAEDEDTYTCDAGDVKTSAQFFVEEQSITIVRGLQDVTVMEPAPAWFECETSIPSVRPPKWLLGKTVLQAGGNVGLEQEGTVHRLMLRRTCSTMTGPVHFTVGKSRSSARLVVSDIPVVLTRPLEPKTGRELQSVVLSCDFRPAPKAVQWYKDDTPLSPSEKFKMSLEGQMAELRILRLMPADAGVYRCQAGSAHSSTEVTVEAREVTVTGPLQDAEATEEGWASFSCELSHEDEEVEWSLNGMPLYNDSFHEISHKGRRHTLVLKSIQRADAGIVRASSLKVSTSARLEVRVKPVVFLKALDDLSAEERGTLALQCEVSDPEAHVVWRKDGVQLGPSDKYDFLHTAGTRGLVVHDVSPEDAGLYTCHVGSEETRARVRVHDLHVGITKRLKTMEVLEGESCSFECVLSHESASDPAMWTVGGKTVGSSSRFQATRQGRKYILVVREAAPSDAGEVVFSVRGLTSKASLIVRERPAAIIKPLEDQWVAPGEDVELRCELSRAGTPVHWLKDRKAIRKSQKYDVVCEGTMAMLVIRGASLKDAGEYTCEVEASKSTASLHVEEKANCFTEELTNLQVEEKGTAVFTCKTEHPAATVTWRKGLLELRASGKHQPSQEGLTLRLTISALEKADSDTYTCDIGQAQSRAQLLVQGRRVHIIEDLEDVDVQEGSSATFRCRISPANYEPVHWFLDKTPLHANELNEIDAQPGGYHVLTLRQLALKDSGTIYFEAGDQRASAALRVTEKPSVFSRELTDATITEGEDLTLVCETSTCDIPVCWTKDGKTLRGSARCQLSHEGHRAQLLITGATLQDSGRYKCEAGGACSSSIVRVHARPVRFQEALKDLEVLEGGAATLRCVLSSVAAPVKWCYGNNVLRPGDKYSLRQEGAMLELVVRNLRPQDSGRYSCSFGDQTTSATLTVTALPAQFIGKLRNKEATEGATATLRCELSKAAPVEWRKGSETLRDGDRYCLRQDGAMCELQIRGLAMVDAAEYSCVCGEERTSASLTIRPMPAHFIGRLRHQESIEGATATLRCELSKAAPVEWRKGRESLRDGDRHSLRQDGAVCELQICGLAVADAGEYSCVCGEERTSATLTVKALPAKFTEGLRNEEAVEGATAMLWCELSKVAPVEWRKGPENLRDGDRYILRQEGTRCELQICGLAMADAGEYLCVCGQERTSATLTIRALPARFIEDVKNQEAREGATAVLQCELNSAAPVEWRKGSETLRDGDRYSLRQDGTKCELQIRGLAMADTGEYSCVCGQERTSAMLTVRALPIKFTEGLRNEEATEGATAVLRCELSKMAPVEWWKGHETLRDGDRHSLRQDGARCELQIRGLVAEDAGEYLCMCGKERTSAMLTVRAMPSKFIEGLRNEEATEGDTATLWCELSKAAPVEWRKGHETLRDGDRHSLRQDGSRCELQIRGLAVVDAGEYSCVCGQERTSATLTVRALPARFIEDVKNQEAREGATAVLQCELSKAAPVEWRKGSETLRGGDRYSLRQDGTRCELQIHGLSVADTGEYSCVCGQERTSATLTVRALPARFTQDLKTKEASEGATATLQCELSKVAPVEWKKGPETLRDGGRYSLKQDGTRCELQIHDLSVADAGEYSCMCGQERTSATLTVRALPARFTEGLRNEEAMEGATATLQCELSKAAPVEWRKGLEALRDGDKYSLRQDGAVCELQIHGLAMADNGVYSCVCGQERTSATLTVRALPARFIEDMRNQKATEGATVTLQCKLRKAAPVEWRKGPNTLKDGDRYSLKQDGTSCELQIRGLVIADAGEYSCICEQERTSATLTVRALPARFIEDVRNHEATEGATAVLQCELSKAAPVEWRKGSETLRDGDRYSLRQDGTRCELQIRGLAVEDTGEYLCVCGQERTSATLTVRALPARFIDNMTNQEAREGATATLHCELSKVAPVEWRKGPETLRDGDRHSLRQENCLNPGGRGCSEPRSCHCTPAWVIEQAL

SEQ ID NO: 870473 - protein, 2080 aa, Homo sapiens
MDEADNVRLLQEGRTYTLIYRRVLAEDAGEIQFVAENAESRAQLRVKELPVTLVRPLRDKIAMEKHRGVLECQVSRASAQVRWFKGSQELQPGPKYELVSDGLYRKLIISDVHAEDEDTYTCDAGDVKTSAQFFVEEQSITIVRGLQDVTVMEPAPAWFECETSIPSVRPPKWLLGKTVLQAGGNVGLEQEGTVHRLMLRRTCSTMTGPVHFTVGKSRSSARLVVSDIPVVLTRPLEPKTGRELQSVVLSCDFRPAPKAVQWYKDDTPLSPSEKFKMSLEGQMAELRILRLMPADAGVYRCQAGSAHSSTEVTVEAREVTVTGPLQDAEATEEGWASFSCELSHEDEEVEWSLNGMPLYNDSFHEISHKGRRHTLVLKSIQRADAGIVRASSLKVSTSARLEVRVKPVVFLKALDDLSAEERGTLALQCEVSDPEAHVVWRKDGVQLGPSDKYDFLHTAGTRGLVVHDVSPEDAGLYTCHVGSEETRARVRVHDLHVGITKRLKTMEVLEGESCSFECVLSHESASDPAMWTVGGKTVGSSSRFQATRQGRKYILVVREAAPSDAGEVVFSVRGLTSKASLIVRERPAAIIKPLEDQWVAPGEDVELRCELSRAGTPVHWLKDRKAIRKSQKYDVVCEGTMAMLVIRGASLKDAGEYTCEVEASKSTASLHVEEKANCFTEELTNLQVEEKGTAVFTCKTEHPAATVTWRKGLLELRASGKHQPSQEGLTLRLTISALEKADSDTYTCDIGQAQSRAQLLVQGRRVHIIEDLEDVDVQEGSSATFRCRISPANYEPVHWFLDKTPLHANELNEIDAQPGGYHVLTLRQLALKDSGTIYFEAGDQRASAALRVTEKPSVFSRELTDATITEGEDLTLVCETSTCDIPVCWTKDGKTLRGSARCQLSHEGHRAQLLITGATLQDSGRYKCEAGGACSSSIVRVHARPVRFQEALKDLEVLEGGAATLRCVLSSVAAPVKWCYGNNVLRPGDKYSLRQEGAMLELVVRNLRPQDSGRYSCSFGDQTTSATLTVTALPAQFIGKLRNKEATEGATATLRCELSKAAPVEWRKGSETLRDGDRYCLRQDGAMCELQIRGLAMVDAAEYSCVCGEERTSASLTIRPMPAHFIGRLRHQESIEGATATLRCELSKAAPVEWRKGRESLRDGDRHSLRQDGAVCELQICGLAVADAGEYSCVCGEERTSATLTVKALPAKFTEGLRNEEAVEGATAMLWCELSKVAPVEWRKGPENLRDGDRYILRQEGTRCELQICGLAMADAGEYLCVCGQERTSATLTIRALPARFIEDVKNQEAREGATAVLQCELNSAAPVEWRKGSETLRDGDRYSLRQDGTKCELQIRGLAMADTGEYSCVCGQERTSAMLTVRALPIKFTEGLRNEEATEGATAVLRCELSKMAPVEWWKGHETLRDGDRHSLRQDGARCELQIRGLVAEDAGEYLCMCGKERTSAMLTVRAMPSKFIEGLRNEEATEGDTATLWCELSKAAPVEWRKGHETLRDGDRHSLRQDGSRCELQIRGLAVVDAGEYSCVCGQERTSATLTVRALPARFIEDVKNQEAREGATAVLQCELSKAAPVEWRKGSETLRGGDRYSLRQDGTRCELQIHGLSVADTGEYSCVCGQERTSATLTVRALPARFTQDLKTKEASEGATATLQCELSKVAPVEWKKGPETLRDGGRYSLKQDGTRCELQIHDLSVADAGEYSCMCGQERTSATLTVRALPARFTEGLRNEEAMEGATATLQCELSKAAPVEWRKGLEALRDGDKYSLRQDGAVCELQIHGLAMADNGVYSCVCGQERTSATLTVRALPARFIEDMRNQKATEGATVTLQCKLRKAAPVEWRKGPNTLKDGDRYSLKQDGTSCELQIRGLVIADAGEYSCICEQERTSATLTVRALPARFIEDVRNHEATEGATAVLQCELSKAAPVEWRKGSETLRDGDRYSLRQDGTRCELQIRGLAVEDTGEYLCVCGQERTSATLTVRALPARFIDNMTNQEAREGATATLHCELSKVAPVEWRKGPETLRDGDRHSLRQENCLNPGGRGCSEPRSCHCTPAWVIEQAL

SEQ ID NO: 870474 - protein, 2341 aa, Homo sapiens
MALHSGWRNCDSCAGRWWGFSQLHGQCQAWEGSVSPTFSSRPSYPRVVFLTWAVSLTSCVPPCPSPEPKVVFAKEQPAHREVQAEAGASATLSCEVAQAQTEVTWYKDGKKLSSSSKVRVEAVGCTRRLVVQQAGQAEAGEYSCEAGGQQLSFRLQVAELEPQISERPCRREPLVVKEHEDIILTATLATPSAATVTWLKDGVEIRRSKRHETASQGDTHTLTVHGAQVLDSAIYSCRVGAEGQDFPVQVEEVAAKFCRLLEPVCGELGGTVTLACELSPACAEVVWRCGNTQLRVGKRFQMVAEGPVRSLTVLGLRAEDAGEYVCESRDDHTSAQLTVSVPRVVKFMSGLSTVVAEEGGEATFQCVVSPSDVAVVWFRDGALLQPSEKFAISQSGASHSLTISDLVLEDAGQITVEAEGASSSAALRVREAPVLFKKKLDPQTVEERSSVTLEVELTRPWPELRWTRNATAWAPGKNVEIHAEGARHRLVLHNVGFADRGFFGCETPDDKTQAKLTVEMRQVRLVRGLQAVEAREQGTATMEVQLSHADVDGSWTRDGLRFQQGPTCHLAVRGPMHTLTLSGLRPEDSGLMVFKAEGVHTSARLVVTELPVSFSRPLQDVVTTEKEKVTLECELSRPNVDVRWLKDGVELRAGKTMAIAAQGACRSLTIYRCEFADQGVYVCDAHDAQSSASVKVQGRTYTLIYRRVLAEDAGEIQFVAENAESRAQLRVKELPVTLVRPLRDKIAMEKHRGVLECQVSRASAQVRWFKGSQELQPGPKYELVSDGLYRKLIISDVHAEDEDTYTCDAGDVKTSAQFFVEEQSITIVRGLQDVTVMEPAPAWFECETSIPSVRPPKWLLGKTVLQAGGNVGLEQEGTVHRLMLRRTCSTMTGPVHFTVGKSRSSARLVVSDIPVVLTRPLEPKTGRELQSVVLSCDFRPAPKAVQWYKDDTPLSPSEKFKMSLEGQMAELRILRLMPADAGVYRCQAGSAHSSTEVTVEAREVTVTGPLQDAEATEEGWASFSCELSHEDEEVEWSLNGMPLYNDSFHEISHKGRRHTLVLKSIQRADAGIVRASSLKVSTSARLEVRVKPVVFLKALDDLSAEERGTLALQCEVSDPEAHVVWRKDGVQLGPSDKYDFLHTAGTRGLVVHDVSPEDAGLYTCHVGSEETRARVRVHDLHVGITKRLKTMEVLEGESCSFECVLSHESASDPAMWTVGGKTVGSSSRFQATRQGRKYILVVREAAPSDAGEVVFSVRGLTSKASLIVRERPAAIIKPLEDQWVAPGEDVELRCELSRAGTPVHWLKDRKAIRKSQKYDVVCEGTMAMLVIRGASLKDAGEYTCEVEASKSTASLHVEEKANCFTEELTNLQVEEKGTAVFTCKTEHPAATVTWRKGLLELRASGKHQPSQEGLTLRLTISALEKADSDTYTCDIGQAQSRAQLLVQGRRVHIIEDLEDVDVQEGSSATFRCRISPANYEPVHWFLDKTPLHANELNEIDAQPGGYHVLTLRQLALKDSGTIYFEAGDQRASAALRVTEKPSVFSRELTDATITEGEDLTLVCETSTCDIPVCWTKDGKTLRGSARCQLSHEGHRAQLLITGATLQDSGRYKCEAGGACSSSIVRVHARPVRFQEALKDLEVLEGGAATLRCVLSSVAAPVKWCYGNNVLRPGDKYSLRQEGAMLELVVRNLRPQDSGRYSCSFGDQTTSATLTVTALPAQFIGKLRNKEATEGATATLRCELSKAAPVEWRKGSETLRDGDRYCLRQDGAMCELQIRGLAMVDAAEYSCVCGEERTSASLTIRPMPAHFIGRLRHQESIEGATATLRCELSKAAPVEWRKGRESLRDGDRHSLRQDGAVCELQICGLAVADAGEYSCVCGEERTSATLTVKALPAKFTEGLRNEEAVEGATAMLWCELSKVAPVEWRKGPENLRDGDRYILRQEGTRCELQICGLAMADAGEYLCVCGQERTSATLTIRALPARFIEDVKNQEAREGATAVLQCELNSAAPVEWRKGSETLRDGDRYSLRQDGTKCELQIRGLAMADTGEYSCVCGQERTSAMLTVRALPIKFTEGLRNEEATEGATAVLRCELSKMAPVEWWKGHETLRDGDRHSLRQDGARCELQIRGLVAEDAGEYLCMCGKERTSAMLTVRAMPSKFIEGLRNEEATEGDTATLWCELSKAAPVEWRKGHETLRDGDRHSLRQDGSRCELQIRGLAVVDAGEYSCVCGQERTSATLTVRALPARFIEDVKNQEAREGATAVLQCELSKAAPVEWRKGSETLRGGDRYSLRQDGTRCELQIHGLSVADTGEYSCVCGQERTSATLTVRGKDHMWPPE

SEQ ID NO: 870475 - protein, 2465 aa, Homo sapiens
MALHSGWRNCDSCAGRWWGFSQLHGQCQAWEGSVSPTFSSRPSYPRVVFLTWAVSLTSCVPPCPSPEPKVVFAKEQPAHREVQAEAGASATLSCEVAQAQTEVTWYKDGKKLSSSSKVRVEAVGCTRRLVVQQAGQAEAGEYSCEAGGQQLSFRLQVAELEPQISERPCRREPLVVKEHEDIILTATLATPSAATVTWLKDGVEIRRSKRHETASQGDTHTLTVHGAQVLDSAIYSCRVGAEGQDFPVQVEEVAAKFCRLLEPVCGELGGTVTLACELSPACAEVVWRCGNTQLRVGKRFQMVAEGPVRSLTVLGLRAEDAGEYVCESRDDHTSAQLTVSVPRVVKFMSGLSTVVAEEGGEATFQCVVSPSDVAVVWFRDGALLQPSEKFAISQSGASHSLTISDLVLEDAGQITVEAEGASSSAALRVREAPVLFKKKLDPQTVEERSSVTLEVELTRPWPELRWTRNATAWAPGKNVEIHAEGARHRLVLHNVGFADRGFFGCETPDDKTQAKLTVEMRQVRLVRGLQAVEAREQGTATMEVQLSHADVDGSWTRDGLRFQQGPTCHLAVRGPMHTLTLSGLRPEDSGLMVFKAEGVHTSARLVVTELPVSFSRPLQDVVTTEKEKVTLECELSRPNVDVRWLKDGVELRAGKTMAIAAQGACRSLTIYRCEFADQGVYVCDAHDAQSSASVKVQGRTYTLIYRRVLAEDAGEIQFVAENAESRAQLRVKELPVTLVRPLRDKIAMEKHRGVLECQVSRASAQVRWFKGSQELQPGPKYELVSDGLYRKLIISDVHAEDEDTYTCDAGDVKTSAQFFVEEQSITIVRGLQDVTVMEPAPAWFECETSIPSVRPPKWLLGKTVLQAGGNVGLEQEGTVHRLMLRRTCSTMTGPVHFTVGKSRSSARLVVSDIPVVLTRPLEPKTGRELQSVVLSCDFRPAPKAVQWYKDDTPLSPSEKFKMSLEGQMAELRILRLMPADAGVYRCQAGSAHSSTEVTVEAREVTVTGPLQDAEATEEGWASFSCELSHEDEEVEWSLNGMPLYNDSFHEISHKGRRHTLVLKSIQRADAGIVRASSLKVSTSARLEVRVKPVVFLKALDDLSAEERGTLALQCEVSDPEAHVVWRKDGVQLGPSDKYDFLHTAGTRGLVVHDVSPEDAGLYTCHVGSEETRARVRVHDLHVGITKRLKTMEVLEGESCSFECVLSHESASDPAMWTVGGKTVGSSSRFQATRQGRKYILVVREAAPSDAGEVVFSVRGLTSKASLIVRERPAAIIKPLEDQWVAPGEDVELRCELSRAGTPVHWLKDRKAIRKSQKYDVVCEGTMAMLVIRGASLKDAGEYTCEVEASKSTASLHVEEKANCFTEELTNLQVEEKGTAVFTCKTEHPAATVTWRKGLLELRASGKHQPSQEGLTLRLTISALEKADSDTYTCDIGQAQSRAQLLVQGRRVHIIEDLEDVDVQEGSSATFRCRISPANYEPVHWFLDKTPLHANELNEIDAQPGGYHVLTLRQLALKDSGTIYFEAGDQRASAALRVTEKPSVFSRELTDATITEGEDLTLVCETSTCDIPVCWTKDGKTLRGSARCQLSHEGHRAQLLITGATLQDSGRYKCEAGGACSSSIVRVHARPVRFQEALKDLEVLEGGAATLRCVLSSVAAPVKWCYGNNVLRPGDKYSLRQEGAMLELVVRNLRPQDSGRYSCSFGDQTTSATLTVTALPAQFIGKLRNKEATEGATATLRCELSKAAPVEWRKGSETLRDGDRYCLRQDGAMCELQIRGLAMVDAAEYSCVCGEERTSASLTIRPMPAHFIGRLRHQESIEGATATLRCELSKAAPVEWRKGRESLRDGDRHSLRQDGAVCELQICGLAVADAGEYSCVCGEERTSATLTVKALPAKFTEGLRNEEAVEGATAMLWCELSKVAPVEWRKGPENLRDGDRYILRQEGTRCELQICGLAMADAGEYLCVCGQERTSATLTIRALPARFIEDVKNQEAREGATAVLQCELNSAAPVEWRKGSETLRDGDRYSLRQDGTKCELQIRGLAMADTGEYSCVCGQERTSAMLTVRALPIKFTEGLRNEEATEGATAVLRCELSKMAPVEWWKGHETLRDGDRHSLRQDGARCELQIRGLVAEDAGEYLCMCGKERTSAMLTVRAMPSKFIEGLRNEEATEGDTATLWCELSKAAPVEWRKGHETLRDGDRHSLRQDGSRCELQIRGLAVVDAGEYSCVCGQERTSATLTVRALPARFIEDVKNQEAREGATAVLQCELSKAAPVEWRKGSETLRGGDRYSLRQDGTRCELQIHGLSVADTGEYSCVCGQERTSATLTVRALPARFTQDLKTKEASEGATATLQCELSKVAPVEWKKGPETLRDGGRYSLKQDGTRCELQIHDLSVADAGEYSCMCGQERTSATLTVRGKVHLSRSAFWCPVVHFLPSISAHCMVSPRLPHSSRHATLSLPAS

SEQ ID NO: 870476 - protein, 747 aa, Homo sapiens
MALHSGWRNCDSCAGRWWGFSQLHGQCQAWEGSVSPTFSSRPSYPRVVFLTWAVSLTSCVPPCPSPEPKVVFAKEQPAHREVQAEAGASATLSCEVAQAQTEVTWYKDGKKLSSSSKVRVEAVGCTRRLVVQQAGQAEAGEYSCEAGGQQLSFRLQVAELEPQISERPCRREPLVVKEHEDIILTATLATPSAATVTWLKDGVEIRRSKRHETASQGDTHTLTVHGAQVLDSAIYSCRVGAEGQDFPVQVEEVAAKFCRLLEPVCGELGGTVTLACELSPACAEVVWRCGNTQLRVGKRFQMVAEGPVRSLTVLGLRAEDAGEYVCESRDDHTSAQLTVSVPRVVKFMSGLSTVVAEEGGEATFQCVVSPSDVAVVWFRDGALLQPSEKFAISQSGASHSLTISDLVLEDAGQITVEAEGASSSAALRVREAPVLFKKKLDPQTVEERSSVTLEVELTRPWPELRWTRNATAWAPGKNVEIHAEGARHRLVLHNVGFADRGFFGCETPDDKTQAKLTVEMRQVRLVRGLQAVEAREQGTATMEVQLSHADVDGSWTRDGLRFQQGPTCHLAVRGPMHTLTLSGLRPEDSGLMVFKAEGVHTSARLVVTELPVSFSRPLQDVVTTEKEKVTLECELSRPNVDVRWLKDGVELRAGKTMAIAAQGACRSLTIYRCEFADQGVYVCDAHDAQSSASVKVQGRNIQIVRPLEDVEVMEKDGATFSCEVSHDEVPGQWFWEGSTLRPTDNVR

SEQ ID NO: 870477 - protein, 118 aa, Homo sapiens
VRNHEATEGATAVLQCELSKAAPVEWRKGSETLRDGDRYSLRQDGTRCELQIRGLAVEDTGEYLCVCGQERTSATLTVRGKDPVWSHGLVAWNLSVSVSPPSTSKCGTPVGTLRLCVL

SEQ ID NO: 870478 - protein, 130 aa, Homo sapiens
QAFSPQCCLPDLDGGGPPYASLPSPEPKAVFAKEQPASREVQAEAGTSATLSCEVAQAQTEVTWYKDGKKLSSSSKVRMEAVGCTRRLVVQEAGQADAGEYSCKAGDQRLSFHLHVAGQCFGGPEEPLQR

SEQ ID NO: 870479 - protein, 115 aa, Homo sapiens
SMFCPKNPPDSLMISVTVWSFSALPARFIEDMRNQKATEGATVTLQCKLRKAAPVEWRKGPNTLKDGDRYSLKQDGTSCELQIRGLVIADAGEYSCICEQERTSATLTVRGKDHM

SEQ ID NO: 870480 - protein, 3133 aa, Homo sapiens
ISYGSGLGLEVTWYKDGKKLSSSSKVRMEVKGCTRRLVVQQVGKADAGEYSCEAGGQRVSFQLHITEPKAVFAKEQLVHNEVRTEAGASATLSCEVAQAQTEVTWYKDGKKLSSSSKVRIEAAGCMRQLVVQQAGQADAGEYTCEAGGQRLSFHLDVSEPKAVFAKEQLAHRKVQAEAGAIATLSCEVAQAQTEVTWYKDGKKLSSSSKVRMEAVGCTRRLVVQQACQADTGEYSCEAGGQRLSFSLDVAEPKVVFAKEQPVHREVQAQAGASTTLSCEVAQAQTEVMWYKDGKKLSFSSKVRMEAVGCTRRLVVQQAGQAVAGEYSCEAGSQRLSFHLHVAEPKAVFAKEQPASREVQAEAGTSATLSCEVAQAQTEVTWYKDGKKLSSSSKVRMEAVGCTRRLVVQEAGQADAGEYSCKAGDQRLSFHLHVAEPKVVFAKEQPAHREVQAEAGASATLSCEVAQAQTEVTWYKDGKKLSSSSKVRVEAVGCTRRLVVQQAGQAEAGEYSCEAGGQQLSFRLQVAELEPQISERPCRREPLVVKEHEDIILTATLATPSAATVTWLKDGVEIRRSKRHETASQGDTHTLTVHGAQVLDSAIYSCRVGAEGQDFPVQVEEVAAKFCRLLEPVCGELGGTVTLACELSPACAEVVWRCGNTQLRVGKRFQMVAEGPVRSLTVLGLRAEDAGEYVCESRDDHTSAQLTVSVPRVVKFMSGLSTVVAEEGGEATFQCVVSPSDVAVVWFRDGALLQPSEKFAISQSGASHSLTISDLVLEDAGQITVEAEGASSSAALRVREAPVLFKKKLDPQTVEERSSVTLEVELTRPWPELRWTRNATAWAPGKNVEIHAEGARHRLVLHNVGFADRGFFGCETPDDKTQAKLTVEMRQVRLVRGLQAVEAREQGTATMEVQLSHADVDGSWTRDGLRFQQGPTCHLAVRGPMHTLTLSGLRPEDSGLMVFKAEGVHTSARLVVTELPVSFSRPLQDVVTTEKEKVTLECELSRPNVDVRWLKDGVELRAGKTMAIAAQGACRSLTIYRCEFADQGVYVCDAHDAQSSASVKVQGRTYTLIYRRVLAEDAGEIQFVAENAESRAQLRVKELPVTLVRPLRDKIAMEKHRGVLECQVSRASAQVRWFKGSQELQPGPKYELVSDGLYRKLIISDVHAEDEDTYTCDAGDVKTSAQFFVEEQSITIVRGLQDVTVMEPAPAWFECETSIPSVRPPKWLLGKTVLQAGGNVGLEQEGTVHRLMLRRTCSTMTGPVHFTVGKSRSSARLVVSDIPVVLTRPLEPKTGRELQSVVLSCDFRPAPKAVQWYKDDTPLSPSEKFKMSLEGQMAELRILRLMPADAGVYRCQAGSAHSSTEVTVEAREVTVTGPLQDAEATEEGWASFSCELSHEDEEVEWSLNGMPLYNDSFHEISHKGRRHTLVLKSIQRADAGIVRASSLKVSTSARLEVRVKPVVFLKALDDLSAEERGTLALQCEVSDPEAHVVWRKDGVQLGPSDKYDFLHTAGTRGLVVHDVSPEDAGLYTCHVGSEETRARVRVHDLHVGITKRLKTMEVLEGESCSFECVLSHESASDPAMWTVGGKTVGSSSRFQATRQGRKYILVVREAAPSDAGEVVFSVRGLTSKASLIVRERPAAIIKPLEDQWVAPGEDVELRCELSRAGTPVHWLKDRKAIRKSQKYDVVCEGTMAMLVIRGASLKDAGEYTCEVEASKSTASLHVEEKANCFTEELTNLQVEEKGTAVFTCKTEHPAATVTWRKGLLELRASGKHQPSQEGLTLRLTISALEKADSDTYTCDIGQAQSRAQLLVQGRRVHIIEDLEDVDVQEGSSATFRCRISPANYEPVHWFLDKTPLHANELNEIDAQPGGYHVLTLRQLALKDSGTIYFEAGDQRASAALRVTEKPSVFSRELTDATITEGEDLTLVCETSTCDIPVCWTKDGKTLRGSARCQLSHEGHRAQLLITGATLQDSGRYKCEAGGACSSSIVRVHARPVRFQEALKDLEVLEGGAATLRCVLSSVAAPVKWCYGNNVLRPGDKYSLRQEGAMLELVVRNLRPQDSGRYSCSFGDQTTSATLTVTALPAQFIGKLRNKEATEGATATLRCELSKAAPVEWRKGSETLRDGDRYCLRQDGAMCELQIRGLAMVDAAEYSCVCGEERTSASLTIRPMPAHFIGRLRHQESIEGATATLRCELSKAAPVEWRKGRESLRDGDRHSLRQDGAVCELQICGLAVADAGEYSCVCGEERTSATLTVKALPAKFTEGLRNEEAVEGATAMLWCELSKVAPVEWRKGPENLRDGDRYILRQEGTRCELQICGLAMADAGEYLCVCGQERTSATLTIRALPARFIEDVKNQEAREGATAVLQCELNSAAPVEWRKGSETLRDGDRYSLRQDGTKCELQIRGLAMADTGEYSCVCGQERTSAMLTVRALPIKFTEGLRNEEATEGATAVLRCELSKMAPVEWWKGHETLRDGDRHSLRQDGARCELQIRGLVAEDAGEYLCMCGKERTSAMLTVRAMPSKFIEGLRNEEATEGDTATLWCELSKAAPVEWRKGHETLRDGDRHSLRQDGSRCELQIRGLAVVDAGEYSCVCGQERTSATLTVRALPARFIEDVKNQEAREGATAVLQCELSKAAPVEWRKGSETLRGGDRYSLRQDGTRCELQIHGLSVADTGEYSCVCGQERTSATLTVRALPARFTQDLKTKEASEGATATLQCELSKVAPVEWKKGPETLRDGGRYSLKQDGTRCELQIHDLSVADAGEYSCMCGQERTSATLTVRALPARFTEGLRNEEAMEGATATLQCELSKAAPVEWRKGLEALRDGDKYSLRQDGAVCELQIHGLAMADNGVYSCVCGQERTSATLTVRALPARFIEDMRNQKATEGATVTLQCKLRKAAPVEWRKGPNTLKDGDRYSLKQDGTSCELQIRGLVIADAGEYSCICEQERTSATLTVRALPARFIEDVRNHEATEGATAVLQCELSKAAPVEWRKGSETLRDGDRYSLRQDGTRCELQIRGLAVEDTGEYLCVCGQERTSATLTVRALPARFIDNMTNQEAREGATATLHCELSKVAPVEWRKGPETLRDGDRHSLRQENCLNPGGRGCSEPRSCHCTPAWVIEQAL

SEQ ID NO: 870481 - protein, 561 aa, Homo sapiens
LVLCFFSSVAGGGGLCRLGSHACVRVLCALSLLACWYNNLSSHAALAILGAVPIFSRALSSLPQRRDHHHCGEEPTWPTTVPQQVPLPLTFPLLCQPAEARPTGPRPAVPARCWPAPQAGGRTRPEARVPTLYVTEAEAHSPALPGLSGPQPKWVEVEETIEVRVKKMGPQGVSPTTEVPRSSSGHLFTLPGATPGGDPNSNNSNNKLLAQEAWAQGTAMVGVREPLVFRVDARGSVDWAASGMGSLEEEGTMEEAGEEEGEDGDAFVTEESQDTHSLGDRDPKILTHNGRMLTLADLEDYVPGEGETFHCGGPGPGAPDDPPCEVSVIQREIGEPTVGQPVLLSVGHALGPRGPLGLFRPEPRGASPPGPQVRSLEGTSFLLREAPARPVGSAPWTQSFCTRIRRSADSGQSSFTTELSTQTVNFGTVGETVTLHICPDRDGDEAAQPDAAAMVAWGSGEKGVSLRPRTLPGLSSSPGSLLRALPVPGHGPFLPHSTSARRTGWCLQCWNDRLKDLSSGLFPVSLAGASGLWTKDVALGICPVPTWAWSLPPGPSHSCQA

SEQ ID NO: 870482 - protein, 152 aa, Homo sapiens
FPGTVHLGKWDLPVTTYGAAHLPRNPPGPASGEARVASWGPSVGRGAAKALPWCSVRGGRIGDPTTGPLGACLSPADPGDGAPGLPHSGGACRMLEGSQGSCTLSLFLHEPDSCYGRSVCWLGFLEEEHLGLGSVGREGEGRDLLSTPHSSS

SEQ ID NO: 870483 - protein, 732 aa, Homo sapiens
MTEGTCLRRRGGPYKTEPATDLGRWRLNCERGRQTWTYLQDERAGREQTGLEAYALGLDTKNYFKDLPKAHTAFEGALNGMTFYVGLQAEDGHWTGDYGGPLFLLPGLLITCHVARIPLPAGYREEIVRYLRSVQLPDGGWGLHIEDKSTVFGTALNYVSLRILGVGPDDPDLVRARNILHKKGGAVAIPSWGKFWLAVLNVYSWEGLNTLFPEMWLFPDWAPAHPSTLWCHCRQVYLPMSYCYAVRLSAAEDPLVQSLRQELYVEDFASIDWLAQRNNVAPDELYTPHSWLLRVVYALLNLYEHHHSAHLRQRAVQKLYEHIVADDRFTKSISIGPISKTINMLVRWYVDGPASTAFQEHVSRIPDYLWMGLDGMKMQGTNGSQIWDTAFAIQALLEAGGHHRPEFSSCLQKAHEFLRLSQVPDNPPDYQKYYRQMRKGGFSFSTLDCGWIVSDCTAEALKAVLLLQEKCPHVTEHIPRERLCDAVAVLLNMRNPDGGFATYETKRGGHLLELLNPSEVFGDIMIDYTYVECTSAVMQALKYFHKRFPEHRAAEIRETLTQGLEFCRRQQRADGSWEGSWGVCFTYGTWFGLEAFACMGQTYRDGTACAEVSRACDFLLSRQMADGGWGEDFESCEERRYVQSAQSQIHNTCWAMMGLMAVRHPDIEAQERGVRCLLEKQLPNGDWPQENIAGVFNKSCAISYTSYRNIFPIWALGRFSQLYPERALAGHP

SEQ ID NO: 870484 - protein, 732 aa, Homo sapiens; identical to SEQ ID NO: 870483

SEQ ID NO: 870485 - protein, 732 aa, Homo sapiens; identical to SEQ ID NO: 870483

SEQ ID NO: 870486 - protein, 640 aa, Homo sapiens
MTTFPSEEHLSCHTGLLITCHVARIPLPAGYREEIVRYLRSVQLPDGGWGLHIEDKSTVFGTALNYVSLRILGVGPDDPDLVRARNILHKKGGAVAIPSWGKFWLAVLNVYSWEGLNTLFPEMWLFPDWAPAHPSTLWCHCRQVYLPMSYCYAVRLSAAEDPLVQSLRQELYVEDFASIDWLAQRNNVAPDELYTPHSWLLRVVYALLNLYEHHHSAHLRQRAVQKLYEHIVADDRFTKSISIGPISKTINMLVRWYVDGPASTAFQEHVSRIPDYLWMGLDGMKMQGTNGSQIWDTAFAIQALLEAGGHHRPEFSSCLQKAHEFLRLSQVPDNPPDYQKYYRQMRKGGFSFSTLDCGWIVSDCTAEALKAVLLLQEKCPHVTEHIPRERLCDAVAVLLNMRNPDGGFATYETKRGGHLLELLNPSEVFGDIMIDYTYVECTSAVMQALKYFHKRFPEHRAAEIRETLTQGLEFCRRQQRADGSWEGSWGVCFTYGTWFGLEAFACMGQTYRDGTACAEVSRACDFLLSRQMADGGWGEDFESCEERRYVQSAQSQIHNTCWAMMGLMAVRHPDIEAQERGVRCLLEKQLPNGDWPQENIAGVFNKSCAISYTSYRNIFPIWALGRFSQLYPERALAGHP

SEQ ID NO: 870487 - protein, 732 aa, Homo sapiens
PDECGVVLGAEESATGAVGRRPALGRGLGRCWPVVLRCLRRRGGPYKTEPATDLGRWRLNCERGRQTWTYLQDERAGREQTGLEAYALGLDTKNYFKDLPKAHTAFEGALNGMTFYVGLQAEDGHWTGDYGGPLFLLPGLLITCHVARIPLPAGYREEIVRYLRSVQLPDGGWGLHIEDKSTVFGTALNYVSLRILGVGPDDPDLVRARNILHKKGCFLTGHRHTPPHSGATAVQVYLPMSYCYAVRLSAAEDPLVQSLRQELYVEDFASIDWLAQRNNVAPDELYTPHSWLLRVVYALLNLYEHHHSAHLRQRAVQKLYEHIVADDRFTKSISIGPISKTINMLVRWYVDGPASTAFQEHVSRIPDYLWMGLDGMKMQGTNGSQIWDTAFAIQALLEAGGHHRPEFSSCLQKAHEFLRLSQVPDNPPDYQKYYRQMRKGGFSFSTLDCGWIVSDCTAEALKAVLLLQEKCPHVTEHIPRERLCDAVAVLLNMRNPDGGFATYETKRGGHLLELLNPSEVFGDIMIDYTYVECTSAVMQALKYFHKRFPEHRAAEIRETLTQGLEFCRRQQRADGSWEGSWGVCFTYGTWFGLEAFACMGQTYRDGTACAEVSRACDFLLSRQMADGGWGEDFESCEERRYVQSAQSQIHNTCWAMMGLMAVRHPDIEAQERGVRCLLEKQLPNGDWPQENIAGVFNKSCAISYTSYRNIFPIWALGRFSQLYPERALAGHP

SEQ ID NO: 870488 - protein, 710 aa, Homo sapiens
MTEGTCLRRRGGPYKTEPATDLGRWRLNCERGRQTWTYLQDERAGREQTGLEAYALGLDTKNYFKDLPKAHTAFEGALNGMTFYVGLQAEDGHWTGDYGGPLFLLPGLLITCHVARIPLPAGYREEIVRYLRSVQLPDGGWGLHIEDKSTVFGTALNYVSLRILGVGPDDPDLVRARNILHKKGGAVAIPSWGKFWLAVLNVYSWEGLNTLFPEMWLFPDWAPAHPSTLWCHCRQVYLPMSYCYAVRLSAAEDPLVQSLRQELYVEDFASIDWLAQRNNVAPDELYTPHSWLLRVVYALLNLYEHHHSAHLRQRAVQKLYEHIVADDRFTKSISIGPISKTINMLVRWYVDGPASTAFQEHVSRIPDYLWMGLDGMKMQGTNGSQIWDTAFAIQALLEAGGHHRPEFSSCLQKAHEFLRLSQVPDNPPDYQKYYRQMRKGGFSFSTLDCGWIVSDCTAEALKAVLLLQEKCPHVTEHIPRERLCDAVAVLLNMRNPDGGFATYETKRGGHLLELLNPSEVFGDIMIDYTYVECTSAVMQALKYFHKRFPEHRAAEIRSWGVCFTYGTWFGLEAFACMGQTYRDGTACAEVSRACDFLLSRQMADGGWGEDFESCEERRYVQSAQSQIHNTCWAMMGLMAVRHPDIEAQERGVRCLLEKQLPNGDWPQENIAGVFNKSCAISYTSYRNIFPIWALGRFSQLYPERALAGHP

SEQ ID NO: 870489 - protein, 185 aa, Homo sapiens [sequence omitted]

SEQ ID NO: 870490 - protein, 158 aa, Homo sapiens [sequence omitted]

SEQ ID NO: 870491 - protein, 732 aa, Homo sapiens; identical to SEQ ID NO: 870483

SEQ ID NO: 870492 - protein, 732 aa, Homo sapiens; identical to SEQ ID NO: 870483

SEQ ID NO: 870493 - protein, 732 aa, Homo sapiens; identical to SEQ ID NO: 870483

SEQ ID NO: 870494 - protein, 732 aa, Homo sapiens; identical to SEQ ID NO: 870483

SEQ ID NO: 870495 - protein, 732 aa, Homo sapiens; identical to SEQ ID NO: 870483

SEQ ID NO: 870496 - protein, 732 aa, Homo sapiens; identical to SEQ ID NO: 870483

SEQ ID NO: 870497 - protein, 559 aa, Homo sapiens
MNVGLFSPPSGGAVAIPSWGKFWLAVLNVYSWEGLNTLFPEMWLFPDWAPAHPSTLWCHCRQVYLPMSYCYAVRLSAAEDPLVQSLRQELYVEDFASIDWLAQRNNVAPDELYTPHSWLLRVVYALLNLYEHHHSAHLRQRAVQKLYEHIVADDRFTKSISIGPISKTINMLVRWYVDGPASTAFQEHVSRIPDYLWMGLDGMKMQGTNGSQIWDTAFAIQALLEAGGHHRPEFSSCLQKAHEFLRLSQVPDNPPDYQKYYRQMRKGGFSFSTLDCGWIVSDCTAEALKAVLLLQEKCPHVTEHIPRERLCDAVAVLLNMRNPDGGFATYETKRGGHLLELLNPSEVFGDIMIDYTYVECTSAVMQALKYFHKRFPEHRAAEIRETLTQGLEFCRRQQRADGSWEGSWGVCFTYGTWFGLEAFACMGQTYRDGTACAEVSRACDFLLSRQMADGGWGEDFESCEERRYVQSAQSQIHNTCWAMMGLMAVRHPDIEAQERGVRCLLEKQLPNGDWPQENIAGVFNKSCAISYTSYRNIFPIWALGRFSQLYPERALAGHP

SEQ ID NO: 870498 - protein, 732 aa, Homo sapiens; identical to SEQ ID NO: 870483

SEQ ID NO: 870499 - protein, 158 aa, Homo sapiens [sequence omitted]

SEQ ID NO: 870500 - protein, 579 aa, Homo sapiens
MTEGTCLRRRGGPYKTEPATDLGRWRLNCERGRQTWTYLQDERAGREQTGLEAYALGLDTKNYFKDLPKAHTAFEGALNGMTFYVGLQAEDGHWTGDYGGPLFLLPGLLITCHVARIPLPAGYREEIVRYLRSVQLPDGGWGLHIEDKSTVFGTALNYVSLRILGVGPDDPDLVRARNILHKKGGAVAIPSWGKFWLAVLNVYSWEGLNTLFPEMWLFPDWAPAHPSTLWCHCRQVYLPMSYCYAVRLSAAEDPLVQSLRQELYVEDFASIDWLAQRNNVAPDELYTPHSWLLRVVYALLNLYEHHHSAHLRQRAVQKLYEHIVADDRFTKSISIGPISKTINMLVRWYVDGPASTAFQEHVSRIPDYLWMGLDGMKMQGTNGSQIWDTAFAIQALLEAGGHHRPEFSSCLQKAHEFLRLSQVPDNPPDYQKYYRQMRKGGFSFSTLDCGWIVSDCTAEALKAVLLLQEKCPHVTEHIPRERLCDAVAVLLNMRNPDGGFATYETKRGGHLLELLNPSEVFGDIMIDYTYVECTSAVMQALKYFHKRFPEHRAAEIRETLTQGLEFCRRQQRADGSWEG

SEQ ID NO: 870501 - protein, 101 aa, Homo sapiens
AVAFPHLILCRWYKDITVSIPSTARLLGPFITAWGWRAIIGVIACPPAGARALEAQDLSGEGQGPEECSQLSASQMPPRGPHETPSGRWKGLRVAGKLGQL

SEQ ID NO: 870502 - protein, 80 aa, Homo sapiens
STLLAWSSSLPAPGAGRWSLGTVSRAEVRRVRPLAMAAWLGQPGQGKKRCKSPNAGTSGVAGTQPGAVGGQGAMLLSWRQ

SEQ ID NO: 870503 - protein, 475 aa, Homo sapiens
MWHAISRTSRMSQSGCPSGLLADKNISSSATRVIVKTAGNQKDFMVADDISVRQFKEMLLAHFQCQMDQLVLVFMGCLLKDHDTLSQRGIMDGHTIYLVIKSKQGSRSLAHSFRDLPTNDPCHRDRNTKGNSSRVHQPTGMNQAPVELAHFVGSDAPKVHTQNLEVSHPECKAQMLENPSIQRLLSNMEFMWQFISEHLDTQQLMQQNPEVSRLLLDNSEILLQTLELARNLAMIQEIMQIQQPSQNLEYPLNPQPYLGLETMPGGNNALGQNYADINDQMLNSMQDPFGGNPFTALLAGQVLEQVQSSPPPPPPSQEQQDQLTQHPATRVIYNSSGGFSSNTSANDTLNKVNHTSKANTAMISTKGQSHICATRQPAWIPALPSIELTQQLQEEYKDATVSLSSSRQTLKGDLQLSDEQSSSQITGGMMQLLMNNPYLAAQIMLFTSMPQLSEQWRQQLPTFLQQTQISDLLSA

SEQ ID NO: 870504 - protein, 412 aa, Homo sapiens
QRPRPARTPPGITLSLPHPQGGRTLRNHQPRLIPRGSMEFPGLGSLGTSEPLPQFVDPALVSSTPESGVFFPSGPEGLDAAASSTAPSTATAAAAALAYYRDAEAYRHSPVFQVYPLLNCMEGIPGGSPYAGWAYGKTGLYPASTVCPTREDSPPQAVEDLDGKGSTSFLETLKTERLSPDLLTLGPALPSSLPVPNSAYGGPDFSSTFFSPTGSPLNSAAYSSPKLRGTLPLPPCEARECVNCGATATPLWRRDRTGHYLCNACGLYHKMNGQNRPLIRPKKRLIVSKRAGTQCTNCQTTTTTLWRRNASGDPVCNACGLYYKLHQVNRPLTMRKDGIQTRNRKASGKGKKKRGSSLGGTGAAEGPEHYCGGSAQLMRAQSMASRGGVVSFSSCSQNSGQPKSLGPRHPLA

SEQ ID NO: 870505 - protein, 450 aa, Homo sapiens
QRPRPARTPPGITLSLPHPQGGRTLRNHQPRLIPRGSMEFPGLGSLGTSEPLPQFVDPALVSSTPESGVFFPSGPEGLDAAASSTAPSTATAAAAALAYYRDAEAYRHSPVFQVYPLLNCMEGIPGGSPYAGWAYGKTGLYPASTVCPTREDSPPQAVEDLDGKGSTSFLETLKTERLSPDLLTLGPALPSSLPVPNSAYGGPDFSSTFFSPTGSPLNSAAYSSPKLRGTLPLPPCEARECVNCGATATPLWRRDRTGHYLCNACGLYHKMNGQNRPLIRPKKRLIVSKRAGTQCTNCQTTTTTLWRRNASGDPVCNACGLYYKLHQVNRPLTMRKDGIQTRNRKASGKGKKKRGSSLGGTGAAEGPAGGFMVVAGGSGSGNCGEVASGLTLGPPGTAHLYQGLGPVVLSGPVSHLMPFPGPLLGSPTGSFPTGPMPPTTSTTVVAPLSS

SEQ ID NO: 870506 - protein, 337 aa, Homo sapiens
QRPRPARTPPGITLSLPHPQGGRTLRNHQPRLIPRGSMEFPGLGSLGTSEPLPQFVDPALVSSTPESGVFFPSGPEGLDAAASSTAPSTATAAAAALAYYRDAEAYRHSPVFQVYPLLNCMEGIPGGSPYAGWAYGKTGLYPASTVCPTREDSPPQAVEDLDGKGSTSFLETLKTERLSPDLLTLGPALPSSLPVPNSAYGGPDFSSTFFSPTGSPLNSAAYSSPKLRGTLPLPPCEARECVNCGATATPLWRRDRTGHYLCNACGLYHKMNGQNRPLIRPKKRLIVSKRAGTQCTNCQTTTTTLWRRNASGDPVCNACGLYYKLHQSTTVVAPLSS

SEQ ID NO: 870507 - protein, 765 aa, Homo sapiens
MTTYLEFIQQNEERDGVRFSWNVWPSSRLEATRMVVPVAALFTPLKERPDLPPIQYEPVLCSRTTCRAVLNPLCQVDYRAKLWACNFCYQRNQFPPSYAGISELNQPAELLPQFSSIEYVVLRGPQMPLIFLYVVDTCMEDEDLQALKESMQMSLSLLPPTALVGLITFGRMVQVHELGCEGISKSYVFRGTKDLSAKQLQEMLGLSKVPVTQATRGPQVQQPPPSNRFLQPVQKIDMNLTDLLGELQRDPWPVPQGKRPLRSSGVALSIAVGLLECTFPNTGARIMMFIGGPATQGPGMVVGDELKTPIRSWHDIDKDNAKYVKKGTKHFEALANRAATTGHVIDIYACALDQTGLLEMKCCPNLTGGYMVMGDSFNTSLFKQTFQRVFTKDMHGQFKMGFGGTLEIKTSREIKISGAIGPCVSLNSKGPCVSENEIGTGGTCQWKICGLSPTTTLAIYFEVVNQHNAPIPQGGRGAIQFVTQYQHSSGQRRIRVTTIARNWADAQTQIQNIAASFDQEAAAILMARLAIYRAETEEGPDVLRWLDRQLIRLCQKFGEYHKDDPSSFRFSETFSLYPQFMFHLRRSSFLQVFNNSPDESSYYRHHFMRQDLTQSLIMIQPILYAYSFSGPPEPVLLDSSSILADRILLMDTFFQILIYHGETIAQWRKSGYQDMPEYENFRHLLQAPVDDAQEILHSRFPMPRYIDTEHGGSQARFLLSKVNPSQTHNNMYAWGQESGAPILTDDVSLQVFMDHLKKLAVSSAA

SEQ ID NO: 870508 - protein, 485 aa, Homo sapiens
FFRKKFLIFVGGPATQGPGMVVGDELKTPIRSWHDIDKDNAKYVKKGTKHFEALANRAATTGHVIDIYACALDQTGLLEMKCCPNLTGGYMVMGDSFNTSLFKQTFQRVFTKDMHGQFKMGFGGTLEIKTSREIKISGAIGPCVSLNSKGPCVSENEIGTGGTCQWKICGLSPTTTLAIYFEVVNQHNAPIPQGGRGAIQFVTQYQHSSGQRRIRVTTIARNWADAQTQIQNIAASFDQEAAAILMARLAIYRAETEEGPDVLRWLDRQLIRLCQKFGEYHKDDPSSFRFSETFSLYPQFMFHLRRSSFLQVFNNSPDESSYYRHHFMRQDLTQSLIMIQPILYAYSFSGPPEPVLLDSSSILADRILLMDTFFQILIYHGETIAQWRKSGYQDMPEYENFRHLLQAPVDDAQEILHSRFPMPRYIDTEHGGSQARFLLSKVNPSQTHNNMYAWGQESGAPILTDDVSLQVFMDHLKKLAVSSAA

SEQ ID NO: 870509 - protein, 743 aa, Homo sapiens
MTTYLEFIQQNEERDGVRFSWNVWPSSRLEATRMVVPVAALFTPLKERPDLPPIQYEPVLCSRTTCRAVLNPLCQVDYRAKLWACNFCYQRNQFPPSYAGISELNQPAELLPQFSSIEYVVLRGPQMPLIFLYVVDTCMEDEDLQALKESMQMSLSLLPPTALVGLITFGRMVQVHELGCEGISKSYVFRGTKDLSAKQLQEMLGLSKVPVTQATRGPQVQQPPPSNRFLQPVQKIDMNLTDLLGELQRDPWPVPQGKRPLRSSGVALSIAVGLLECTFPNTGARIMMFIGGPATQGPGMVVGDELKTPIRSWHDIDKDNAKYVKKGTKHFEALANRAATTGHVIDIYACALDQTGLLEMKCCPNLTGGYMVMGDSFNTSLFKQTFQRVFTKDMHGQFKMGFGGTLEIKTSREIKISGAIGPCVSLNSKGPCVSENEIGTGGTCQWKICGLSPTTTLAIYFEVVNQHNAPIPQGGRGAIQFVTQYQHSSGQRRIRVTTIARNWADAQTQIQNIAASFDQEAAAILMARLAIYRAETEEGPDVLRWLDRQLIRLCQKFGEYHKDDPSSFRFSETFSLYPQFMFHLRRSSFLQVFNNSPDESSYYRHHFMRQDLTQSLIMIQPILYAYSFSGPPEPVLLDSSSILADRILLMDTFFQILIYHGETIAQWRKSGYQDMPEYENFRHLLQAPVDDAQEILHSRFPMPRYIDTEHGGSQESGAPILTDDVSLQVFMDHLKKLAVSSAA

SEQ ID NO: 870510 - protein, 765 aa, Homo sapiens; identical to SEQ ID NO: 870507

SEQ ID NO: 870511 - protein, 748 aa, Homo sapiens [sequence omitted]

SEQ ID NO: 870512 - protein, 765 aa, Homo sapiens; identical to SEQ ID NO: 870507

SEQ ID NO: 870513 - protein, 752 aa, Homo sapiens
MTTYLEFIQQNEERDGVRFSWNVWPSSRLEATRMVVPVAALFTPLKERPDLPPIQYEPVLCSRTTCRAVLNPLCQVDYRAKLWACNFCYQRNQFPPSYAGISELNQPAELLPQFSSIEYVVLRGPQMPLIFLYVVDTCMEDEDLQALKESMQMSLSLLPPTALVGLITFGRMVQVHELGCEGISKSYVFRGTKDLSAKQLQEMLGLSKVPVTQATRGPQVQQPPPSNRFLQPVQKIDMNLTDLLGELQRDPWPVPQGKRPLRSSGVALSIAVGLLECTFPNTGARIMMFIGGPATQGPGMVVGDELKTPIRSWHDIDKDNAKYVKKGTKHFEALANRAATTGHVIDIYACALDQTGLLEMKCCPNLTGGYMVMGDSFNTSLFKQTFQRVFTKDMHGQFKMGFGGTLEIKTSREIKISGAIGPCVSLNSKGPCVSENEIGTGGTCQWKICGLSPTTTLAIYFEVVNQHNAPIPQGGRGAIQFVTQYQHSSGQRRIRVTTIARNWADAQTQIQNIAASFDQEAAAILMARLAIYRAETEEGPDVLRWLDRQLIRLCQKFGEYHKDDPSSFRFSETFSLYPQFMFHLRRSSFLQVFNNSPDESSYYRHHFMRQDLTQSLIMIQPILYAYSFSGPPEPVLLDSSSILADRILLMDTFFQILIYHGETIAQWRKSGYQDMPEYENFRHLLQAPVDDAQEILHSRFPMPRYIDTEHGGSQSSVNLFVCLFVVRFAVRCTCLPSDFNRLLHKADRKVRR

SEQ ID NO: 870514 - protein, 765 aa, Homo sapiens; identical to SEQ ID NO: 870507

SEQ ID NO: 870515 - protein, 463 aa, Homo sapiens
MTTYLEFIQQNEERDGVRFSWNVWPSSRLEATRMVVPVAALFTPLKERPDLPPIQYEPVLCSRTTCRAVLNPLCQVDYRAKLWACNFCYQRNQFPPSYAGISELNQPAELLPQFSSIEYVVLRGPQMPLIFLYVVDTCMEDEDLQALKESMQMSLSLLPPTALVGLITFGRMVQVHELGCEGISKSYVFRGTKDLSAKQLQEMLGLSKVPVTQATRGPQVQQPPPSNRFLQPVQKIDMNLTDLLGELQRDPWPVPQGKRPLRSSGVALSIAVGLLECTFPNTGARIMMFIGGPATQGPGMVVGDELKTPIRSWHDIDKDNAKYVKKGTKHFEALANRAATTGHVIDIYACALDQTGLLEMKCCPNLTGGYMVMGDSFNTSLFKQTFQRVFTKDMHGQFKMGFGGTLEIKTSREIKISGAIGPCVSLNSKGPCVSENVSCVYSKKKIQDQELWLALCNPRYLGS

SEQ ID NO: 870516 - protein, 72 aa, Homo sapiens
PPPTGRAWRKRYTLTRTMDDMGNLPGRHCSSVAMIYVTVYTVAWQLQTADLLGLPMQHEAAFLYCYIIIHIL

SEQ ID NO: 870517 - protein, 74 aa, Homo sapiens
NNPLANEVDNARRKTPGLQREREESRALRSKASVSPRSIHHEQSSPSRVEKIYGQEVIIEIKWWQTCPRNIAGI

SEQ ID NO: 870518 - protein, 85 aa, Homo sapiens
  misc_feature (32)..(32): Xaa can be any naturally occurring amino acid
VVCVGGVRRGYYVVARVGLDGSDPRVVQGAVXRVFYGGGRGTVSGARFLWRRLGREVEVAYWCRGPQPGGVLEDFFLRGWRRAHK

SEQ ID NO: 870519 - protein, 85 aa, Homo sapiens; identical to SEQ ID NO: 870518
  misc_feature (32)..(32): Xaa can be any naturally occurring amino acid

SEQ ID NO: 870520 - protein, 85 aa, Homo sapiens; identical to SEQ ID NO: 870518
  misc_feature (32)..(32): Xaa can be any naturally occurring amino acid

SEQ ID NO: 870521 - protein, 85 aa, Homo sapiens; identical to SEQ ID NO: 870518
  misc_feature (32)..(32): Xaa can be any naturally occurring amino acid

SEQ ID NO: 870522 - protein, 74 aa, Homo sapiens; identical to SEQ ID NO: 870517

SEQ ID NO: 870523 - protein, 85 aa, Homo sapiens; identical to SEQ ID NO: 870518
  misc_feature (32)..(32): Xaa can be any naturally occurring amino acid

SEQ ID NO: 870524 - protein, 85 aa, Homo sapiens; identical to SEQ ID NO: 870518
  misc_feature (32)..(32): Xaa can be any naturally occurring amino acid

SEQ ID NO: 870525 - protein, 74 aa, Homo sapiens; identical to SEQ ID NO: 870517

SEQ ID NO: 870526 - protein, 85 aa, Homo sapiens; identical to SEQ ID NO: 870518
  misc_feature (32)..(32): Xaa can be any naturally occurring amino acid

SEQ ID NO: 870527 - protein, 85 aa, Homo sapiens; identical to SEQ ID NO: 870518
  misc_feature (32)..(32): Xaa can be any naturally occurring amino acid

SEQ ID NO: 870528 - protein, 74 aa, Homo sapiens; identical to SEQ ID NO: 870517

SEQ ID NO: 870529 - protein, 74 aa, Homo sapiens; identical to SEQ ID NO: 870517

SEQ ID NO: 870530 - protein, 74 aa, Homo sapiens; identical to SEQ ID NO: 870517

SEQ ID NO: 870531 - protein, 85 aa, Homo sapiens; identical to SEQ ID NO: 870518
  misc_feature (32)..(32): Xaa can be any naturally occurring amino acid

SEQ ID NO: 870532 - protein, 85 aa, Homo sapiens; identical to SEQ ID NO: 870518
  misc_feature (32)..(32): Xaa can be any naturally occurring amino acid

SEQ ID NO: 870533 - protein, 85 aa, Homo sapiens; identical to SEQ ID NO: 870518
  misc_feature (32)..(32): Xaa can be any naturally occurring amino acid

SEQ ID NO: 870534 - protein, 74 aa, Homo sapiens; identical to SEQ ID NO: 870517

SEQ ID NO: 870535 - protein, 85 aa, Homo sapiens; identical to SEQ ID NO: 870518
  misc_feature (32)..(32): Xaa can be any naturally occurring amino acid

SEQ ID NO: 870536 - protein, 85 aa, Homo sapiens; identical to SEQ ID NO: 870518
  misc_feature (32)..(32): Xaa can be any naturally occurring amino acid

SEQ ID NO: 870537 - protein, 85 aa, Homo sapiens; identical to SEQ ID NO: 870518
  misc_feature (32)..(32): Xaa can be any naturally occurring amino acid

SEQ ID NO: 870538 - protein, 85 aa, Homo sapiens; identical to SEQ ID NO: 870518
  misc_feature (32)..(32): Xaa can be any naturally occurring amino acid

SEQ ID NO: 870539 - protein, 74 aa, Homo sapiens; identical to SEQ ID NO: 870517

SEQ ID NO: 870540 - protein, 136 aa, Homo sapiens
SGDRRAGGCASGRGTRSRHRRCRLYGRVRTEERKGRSRVEPKLPPDLTPDPRAAWRAWSVAVSFGAGGDCSFGRKEEAQAASSGSCAHHPKVRHLAPNRPSKSRTDRGVTLQPDLHLLQGESAPPFPWRGVRPSVG

SEQ ID NO: 870541 - protein, 711 aa, Homo sapiens
MSSPLQRAVGDTKRALSASSSSSASLPFDDRDSNHTSEGNGDSLLADEDTDFEDSLNRNVKKRAAKRPPKTTPVAKHPKKGSRVVHRHSRKQSEPPANDLFNAVKAAKSDMQSLVDEWLDSYKQDQDAGFLELVNFFIQSCGCKGIVTPEMFKKMSNSEIIQHLTEQFNEDSGDYPLIAPGPSWKKFQGSFCEFVRTLVCQCQYSLLYDGFPMDDLISLLTGLSDSQVRAFRHTSTLAAMKLMTSLVKVALQLSVHQDNNQRQYEAERNKGPGQRAPERLESLLEKRKELQEHQEEIEGMMNALFRGVFVHRYRDVLPEIRAICIEEIGCWMQSYSTSFLTDSYLKYIGWTLHDKHREVRLKCVKALKGLYGNRDLTTRLELFTSRFKDRMVSMVMDREYDVAVEAVRLLILILKNMEGLLTDADCESVYPVVYPSNRGLASAAGEFLYWKLFYPECEIRTMGGREQRQSPGAQRTFFQLLLSFFVESELHDHAAYLVDSLWDCAGARLKDWEGLTSLLLEKDQNLGDVQESTLIEILVSSARQASEGHPPVGRVTGRKGLTSKERKTQADDRVKLTEHLIPLLPQLLAKFSADAEKVTPLLQLLSCFDLHIYCTGRLEKHLELFLQQLQEVVVKHAEPAVLEAGAHALYLLCNPEFTFFSRADFARSQLVDLLTDRFQQELEELLQVGAGAGQWDTPNKGGRGCKTGDVD

SEQ ID NO: 870542 - protein, 711 aa, Homo sapiens; identical to SEQ ID NO: 870541

SEQ ID NO: 870543 - protein, 711 aa, Homo sapiens; identical to SEQ ID NO: 870541

SEQ ID NO: 870544 - protein, 711 aa, Homo sapiens; identical to SEQ ID NO: 870541

SEQ ID NO: 870545 - protein, 499 aa, Homo sapiens
MDDLISLLTGLSDSQVRAFRHTSTLAAMKLMTSLVKVALQLSVHQDNNQRQYEAERNKGPGQRAPERLESLLEKRKELQEHQEEIEGMMNALFRGVFVHRYRDVLPEIRAICIEEIGCWMQSYSTSFLTDSYLKYIGWTLHDKHREVRLKCVKALKGLYGNRDLTTRLELFTSRFKDRMVSMVMDREYDVAVEAVRLLILILKNMEGLLTDADCESVYPVVYPSNRGLASAAGEFLYWKLFYPECEIRTMGGREQRQSPGAQRTFFQLLLSFFVESELHDHAAYLVDSLWDCAGARLKDWEGLTSLLLEKDQNLGDVQESTLIEILVSSARQASEGHPPVGRVTGRKGLTSKERKTQADDRVKLTEHLIPLLPQLLAKFSADAEKVTPLLQLLSCFDLHIYCTGRLEKHLELFLQQLQEVVVKHAEPAVLEAGAHALYLLCNPEFTFFSRADFARSQLVDLLTDRFQQELEELLQVGAGAGQWDTPNKGGRGCKTGDVD

SEQ ID NO: 870546 - protein, 711 aa, Homo sapiens; identical to SEQ ID NO: 870541

SEQ ID NO: 870547 - protein, 164 aa, Homo sapiens
MLVEAGVNRHRGRGGALRGPAKPNREDVSSSQEESLQLNSIPPTPTLTSTAVKSRQPLWGLKEMEEEDGSELDFAQGQPVAGTERSRFLGPQYFQTPHNPSGPGLGNQLMRLSLMEEDEEEELEIQDESNEERQDTDMQASSYSSTSERGLDLLDSTELDIEDF

SEQ ID NO: 870548 - protein, 110 aa, Homo sapiens
MEIAHSLLDFWNIFLSLFCVLMIRSINMFESKKKTQNKKTKKKEDHNHNKTAGTPSTARREQKAETTHRATGQTERTDSPSAAAPQHGTNAPETKDSAASNAQTTGKPTE

SEQ ID NO: 870549 - protein, 1227 aa, Homo sapiens
MSSPLQRAVGDTKRALSASSSSSASLPFDDRDSNHTSEGNGDSLLADEDTDFEDSLNRNVKKRAAKRPPKTTPVAKHPKKGSRVVHRHSRKQSEPPANDLFNAVKAAKSDMQSLVDEWLDSYKQDQDAGFLELVNFFIQSCGCKGIVTPEMFKKMSNSEIIQHLTEQFNEDSGDYPLIAPGPSWKKFQGSFCEFVRTLVCQCQYSLLYDGFPMDDLISLLTGLSDSQVRAFRHTSTLAAMKLMTSLVKVALQLSVHQDNNQRQYEAERNKGPGQRAPERLESLLEKRKELQEHQEEIEGMMNALFRGVFVHRYRDVLPEIRAICIEEIGCWMQSYSTSFLTDSYLKYIGWTLHDKHREVRLKCVKALKGLYGNRDLTTRLELFTSRFKDRMVSMVMDREYDVAVEAVRLLILILKNMEGLLTDADCESVYPVVYPSNRGLASAAGEFLYWKLFYPECEIRTMGGREQRQSPGAQRTFFQLLLSFFVESELHDHAAYLVDSLWDCAGARLKDWEGLTSLLLEKDQNLGDVQESTLIEILVSSARQASEGHPPVGRVTGRKGLTSKERKTQADDRVKLTEHLIPLLPQLLAKFSADAEKVTPLLQLLSCFDLHIYCTGRLEKHLELFLQQLQEVVVKHAEPAVLEAGAHALYLLCNPEFTFFSRADFARSQLVDLLTDRFQQELEELLQSSFLDEDEVYNLAATLKRLSAFYNTHDLTRWELYEPCCQLLQKAVDTGEVPHQVILPALTLVYFSILWTLTHISKSDASQKQLSSLRDRMVAFCELCQSCLSDVDTEIQEQAFVLLSDLLLIFSPQMIVGGRDFLRPLVFFPEATLQSELASFLMDHVFIQPGDLGSGDSQEDHLQIERLHQRRRLLAGFCKLLLYGVLEMDAASDVFKHYNKNKFYNDYGDIIKETLTRARQIDRSHCSRILLLSLKQLYTELLQEHGPQGLNELPAFIEMRDLARRFALSFGPQQLQNRDLVVMLHKEGIQFSLSELPPAGSSNQPPNLAFLELLSEFSPRLFHQDKQLLLSYLEKCLQHVSQAPGHPWGPVTTYCHSLSPVENTAETSPQVLPSSKRRRVEGPAKPNREDVSSSQEESLQLNSIPPTPTLTSTAVKSRQPLWGLKEMEEEDGSELDFAQGQPVAGTERSRFLGPQYFQTPHNPSGPGLGNQLMRLSLMEEDEEEELEIQDESNEERQDTDMQASSYSSTSERGLDLLDSTELDIEDF

SEQ ID NO: 870550 - protein, 711 aa, Homo sapiens; identical to SEQ ID NO: 870541

SEQ ID NO: 870551 - protein, 711 aa, Homo sapiens; identical to SEQ ID NO: 870541

SEQ ID NO: 870552 - protein, 711 aa, Homo sapiens; identical to SEQ ID NO: 870541

SEQ ID NO: 870553 - protein, 380 aa, Homo sapiens
MQSYSTSFLTDSYLKYIGWTLHDKHREVRLKCVKALKGLYGNRDLTTRLELFTSRFKDRMVSMVMDREYDVAVEAVRLLILILKNMEGLLTDADCESVYPVVYPSNRGLASAAGEFLYWKLFYPECEIRTMGGREQRQSPGAQRTFFQLLLSFFVESELHDHAAYLVDSLWDCAGARLKDWEGLTSLLLEKDQNLGDVQESTLIEILVSSARQASEGHPPVGRVTGRKGLTSKERKTQADDRVKLTEHLIPLLPQLLAKFSADAEKVTPLLQLLSCFDLHIYCTGRLEKHLELFLQQLQEVVVKHAEPAVLEAGAHALYLLCNPEFTFFSRADFARSQLVDLLTDRFQQELEELLQVGAGAGQWDTPNKGGRGCKTGDVD

SEQ ID NO: 870554 - protein, 345 aa, Homo sapiens
MGCWRWMQPQMFSNTQQGNKFYNDYGDIIKETLTRARQIDRSHCSRILLLSLKQLYTELLQEHGPQGLNELPAFIEMRDLARRFALSFGPQQLQNRDLVVMLHKEGIQFSLSELPPAGSSNQPPNLAFLELLSEFSPRLFHQDKQLLLSYLEKCLQHVSQAPGHPWGPVTTYCHSLSPVENTAETSPQVLPSSKRRRVEGPAKPNREDVSSSQEESLQLNSIPPTPTLTSTAVKSRQPLWGLKEMEEEDGSELDFAQGQPVAGTERSRFLGPQYFQTPHNPSGPGLGNQLMRLSLMEEDEEEELEIQDESNEERQDTDMQASSYSSTSERGLDLLDSTELDIEDF

SEQ ID NO: 870555 - protein, 68 aa, Homo sapiens
MWIREGPAEGPVAPSGFWFYLFHRLSYLEKCLQHVSQAPGHPWGPVTTYCHSLSPVENTAETSPQVLP

SEQ ID NO: 870556 - protein, 454 aa, Homo sapiens
MRPRSAVLPAGPDPGLTSAPRPAPRPSGPARGRPVGCEEELCLACRQRRADGGRRSKMNAGSDPVVIVSAARTIIGSFNGALAAVPVQDLGSTVIKEVLKRATVAPEDVSEVIFGHVLAAGCGQNPVRQASVGAGIPYSVPAWSCQMICGSGLKAVCLAVQSIGIGDSSIVVAGGMENMSKAPHLAYLRTGVKIGEMPLTDSILCDGLTDAFHNCHMGITAENVAKKWQVSREDQDKVAVLSQNRTENAQKAGHFDKEIVPVLVSTRRGLIEVKTDEFPRHGSNIEAMSKLKPYFLTDGTGTVTPANASGINDGAAAVVLMKKSEADKRGLTPLARIVSWSQVGVEPSIMGIGPIPAIKQAVTKAGWSLEDVDIFEINEAFAAVSAAIVKELGLNPEKVNIEGGAIALGHPLGASGCRILVTLLHTLERMGRSRGVAALCIGGGMGIAMCVQRE

SEQ ID NO: 870557 - protein, 445 aa, Homo sapiens
RGEVVRGEVEGEGRGYLSGPARGRPVGCEEELCLACRQRRADGGRRSKMNAGSDPVVIVSAARTIIGSFNGALAAVPVQDLGSTVIKEVLKRATVAPEDVSEVIFGHVLAAGCGQNPVRQASVGAGIPYSVPAWSCQMICGSGLKAVCLAVQSIGIGDSSIVVAGGMENMSKAPHLAYLRTGVKIGEMPLTDSILCDGLTDAFHNCHMGITAENVAKKWQVSREDQDKVAVLSQNRTENAQKAGHFDKEIVPVLVSTRRGLIEVKTDEFPRHGSNIEAMSKLKPYFLTDGTGTVTPANASGINDGAAAVVLMKKSEADKRGLTPLARIVSWSQVGVEPSIMGIGPIPAIKQAVTKAGWSLEDVDIFEINEAFAAVSAAIVKELGLNPEKVNIEGGAIALGHPLGASGCRILVTLLHTLERMGRSRGVAALCIGGGMGIAMCVQRE

SEQ ID NO: 870558 - protein, 454 aa, Homo sapiens; identical to SEQ ID NO: 870556

SEQ ID NO: 870559 - protein, 454 aa, Homo sapiens; identical to SEQ ID NO: 870556

SEQ ID NO: 870560 - protein, 454 aa, Homo sapiens; identical to SEQ ID NO: 870556

SEQ ID NO: 870561 - protein, 456 aa, Homo sapiens
  misc_feature (350)..(351): Xaa can be any naturally occurring amino acid
  misc_feature (353)..(353): Xaa can be any naturally occurring amino acid
  misc_feature (357)..(358): Xaa can be any naturally occurring amino acid
  misc_feature (360)..(360): Xaa can be any naturally occurring amino acid
  misc_feature (365)..(365): Xaa can be any naturally occurring amino acid
  misc_feature (367)..(367): Xaa can be any naturally occurring amino acid
  misc_feature (378)..(379): Xaa can be any naturally occurring amino acid
  misc_feature (381)..(381): Xaa can be any naturally occurring amino acid
  misc_feature (383)..(383): Xaa can be any naturally occurring amino acid
  misc_feature (385)..(385): Xaa can be any naturally occurring amino acid
  misc_feature (387)..(387): Xaa can be any naturally occurring amino acid
  misc_feature (393)..(393): Xaa can be any naturally occurring amino acid
  misc_feature (400)..(400): Xaa can be any naturally occurring amino acid
MRPRSAVLPAGPDPGLTSAPRPAPRPSGPARGRPVGCEEELCLACRQRRADGGRRSKMNAGSDPVVIVSAARTIIGSFNGALAAVPVQDLGSTVIKEVLKRATVAPEDVSEVIFGHVLAAGCGQNPVRQASVGAGIPYSVPAWSCQMICGSGLKAVCLAVQSIGIGDSSIVVAGGMENMSKAPHLAYLRTGVKIGEMPLTDSILCDGLTDAFHNCHMGITAENVAKKWQVSREDQDKVAVLSQNRTENAQKAGHFDKEIVPVLVSTRRGLIEVKTDEFPRHGSNIEAMSKLKPYFLTDGTGTVTPANASGINDGAAAVVLMKKSEADKRGLTPLARIVSWSQVGVEPSFXXFXSLFXXFXSCFYXFXFFFLKFFSYFXXFXPXLXFXSAIVKXLGLNPEXVNIEGGAIALGHPLGASGCRILVTLLHTLERMGRSRGVAALCIGGGMGIAMCVQRE

SEQ ID NO: 870562 - protein, 373 aa, Homo sapiens
MRPRSAVLPAGPDPGLTSAPRPAPRPSGPARGRPVGCEEELCLACRQRRADGGRRSKMNAGSDPVVIVSAARTIIGSFNGALAAVPVQDLGSTVIKEVLKRATVAPEDVSEVIFGHVLAAGCGQNPVRQASVGAGIPYSVPAWSCQMICGSGLKAVCLAVQSIGIGDSSIVVAGGMENMSKAPHLAYLRTGVKIGEMPLTDSILCDGLTDAFHNCHMGITAENVAKKWQVSREDQDKVAVLSQNRTENAQKAGHFDKEIVPVLVSTRRGLIEVKTDEFPRHGSNIEAMSKLKPYFLTDGTGTVTPANASGINDGAAAVVLMKKSEADKRGLTPLARIVSWSQVGVEPSGLLWEGPSPKKGCKPGPGSHFTKHS

SEQ ID NO: 870563 - protein, 238 aa, Homo sapiens
MRPRSAVLPAGPDPGLTSAPRPAPRPSGPARGRPVGCEEELCLACRQRRADGGRRSKMNAGSDPVVIVSAARTIIGSFNGALAAVPVQDLGSTVIKEVLKRATVAPEDVSEVIFGHVLAAGCGQNPVRQASVGAGIPYSVPAWSCQMICGSGLKAVCLAVQSIGIGDSSIVVAGGMENMSKAPHLAYLRTGVKIGEMPLTDSILCDGLTDAFHNCHMGITGCSSVPEQDRECTESWPF

SEQ ID NO: 870564 - protein, 299 aa, Homo sapiens
MELPDDLWVRPKSCVPCSPVNRDRRLQHCGCRRHGKYEQGEMPLTDSILCDGLTDAFHNCHMGITAENVAKKWQVSREDQDKVAVLSQNRTENAQKAGHFDKEIVPVLVSTRRGLIEVKTDEFPRHGSNIEAMSKLKPYFLTDGTGTVTPANASGINDGAAAVVLMKKSEADKRGLTPLARIVSWSQVGVEPSIMGIGPIPAIKQAVTKAGWSLEDVDIFEINEAFAAVSAAIVKELGLNPEKVNIEGGAIALGHPLGASGCRILVTLLHTLERMGRSRGVAALCIGGGMGIAMCVQRE

SEQ ID NO: 870565 - protein, 454 aa, Homo sapiens; identical to SEQ ID NO: 870556

SEQ ID NO: 870566 - protein, 394 aa, Homo sapiens
MRPRSAVLPAGPDPGLTSAPRPAPRPSGPARGRPVGCEEELCLACRQRRADGGRRSKMNAGSDPVVIVSAARTIIGSFNGALAAVPVQDLGSTVIKEVLKRATVAPEDVSEVIFGHVLAAGCGQNPVRQASVGAGIPYSVPAWSCQMICGSGLKAVCLAVQSIGIGDSSIVVAGGMENMSKAPHLAYLRTGVKIGEMPLTDSILCDGLTDAFHNCHMGITAENVAKKWQVSREDQDKVAVLSQNRTENAQKAGHFDKEIVPVLVSTRRGLIEVKTDEFPRHGSNIEAMSKLKPYFLTDGTGTVTPANASGINDGAAAVVLMKKSEADKRGLTPLARIVSWSQVGVEPSIMGIGPIPAIKQAVTKAGWSLEDVDIFEINEAFAAVSAAIVKELQY

SEQ ID NO: 870567 - protein, 308 aa, Homo sapiens [sequence omitted]

SEQ ID NO: 870568 - protein, 391 aa, Homo sapiens
MVRGLTINRCIIGSFNGALAAVPVQDLGSTVIKEVLKRATVAPEDVSEVIFGHVLAAGCGQNPVRQASVGAGIPYSVPAWSCQMICGSGLKAVCLAVQSIGIGDSSIVVAGGMENMSKAPHLAYLRTGVKIGEMPLTDSILCDGLTDAFHNCHMGITAENVAKKWQVSREDQDKVAVLSQNRTENAQKAGHFDKEIVPVLVSTRRGLIEVKTDEFPRHGSNIEAMSKLKPYFLTDGTGTVTPANASGINDGAAAVVLMKKSEADKRGLTPLARIVSWSQVGVEPSIMGIGPIPAIKQAVTKAGWSLEDVDIFEINEAFAAVSAAIVKELGLNPEKVNIEGGAIALGHPLGASGCRILVTLLHTLERMGRSRGVAALCIGGGMGIAMCVQRE

SEQ ID NO: 870569 - protein, 403 aa, Homo sapiens
MGSHPVLRIWGNRRATAASLGRSGGSFNGALAAVPVQDLGSTVIKEVLKRATVAPEDVSEVIFGHVLAAGCGQNPVRQASVGAGIPYSVPAWSCQMICGSGLKAVCLAVQSIGIGDSSIVVAGGMENMSKAPHLAYLRTGVKIGEMPLTDSILCDGLTDAFHNCHMGITAENVAKKWQVSREDQDKVAVLSQNRTENAQKAGHFDKEIVPVLVSTRRGLIEVKTDEFPRHGSNIEAMSKLKPYFLTDGTGTVTPANASGINDGAAAVVLMKKSEADKRGLTPLARIVSWSQVGVEPSIMGIGPIPAIKQAVTKAGWSLEDVDIFEINEAFAAVSAAIVKELGLNPEKVNIEGGAIALGHPLGASGCRILVTLLHTLERMGRSRGVAALCIGGGMGIAMCVQRE

SEQ ID NO: 870570 - protein, 372 aa, Homo sapiens
MRPRSAVLPAGPDPGLTSAPRPAPRPSGPARGRPVGCEEELCLACRQRRADGGRRSKMNAGSDPVVIVSAARTIIGSFNGALAAVPVQDLGSTVIKEVLKRATVAPEDVSEVIFGHVLAAGCGQNPVRQASVGAGIPYSVPAWSCQMICGSGLKAVCLAVQSIGIGDSSIVVAGGMENMSKAPHLAYLRTGVKIGEMPLTDSILCDGLTDAFHNCHMGITAENVAKKWQVSREDQDKVAVLSQNRTENAQKAGHFDKEIVPVLVSTRRGLIEVKTDEFPRHGSNIEAMSKLKPYFLTDGTGTVTPANASGINDGAAAVVLMKKSEADKRGLTPLARIVSWSQVGVEPSNVCSERMNCLNFEQPQFLFKLIKY

SEQ ID NO: 870571 - protein, 299 aa, Homo sapiens; identical to SEQ ID NO: 870564

SEQ ID NO: 870572 - protein, 358 aa, Homo sapiens
MRPRSAVLPAGPDPGLTSAPRPAPRPSGPARGRPVGCEEELCLACRQRRADGGRRSKMNAGSDPVVIVSAARTIIGSFNGALAAVPVQDLGSTVIKEVLKRATVAPEDVSEAPHLAYLRTGVKIAENVAKKWQVSREDQDKVAVLSQNRTENAQKAGHFDKEIVPVLVSTRRGLIEVKTDEFPRHGSNIEAMSKLKPYFLTDGTGTVTPANASGINDGAAAVVLMKKSEADKRGLTPLARIVSWSQVGVEPSIMGIGPIPAIKQAVTKAGWSLEDVDIFEINEAFAAVSAAIVKELGLNPEKVNIEGGAIALGHPLGASGCRILVTLLHTLERMGRSRGVAALCIGGGMGIAMCVQRE

SEQ ID NO: 870573 - protein, 167 aa, Homo sapiens
MSKLKPYFLTDGTGTVTPANASGINDGAAAVVLMKKSEADKRGLTPLARIVSWSQVGVEPSIMGIGPIPAIKQAVTKAGWSLEDVDIFEINEAFAAVSAAIVKELGLNPEKVNIEGGAIALGHPLGASGCRILVTLLHTLERMGRSRGVAALCIGGGMGIAMCVQRE

SEQ ID NO: 870574 - protein, 165 aa, Homo sapiens
MADFDEIYEEEEDEERALEEQLLKYSPDPVVVRGSGHVTVFGLSNKFESEFPSSLTGKVAPEEFKASINRVNSCLKKNLPVNVRWLLCGCLCCCCTLGCSMWPVICLSKRTRRSIEKLLEWENNRLYHKLCLHWRLSKRKCETNNMMEYVILIEFLPKTPIFRPD

SEQ ID NO: 870575 - protein, 165 aa, Homo sapiens; identical to SEQ ID NO: 870574

SEQ ID NO: 870576 - protein, 112 aa, Homo sapiens
MADFDEIYEEEEDEERALEEQLLKYSPDPVVVRGSGHVTVFGLSNKFESEFPSSLTGKVAPEEFKASINRVNSCLKKNLPVNVRWLLCGCLCCCCTLGCSMWPVICLSKRVS

SEQ ID NO: 870577 - protein, 106 aa, Homo sapiens
SRGSPSSSINRVNSCLKKNLPVNVRWLLCGCLCCCCTLGCSMWPVICLSKRTRRSIEKLLEWENNRLYHKLCLHWRLSKRKCETNNMMEYVILIEFLPKTPIFRPD

SEQ ID NO: 870578 - protein, 137 aa, Homo sapiens
MADFDEIYEEEEDEERALEEQLLKYSPDPVVVRGSGHVTVFGLSNKFESEFPSSLTGKVAPEEFKASINRVNSCLKKNLPVNTRRSIEKLLEWENNRLYHKLCLHWRLSKRKCETNNMMEYVILIEFLPKTPIFRPD

SEQ ID NO: 870579 - protein, 721 aa, Homo sapiens
MLLPVFTLKLRHKISPRMVAIGRYDGTHPCLAAATQTGKVFIHNPHTRNQHVSASRVFQSPLESDVSLLNINQAVSCLTAGVLNPELGYDALLVGTQTNLLAYDVYNNSDLFYREVADGANAIVLGTLGDISSPLAIIGGNCALQGFNHEGSDLFWTVTGDNVNSLALCDFDGDGKKELLVGSEDFDIRVFKEDEIVAEMTETEIVTSLCPMYGSRFGYALSNGTVGVYDKTSRYWRIKSKNHAMSIHAFDLNSDGVNELITGWSNGKVDARSDRTGEVIFKDNFSSAIAGVVEGDYRMDGHIQLICCSVDGEIRGYLPGTAEMRGNLMDTSAEQDLIRELSQKKQNLLLELRNYEENAKAELASPLNEADGHRGIIPANTRLHTTLSVSLGNETQTAHTELRISTSNDTIIRAVLIFAEGIFTGESHVVHPSIHNLSSSICIPIVPPKDVPVDLHLKAFVGYRSSTQFHVFESTRQLPRFSMYALTSLDPASEPISYVNFTIAERAQRVVVWLGQNFLLPEDTHIQNAPFQVCFTSLRNGGHLHIKIKLSGEITINTDDIDLAGDIIQSMASFFAIEDLQVEADFPVYFEELRKVLVKVDEYHSVHQKLSADMADHSNLIRSLLVGAEDARLMRDMKTMKSRYMELYDLNRDLLNGYKIRCNNHTELLGNLKAVNQAIQRAGRLRVGKPKNQVITACRDAIRSNNINTLFKIMRVGTASS

SEQ ID NO: 870580 - protein, 194 aa, Homo sapiens
CVSLIGHSTQFHVFESTRQLPRFSMYALTSLDPASEPISYVNFTIAERAQRVVVWLGQNFLLPEDTHIQNAPFQVCFTSLRNGGHLHIKIKLSGEITINTDDIDLAGDIIQSMASFFAIEDLQVEADFPVYFEELRKVLVKVDEYHSVHQKLSADMADHSNLIRSLLVGAEDARLMRDIENKLKKSFFGNLLRP

SEQ ID NO: 870581 - protein, 721 aa, Homo sapiens; identical to SEQ ID NO: 870579

SEQ ID NO: 870582 - protein, 417 aa, Homo sapiens
MLLPVFTLKLRHKISPRMVAIGRYDGTHPCLAAATQTGKVFIHNPHTRNQHVSASRVFQSPLESDVSLLNINQAVSCLTAGVLNPELGYDALLVGTQTNLLAYDVYNNSDLFYREVADGANAIVLGTLGDISSPLAIIGGNCALQGFNHEGSDLFWTVTGDNVNSLALCDFDGDGKKELLVGSEDFDIRVFKEDEIVAEMTETEIVTSLCPMYGSRFGYALSNGTVGVYDKTSRYWRIKSKNHAMSIHAFDLNSDGVNELITGWSNGKVDARSDRTGEVIFKDNFSSAIAGVVEGDYRMDGHIQLICCSVDGEIRGYLPGTAEMRGNLMDTSAEQDLIRELSQKKQNLLLELRNYEENAKAELASPLNEADGHRGIIPANTRLHTTLSVSLGNETQTAHTELRISTSNGKTVLTAGI

SEQ ID NO: 870583 - protein, 510 aa, Homo sapiens
MLLPVFTLKLRHKISPRMVAIGRYDGTHPCLAAATQTGKVFIHNPHTRNQHVSASRVFQSPLESDVSLLNINQAVSCLTAGVLNPELGYDALLVGTQTNLLAYDVYNNSDLFYREVADGANAIVLGTLGDISSPLAIIGGNCALQGFNHEGSDLFWTVTGDNVNSLALCDFDGDGKKELLVGSEDFDIRVFKEDEIVAEMTETEIVTSLCPMYGSRFGYALSNGTVGVYDKTSRYWRIKSKNHAMSIHAFDLNSDGVNELITGWSNGKVDARSDRTGEVIFKDNFSSAIAGVVEGDYRMDGHIQLICCSVDGEIRGYLPGTAEMRGNLMDTSAEQDLIRELSQKKQNLLLELRNYEENAKAELASPLNEADGHRGIIPANTRLHTTLSVSLGNETQTAHTELRISTSNDTIIRAVLIFAEGIFTGESHVVHPSIHNLSSSICIPIVPPKDVPVDLHLKAFVGYRSSTQFHVFESTRQLPRFSMYALTSLDPASEPISYVNFTIAERAQRQ

SEQ ID NO: 870584 - protein, 721 aa, Homo sapiens; identical to SEQ ID NO: 870579

SEQ ID NO: 870585 - protein, 148 aa, Homo sapiens
VSTIFFLAASFYTFLSTLLFKHVPLISLFSRPKYFALLELQFLHPKLILSIFRLTSPHLSHNPFLRDLAPPNPHVHASSPRRPFLECLSLKKLLQENFRTFFKLFLNLNLVIHVQISRVDPIIQNLMILWDVRAPRYGGFKVVGRPSQ

SEQ ID NO: 870586 - protein, 239 aa, Homo sapiens [sequence omitted]

SEQ ID NO: 870587 - protein, 148 aa, Homo sapiens; identical to SEQ ID NO: 870585

SEQ ID NO: 870588 - protein, 466 aa, Homo sapiens
MLLPVFTLKLRHKISPRMVAIGRYDGTHPCLAAATQTGKVFIHNPHTRNQHVSASRVFQSPLESDVSLLNINQAVSCLTAGVLNPELGYDALLVGTQTNLLAYDVYNNSDLFYREVADGANAIVLGTLGDISSPLAIIGGNCALQGFNHEGSDLFWTVTGDNVNSLALCDFDGDGKKELLVGSEDFDIRVFKEDEIVAEMTETEIVTSLCPMYGSRFGYALSNGTVGVYDKTSRYWRIKSKNHAMSIHAFDLNSDGVNELITGWSNGKVDARSDRTGEVIFKDNFSSAIAGVVEGDYRMDGHIQLICCSVDGEIRGYLPGTAEMRGNLMDTSAEQDLIRELSQKKQNLLLELRNYEENAKAELASPLNEADGHRGIIPANTRLHTTLSVSLGNETQTAHTELRISTSNDTIIRAVLIFAEGIFTGESHVVHPSIHNLSSSICIPIVPPKDVPVDLHLKAFVGYRSR

SEQ ID NO: 870589 - protein, 417 aa, Homo sapiens; identical to SEQ ID NO: 870582

SEQ ID NO: 870590 - protein, 148 aa, Homo sapiens; identical to SEQ ID NO: 870585

SEQ ID NO: 870591 - protein, 137 aa, Homo sapiens
NPHTRNQHVSASRVFQSPLESDVSLLNINQAVSCLTAGVLNPELGYDALLVGTQTNLLAYDVYNNSDLFYREASITFITIKLSLLINVHFLCLEEIRSFILVCLLYDCYSIGKQHGDFAVNICFMYSELIYLVMVAN

SEQ ID NO: 870592 - protein, 721 aa, Homo sapiens; identical to SEQ ID NO: 870579

SEQ ID NO: 870593 - protein, 721 aa, Homo sapiens; identical to SEQ ID NO: 870579

SEQ ID NO: 870594 - protein, 922 aa, Homo sapiens
MLLPVFTLKLRHKISPRMVAIGRYDGTHPCLAAATQTGKVFIHNPHTRNQHVSASRVFQSPLESDVSLLNINQAVSCLTAGVLNPELGYDALLVGTQTNLLAYDVYNNSDLFYREVADGANAIVLGTLGDISSPLAIIGGNCALQGFNHEGSDLFWTVTGDNVNSLALCDFDGDGKKELLVGSEDFDIRVFKEDEIVAEMTETEVRSSTSNYGNLEQDRSVLSDETSSESAGASPNPGGFRIKAWGGGQTELYVMVRKAIKILIKIYFEKTELNREKLLHIVEYIKGISFNELIHANNNNGNHLLCTYCMPGSALSTLYEVTYVNPYNNPNRKINYYYFYRGGKWCSGFLFVCLFVLRQSFTPSPRLECGGAISAYCKLHLPSSSDSHASASRVAGTTGTHHHAWIVTSLCPMYGSRFGYALSNGTVGVYDKTSRYWRIKSKNHAMSIHAFDLNSDGVNELITGWSNGKVDARSDRTGEVIFKDNFSSAIAGVVEGDYRMDGHIQLICCSVDGEIRGYLPGTAEMRGNLMDTSAEQDLIRELSQKKQNLLLELRNYEENAKAELASPLNEADGHRGIIPANTRLHTTLSVSLGNETQTAHTELRISTSNDTIIRAVLIFAEGIFTGESHVVHPSIHNLSSSICIPIVPPKDVPVDLHLKAFVGYRSSTQFHVFESTRQLPRFSMYALTSLDPASEPISYVNFTIAERAQRVVVWLGQNFLLPEDTHIQNAPFQVCFTSLRNGGHLHIKIKLSGEITINTDDIDLAGDIIQSMASFFAIEDLQVEADFPVYFEELRKVLVKVDEYHSVHQKLSADMADHSNLIRSLLVGAEDARLMRDMKTMKSRYMELYDLNRDLLNGYKIRCNNHTELLGNLKAVNQAIQRAGRLRVGKPKNQVITACRDAIRSNNINTLFKIMRVGTASS

SEQ ID NO: 870595 - protein, 793 aa, Homo sapiens
MLLPVFTLKLRHKISPRMVAIGRYDGTHPCLAAATQTGKVFIHNPHTRNQHVSASRVFQSPLESDVSLLNINQAVSCLTAGVLNPELGYDALLVGTQTNLLAYDVYNNSDLFYREVADGANAIVLGTLGDISSPLAIIGGNCALQGFNHEGSDLFWTVTGDNVNSLALCDFDGDGKKELLVGSEDFDIRVFKEDEIVAEMTETEIVTSLCPMYGSRFGYALSNGTVGVYDKTSRYWRIKSKNHAMSIHAFDLNSDGVNELITGWSNGKVDARSDRTGEVIFKDNFSSAIAGVVEGDYRMDGHIQLICCSVDGESKLGGEKSLKSHVFHLIGSKYQEISPEVFVPRSCSSNKFTKVGENLGFCFEEQVIDDLKVYLVILAVFSFCSVRGYLPGTAEMRGNLMDTSAEQDLIRELSQKKQNLLLELRNYEENAKAELASPLNEADGHRGIIPANTRLHTTLSVSLGNETQTAHTELRISTSNDTIIRAVLIFAEGIFTGESHVVHPSIHNLSSSICIPIVPPKDVPVDLHLKAFVGYRSSTQFHVFESTRQLPRFSMYALTSLDPASEPISYVNFTIAERAQRVVVWLGQNFLLPEDTHIQNAPFQVCFTSLRNGGHLHIKIKLSGEITINTDDIDLAGDIIQSMASFFAIEDLQVEADFPVYFEELRKVLVKVDEYHSVHQKLSADMADHSNLIRSLLVGAEDARLMRDMKTMKSRYMELYDLNRDLLNGYKIRCNNHTELLGNLKAVNQAIQRAGRLRVGKPKNQVITACRDAIRSNNINTLFKIMRVGTASS

SEQ ID NO: 870596 - protein, 522 aa, Homo sapiens
MLLPVFTLKLRHKISPRMVAIGRYDGTHPCLAAATQTGKVFIHNPHTRNQHVSASRVFQSPLESDVSLLNINQAVSCLTAGVLNPELGYDALLVGTQTNLLAYDVYNNSDLFYREVADGANAIVLGTLGDISSPLAIIGGNCALQGFNHEGSDLFWTVTGDNVNSLALCDFDGDGKKELLVGSEDFDIRVFKEDEIVAEMTETEIVTSLCPMYGSRFGYALSNGTVGVYDKTSRYWRIKSKNHAMSIHAFDLNSDGVNELITGWSNGKVDARSDRTGEVIFKDNFSSAIAGVVEGDYRMDGHIQLICCSVDGEIRGYLPGTAEMRGNLMDTSAEQDLIRELSQKKQNLLLELRNYEENAKAELASPLNEADGHRGIIPANTRLHTTLSVSLGNETQTAHTELRISTSNDTIIRAVLIFAEGIFTGESHVVHPSIHNLSSSICIPIVPPKDVPVDLHLKAFVGYRSSTQFHVFESTRQLPRFSMYALTSLDPASEPISYVNFTIAERAQRVSISLFSFNAFTQ

SEQ ID NO: 870597 - protein, 146 aa, Homo sapiens
VSFHLSGFKKFVRPFSFLSVHGLQVDEYHSVHQKLSADMADHSNLIRSLLVGAEDARLMRDMKTMKSRYMELYDLNRDLLNGYKIRCNNHTELLGNLKAVNQAIQRAGRLRVGKPKNQVITACRDAIRSNNINTLFKIMRVGTASS

SEQ ID NO: 870598 - protein, 148 aa, Homo sapiens; identical to SEQ ID NO: 870585

SEQ ID NO: 870599 - protein, 279 aa, Homo sapiens
MPAFIQMGRDKNFSSLHTVFCATGGGAYKFEQDFLTIGDLQLCKLDELDCLIKGILYIDSVGFNGRSQCYYFENPADSEKCQKLPFDLKNPYPLLLVNIGSGVSILAVYSKDNYKRVTGTSLGGGTFFGLCCLLTGCTTFEEALEMASRGDSTKVDKLVRDIYGGDYERFGLPGWAVASSFGNMMSKEKREAVSKEDLARATLITITNNIGSIARMCALNENINQVVFVGNFLRINTIAMRLLAYALDYWSKGQLKALFSEHEGYFGAVGALLELLKIP

SEQ ID NO: 870600 - protein, 368 aa, Homo sapiens
MLGEGLAASTAAAELGRGTKAKVSRGSSPFVCRRPAARRCGSTAGLEEGSSCEDGTEQRGGTRGRPRRVPRPGGAEACTSGGRKEGVDEEARALPPTRPLGGAAITLFWATRLLFLRGTRIPSSTTLSPPRHDSLSLDGGTVNPPRVREPTGREAFGPSPASSDWLPARWRNGRGGRPRARLCSGWTAAEEARRNPTLGGLLGRQRLLLRMGAGRLGAPMERHGRASATSVSSAGEQAAGDPEGRRQEPLRRRASSASVPAVGASAEGTRRDRLGSYSGPTSVSRQRVESLRKKRPLFPWFGLDIGGTLVKLVYFEPKDITAEEEEEEVESLKSIRKYLTSNVAYGSTGIRDVHLELKDLTLCGRKDR

SEQ ID NO: 870601 - protein, 418 aa, Homo sapiens
MLGEGLAASTAAAELGRGTKAKVSRGSSPFVCRRPAARRCGSTAGLEEGSSCEDGTEQRGGTRGRPRRVPRPGGAEACTSGGRKEGVDEEARALPPTRPLGGAAITLFWATRLLFLRGTRIPSSTTLSPPRHDSLSLDGGTVNPPRVREPTGREAFGPSPASSDWLPARWRNGRGGRPRARLCSGWTAAEEARRNPTLGGLLGRQRLLLRMGAGRLGAPMERHGRASATSVSSAGEQAAGDPEGRRQEPLRRRASSASVPAVGASAEGTRRDRLGSYSGPTSVSRQRVESLRKKRPLFPWFGLDIGGTLVKLVYFEPKDITAEEEEEEVESLKSIRKYLTSNVAYGSTGIRDVHLELKDLTLCGRKGNLHFIRFPTHDMPAFIQMGRDKNFSSLHTVFCATGGGAYKFEQDFLTVCIF

SEQ ID NO: 870602 - protein, 131 aa, Homo sapiens
MLGEGLAASTAAAELGRGTKAKVSRGSSPFVCRRPAARRCGSTAGLEEGSSCEDGTEQRVFPWFGLDIGGTLVKLVYFEPKDITAEEEEEEVESLKSIRKYLTSNVAYGSTGIRDVHLELKDLTLCGRKDR

SEQ ID NO: 870603 - protein, 134 aa, Homo sapiens
MASRGDSTKVDKLVRDIYGGDYERFGLPGWAVASSFGNMMSKEKREAVSKEDLARATLITITNNIGSIARMCALNENINQVVFVGNFLRINTIAMRLLAYALDYWSKGQLKALFSEHEGYFGAVGALLELLKIP

SEQ ID NO: 870604 - protein, 368 aa, Homo sapiens; identical to SEQ ID NO: 870600

SEQ ID NO: 870605 - protein, 418 aa, Homo sapiens; identical to SEQ ID NO: 870601

SEQ ID NO: 870606 - protein, 518 aa, Homo sapiens
MLGEGLAASTAAAELGRGTKAKVSRGSSPFVCRRPAARRCGSTAGLEEGSSCEDGTEQRGGTRGRPRRVPRPGGAEACTSGGRKEGVDEEARALPPTRPLGGAAITLFWATRLLFLRGTRIPSSTTLSPPRHDSLSLDGGTVNPPRVREPTGREAFGPSPASSDWLPARWRNGRGGRPRARLCSGWTAAEEARRNPTLGGLLGRQRLLLRMGAGRLGAPMERHGRASATSVSSAGEQAAGDPEGRRQEPLRRRASSASVPAVGASAEGTRRDRLGSYSGPTSVSRQRVESLRKKRPLFPWFGLDIGGTLVKLVYFEPKDITAEEEEEEVESLKSIRKYLTSNVAYGSTGIRDVHLELKDLTLCGRKGNLHFIRFPTHDMPAFIQMGRDKNFSSLHTVFCATGGGAYKFEQDFLTIGDLQLCKLDELDCLIKGILYIDSVGFNGRSQCYYFENPADSEKCQKLPFDLKNPYPLLLVNIGSGVSILAVYSKDNYKRVTGTSFGGRNFFGVWWVFTGWATF

SEQ ID NO: 870607 - protein, 316 aa, Homo sapiens
MLGEGLAASTAAAELGRGTKAKVSRGSSPFVCRRPAARRCGSTAGLEEGSSCEDGTEQRGGTRGRPRRVPRPGGAEACTSGGRKEGVDEEARALPPTRPLGGAAITLFWATRLLFLRGTRIPSSTTLSPPRHDSLSLDGGTVNPPRVREPTGREAFGPSPASSDWLPARWRNGRGGRPRARLCSGWTAAEEARRNPTLGGLLGRQRLLLRMGAGRLGAPMERHGRASATSVSSAGEQAAGDPEGRRQEPLRRRASSASVPAVGASAEGTRRDRLGSYSGPTSVSRQRVESLRKKRPRKCSVGRPPGPPCPPFRPTL

SEQ ID NO: 870608 - protein, 108 aa, Homo sapiens
MGFFFPHHSFGNMMSKEKREAVSKEDLARATLITITNNIGSIARMCALNENINQVVFVGNFLRINTIAMRLLAYALDYWSKGQLKALFSEHEGYFGAVGALLELLKIP

SEQ ID NO: 870609 - protein, 657 aa, Homo sapiens
MLGEGLAASTAAAELGRGTKAKVSRGSSPFVCRRPAARRCGSTAGLEEGSSCEDGTEQRGGTRGRPRRVPRPGGAEACTSGGRKEGVDEEARALPPTRPLGGAAITLFWATRLLFLRGTRIPSSTTLSPPRHDSLSLDGGTVNPPRVREPTGREAFGPSPASSDWLPARWRNGRGGRPRARLCSGWTAAEEARRNPTLGGLLGRQRLLLRMGAGRLGAPMERHGRASATSVSSAGEQAAGDPEGRRQEPLRRRASSASVPAVGASAEGTRRDRLGSYSGPTSVSRQRVESLRKKRPLFPWFGLDIGGTLVKLVYFEPKDITAEEEEEEVESLKSIRKYLTSNVAYGSTGIRDVHLELKDLTLCGRKGNLHFIRFPTHDMPAFIQMGRDKNFSSLHTVFCATGGGAYKFEQDFLTIGDLQLCKLDELDCLIKGILYIDSVGFNGRSQCYYFENPADSEKCQKLPFDLKNPYPLLLVNIGSGVSILAVYSKDNYKRVTGTSLGGGTFFGLCCLLTGCTTFEEALEMASRGDSTKVDKLVRDIYGGDYERFGLPGWAVASSFGNMMSKEKREAVSKEDLARATLITITNNIGSIARMCALNENINQVVFVGNFLRINTIAMRLLAYALDYWSKGQLKALFSEHEGYFGAVGALLELLKIP

SEQ ID NO: 870610 - protein, 401 aa, Homo sapiens
FSRARTLSPHGGPSLVRGLTSGWRPRVLRKRYLRGPPAPIVFPWFGLDIGGTLVKLVYFEPKDITAEEEEEEVESLKSIRKYLTSNVAYGSTGIRDVHLELKDLTLCGRKGNLHFIRFPTHDMPAFIQMGRDKNFSSLHTVFCATGGGAYKFEQDFLTIGDLQLCKLDELDCLIKGILYIDSVGFNGRSQCYYFENPADSEKCQKLPFDLKNPYPLLLVNIGSGVSILAVYSKDNYKRVTGTSLGGGTFFGLCCLLTGCTTFEEALEMASRGDSTKVDKLVRDIYGGDYERFGLPGWAVASSFGNMMSKEKREAVSKEDLARATLITITNNIGSIARMCALNENINQVVFVGNFLRINTIAMRLLAYALDYWSKGQLKALFSEHEGYFGAVGALLELLKIP

SEQ ID NO: 870611 - protein, 134 aa, Homo sapiens; identical to SEQ ID NO: 870603

SEQ ID NO: 870612 - protein, 418 aa, Homo sapiens; identical to SEQ ID NO: 870601

SEQ ID NO: 870613 - protein, 368 aa, Homo sapiens; identical to SEQ ID NO: 870600

SEQ ID NO: 870614 - protein, 452 aa, Homo sapiens
LCLRPFLLCPQLSRLLLSEPTFGIFLPYSPDGGTRRLEKAKVSLNDCLACSGCITSAETVLITQQSHEELKKVLDANKMAAPSQQRLVVVSVSPQSRASLAARFQLNPTDTARKLTSFFKKIGVHFVFDTAFSRHFSLLESQREFVRRFRGQADCRQALPLLASACPGWICYAEKTHGSFILPHISTARSPQQVMGSLVKDFFAQQQHLTPDKIYHVTVMPCYDKKLEASRPDFFNQEHQTRDVDCVLTTGEVFRLLEEEGVSLPDLEPAPLDSLCSGASAEEPTSHRGGGSGGYLEHVFRHAARELFGIHVAEVTYKPLRNKDFQEVTLEKEGQVLLHFAMAYGFRNIQNLVQRLKRGRCPYHYVEVMACPSGCLNGGGQLQAPDRPSRELLQHVERLYGMVRAEAPEDAPGVQELYTHWLQGTDSECAGRLLHTQYHAVEKASTGLGIRW

SEQ ID NO: 870615 - protein, 453 aa, Homo sapiens
GGSAAVMASPFSGALQLTDLDDFIGPSQECIKPVKVEKRAGSGVAKIRIEDDGSYFQINQDGGTRRLEKAKVSLNDCLACSGCITSAETVLITQQSHEELKKVLDANKMAAPSQQRLVVVSVSPQSRASLAARFQLNPTDTARKLTSFFKKIGVHFVFDTAFSRHFSLLESQREFVRRFRGQADCRQALPLLASACPGWICYAEKTHGSFILPHISTARSPQQVMGSLVKDFFAQQQHLTPDKIYHVTVMPCYDKKLEASRPDFFNQEHQTRDVDCVLTTGEVFRLLEEEGGSGGYLEHVFRHAARELFGIHVAEVTYKPLRNKDFQEVTLEKEGQVLLHFAMAYGFRNIQNLVQRLKRGRCPYHYVEVMACPSGCLNGGGQLQAPDRPSRELLQHVERLYGMVRAEAPEDAPGVQELYTHWLQGTDSECAGRLLHTQYHAVEKASTGLGIRW

SEQ ID NO: 870616 - protein, 258 aa, Homo sapiens [sequence omitted]

SEQ ID NO: 870617 - protein, 482 aa, Homo sapiens
GGSAAVMASPFSGALQLTDLDDFIGPSQECIKPVKVEKRAGSGVAKIRIEDDGSYFQINQDGGTRRLEKAKVSLNDCLACSGCITSAETVLITQQSHEELKKVLDANKMAAPSQQRLVVVSVSPQSRASLAARFQLNPTDTARKLTSFFKKIGVHFVFDTAFSRHFSLLESQREFVRRFRGQADCRQALPLLASACPGWICYAEKTHGSFILPHISTARSPQQVMGSLVKDFFAQQQHLTPDKIYHVTVMPCYDKKLEASRPDFFNQEHQTRDVDCVLTTGEVFRLLEEEGVSLPDLEPAPLDSLCSGASAEEPTSHRGGGSGGYLEHVFRHAARELFGIHVAEVTYKPLRNKDFQEVTLEKEGQVLLHFAMAYGFRNIQNLVQRLKRGRCPYHYVEVMACPSGCLNGGGQLQAPDRPSRELLQHVERLYGMVRAEAPEDAPGVQELYTHWLQGTDSECAGRLLHTQYHAVEKASTGLGIRW

SEQ ID NO: 870618 - protein, 88 aa, Homo sapiens
GGSAAVMASPFSGALQLTDLDDFIGPSQECIKPVKVEKRAGSGVAKIRIEDDGSYFQINQVRHRRLLHHLSCPADPKHFSLLPPVTER

SEQ ID NO: 870619 - protein, 482 aa, Homo sapiens; identical to SEQ ID NO: 870617

SEQ ID NO: 870620 - protein, 373 aa, Homo sapiens
RLWKTGRLWKTGRLWKTGRLWKTGEAWKTGWKCWHKWPFLEKRLPSRGSHAQSPQVPRRCRLHAELRVVVGRTGMSTLECHHDLLYERARPQNVVLLPVGAGAAVRPRQPRVPPVTSGWICYAEKTHGSFILPHISTARSPQQVMGSLVKDFFAQQQHLTPDKIYHVTVMPCYDKKLEASRPDFFNQEHQTRDVDCVLTTGEVFRLLEEEGGSGGYLEHVFRHAARELFGIHVAEVTYKPLRNKDFQEVTLEKEGQVLLHFAMAYGFRNIQNLVQRLKRGRCPYHYVEVMACPSGCLNGGGQLQAPDRPSRELLQHVERLYGMVRAEAPEDAPGVQELYTHWLQGTDSECAGRLLHTQYHAVEKASTGLGIRW

SEQ ID NO: 870621 - protein, 290 aa, Homo sapiens
GGSAAVMASPFSGALQLTDLDDFIGPSQECIKPVKVEKRAGSGVAKIRIEDDGSYFQINQDGGTRRLEKAKVSLNDCLACSGCITSAETVLITQQSHEELKKVLDANKMAAPSQQRLVVVSVSPQSRASLAARFQLNPTDTARKLTSFFKKIGVHFVFDTAFSRHFSLLESQREFVRRFRGQADCRQALPLLASACPGWICYAEKTHGSFILPHISTARSRAAALRNGVRLPQHPEPGAEAQTRALPLPLRGGHGLPLRLPERRGPAPGPRQAQQRAPPARGETVRHGPG

SEQ ID NO: 870622 - protein, 182 aa, Homo sapiens
GGSAAVMASPFSGALQLTDLDDFIGPSQECIKPVKVEKRAGSGVAKIRIEDDGSYFQINQDGGTRRLEKAKVSLNDCLACSGCITSAETVLITQQSHEELKKVLDANKMAAPSQQRLVVVSVSPQSRASLAARFQLNPTDTARKLTSFFKKIGVHFVFDTAFSRHFSLSRGCLRQSKTGSHP

SEQ ID NO: 870623 - protein, 120 aa, Homo sapiens
MTMRHNWTPDLSPLWVLLLCAHVVTLLVRATPVSQTTTAATASVRSTKDPCPSQPPVFPAAKQCPALEVTWPEVEVPLNGTLSLSCVACSRFPNFSILYWLGNGSFIEHLPGRLWEGSTR

SEQ ID NO: 870624 - protein, 194 aa, Homo sapiens
MTMRHNWTPDLSPLWVLLLCAHVVTLLVRATPVSQTTTAATASVRSTKDPCPSQPPVFPAAKQCPALEVTWPEVEVPLNGTLSLSCVACSRFPNFSILYWLGNGSFIEHLPGRLWEGSTSRERGSTGTQLCKALVLEQLTPALHSTNFSCVLVDPEQVVQRHVVLAQLWAGLRATLPPTQEALPSSHSSPQQQG

SEQ ID NO: 870625 - protein, 266 aa, Homo sapiens
MTMRHNWTPDLSPLWVLLLCAHVVTLLVRATPVSQTTTAATASVRSTKDPCPSQPPVFPAAKQCPALEVTWPEVEVPLNGTLSLSCVACSRFPNFSILYWLGNGSFIEHLPGRLWEGSTSRERGSTGTQLCKALVLEQLTPALHSTNFSCVLVDPEQVVQRHVVLAQLWPGLKGKTLAPRSQRNATWPPPKDTRHGINTQKSQNGTKGTQQGGGELLKKTGKNPSAKWGQNPKRGGGPTQKGDQKGAPKMAKPKKSPVCGRNPQRG

SEQ ID NO: 870626 - protein, 194 aa, Homo sapiens; identical to SEQ ID NO: 870624

SEQ ID NO: 870627 - protein, 199 aa, Homo sapiens
MTMRHNWTPDLSPLWVLLLCAHVVTLLVRATPVSQTTTAATASVRSTKDPCPSQPPVFPAAKQCPALEVTWPEVEVPLNGTLSLSCVACSRFPNFSILYWLGNGSFIEHLPGRLWEGSTSRERGSTGTQLCKALVLEQLTPALHSTNFSCVLVDPEQVVQRHVVLAQLWVRSPRRGLQEQEELCFHMWGGKGGLCQSSL

SEQ ID NO: 870628 - protein, 199 aa, Homo sapiens; identical to SEQ ID NO: 870627

SEQ ID NO: 870629 - protein, 142 aa, Homo sapiens
PARKASPFLGVLLRHLEVCCPDPPERSLTRLAHCTWQLYQPSGLPRCVDTEYTPQPVLAYWKSDLIKLATLTLCHQSNLTCLIYHFHYCGSPPFRLCVCPSKMPLFHSACGSPMHLSKANSSSSFFLTPSLNIPALLSLVPL

SEQ ID NO: 870630 - protein, 599 aa, Homo sapiens
MHPIPSSFMIKAVSSFLTAEEASVGNPEGAFMKVLQARKNYTSTELIVEPEEPSDSSGINLSGFGSEQLDTNDESDFISTLSYILPYFSAVNLDVKSLLLPFIKLPTTGNSLAKIQTVGQNRQRVKRVLMGPRSIQKRHFKEVGRQSIRREQGAQASVENAAEEKRLGSPAPRELEQPHTQQGPEKLAGNAVYTKPSFTQEHKAAVSVLKPFSKGAPSTSSPAKALPQVRDRWKDLTHAISILESAKARVTNTKTSKPIVHARKKYRFHKTRSHVTHRTPKVKKSPKVRKKSYLSRLMLANRLPFSAAKSLINSPSQGAFSSLGDLSPQENPFLEVSAPSEHFIEKNNTKHTTARNAFEENDFMENTNMPEGTISENTNYNHPPEADSAGTAFNLGPTVKQTETKWEYNNVGTDLSPEPKSFNYPLLSSPGDQFEIQLTQQLQSLIPNNNVRRLIAHVIRTLKMDCSGAHVQVTCAKLISRTGHLMKLLSGQQEVKASKIEWDTDQWKIENYINESTEAQSEQKEKSLELKKEVPGYGYTDKLILALIVTGILTILIILFCLIVVRTIINSGFQNAVLSLCGFRAHKLKTKATFPPAAT

SEQ ID NO: 870631 - protein, 599 aa, Homo sapiens; identical to SEQ ID NO: 870630

SEQ ID NO: 870632 - protein, 599 aa, Homo sapiens; identical to SEQ ID NO: 870630

SEQ ID NO: 870633 - protein, 581 aa, Homo sapiens
MHPIPSSFMIKAVSSFLTAEEASVGNPEGAFMKVLQARKNYTSTELIVEPEEPSDSSGINLSGFGSEQLDTNDESDFISTLSYILPYFSAVNLDVKSLLLPFIKLPTTGNSLAKIQTVGQNRQRVKRVLMGPRSIQKRHFKEVGRQSIRREQGAQASVENAAEEKRLGSPAPRELEQPHTQQGPEKLAGNAVYTKPSFTQEHKAAVSVLKPFSKGAPSTSSPAKALPQVRDRWKDLTHAISILESAKARVTNTKTSKPIVHARKKYRFHKTRSHVTHRTPKVKKSPKVRKKSYLSRLMLANRLPFSAAKSLINSPSQGAFSSLGDLSPQENPFLEVSAPSEHFIEKNNTKHTTARNAFEENDFMENTNMPEGTISENTNYNHPPEADSAGTAFNLGPTVKQTETKWEYNNVGTDLSPEPKSFNYPLLSSPGDQFEIQLTQQLQSLIPNNNVRRLIAHVIRTLKMDCSGAHVQVTCAKLISRTGHLMKLLSGQQEVKASKIEWDTDQWKIENYINESTEAQSEQKEKSLELKKEVPGYGYTDKLILALIVTGILTILIILFCLIVICCHRRSLQEDEEGFSR

SEQ ID NO: 870634 - protein, 599 aa, Homo sapiens; identical to SEQ ID NO: 870630

SEQ ID NO: 870635 - protein, 596 aa, Homo sapiens
MHPIPSSFMIKAVSSFLTAEEASVGNPEGAFMKVLQARKNYTSTELIVEPEEPSDSSGINLSGFGSEQLDTNDESDFISTLSYILPYFSAVNLDVKSLLLPFIKLPTTGNSLAKIQTVGQNRQRVKRVLMGPRSIQKRHFKEVGRQSIRREQGAQASVENAAEEKRLGSPAPRELEQPHTQQGPEKLAGNAVYTKPSFTQEHKAAVSVLKPFSKGAPSTSSPAKALPQVRDRWKDLTHAISILESAKARVTNTKTSKPIVHARKKYRFHKTRSHVTHRTPKVKKSPKVRKKSYLSRLMLANRLPFSAAKSLINSPSQGAFSSLGDLSPQENPFLEVSAPSEHFIEKNNTKHTTARNAFEENDFMENTNMPEGTISENTNYNHPPEADSAGTAFNLGPTVKQTETKWEYNNVGTDLSPEPKSFNYPLLSSPGDQFEIQLTQQLQSLIPNNNVRRLIAHVIRTLKMDCSGAHVQVTCAKLISRTGHLMKLLSGQQEVKASKIEWDTDQWKIENYINESTEAQSEQKEKSLELKKEVPGYGYTDKLILALIVTGILTILIILFCLIVICCHRRSLQEDEEGFSRDSEAPTEEEESEALP

SEQ ID NO: 870636 - protein, 581 aa, Homo sapiens; identical to SEQ ID NO: 870633

SEQ ID NO: 870637 - protein, 614 aa, Homo sapiens
MHPIPSSFMIKAVSSFLTAEEASVGNPEGAFMKVLQARKNYTSTELIVEPEEPSDSSGINLSGFGSEQLDTNDESDFISTLSYILPYFSAVNLDVKSLLLPFIKLPTTGNSLAKIQTVGQNRQRVKRVLMGPRSIQKRHFKEVGRQSIRREQGAQASVENAAEEKRLGSPAPRELEQPHTQQGPEKLAGNAVYTKPSFTQEHKAAVSVLKPFSKGAPSTSSPAKALPQVRDRWKDLTHAISILESAKARVTNTKTSKPIVHARKKYRFHKTRSHVTHRTPKVKKSPKVRKKSYLSRLMLANRLPFSAAKSLINSPSQGAFSSLGDLSPQENPFLEVSAPSEHFIEKNNTKHTTARNAFEENDFMENTNMPEGTISENTNYNHPPEADSAGTAFNLGPTVKQTETKWEYNNVGTDLSPEPKSFNYPLLSSPGDQFEIQLTQQLQSLIPNNNVRRLIAHVIRTLKMDCSGAHVQVTCAKLISRTGHLMKLLSGQQEVKASKIEWDTDQWKIENYINESTEAQSEQKEKSLEVRTTQKHETQISHHLAYPRKVPTQKSLGLPGHSLSWPCNFGHDSDLPLCSCRERNRLGHKMNCRPGVVAHACNLSTLGGEGGWIT

SEQ ID NO: 870638 - protein, 815 aa, Homo sapiens
ASTSTNICELCTCGDEMLSCIDLNPEQRLRQVPVPEPNTHNGTFTILNFQGNYISYIDGNVWKAYSWTEKLILRENNLTELHKDSFEGLLSLQYLDLSCNKIQSIERHTFEPLPFLKFINLSCNVITELSFGTFQAWHGMQFLHKLILNHNPLTTVEDPYLFKLPALKYLDMGTTLVPLTTLKNILMMTVELEKLILPSHMACCLCQFKNSIEAVCKTVKLHCNSACLTNTTHCPEEASVGNPEGAFMKVLQARKNYTSTELIVEPEEPSDSSGINLSGFGSEQLDTNDESDFISTLSYILPYFSAVNLDVKSLLLPFIKLPTTGNSLAKIQTVGQNRQRVKRVLMGPRSIQKRHFKEVGRQSIRREQGAQASVENAAEEKRLGSPAPRELEQPHTQQGPEKLAGNAVYTKPSFTQEHKAAVSVLKPFSKGAPSTSSPAKALPQVRDRWKDLTHAISILESAKARVTNTKTSKPIVHARKKYRFHKTRSHVTHRTPKVKKSPKVRKKSYLSRLMLANRLPFSAAKSLINSPSQGAFSSLGDLSPQENPFLEVSAPSEHFIEKNNTKHTTARNAFEENDFMENTNMPEGTISENTNYNHPPEADSAGTAFNLGPTVKQTETKWEYNNVGTDLSPEPKSFNYPLLSSPGDQFEIQLTQQLQSLIPNNNVRRLIAHVIRTLKMDCSGAHVQVTCAKLISRTGHLMKLLSGQQEVKASKIEWDTDQWKIENYINESTEAQSEQKEKSLELKKEVPGYGYTDKLILALIVTGILTILIILFCLIVVRTIINSGFQNAVLSLCGFRAHKLKTKATFPPAAT

SEQ ID NO: 870639 - protein, 615 aa, Homo sapiens
MACCLCQFKNSIEAVCKTVKLHCNSACLTNTTHCPEEASVGNPEGAFMKVLQARKNYTSTELIVEPEEPSDSSGINLSGFGSEQLDTNDESDFISTLSYILPYFSAVNLDVKSLLLPFIKLPTTGNSLAKIQTVGQNRQRVKRVLMGPRSIQKRHFKEVGRQSIRREQGAQASVENAAEEKRLGSPAPRELEQPHTQQGPEKLAGNAVYTKPSFTQEHKAAVSVLKPFSKGAPSTSSPAKALPQVRDRWKDLTHAISILESAKARVTNTKTSKPIVHARKKYRFHKTRSHVTHRTPKVKKSPKVRKKSYLSRLMLANRLPFSAAKSLINSPSQGAFSSLGDLSPQENPFLEVSAPSEHFIEKNNTKHTTARNAFEENDFMENTNMPEGTISENTNYNHPPEADSAGTAFNLGPTVKQTETKWEYNNVGTDLSPEPKSFNYPLLSSPGDQFEIQLTQQLQSLIPNNNVRRLIAHVIRTLKMDCSGAHVQVTCAKLISRTGHLMKLLSGQQEVKASKIEWDTDQWKIENYINESTEAQSEQKEKSLELKKEVPGYGYTDKLILALIVTGILTILIILFCLIVVRTIINSGFQNAVLSLCGFRAHKLKTKATFPPAAT

SEQ ID NO: 870640 - protein, 599 aa, Homo sapiens; identical to SEQ ID NO: 870630

SEQ ID NO: 870641 - protein, 599 aa, Homo sapiens; identical to SEQ ID NO: 870630

SEQ ID NO: 870642 - protein, 599 aa, Homo sapiens; identical to SEQ ID NO: 870630

SEQ ID NO: 870643 - protein, 661 aa, Homo sapiens
MHPIPSSFMIKAVSSFLTAEEASVGNPEGAFMKVLQARKNYTSTELIVEPEEPSDSSGINLSGFGSEQLDTNDESDFISTLSYILPYFSAVNLDVKSLLLPFIKLPTTGNSLAKIQTVGQNRQRVKRVLMGPRSIQKRHFKEVGRQSIRREQGAQASVENAAEEKRLGSPAPRELEQPHTQQGPEKLAGNAVYTKPSFTQEHKAAVSVLKPFSKGAPSTSSPAKALPQVRDRWKDLTHAISILESAKARVTNTKTSKPIVHARKKYRFHKTRSHVTHRTPKVKKSPKVRKKSYLSRLMLANRLPFSAAKSLINSPSQGAFSSLGDLSPQENPFLEVSAPSEHFIEKNNTKHTTARNAFEENDFMENTNMPEGTISENTNYNHPPEADSAGTAFNLGPTVKQTETKWEYNNVGTDLSPEPKSFNYPLLSSPGDQFEIQLTQQLQSLIPNNNVRRLIAHVIRTLKMDCSGAHVQVTCAKLISRTGHLMKLLSGQQEVKASKIEWDTDQWKIENYINESTEAQSEQKEKSLELKKEVPGYGYTDKLILALIVTGILTILIILFCLIVICCHRRSLQEDEEGFSRGIFRFLPRRGCSSRRESQDGLSSFGQPLWFKDMYKPLSATRINNHAWKLHKKSSNEDKILNRDPGDSEAPTEEEESEALP

SEQ ID NO: 870644 - protein, 626 aa, Homo sapiens
MHPIPSSFMIKAVSSFLTAEEASVGNPEGAFMKVLQARKNYTSTELIVEPEEPSDSSGINLSGFGSEQLDTNDESDFISTLSYILPYFSAVNLDVKSLLLPFIKLPTTGNSLAKIQTVGQNRQRVKRVLMGPRSIQKRHFKEVGRQSIRREQGAQASVENAAEEKRLGSPAPRELEQPHTQQGPEKLAGNAVYTKPSFTQEHKAAVSVLKPFSKGAPSTSSPAKALPQVRDRWKDLTHAISILESAKARVTNTKTSKPIVHARKKYRFHKTRSHVTHRTPKVKKSPKVRKKSYLSRLMLANRLPFSAAKSLINSPSQGAFSSLGDLSPQENPFLEVSAPSEHFIEKNNTKHTTARNAFEENDFMENTNMPEGTISENTNYNHPPEADSAGTAFNLGPTVKQTETKWEYNNVGTDLSPEPKSFNYPLLSSPGDQFEIQLTQQLQSLIPNNNVRRLIAHVIRTLKMDCSGAHVQVTCAKLISRTGHLMKLLSGQQEVKASKIEWDTDQWKIENYINESTEAQSEQKEKSLEICCHRRSLQEDEEGFSRGIFRFLPRRGCSSRRESQDGLSSFGQPLWFKDMYKPLSATRINNHAWKLHKKSSNEDKILNRDPGDSEAPTEEEESEALP

SEQ ID NO: 870645 - protein, 599 aa, Homo sapiens; identical to SEQ ID NO: 870630

SEQ ID NO: 870646 - protein, 561 aa, Homo sapiens
MHPIPSSFMIKAVSSFLTAEEASVGNPEGAFMKVLQARKNYTSTELIVEPEEPSDSSGINLSGFGSEQLDTNDESDFISTLSYILPYFSAVNLDVKSLLLPFIKLPTTGNSLAKIQTVGQNRQRVKRVLMGPRSIQKRHFKEVGRQSIRREQGAQASVENAAEEKRLGSPAPRELEQPHTQQGPEKLAGNAVYTKPSFTQEHKAAVSVLKPFSKGAPSTSSPAKALPQVRDRWKDLTHAISILESAKARVTNTKTSKPIVHARKKYRFHKTRSHVTHRTPKVKKSPKVRKKSYLSRLMLANRLPFSAAKSLINSPSQGAFSSLGDLSPQENPFLEVSAPSEHFIEKNNTKHTTARNAFEENDFMENTNMPEGTISENTNYNHPPEADSAGTAFNLGPTVKQTETKWEYNNVGTDLSPEPKSFNYPLLSSPGDQFEIQLTQQLQSLIPNNNVRRLIAHVIRTLKMDCSGAHVQVTCAKLISRTGHLMKLLSGQQEVKASKIEWDTDQWKIENYINESTEAQSEQKEKSLEICCHRRSLQEDEEGFSRDSEAPTEEEESEALP

SEQ ID NO: 870647 - protein, 557 aa, Homo sapiens
LRYSKDQPEEPSDSSGINLSGFGSEQLDTNDESDFISTLSYILPYFSAVNLDVKSLLLPFIKLPTTGNSLAKIQTVGQNRQRVKRVLMGPRSIQKRHFKEVGRQSIRREQGAQASVENAAEEKRLGSPAPRELEQPHTQQGPEKLAGNAVYTKPSFTQEHKAAVSVLKPFSKGAPSTSSPAKALPQVRDRWKDLTHAISILESAKARVTNTKTSKPIVHARKKYRFHKTRSHVTHRTPKVKKSPKVRKKSYLSRLMLANRLPFSAAKSLINSPSQGAFSSLGDLSPQENPFLEVSAPSEHFIEKNNTKHTTARNAFEENDFMENTNMPEGTISENTNYNHPPEADSAGTAFNLGPTVKQTETKWEYNNVGTDLSPEPKSFNYPLLSSPGDQFEIQLTQQLQSLIPNNNVRRLIAHVIRTLKMDCSGAHVQVTCAKLISRTGHLMKLLSGQQEVKASKIEWDTDQWKIENYINESTEAQSEQKEKSLELKKEVPGYGYTDKLILALIVTGILTILIILFCLIVVRTIINSGFQNAVLSLCGFRAHKLKTKATFPPAAT

SEQ ID NO: 870648 - protein, 192 aa, Homo sapiens
SLHPGDLYPFTRKPLFIIVDSSNSVAYKNFTNLFGQPLVCLLSPTAYPKALQDQSQRGSLFTLFLNNPLMAFLFVSGLSSMRRGLWEKCQEYLRKINRDIAQLLTHSRSIDQAFLQFFGDEFLRLLLTRFIFCSATMRMHKIFRETRNYPESYPQLPRDETVENPHLQKHILELASILDVRNVFFENTIDDY

SEQ ID NO: 870649 - protein, 2173 aa, Homo sapiens
CPYSGVLASKPSTPGYPNFRNLCPSYFDPGGLAMIGAWSHIHGSAPDAPGLRAAASQATLWQELQVEVKAHQGQVQRVLSSGRSLAASGHPQAQHIVEQCQELEGHWAELERACEARAQCLQQAVTFQQYFLDVSELEGWVEEKRPLVSSRDYGRDEAATLRLINKHQALQEELAIYWSSMEELDQTAQTLTGPEVPEQQRVVQERLREQLRALQELAATRDRELEGTLRLHEFLREAEDLQGWLASQKQAAKGGESLGEDPEHALHLCTKFAKFQHQVEMGSQRVAACRLLAESLLERGHSAGPMVRQRQQDLQTAWSELWELTQARGHALRDTETTLRVHRDLLEVLTQVQEKATSLPNNVARDLCGLEAQLRSHQGLERELVGTERQLQELLETAGRVQKLCPGPQAHAVQQRQQAVTQAWAVLQRRMEQRRAQLERARLLARFRTAVRDYASWAARVRQDLQVEESSQEPSSGPLKLSAHQWLRAELEAREKLWQQATQLGQQALLAAGTPTKEVQEELRALQDQRDQVYQTWARKQERLQAEQQEQLFLRECGRLEEILAAQEVSLKTSALGSSVEEVEQLIRKHEVFLKVLTAQDKKEAALRERLKTLRRPRVRDRLPILLQRRMRVKELAESRGHALHASLLMASFTQAATQAEDWIQAWAQQLKEPVPPGDLRDKLKPLLKHQAFEAEVQAHEEVMTSVAKKGEALLAQSHPRAGEVSQRLQGLRKHWEDLRQAMALRGQELEDRRNFLEFLQRVDLAEAWIQEKEVKMNVGDLGQDLEHCLQLRRRLREFRGNSAGDTVGDACIRSISDLSLQLKNRDPEEVKIICQRRSQLNNRWASFHGNLLRYQQQLEGALEIHVLSRELDNVTKRIQEKEALIQALDCGKDLESVQRLLRKHEELEREVHPIQAQVESLEREVGRLCQRSPEAAHGLRHRQQEVAESWWQLRSRAQKRREALDALHQAQKLQAMLQELLVSAQRLRAQMDTSPAPRSPVEARRMLEEHQECKAELDSWTDSISLARSTGQQLLTAGHPFSSDIRQVLAGLEQELSSLEGAWQEHQLQLQQALELQLFLSSVEKMERWLCSKEDSLASEGLWDPLAPMEPLLWKHKMLEWDLEVQAGKISALEATARGLHQGGHPEAQSALGRCQAMLLRKEALFRQAGTRRHRLEELRQLQAFLQDSQEVAAWLREKNLVALEEGLLDTAMLPAQLQKQQNFQAELDASMHQQQELQREGQRLLQGGHPASEAIQERLEELGALWGELQDNSQKKVAKLQKACEALRLRRSMEELENWLEPIEVELRAPTVGQALPGVGELLGTQRELEAAVDKKARQAEALLGQAQAFVREGHCLAQDVEEQARRLLQRFKSLREPLQERRTALEARSLLLKFFRDADEEMAWVQEKLPLAAAQDYGQSLSAVRHLQEQHQNLESEMSSHEALTRVVLGTGYKLVQAGHFAAHEVAARVQQLEKAMAHLRAEAARRRLLLQQAQEAQQFLTELLEAGSWLAERGHVLDSEDMGHSAEATQALLRRLEATKRDLEAFSPRIERLQQTAALLESRKNPESPKVLAQLQAVREAHAELLRRAEARGHGLQEQLQLHQLERETLLLDAWLTTKAATAESQDYGQDLEGVKVLEEKFDAFRKEVQSLGQAKVYALRKLAGTLERGAPRRYPHIQAQRSRIEAAWERLDQAIKARTENLAAAHEVHSFQQAAAELQGRMQEKTALMKGEDGGHSLSSVRTLQQQHRRLERELEAMEKEVARLQTEACRLGQLHPAAPGGLAKVQEAWATLQAKAQERGQWLAQAAQGHAFLGRCQELLAWAQERQELASSEELAEDVAGAEQLLGQHEELGQEIRECRLQAQDLRQEGQQLVDNSHFMSAEVTECLQELEGRLQELEEAWALRWQRCAESWGLQKLRQRLEQAEAWLACWEGLLLKPDYGHSVSDVELLLHRHQDLEKLLAAQEEKFAQMQKTEMEQELLLQPQELKPGRAGSSLTSFQWRPSGHQGLGAQLAETRDPQDAKGTPTMEGSLEFKQHLLPGGRQPSSSSWDSCRGTLQGSSLSLFLDERMAAEKVASIALLDLTGARCERLRGRHGRKHTFSLRLTSGAEILFAAPSEEQAESWWRALGSTAAQSLSPKLKAKPVSSLNECTTKDARPGCLLRSDP

SEQ ID NO: 870650 - protein, 107 aa, Homo sapiens
TARWGTSPVPVLRGTQHLGTTAMTIISGQEPARSTACGQQLAEVVELLQRHDLLEAQVSAHGAHVSHLAQQTAELDSSLGTSVEVLQAKARTLAQLQQSLVALVRAR

SEQ ID NO: 870651 - protein, 3674 aa, Homo sapiens
MAGQPHSPRELLGAAGHRSRRPSTELRVPPSPSLTMDSQYETGHIRKLQARHMQMQEKTFTKWINNVFQCGQAGIKIRNLYTELADGIHLLRLLELISGEALPPPSRGRLRVHFLENSSRALAFLRAKVPVPLIGPENIVDGDQTLILGLIWVIILRFQISHISLDKEEFGASAALLSTKEALLVWCQRKTASYTNVNITDFSRSWSDGLGFNALIHAHRPDLLDYGSLRPDRPLHNLAFAFLVAEQELGIAQLLDPEDVAAAQPDERSIMTYVSLYYHYCSRLHQGQTVQRRLTKILLQLQETELLQTQYEQLVADLLRWIAEKQMQLEARDFPDSLPAMRQLLAAFTIFRTQEKPPRLQQRGAAEALLFRLQTALQAQNRRPFLPHEGLGLAELSQCWAGLEWAEAARSQALQQRLLQLQRLETLARRFQRKAALRESFLKDAEQVLDQARAPPASLATVEAAVQRLGMLEAGILPQEGRFQALAEIADILRQEQYHSWADVARRQEEVTVRWQRLLQHLQGQRKQVADMQAVLSLLQEVEAASHQLEELQEPARSTACGQQLAEVVELLQRHDLLEAQVSAHGAHVSHLAQQTAELDSSLGTSVEVLQAKARTLAQLQQSLVALVRARRALLEQTLQRAEFLRNCEEEEAWLKECGQRVGNAALGRDLSQIAGALQKHKALEAEVHRHQAVCVDLVRRGRDLSARRPPTQPDPGERAEAVQGGWQLLQTRVVGRGARLQTALLVLQYFADAAEAASWLRERRSSLERASCGQDQAAAETLLRRHVRLERVLRAFAAELRRLEEQGRAASARASLFTVNSALSPPGESLRNPGPWSEASCHPGPGDAWKMALPAEPDPDFDPNTILQTQDHLSQDYESLRALAQLRRARLEEAMALFGFCSSCGELQLWLEKQTVLLQRVQPQADTLEVMQLKYENFLTALAVGKGLWAEVSSSAEQLRQRYPGNSTQIQRQQEELSQRWGQLEALKREKAVQLAHSVEVCSFLQECGPTQVQLRDVLLQLEALQPGSSEDTRHALQLAQKKTLVLERRVYFLQSVVVKVEEPGYAESQPLQGQVETLQGLLKQVQEQVAQRARRQAETQARQSFLQESQQLLLWAESVQAQLRSKEVSVDVASAQRLLREHQDLLEEIHLWQERLQQLDAQSQPMAALDCPDSQEVPNTLRVLGQQGQELKVLWEQRQQWLQEGLELQKFGREVDGFTATCANHQAWLHLDNLGEDVREALSLLQQHREFGRLLSTLGPRAEALRAHGEKLVQSQHPAAHTVREQLQSIQAQWTRLQGRSEQRRRQLLASLQLQEWKQDVAELMQWMEEKGLMAAHEPSGARRNILQTLKRHEAAESELLATRRHVEALQQVGRELLSRRPCGQEDIQTRLQGLRSKWEALNRKMTERGDELQQAGQQEQLLRQLQDAKEQLEQLEGALQSSETGQDLRSSQRLQKRHQQLESESRTLAAKMAALASMAHGMAASPAILEETQKHLRRLELLQGHLAIRGLQLQASVELHQFCHLSNMELSWVAEHMPHGSPTSYTECLNGAQSLHRKHKELQVEVKAHQGQVQRVLSSGRSLAASGHPQAQHIVEQCQELEGHWAELERACEARAQCLQQAVTFQQYFLDVSELEGWVEEKRPLVSSRDYGRDEAATLRLINKHQALQEELAIYWSSMEELDQTAQTLTGPEVPEQQRVVQERLREQLRALQELAATRDRELEGTLRLHEFLREAEDLQGWLASQKQAAKGGESLGEDPEHALHLCTKFAKFQHQVEMGSQRVAACRLLAESLLERGHSAGPMVRQRQQDLQTAWSELWELTQARGHALRDTETTLRVHRDLLEVLTQVQEKATSLPNNVARDLCGLEAQLRSHQGLERELVGTERQLQELLETAGRVQKLCPGPQAHAVQQRQQAVTQAWAVLQRRMEQRRAQLERARLLARFRTAVRDYASWAARVRQDLQVEESSQEPSSGPLKLSAHQWLRAELEAREKLWQQATQLGQQALLAAGTPTKEVQEELRALQDQRDQVYQTWARKQERLQAEQQEQLFLRECGRLEEILAAQEVSLKTSALGSSVEEVEQLIRKHEVFLKVLTAQDKKEAALRERLKTLRRPRVRDRLPILLQRRMRVKELAESRGHALHASLLMASFTQAATQAEDWIQAWAQQLKEPVPPGDLRDKLKPLLKHQAFEAEVQAHEEVMTSVAKKGEALLAQSHPRAGEVSQRLQGLRKHWEDLRQAMALRGQELEDRRNFLEFLQRVDLAEAWIQEKEVKMNVGDLGQDLEHCLQLRRRLREFRGNSAGDTVGDACIRSISDLSLQLKNRDPEEVKIICQRRSQLNNRWASFHGNLLRYQQQLEGALEIHVLSRELDNVTKRIQEKEALIQALDCGKDLESVQRLLRKHEELEREVHPIQAQVESLEREVGRLCQRSPEAAHGLRHRQQEVAESWWQLRSRAQKRREALDALHQAQKLQAMLQELLVSAQRLRAQMDTSPAPRSPVEARRMLEEHQECKAELDSWTDSISLARSTGQQLLTAGHPFSSDIRQVLAGLEQELSSLEGAWQEHQLQLQQALELQLFLSSVEKMERWLCSKEDSLASEGLWDPLAPMEPLLWKHKMLEWDLEVQAGKISALEATARGLHQGGHPEAQSALGRCQAMLLRKEALFRQAGTRRHRLEELRQLQAFLQDSQEVAAWLREKNLVALEEGLLDTAMLPAQLQKQQNFQAELDASMHQQQELQREGQRLLQGGHPASEAIQERLEELGALWGELQDNSQKKVAKLQKACEALRLRRSMEELENWLEPIEVELRAPTVGQALPGVGELLGTQRELEAAVDKKARQAEALLGQAQAFVREGHCLAQDVEEQARRLLQRFKSLREPLQERRTALEARSLLLKFFRDADEEMAWVQEKLPLAAAQDYGQSLSAVRHLQEQHQNLESEMSSHEALTRVVLGTGYKLVQAGHFAAHEVAARVQQLEKAMAHLRAEAARRRLLLQQAQEAQQFLTELLEAGSWLAERGHVLDSEDMGHSAEATQALLRRLEATKRDLEAFSPRIERLQQTAALLESRKNPESPKVLAQLQAVREAHAELLRRAEARGHGLQEQLQLHQLERETLLLDAWLTTKAATAESQDYGQDLEGVKVLEEKFDAFRKEVQSLGQAKVYALRKLAGTLERGAPRRYPHIQAQRSRIEAAWERLDQAIKARTENLAAAHEVHSFQQAAAELQGRMQEKTALMKGEDGGHSLSSVRTLQQQHRRLERELEAMEKEVARLQTEACRLGQLHPAAPGGLAKVQEAWATLQAKAQERGQWLAQAAQGHAFLGRCQELLAWAQERQELASSEELAEDVAGAEQLLGQHEELGQEIRECRLQAQDLRQEGQQLVDNSHFMSAEVTECLQELEGRLQELEEAWALRWQRCAESWGLQKLRQRLEQAEAWLACWEGLLLKPDYGHSVSDVELLLHRHQDLEKLLAAQEEKFAQMQKTEMEQELLLQPQELKPGRAGSSLTSFQWRPSGHQGLGAQLAETRDPQDAKGTPTMEGSLEFKQHLLPGGRQPSSSSWDSCRGTLQGSSLSLFLDERMAAEKVASIALLDLTGARCERLRGRHGRKHTFSLRLTSGAEILFAAPSEEQAESWWRALGSTAAQSLSPKLKAKPVSSLNECTTKDARPGCLLRSDP

SEQ ID NO: 870652 - protein, 232 aa, Homo sapiens
ELLGAAGHRSRRPSTELRVPPSPSLTMDSQYETGHIRKLQARHMQMQEKTFTKWINNVFQCGQVSIAAVTHSPPIPGPQLWPVGLRGELWGHLPEAKLRPELLLPKQLLWVVPLRSQDGRTGEAGLTPYLPLSPPQAGIKIRNLYTELADGIHLLRLLELISGEALPPPSRGRLRVHFLENSSRALAFLRAKVGPRERGLGWCWGRQLGQAELLGHLSCARPLGRTEELGPE

SEQ ID NO: 870653 - protein, 322 aa, Homo sapiens
MSKTLGSGACGEVKLAFERKTCKKVAIKIISKRKFAIGSAREADPALNVETEIEILKKLNHPCIIKIKNFFDAEDYYIVLELMEGGELFDKVVGNKRLKEATCKLYFYQMLLAVQYLHENGIIHRDLKPENVLLSSQEEDCLIKITDFGHSKILGETSLMRTLCGTPTYLAPEVLVSVGTAGYNRAVDCWSLGVILFICLSGYPPFSEHRTQVSLKDQITSGKYNFIPEVWAEVSEKALDLVKKLLVVDPKARFTTEEALRHPWLQDEDMKRKFQDLLSEENESTALPQVLAQPSTSRKRPREGEAEGAETTKRPAVCAAVL

SEQ ID NO: 870654 - protein, 322 aa, Homo sapiens; identical to SEQ ID NO: 870653

SEQ ID NO: 870655 - protein, 322 aa, Homo sapiens; identical to SEQ ID NO: 870653

SEQ ID NO: 870656 - protein, 322 aa, Homo sapiens; identical to SEQ ID NO: 870653

SEQ ID NO: 870657 - protein, 293 aa, Homo sapiens
MSKTLGSGACGEVKLAFERKTCKKVAIKIISKRKFAIGSAREADPALNVETEIEILKKLNHPCIIKIKNFFDAEDYYIVLELMEGGELFDKVVGNKRLKEATCKLYFYQMLLAVQITDFGHSKILGETSLMRTLCGTPTYLAPEVLVSVGTAGYNRAVDCWSLGVILFICLSGYPPFSEHRTQVSLKDQITSGKYNFIPEVWAEVSEKALDLVKKLLVVDPKARFTTEEALRHPWLQDEDMKRKFQDLLSEENESTALPQVLAQPSTSRKRPREGEAEGAETTKRPAVCAAVL

SEQ ID NO: 870658 - protein, 311 aa, Homo sapiens
MSKTLGSGACGEVKLAFERKTCKKVAIKIISKRKFAIGSAREADPALNVETEIEILKKLNHPCIIKIKNFFDAEDYYIVLELMEGGELFDKVVGNKRLKEATCKLYFYQMLLAVQYLHENGIIHRDLKPENVLLSSQEEDCLIKITDFGHSKILGETSLMRTLCGTPTYLAPEVLVSVGTAGYNRAVDCWSLGVILFIWTQVSLKDQITSGKYNFIPEVWAEVSEKALDLVKKLLVVDPKARFTTEEALRHPWLQDEDMKRKFQDLLSEENESTALPQVLAQPSTSRKRPREGEAEGAETTKRPAVCAAVL

SEQ ID NO: 870659 - protein, 581 aa, Homo sapiens
MSRESDVEAQQSHGSSACSQPHGSVTQSQGSSSQSQGISSSSTSTMPNSSQSSHSSSGTLSSLETVSTQELYSIPEDQEPEDQEPEEPTPAPWARLWALQDGFANLECVNDNYWFGRDKSCEYCFDEPLLKRTDKYRTYSKKHFRIFREVGPKNSYIAYIEDHSGNGTFVNTELVGKGKRRPLNNNSEIALSLSRNKEKILKIYSLSRFSKIRRGAVAHVFNPSTLGGRGWQINLSFVFFDLTVDDQSVYPKALRDEYIMSKTLGSGACGEVKLAFERKTCKKVAIKIISKRKFAIGSAREADPALNVETEIEILKKLNHPCIIKIKNFFDAEDYYIVLELMEGGELFDKVVGNKRLKEATCKLYFYQMLLAVQYLHENGIIHRDLKPENVLLSSQEEDCLIKITDFGHSKILGETSLMRTLCGTPTYLAPEVLVSVGTAGYNRAVDCWSLGVILFICLSGYPPFSEHRTQVSLKDQITSGKYNFIPEVWAEVSEKALDLVKKLLVVDPKARFTTEEALRHPWLQDEDMKRKFQDLLSEENESTALPQVLAQPSTSRKRPREGEAEGAETTKRPAVCAAVL

SEQ ID NO: 870660 - protein, 322 aa, Homo sapiens; identical to SEQ ID NO: 870653

SEQ ID NO: 870661 - protein, 322 aa, Homo sapiens; identical to SEQ ID NO: 870653

SEQ ID NO: 870662 - protein, 322 aa, Homo sapiens; identical to SEQ ID NO: 870653

SEQ ID NO: 870663 - protein, 322 aa, Homo sapiens; identical to SEQ ID NO: 870653

SEQ ID NO: 870664 - protein, 163 aa, Homo sapiens
PWGNQFPKIQWEDLHNNSIPNTTFGEIIIGLWKSPMEDDNERPTGCSIEQAWCLYTPVIHLAQFLTSAVLIGLGYPVCNLMSYTLYSKILGPKPQGVYMGWLTASGSGARILGPMFISQVYAHWGPRWAFSLVCGIIVLTITLLGVVYKRLIALSVRYGRIQE

SEQ ID NO: 870665 - protein, 163 aa, Homo sapiens; identical to SEQ ID NO: 870664

SEQ ID NO: 870666 - protein, 158 aa, Homo sapiens
MLSCFPKNLHNNSIPNTTFGEIIIGLWKSPMEDDNERPTGCSIEQAWCLYTPVIHLAQFLTSAVLIGLGYPVCNLMSYTLYSKILGPKPQGVYMGWLTASGSGARILGPMFISQVYAHWGPRWAFSLVCGIIVLTITLLGVVYKRLIALSVRYGRIQE

SEQ ID NO: 870667 - protein, 371 aa, Homo sapiens
GRLRRRSFLIRGYRLGSDVGVGGMVGSAFSAVILLQGRKGVWLRLRKILFCVLGLYIAIPFLIKLCPGIQAKLIFLNFVRVPYFIDLKKPQDQGLNHTCNYYLQPEEDVTIGVWHTVPAVWWKNAQGKDQMWYEDALASSHPIILYLHGNAGTRGGDHRVELYKVLSSLGYHVVTFDYRGWGDSVGTPSERGMTYDALHVFDWIKARSGDNPVYIWGHSLGTGVATNLVRRLCERETPPDALILESPFTNIREEAKSHPFSVIYRYFPGFDWFFLDPITSSGIKFANDENVKHISCPLLILHAEDDPVVPFQLGRKLYSIAAPARSFRDFKVQFVPFHSDLGYRHKYIYKSPELPRILREFLGKSEPEHQH

SEQ ID NO: 870668 - protein, 148 aa, Homo sapiens
VPGLRALGGGGCERRHCGAGQRAPSAAGPVGRGMRKRTEPVALEHERCAAAGSSSSGSAAAALDADCRLKQNLRLTGPAAAEPRCAADAGMKRALGRRKGVWLRLRKILFCVLGLYIAIPFLIKLCPFIQTLATGTNTFTRALSCHGY

SEQ ID NO: 870669 - protein, 371 aa, Homo sapiens; identical to SEQ ID NO: 870667

SEQ ID NO: 870670 - protein, 371 aa, Homo sapiens; identical to SEQ ID NO: 870667

SEQ ID NO: 870671 - protein, 155 aa, Homo sapiens
ATCMSLASCLPLSSLFVYLETPPDALILESPFTNIREEAKSHPFSVIYRYFPGFDWFFLDPITSSGIKFANDENVKHISCPLLILHAEDDPVVPFQLGRKLYSIAAPARSFRDFKVQFVPFHSDLGYRHKYIYKSPELPRILREFLGKSEPEHQH

SEQ ID NO: 870672 - protein, 377 aa, Homo sapiens
GRLRRRSFLIRGYRLGSDVGVGGMVGSAFSAVILLQGRKGVWLRLRKILFCVLGLYIAIPFLIKLCPGIQAKLIFLNFVRVPYFIDLKKPQDQGLNHTCNYYLQPEEDVTIGVWHTVPAVWWKNAQGKDQMWYEDALASSHPIILYLHGNAGTRGGDHRVELYKVLSSLGYHVVTFDYRGWGDSVGTPSERGMTYDALHVFDWIKARSGDNPVYIWGHSLGTGVATNLVRRLCERETPPDALILESPFTNIREEAKSHPFSVIYRYFPGFDWFFLDPITSSGIKFANDENVKHISCPLLILHAEDDPVVPFQLGRKLYSIAAPARSFRDFKVQFVPFHSDLGYRHKYIYKSPELPRILRPQQGPGSSPDPSMWSELV

SEQ ID NO: 870673 - protein, 526 aa, Homo sapiens
MYQPEDDNNSDVTSDDDMTRNRRESSPPHSVHSFSDRDWDRRGRSRDMEPRDRWSHTRNPRSRMPPRDLSLPVVAKTSFEMDREDDRDSRAYESRSQDAESYQNVVDLAEDRKPHNTIQDNMENYRKLLSLGFLAQDSVPAEKRNTEMLDNLPSAGSQFPDFKHLGTFLVFEELVTFEDVLVDFSPEELSSLSAAQRNLYREVMLENYRNLVSLGHQFSKPDIISRLEEEESYAMETDSRHTVICQGESHDDPLEPHQGNQEKLLTPITMNDPKTLTPERSYGSDEFERSSNLSKQSKDPLGKDPQEGTAPGICTSPQSASQENKHNRCEFCKRTFSTQVALRRHERIHTGKKPYECKQCAEAFYLMPHLNRHQKTHSGRKTSGCNEGRKPSVQCANLCERVRIHSQEDYFECFQCGKAFLQNVHLLQHLKAHEAARVLPPGLSHSKTYLIRYQRKHDYVGERACQCCDCGRVFSRNSYLIQHYRTHTQERPYQCQLCGKCFGRPSYLTQHYQLHSQEKTVECDHC

SEQ ID NO: 870674 - protein, 92 aa, Homo sapiens
  misc_feature (81)..(81): Xaa can be any naturally occurring amino acid
MSEGQALGGWVQPETRTKEEIIELLVLEQYLTIIPEKLKPWVRAKKPENCEKLVTLLENYKEMYQPEDDNNSDCDRDDEGXPGAYESRSPML

SEQ ID NO: 870675 - protein, 1590 aa, Homo sapiens
CRSLGSCGRRGLGGAGDVHPGLVAPPGAGRHEGALGGCSCPRLRSTEVSFAFLIFRPSWRRLARGRGTEVQTLGGWVQPETRTKEEIIELLVLEQYLTIIPEKLKPWVRAKKPENCEKLVTLLENYKEMYQPEDDNNSDVTSDDDMTRNRRESSPPHSVHSFSDRDWDRRGRSRDMEPRDRWSHTRNPRSRMPPRDLSLPVVAKTSFEMDREDDRDSRAYESRSQDAESYQNVVDLAEDRKPHNTIQDNMENYRKLLSLVQLAEDDGHSHMTQGHSSRSKRSAYPSTSRGLKTMPEAKKSTHRRGICEDESSHGVIMEKFIKDVSRSSKSGRARESSDRSQRFPRMSDDNWKDISLNKRESVIQQRVYEGNAFRGGFRFNSTLVSRKRVLERKRRYHFDTDGKGSIHDQKGCPRKKPFECGSEMRKAMSVSSLSSLSSPSFTESQPIDFGAMPYVCDECGRSFSVISEFVEHQIMHTRENLYEYGESFIHSVAVSEVQKSQVGGKRFECKDCGETFNKSAALAEHRKIHARGYLVECKNQECEEAFMPSPTFSELQKIYGKDKFYECRVCKETFLHSSALIEHQKIHFGDDKDNEREHERERERERGETFRPSPALNEFQKMYGKEKMYECKVCGETFLHSSSLKEHQKIHTRGNPFENKGKVCEETFIPGQSLKRRQKTYNKEKLCDFTDGRDAFMQSSELSEHQKIHSRKNLFEGRGYEKSVIHSGPFTESQKSHTITRPLESDEDEKAFTISSNPYENQKIPTKENVYEAKSYERSVIHSLASVEAQKSHSVAGPSKPKVMAESTIQSFDAINHQRVRAGGNTSEGREYSRSVIHSLVASKPPRSHNGNELVESNEKGESSIYISDLNDKRQKIPARENPCEGGSKNRNYEDSVIQSVFRAKPQKSVPGEGSGEFKKDGEFSVPSSNVREYQKARAKKKYIEHRSNETSVIHSLPFGEQTFRPRGMLYECQECGECFAHSSDLTEHQKIHDREKPSGSRNYEWSVIRSLAPTDPQTSYAQEQYAKEQARNKCKDFRQFFATSEDLNTNQKIYDQEKSHGEESQGENTDGEETHSEETHGQETIEDPVIQGSDMEDPQKDDPDDKIYECEDCGLGFVDLTDLTDHQKVHSRKCLVDSREYTHSVIHTHSISEYQRDYTGEQLYECPKCGESFIHSSFLFEHQRIHEQDQLYSMKGCDDGFIALLPMKPRRNRAAERNPALAGSAIRCLLCGQGFIHSSALNEHMRLHREDDLLEQSQMAEEAIIPGLALTEFQRSQTEERLFECAVCGESFVNPAELADHVTVHKNEPYEYGSSYTHTSFLTEPLKGAIPFYECKDCGKSFIHSTVLTKHKELHLEEEEEDEAAAAAAAAAQEVEANVHVPQVVLRIQGLNVEAAEPEVEAAEPEVEAAEPEVEAAEPNGEAEGPDGEAAEPIGEAGQPNGEAEQPNGDADEPDGAGIEDPEERAEEPEGKAEEPEGDADEPDGVGIEDPEEGEDQEIQVEEPYYDCHECTETFTSSTAFSEHLKTHASMIIFEPANAFGECSGYIERASTSTGGANQADEKYFKCDVCGQLFNDRLSLARHQNTHTG

SEQ ID NO: 870676 - protein, 1590 aa, Homo sapiens; identical to SEQ ID NO: 870675

SEQ ID NO: 870677 - protein, 1590 aa, Homo sapiens; identical to SEQ ID NO: 870675

SEQ ID NO: 870678 - protein, 1588 aa, Homo sapiens
MLPPKHLSATKPKKSWAPNLYELDSDLTKEPDVIIGEGPTDSEFFHQRFRNLIYVEFVGPRKTLIKLRNLCLDWLQPETRTKEEIIELLVLEQYLTIIPEKLKPWVRAKKPENCEKLVTLLENYKEMYQPEDDNNSDVTSDDDMTRNRRESSPPHSVHSFSDRDWDRRGRSRDMEPRDRWSHTRNPRSRMPPRDLSLPVVAKTSFEMDREDDRDSRAYESRSQDAESYQNVVDLAEDRKPHNTIQDNMENYRKLLSLVQLAEDDGHSHMTQGHSSRSKRSAYPSTSRGLKTMPEAKKSTHRRGICEDESSHGVIMEKFIKDVSRSSKSGRARESSDRSQRFPRMSDDNWKDISLNKRESVIQQRVYEGNAFRGGFRFNSTLVSRKRVLERKRRYHFDTDGKGSIHDQKGCPRKKPFECGSEMRKAMSVSSLSSLSSPSFTESQPIDFGAMPYVCDECGRSFSVISEFVEHQIMHTRENLYEYGESFIHSVAVSEVQKSQVGGKRFECKDCGETFNKSAALAEHRKIHARGYLVECKNQECEEAFMPSPTFSELQKIYGKDKFYECRVCKETFLHSSALIEHQKIHFGDDKDNEREHERERERERGETFRPSPALNEFQKMYGKEKMYECKVCGETFLHSSSLKEHQKIHTRGNPFENKGKVCEETFIPGQSLKRRQKTYNKEKLCDFTDGRDAFMQSSELSEHQKIHSRKNLFEGRGYEKSVIHSGPFTESQKSHTITRPLESDEDEKAFTISSNPYENQKIPTKENVYEAKSYERSVIHSLASVEAQKSHSVAGPSKPKVMAESTIQSFDAINHQRVRAGGNTSEGREYSRSVIHSLVASKPPRSHNGNELVESNEKGESSIYISDLNDKRQKIPARENPCEGGSKNRNYEDSVIQSVFRAKPQKSVPGEGSGEFKKDGEFSVPSSNVREYQKARAKKKYIEHRSNETSVIHSLPFGEQTFRPRGMLYECQECGECFAHSSDLTEHQKIHDREKPSGSRNYEWSVIRSLAPTDPQTSYAQEQYAKEQARNKCKDFRQFFATSEDLNTNQKIYDQEKSHGEESQGENTDGEETHSEETHGQETIEDPVIQGSDMEDPQKDDPDDKIYECEDCGLGFVDLTDLTDHQKVHSRKCLVDSREYTHSVIHTHSISEYQRDYTGEQLYECPKCGESFIHSSFLFEHQRIHEQDQLYSMKGCDDGFIALLPMKPRRNRAAERNPALAGSAIRCLLCGQGFIHSSALNEHMRLHREDDLLEQSQMAEEAIIPGLALTEFQRSQTEERLFECAVCGESFVNPAELADHVTVHKNEPYEYGSSYTHTSFLTEPLKGAIPFYECKDCGKSFIHSTVLTKHKELHLEEEEEDEAAAAAAAAAQEVEANVHVPQVVLRIQGLNVEAAEPEVEAAEPEVEAAEPEVEAAEPNGEAEGPDGEAAEPIGEAGQPNGEAEQPNGDADEPDGAGIEDPEERAEEPEGKAEEPEGDADEPDGVGIEDPEEGEDQEIQVEEPYYDCHECTETFTSSTAFSEHLKTHASMIIFEPANAFGECSGYIERASTSTGGANQADEKYFKCDVCGQLFNDRLSLARHQNTHTG

SEQ ID NO: 870679 - protein, 1588 aa, Homo sapiens; identical to SEQ ID NO: 870678

SEQ ID NO: 870680 - protein, 1590 aa, Homo sapiens; identical to SEQ ID NO: 870675

SEQ ID NO: 870681 - protein, 1478 aa, Homo sapiens
MLPPKHLSATKPKKSWAPNLYELDSDLTKEPDVIIGEGPTDSEFFHQRFRNLIYVEFVGPRKTLIKLRNLCLDWLQPETRTKEEIIELLVLEQYLTIIPEKLKPWVRAKKPENCEKLVTLLENYKEMYQPEDDNNSDVTSDDDMTRNRRESSPPHSVHSFSDRDWDRRGRSRDMEPRDRWSHTRNPRSRMPPRDLSLPVVAKTSFEMDREDDRDSRAYESRSQDAESYQNVVDLAEDRKPHNTIQDNMENYRKLLSLVQLAEDDGHSHMTQGHSSRSKRSAYPSTSRGLKTMPEAKKSTHRRGICEDESSHGVIMEKFIKDVSRSSKSGRARESSDRSQRFPRMSDDNWKDISLNKRESVIQQRVYEGNAFRGGFRFNSTLVSRKRVLERKRRYHFDTDGKGSIHDQKGCPRKKPFECGSEMRKAMSVSSLSSLSSPSFTESQPIDFGAMPYVCDECGRSFSVISEFVEHQIMHTRENLYEYGESFIHSVAVSEVQKSQVGGKRFECKDCGETFNKSAALAEHRKIHARGYLVECKNQECEEAFMPSPTFSELQKIYGKDKFYECRVCKETFLHSSALIEHQKIHFGDDKDNEREHERERERERGETFRPSPALNEFQKMYGKEKMYECKVCGETFLHSSSLKEHQKIHTRGNPFENKGKVCEETFIPGQSLKRRQKTYNKEKLCDFTDGRDAFMQSSELSEHQKIHSRKNLFEGRGYEKSVIHSGPFTESQKSHTITRPLESDEDEKAFTISSNPYENQKIPTKENVYEAKSYERSVIHSLASVEAQKSHSVAGPSKPKVMAESTIQSFDAINHQRVRAGGNTSEGREYSRSVIHSLVASKPPRSHNGNELVESNEKGESSIYISDLNDKRQKIPARENPCEGGSKNRNYEDSVIQSVFRAKPQKSVPGEGSGEFKKDGEFSVPSSNVREYQKARAKKKYIEHRSNETSVIHSLPFGEQTFRPRGMLYECQECGECFAHSSDLTEHQKIHDREKPSGSRNYEWSVIRSLAPTDPQTSYAQEQYAKEQARNKCKDFRQFFATSEDLNTNQKIYDQEKSHGEESQGENTDGEETHSEETHGQETIEDPVIQGSDMEDPQKDDPDDKIYECEDCGLGFVDLTDLTDHQKVHSRKCLVDSREYTHSVIHTHSISEYQRDYTGEQLYECPKCGESFIHSSFLFEHQRIHEQDQLYSMKGCDDGFIALLPMKPRRNRAAERNPALAGSAIRCLLCGQGFIHSSALNEHMRLHREDDLLEQSQMAEEAIIPGLALTEFQRSQTEERLFECAVCGESFVNPAELADHVTVHKNEPYEYGSSYTHTSFLTEPLKGAIPFYECKDCGKSFIHSTVLTKHKELHLEEEEEDEAAAAAAAAAQEVEANVHVPQVVLRIQGLNVEAAEPEVEAAEPEVEAAEPEVEAAEPNGEAEGQMGMLMSQMVQVLKTQKKELKSQREKLKSQREMPTSLTVWELKTQKKVKIKRFR

SEQ ID NO: 870682 - protein, 191 aa, Homo sapiens
MLPPKHLSATKPKKSWAPNLYELDSDLTKEPDVIIGEGPTDSEFFHQRFRNLIYVEFVGPRKTLIKLRNLCLDWLQPETRTKEEIIELLVLEQYLTIIPEKLKPWVRAKKPENCEKLVTLLENYKEMYQPEDDNNSDVTSDDDMTRNRRESSPPHSVHSFSDRDWDRRGRSRDMEPRDRWSHTRNPRSSES

SEQ ID NO: 870683 - protein, 126 aa, Homo sapiens
MADQLTEEQIAEFKEAFSLFDKDGDGTITTKELGTVMRSLGQNPTEAELQDMINEVDADGNGTIDFPEFLTMMARKMKDTDSEEEIREAFRVFDKDGNGYISAAELRHVMTNLGEKLPDEEVDDMI

SEQ ID NO: 870684 - protein, 1590 aa, Homo sapiens; identical to SEQ ID NO: 870675

SEQ ID NO: 870685 - protein, 1590 aa, Homo sapiens; identical to SEQ ID NO: 870675

SEQ ID NO: 870686 - protein, 1588 aa, Homo sapiens; identical to SEQ ID NO: 870678

SEQ ID NO: 870687 - protein, 644 aa, Homo sapiens
LLLPIDCMCMQVRNAFKIFSQYLLNINYVPRHIDNIQDPCSYGVYTLVREKPSGSRNYEWSVIRSLAPTDPQTSYAQEQYAKEQARNKCKDFRQFFATSEDLNTNQKIYDQEKSHGEESQGENTDGEETHSEETHGQETIEDPVIQGSDMEDPQKDDPDDKIYECEDCGLGFVDLTDLTDHQKVHSRKCLVDSREYTHSVIHTHSISEYQRDYTGEQLYECPKCGESFIHSSFLFEHQRIHEQDQLYSMKGCDDGFIALLPMKPRRNRAAERNPALAGSAIRCLLCGQGFIHSSALNEHMRLHREDDLLEQSQMAEEAIIPGLALTEFQRSQTEERLFECAVCGESFVNPAELADHVTVHKNEPYEYGSSYTHTSFLTEPLKGAIPFYECKDCGKSFIHSTVLTKHKELHLEEEEEDEAAAAAAAAAQEVEANVHVPQVVLRIQGLNVEAAEPEVEAAEPEVEAAEPEVEAAEPNGEAEGPDGEAAEPIGEAGQPNGEAEQPNGDADEPDGAGIEDPEERAEEPEGKAEEPEGDADEPDGVGIEDPEEGEDQEIQVEEPYYDCHECTETFTSSTAFSEHLKTHASMIIFEPANAFGECSGYIERASTSTGGANQADEKYFKCDVCGQLFNDRLSLARHQNTHTG

SEQ ID NO: 870688 - protein, 1588 aa, Homo sapiens; identical to SEQ ID NO: 870678

SEQ ID NO: 870689 - protein, 207 aa, Homo sapiens
LFGQALPLYSLEWTARGCSWSPEPKMEPQLGPEAAALRPGWLALLLWVSALSCSFSLPASSLSSLVPQVRTSYNFGRTFLGLDKCNACIGTSICKKFFKEEIRSDNWLASHLGLPPDSLLSYPANYSDDSKIWRPVEIFRLVSKYQNEISDRRICASASAPKTCSIERVLRKTERFQKWLQAKRLTPDLVQDCHQGQRELKFLCMLR

SEQ ID NO: 870690 - protein, 230 aa, Homo sapiens
LFGQALPLYSLEWTARGCSWSPEPKMEPQLGPEAAALRPGWLALLLWVSALSCSFSLPASSLSSLVPQVRTSYNFGRTFLGLDKCNACIGTSICKKFFKEEIRSDNWLASHLGLPPDSLLSYPANYSDDSKIWRPVEIFRLVSKYQNEISDRRICASASAPKTCSIERVLRKTERFQKWLQAKRLTPDLVQGLASPLLRCPSQRLLDRVVRRYAEVADAGSIFMDHFTDG

SEQ ID NO: 870691 - protein, 67 aa, Homo sapiens
VVWPCRAVQSKPPDSNNSSITLRMTLYGRICASASAPKTCSIERVLRKTERFQKWLQAKRLTPDLVQ

SEQ ID NO: 870692 - protein, 118 aa, Homo sapiens
LGRPGGPAGGTGQLEHPPGARAASLLAATCGQHAWPPAADHVAFCPVPCQMAPSEPPGETRCGLASESPPPPAVGTALSREGDSGWAARLLPLRLQTLFAPRFLWSTRRLHTHFLYLS

SEQ ID NO: 870693 - protein, 1338 aa, Homo sapiens
RTIVPNAPATIPLLAVAPPGVAALSIHSAVAQLPGQPVYPAAFPQMAPTDVPPSPHHTVQNMRATPPQPALPPQPTLPPQPVLPPQPTLPPQPVLPPQPTRPPQPVLPPQPMLPPQPVLPPQPALPVRPEPLQPHLPEQAAPAATPGSQILLGHPAPYAVDVAAQVPTVPVPPAAVLSPPLPEVLLPAAPELLPQFPSSLATVSASVQSVPTQTATLLPPANPPLPGGPGIASPCPTVQLTVEPVQEEQASQDKPPGLPQSCESYGGSDVTSGKELSDSCEGAFGGGRLEGRAARKHHRRSTRARSRQERASRPRLTILNVCNTGDKMVECQLETHNHKMVTFKFDLDGDAPDEIATYMVEHDFILQAERETFIEQMKDVMDKAEDMLSEDTDADRGSDPGTSPPHLSTCGLGTGEESRQSQANAPVYQQNVLHTGKRWFIICPVAEHPAPEAPESSPPLPLSSLPPEASQDSAPYKDQLSSKEQPSFLASQQLLSQAGPSNPPGAPPAPLAPSSPPVTALPQDGAAPATSTMPEPASGTASQAGGPGTPQGLTSELETSQPLAETHEAPLAVQPLVVGLAPCTPAPEAASTRDASAPREPLPPPAPEPSPHSGTPQPALGQPAPLLPAAVGAVSLATSQLPSPPLGPTVPPQPPSALESDGEGPPPRVGFVDSTIKSLDEKLRTLLYQEHVPTSSASAGTPVEVGDRDFTLEPLRGDQPRSEVCGGDLALPPVPKEAVSGRVQLPQPLVEKSELAPTRGAVMEQGTSSSMTESSPRSMLGYDRDGRQVASDSHVVPSVPQDVPAFVRPARVEPTDRDGGEAGESSAEPPPSDMGTVGGQASHPQTLGARALGSPRKRPEQQDVSSPAKTVGRFSVVSTQDEWTLASPHSLRYSAPPDVYLDEAPSSPDVKLAVRRAQTASSIEVGVGEPVSSDSGDEGPRARPPVQKQASLPVSGSVAGDFVKKATAFLQRPSRAGSLGPETPSRVGMKVPTISVTSFHSQSSYISSDNDSELEDADIKKELQSLREKHLKEISELQSQQKQEIEALYRRLGKPLPPNVGFFHTAPPTGRRRKTSKSKLKAGKLLNPLVRQLKVVASSTGHLADSSRGPPAKDPAQASVGLTADSTGLSGKAVQTQQPCSVRASLSSDICSGLASDGGGARGQGSSTSSLAPGPEPGPQPALHVQAQVNNSNNKKGTFTDDLHKLVDEWTSKTVGAAQLKPTLNQLKQTQKLQDMEAQAGWAAPGEARAMTAPRAGVGMPRLPPAPGPLSTTVIPGAAPTLSVPTPDGALGTARRNQVWFGLRVPPTACCGHSTQPRGGQRVGSKTASFAASDPVRS

SEQ ID NO: 870694 - protein, 1343 aa, Homo sapiens
RTIVPNAPATIPLLAVAPPGVAALSIHSAVAQLPGQPVYPAAFPQMAPTDVPPSPHHTVQNMRATPPQPALPPQPTLPPQPVLPPQPTLPPQPVLPPQPTRPPQPVLPPQPMLPPQPVLPPQPALPVRPEPLQPHLPEQAAPAATPGSQILLGHPAPYAVDVAAQVPTVPVPPAAVLSPPLPEVLLPAAPELLPQFPSSLATVSASVQSVPTQTATLLPPANPPLPGGPGIASPCPTVQLTVEPVQEEQASQDKPPGLPQSCESYGGSDVTSGKELSDSCEGAFGGGRLEGRAARKHHRRSTRARSRQERASRPRLTILNVCNTGDKMVECQLETHNHKMVTFKFDLDGDAPDEIATYMVEHDFILQAERETFIEQMKDVMDKAEDMLSEDTDADRGSDPGTSPPHLSTCGLGTGEESRQSQANAPVYQQNVLHTGKRWFIICPVAEHPAPEAPESSPPLPLSSLPPEASQDSAPYKDQLSSKEQPSFLASQQLLSQAGPSNPPGAPPAPLAPSSPPVTALPQDGAAPATSTMPEPASGTASQAGGPGTPQGLTSELETSQPLAETHEAPLAVQPLVVGLAPCTPAPEAASTRDASAPREPLPPPAPEPSPHSGTPQPALGQPAPLLPAAVGAVSLATSQLPSPPLGPTVPPQPPSALESDGEGPPPRVGFVDSTIKSLDEKLRTLLYQEHVPTSSASAGTPVEVGDRDFTLEPLRGDQPRSEVCGGDLALPPVPKEAVSGRVQLPQPLVEKSELAPTRGAVMEQGTSSSMTESSPRSMLGYDRDGRQVASDSHVVPSVPQDVPAFVRPARVEPTDRDGGEAGESSAEPPPSDMGTVGGQASHPQTLGARALGSPRKRPEQQDVSSPAKTVGRFSVVSTQDEWTLASPHSLRYSAPPDVYLDEAPSSPDVKLAVRRAQTASSIEVGVGEPVSSDSGDEGPRARPPVQKQASLPVSGSVAGDFVKKATAFLQRPSRAGSLGPETPSRVGMKVPTISVTSFHSQSSYISSDNDSELEDADIKKELQSLREKHLKEISELQSQQKQEIEALYRRLGKPLPPNVGFFHTAPPTGRRRKTSKSKLKAGKLLNPLVRQLKVVASSTGHLADSSRGPPAKDPAQASVGLTADSTGLSGKAVQTQQPCSVRASLSSDICSGLASDGGGARGQGWTVYHPTSERVTYKSSSKPRARFLSGPVSVSIWSALKRLCLGKEHSSRSSTSSLAPGPEPGPQPALHVQAQVNNSNNKKGTFTDDLHKLVDEWTSKTVGAAQLKPTLNQLKQTQKLQDMEAQAGWAAPGEARAMTAPRAGVGMPRLPPAPGPLSTTVIPGAAPTLSVPTPDPESEKPD

SEQ ID NO: 870695 - protein, 1338 aa, Homo sapiens; identical to SEQ ID NO: 870693

SEQ ID NO: 870696 - protein, 1322 aa, Homo sapiens
RTIVPNAPATIPLLAVAPPGVAALSIHSAVAQLPGQPVYPAAFPQMAPTDVPPSPHHTVQNMRATPPQPALPPQPTLPPQPVLPPQPTLPPQPVLPPQPTRPPQPVLPPQPMLPPQPVLPPQPALPVRPEPLQPHLPEQAAPAATPGSQILLGHPAPYAVDVAAQVPTVPVPPAAVLSPPLPEVLLPAAPELLPQFPSSLATVSASVQSVPTQTATLLPPANPPLPGGPGIASPCPTVQLTVEPVQEEQASQDKPPGLPQSCESYGGSDVTSGKELSDSCEGAFGGGRLEGRAARKHHRRSTRARSRQERASRPRLTILNVCNTGDKMVECQLETHNHKMVTFKFDLDGDAPDEIATYMVEHDFILQAERETFIEQMKDVMDKAEDMLSEDTDADRGSDPGTSPPHLSTCGLGTGEESRQSQANAPVYQQNVLHTGKRWFIICPVAEHPAPEAPESSPPLPLSSLPPEASQDSAPYKDQLSSKEQPSFLASQQLLSQAGPSNPPGAPPAPLAPSSPPVTALPQDGAAPATSTMPEPASGTASQAGGPGTPQGLTSELETSQPLAETHEAPLAVQPLVVGLAPCTPAPEAASTRDASAPREPLPPPAPEPSPHSGTPQPALGQPAPLLPAAVGAVSLATSQLPSPPLGPTVPPQPPSALESDGEGPPPRVGFVDSTIKSLDEKLRTLLYQEHVPTSSASAGTPVEVGDRDFTLEPLRGDQPRSEVCGGDLALPPVPKEAVSGRVQLPQPLVEKSELAPTRGAVMEQGTSSSMTESSPRSMLGYDRDGRQVASDSHVVPSVPQDVPAFVRPARVEPTDRDGGEAGESSAEPPPSDMGTVGGQASHPQTLGARALGSPRKRPEQQDVSSPAKTVGRFSVVSTQDEWTLASPHSLRYSAPPDVYLDEAPSSPDVKLAVRRAQTASSIEVGVGEPVSSDSGDEGPRARPPVQKQASLPVSGSVAGDFVKKATAFLQRPSRAGSLGPETPSRVGMKVPTISVTSFHSQSSYISSDNDSELEDADIKKELQSLREKHLKEISELQSQQKQEIEALYRRLGKPLPPNVGFFHTAPPTGRRRKTSKSKLKAGKLLNPLVRQLKVVASSTGWTVYHPTSERVTYKSSSKPRARFLSGPVSVSIWSALKRLCLGKEHSSRSSTSSLAPGPEPGPQPALHVQAQVNNSNNKKGTFTDDLHKLVDEWTSKTVGAAQLKPTLNQLKQTQKLQDMEAQAGWAAPGEARAMTAPRAGVGMPRLPPAPGPLSTTVIPGAAPTLSVPTPDGALGTARRNQVWFGLRVPPTACCGHSTQPRGGQRVGSKTASFAASDPVRS

SEQ ID NO: 870697 - protein, 1402 aa, Homo sapiens
RTIVPNAPATIPLLAVAPPGVAALSIHSAVAQLPGQPVYPAAFPQMAPTDVPPSPHHTVQNMRATPPQPALPPQPTLPPQPVLPPQPTLPPQPVLPPQPTRPPQPVLPPQPMLPPQPVLPPQPALPVRPEPLQPHLPEQAAPAATPGSQILLGHPAPYAVDVAAQVPTVPVPPAAVLSPPLPEVLLPAAPELLPQFPSSLATVSASVQSVPTQTATLLPPANPPLPGGPGIASPCPTVQLTVEPVQEEQASQDKPPGLPQSCESYGGSDVTSGKELSDSCEGAFGGGRLEGRAARKHHRRSTRARSRQERASRPRLTILNVCNTGDKMVECQLETHNHKMVTFKFDLDGDAPDEIATYMVEHDFILQAERETFIEQMKDVMDKAEDMLSEDTDADRGSDPGTSPPHLSTCGLGTGEESRQSQANAPVYQQNVLHTGKRWFIICPVAEHPAPEAPESSPPLPLSSLPPEASQDSAPYKDQLSSKEQPSFLASQQLLSQAGPSNPPGAPPAPLAPSSPPVTALPQDGAAPATSTMPEPASGTASQAGGPGTPQGLTSELETSQPLAETHEAPLAVQPLVVGLAPCTPAPEAASTRDASAPREPLPPPAPEPSPHSGTPQPALGQPAPLLPAAVGAVSLATSQLPSPPLGPTVPPQPPSALESDGEGPPPRVGFVDSTIKSLDEKLRTLLYQEHVPTSSASAGTPVEVGDRDFTLEPLRGDQPRSEVCGGDLALPPVPKEAVSGRVQLPQPLVEKSELAPTRGAVMEQGTSSSMTESSPRSMLGYDRDGRQVASDSHVVPSVPQDVPAFVRPARVEPTDRDGGEAGESSAEPPPSDMGTVGGQASHPQTLGARALGSPRKRPEQQDVSSPAKTVGRFSVVSTQDEWTLASPHSLRYSAPPDVYLDEAPSSPDVKLAVRRAQTASSIEVGVGEPVSSDSGDEGPRARPPVQKQASLPVSGSVAGDFVKKATAFLQRPSRAGSLGPETPSRVGMKVPTISVTSFHSQSSYISSDNDSELEDADIKKELQSLREKHLKEISELQSQQKQEIEALYRRLGKPLPPNVGFFHTAPPTGRRRKTSKSKLKAGKLLNPLVRQLKVVASSTGHLADSSRGPPAKDPAQASVGLTADSTGLSGKAVQTQQPCSVRASLSSDICSGLASDGGGARGQGWTVYHPTSERVTYKSSSKPRARFLSGPVSVSICLYLFFCILSPPGPWFSPPTPSLSSLPFIHFIGCLPHPIEVTYLISKWNPMSRSPGAAAASAYPQAPHSVLCMLMAGAWARKACAAAGLPSAPGTSAQKDWSPLHSFRHLIYLIFFFMLDVVFFSVAIVANIHVRCPQFQRQQKDNPNLLQMHSVCHACLDCEDMHIASLYGSKGHWRAWFLYQGQIPAPSTLHTHRPVPCMWKC

SEQ ID NO: 870698 - protein, 549 aa, Homo sapiens
RTIVPNAPATIPLLAVAPPGVAALSIHSAVAQLPGQPVYPAAFPQMAPTDVPPSPHHTVQNMRATPPQPALPPQPTLPPQPVLPPQPTLPPQPVLPPQPTRPPQPVLPPQPMLPPQPVLPPQPALPVRPEPLQPHLPEQAAPAATPGSQILLGHPAPYAVDVAAQVPTVPVPPAAVLSPPLPEVLLPAAPELLPQFPSSLATVSASVQSVPTQTATLLPPANPPLPGGPGIASPCPTVQLTVEPVQEEQASQDKPPGLPQSCESYGGSDVTSGKELSDSCEGAFGGGRLEGRAARKHHRRSTRARSRQERASRPRLTILNVCNTGDKMVECQLETHNHKMVTFKFDLDGDAPDEIATYMVEHDFILQAERETFIEQMKDVMDKAEDMLSEDTDADRGSDPGTSPPHLSTCGLGTGEESRQSQANAPVYQQNVLHTGKRWFIICPVAEHPAPEAPESSPPLPLSSLPPEASQGMSSRRPHKPLPVSCTGLLLCMTQPVCAPCPGPCRGLTLPCLPWRRAACGAVFLSLFSAESAQSKQPPGLSLPCYPTK

SEQ ID NO: 870699 - protein, 67 aa, Homo sapiens
VSLTALLFLCFFLQVEKSELAPTRGAVMEQGTSSSMTGNSFLLNPAFTRCCLASLPQNLLHPHPRLS

SEQ ID NO: 870700 - protein, 1386 aa, Homo sapiens
RTIVPNAPATIPLLAVAPPGVAALSIHSAVAQLPGQPVYPAAFPQMAPTDVPPSPHHTVQNMRATPPQPALPPQPTLPPQPVLPPQPTLPPQPVLPPQPTRPPQPVLPPQPMLPPQPVLPPQPALPVRPEPLQPHLPEQAAPAATPGSQILLGHPAPYAVDVAAQVPTVPVPPAAVLSPPLPEVLLPAAPELLPQFPSSLATVSASVQSVPTQTATLLPPANPPLPGGPGIASPCPTVQLTVEPVQEEQASQDKPPGLPQSCESYGGSDVTSGKELSDSCEGAFGGGRLEGRAARKHHRRSTRARSRQERASRPRLTILNVCNTGDKMVECQLETHNHKMVTFKFDLDGDAPDEIATYMVEHDFILQAERETFIEQMKDVMDKAEDMLSEDTDADRGSDPGTSPPHLSTCGLGTGEESRQSQANAPVYQQNVLHTGKRWFIICPVAEHPAPEAPESSPPLPLSSLPPEASQDSAPYKDQLSSKEQPSFLASQQLLSQAGPSNPPGAPPAPLAPSSPPVTALPQDGAAPATSTMPEPASGTASQAGGPGTPQGLTSELETSQPLAETHEAPLAVQPLVVGLAPCTPAPEAASTRDASAPREPLPPPAPEPSPHSGTPQPALGQPAPLLPAAVGAVSLATSQLPSPPLGPTVPPQPPSALESDGEGPPPRVGFVDSTIKSLDEKLRTLLYQEHVPTSSASAGTPVEVGDRDFTLEPLRGDQPRSEVCGGDLALPPVPKEAVSGRVQLPQPLVEKSELAPTRGAVMEQGTSSSMTESSPRSMLGYDRDGRQVASDSHVVPSVPQDVPAFVRPARVEPTDRDGGEAGESSAEPPPSDMGTVGGQASHPQTLGARALGSPRKRPEQQDVSSPAKTVGRFSVVSTQDEWTLASPHSLRYSAPPDVYLDEAPSSPDVKLAVRRAQTASSIEVGVGEPVSSDSGDEGPRARPPVQKQASLPVSGSVAGDFVKKATAFLQRPSRAGSLGPETPSRVGMKVPTISVTSFHSQSSYISSDNDSELEDADIKKELQSLREKHLKEISELQSQQKQEIEALYRRLGKPLPPNVGFFHTAPPTGRRRKTSKSKLKAGKLLNPLVRQLKVVASSTGHLADSSRGPPAKDPAQASVGLTADSTGLSGKAVQTQQPCSVRASLSSDICSGLASDGGGARGQGWTVYHPTSERVTYKSSSKPRARFLSGPVSVSIWSALKRLCLGKEHSSRSSTSSLAPGPEPGPQPALHVQAQVNNSNNKKGTFTDDLHKLVDEWTSKTVGAAQLKPTLNQLKQTQKLQDMEAQAGWAAPGEARAMTAPRAGVGMPRLPPAPGPLSTTVIPGAAPTLSVPTPDGALGTARRNQVWFGLRVPPTACCGHSTQPRGGQRVGSKTASFAASDPVRS

SEQ ID NO: 870701 - protein, 1295 aa, Homo sapiens
RTIVPNAPATIPLLAVAPPGVAALSIHSAVAQLPGQPVYPAAFPQMAPTDVPPSPHHTVQNMRATPPQPALPPQPTLPPQPVLPPQPTLPPQPVLPPQPTRPPQPVLPPQPMLPPQPVLPPQPALPVRPEPLQPHLPEQAAPAATPGSQILLGHPAPYAVDVAAQVPTVPVPPAAVLSPPLPEVLLPAAPELLPQFPSSLATVSASVQSVPTQTATLLPPANPPLPGGPGIASPCPTVQLTVEPVQEEQASQDKPPGLPQSCESYGGSDVTSGKELSDSCEGAFGGGRLEGRAARKHHRRSTRARSRQERASRPRLTILNVCNTGDKMVECQLETHNHKMVTFKFDLDGDAPDEIATYMVEHDFILQAERETFIEQMKDVMDKAEDMLSEDTDADRGSDPGTSPPHLSTCGLGTGEESRQSQANAPVYQQNVLHTGKRWFIICPVAEHPAPEAPESSPPLPLSSLPPEASQDSAPYKDQLSSKEQPSFLASQQLLSQAGPSNPPGAPPAPLAPSSPPVTALPQDGAAPATSTMPEPASGTASQAGGPGTPQGLTSELETSQPLAETHEAPLAVQPLVVGLAPCTPAPEAASTRDASAPREPLPPPAPEPSPHSGTPQPALGQPAPLLPAAVGAVSLATSQLPSPPLGPTVPPQPPSALESDGEGPPPRVGFVDSTIKSLDEKLRTLLYQEHVPTSSASAGTPVEVGDRDFTLEPLRGDQPRSEVCGGDLALPPVPKEAVSGRVQLPQPLVEKSELAPTRGAVMEQGTSSSMTESSPRSMLGYDRDGRQVASDSHVVPSVPQDVPAFVRPARVEPTDRDGGEAGESSAEPPPSDMGTVGGQASHPQTLGARALGSPRKRPEQQDVSSPAKTVGRFSVVSTQDEWTLASPHSLRYSAPPDVYLDEAPSSPDVKLAVRRAQTASSIEVGVGEPVSSDSGDEGPRARPPVQKQASLPVSGSVAGDFVKKATAFLQRPSRAGSLGPETPSRVGMKVPTISVTSFHSQSSYISSDNDSELEDADIKKELQSLREKHLKEISELQSQQKQEIEALYRRLGKPLPPNVGFFHTAPPTGRRRKTSKSKLKAGKLLNPLVRQLKVVASSTGHLADSSRGPPAKDPAQASVGLTADSTGLSGKAVQTQQPCSVRASLSSDICSGLASDGGGARGQGSSTSSLAPGPEPGPQPALHVQAQVNNSNNKKGTFTDDLHKLVDEWTSKTVGAAQLKPTLNQLKQTQKLQDMEAQAGWAAPGEARAMTAPRAGVGMPRLPPAPGPLSTTVIPGAAPTLSVPTPDPESEKPD

SEQ ID NO: 870702 - protein, 1263 aa, Homo sapiens
RTIVPNAPATIPLLAVAPPGVAALSIHSAVAQLPGQPVYPAAFPQMAPTDVPPSPHHTVQNMRATPPQPALPPQPTLPPQPVLPPQPTLPPQPVLPPQPTRPPQPVLPPQPMLPPQPVLPPQPALPVRPEPLQPHLPEQAAPAATPGSQILLGHPAPYAVDVAAQVPTVPVPPAAVLSPPLPEVLLPAAPELLPQFPSSLATVSASVQSVPTQTATLLPPANPPLPGGPGIASPCPTVQLTVEPVQEEQASQDKPPGLPQSCESYGGSDVTSGKELSDSCEGAFGGGRLEGRAARKHHRRSTRARSRQERASRPRLTILNVCNTGDKMVECQLETHNHKMVTFKFDLDGDAPDEIATYMVEHDFILQAERETFIEQMKDVMDKAEDMLSEDTDADRGSDPGTSPPHLSTCGLGTGEESRQSQANAPVYQQNVLHTGKRWFIICPVAEHPAPEAPESSPPLPLSSLPPEASQDSAPYKDQLSSKEQPSFLASQQLLSQAGPSNPPGAPPAPLAPSSPPVTALPQDGAAPATSTMPEPASGTASQAGGPGTPQGLTSELETSQPLAETHEAPLAVQPLVVGLAPCTPAPEAASTRDASAPREPLPPPAPEPSPHSGTPQPALGQPAPLLPAAVGAVSLATSQLPSPPLGPTVPPQPPSALESDGEGPPPRVGFVDSTIKSLDEKLRTLLYQEHVPTSSASAGTPVEVGDRDFTLEPLRGDQPRSEVCGGDLALPPVPKEAVSGRVQLPQPLVEKSELAPTRGAVMEQGTSSSMTESSPRSMLGYDRDGRQVASDSHVVPSVPQDVPAFVRPARVEPTDRDGGEAGESSAEPPPSDMGTVGGQASHPQTLGARALGSPRKRPEQQDVSSPAKTVGRFSVVSTQDEWTLASPHSLRYSAPPDVYLDEAPSSPDVKLAVRRAQTASSIEVGVGEPVSSDSGDEGPRARPPVQKQASLPVSGSVAGDFVKKATAFLQRPSRAGSLGPETPSRVGMKVPTISVTSFHSQSSYISSDNDSELEDADIKKELQSLREKHLKEISELQSQQKQEIEALYRRLGKPLPPNVGFFHTAPPTGRRRKTSKSKLKAGKLLNPLVRQLKVVASSTGHLADSSRGPPAKDPAQASVGLTADSTGLSGKAVQTQQPCSVRASLSSDICSGLASDGGGARGQGSSTSSLAPGPEPGPQPALHVQAQVNNSNNKKGTFTDDLHKLVDEWTSKTVGAAQLKPTLNQLKQTQKLQDMEAQAGWAAPGEARAPQELGLSTLQIGR

SEQ ID NO: 870703 - protein, 1199 aa, Homo sapiens
RTIVPNAPATIPLLAVAPPGVAALSIHSAVAQLPGQPVYPAAFPQMAPTDVPPSPHHTVQNMRATPPQPALPPQPTLPPQPVLPPQPTLPPQPVLPPQPTRPPQPVLPPQPMLPPQPVLPPQPALPVRPEPLQPHLPEQAAPAATPGSQILLGHPAPYAVDVAAQVPTVPVPPAAVLSPPLPEVLLPAAPELLPQFPSSLATVSASVQSVPTQTATLLPPANPPLPGGPGIASPCPTVQLTVEPVQEEQASQDKPPGLPQSCESYGGSDVTSGKELSDSCEGAFGGGRLEGRAARKHHRRSTRARSRQERASRPRLTILNVCNTGDKMVECQLETHNHKMVTFKFDLDGDAPDEIATYMVEHDFILQAERETFIEQMKDVMDKAEDMLSEDTDADRGSDPGTSPPHLSTCGLGTGEESRQSQANAPVYQQNVLHTGKRWFIICPVAEHPAPEAPESSPPLPLSSLPPEASQDSAPYKDQLSSKEQPSFLASQQLLSQAGPSNPPGAPPAPLAPSSPPVTALPQDGAAPATSTMPEPASGTASQAGGPGTPQGLTSELETSQPLAETHEAPLAVQPLVVGLAPCTPAPEAASTRDASAPREPLPPPAPEPSPHSGTPQPALGQPAPLLPAAVGAVSLATSQLPSPPLGPTVPPQPPSALESDGEGPPPRVGFVDSTIKSLDEKLRTLLYQEHVPTSSASAGTPVEVGDRDFTLEPLRGDQPRSEVCGGDLALPPVPKEAVSGRVQLPQPLVEKSELAPTRGAVMEQGTSSSMTESSPRSMLGYDRDGRQVASDSHVVPSVPQDVPAFVRPARVEPTDRDGGEAGESSAEPPPSDMGTVGGQASHPQTLGARALGSPRKRPEQQDVSSPAKTVGRFSVVSTQDEWTLASPHSLRYSAPPDVYLDEAPSSPDVKLAVRRAQTASSIEVGVGEPVSSDSGDEGPRARPPVQKQASLPVSGSVAGDFVKKATAFLQRPSRAGSLGPETPSRVGMKVPTISVTSFHSQSSYISSDNDSELEDADIKKELQSLREKHLKEISELQSQQKQEIEALYRRLGKPLPPNVGFFHTAPPTGRRRKTSKSKLKAGKLLNPLVRQLKVVASSTGHLADSSRGPPAKDPAQASVGLTADSTGLSGKAVQTQQPCSVRASLSSDICSGLASDGGGARGQGSSTSSLAPGPEPGPQPALHVQAQILRVRSLTDPA

SEQ ID NO: 870704 - protein, 61 aa, Homo sapiens
EAGVAVGVEEESQQPVLDECLFVFFPLYSFAGWTVYHPTSERVTYKSSSKPRARFLSGPVS

SEQ ID NO: 870705 - protein, 271 aa, Homo sapiens
MVLIKEFRVVLPCSVQEYQVGQLYSVAEASKNETGGGEGIEVLKNEPYEKDGEKGQYTHKIYHLKSKVPAFVRMIAPEGSLVFHEKAWNAYPYCRTIVTNEYMKDDFFIKIETWHKPDLGTLENVHGLDPNTWKTVEIVHIDIADRSQVEPADYKADEDPALFQSVKTKRGPLGPNWKKELANSPDCPQMCAYKLVTIKFKWWGLQSKVENFIQKQEKRIFTNFHRQLFCWIDKWIDLTMEDIRRMEDETQKELETMRKRGSVRGTSAADV

SEQ ID NO: 870706 - protein, 272 aa, Homo sapiens
MVLIKEFRVVLPCSVQEYQVGQLYSVAEASKNETGGGEGIEVLKNEPYEKDGEKGQYTHKIYHLKSKVPAFVRMIAPEGSLVFHEKAWNAYPYCRTIVTNEYMKDDFFIKIETWHKPDLGTLENVHGLDPNTWKTVEIVHIDIADRSQVEPADYKADEDPALFQSVKTKRGPLGPNWKKELANSPDCPQMCAYKLVTIKFKWWGLQSKVENFIQKQEKRIFTNFHRQLFCWIDKWIDLTMEDIRRMEDETQKELETLRNQGQVRGTSAASDE

SEQ ID NO: 870707 - protein, 285 aa, Homo sapiens
  misc_feature (11)..(11): Xaa can be any naturally occurring amino acid
LLQKLGRMRLXGPEMVLIKEFRVVLPCSVQEYQVGQLYSVAEASKNETGGGEGIEVLKNEPYEKDGEKGQYTHKIYHLKSKVPAFVRMIAPEGSLVFHEKAWNAYPYCRTIVTNEYMKDDFFIKIETWHKPDLGTLENVHGLDPNTWKTVEIVHIDIADRSQVEPADYKADEDPALFQSVKTKRGPLGPNWKKELANSPDCPQMCAYKLVTIKFKWWGLQSKVENFIQKQEKRIFTNFHRQLFCWIDKWIDLTMEDIRRMEDETQKELETMRKRGSVRGTSAADV

SEQ ID NO: 870708 - protein, 157 aa, Homo sapiens
MVLIKEFRVVLPCSVQEYQVGQLYSVAEASKNETGGGEGIEVLKNEPYEKDGEKGQYTHKIYHLKSKVPAFVRMIAPEGSLVFHEKAWNAYPYCRTIVTNEYMKDDFFIKIETWHKPDLGTLENVHGLDPNTWKTVEIVHIDIADRSQVEPAVSITQ

SEQ ID NO: 870709 - protein, 271 aa, Homo sapiens; identical to SEQ ID NO: 870705

SEQ ID NO: 870710 - protein, 273 aa, Homo sapiens
MGDLLMEKCRVVLPCSVQEYQVGQLYSVAEASKNETGGGEGIEVLKNEPYEKDGEKGQYTHKIYHLKSKVPAFVRMIAPEGSLVFHEKAWNAYPYCRTIVTNEYMKDDFFIKIETWHKPDLGTLENVHGLDPNTWKTVEIVHIDIADRSQVEPADYKADEDPALFQSVKTKRGPLGPNWKKELANSPDCPQMCAYKLVTIKFKWWGLQSKVENFIQKQEKRIFTNFHRQLFCWIDKWIDLTMEDIRRMEDETQKELETMRKRGSVRGTSAADV

SEQ ID NO: 870711 - protein, 271 aa, Homo sapiens; identical to SEQ ID NO: 870705

SEQ ID NO: 870712 - protein, 545 aa, Homo sapiens
MLLLHRAVVLRLQQACRLKSIPSRICIQACSTNDSFQPQRPSLTFSGDNSSTQGWRVMGTLLGLGAVLAYQDHRCRAAQESTHIYTKEEVSSHTSPETGIWVTLGSEVFDVTEFVDLHPGGPSKLMLAAGGPLEPFWALYAVHNQSHVRELLAQYKIGELNPEDKVAPTVETSDPYADDPVRHPALKVNSQRPFNAEPPPELLTENYITPNPIFFTRNHLPVPNLDPDTYRLHVVGAPGGQSLSLSLDDLHNFPRYEITVTLQCAGNRRSEMTQVKEVKGLEWRTGAISTARWAGARLCDVLAQAGHQLCETEAHVCFEGLDSDPTGTAYGASIPLARAMDPEAEVLLAYEMNGQPLPRDHGFPVRVVVPGVVGARHVKWLGRVSVQPEESYSHWQRRDYKGFSPSVDWETVDFDSAPSIQELPVQSAITEPRDGETVESGEVTIKGYAWSGGGRAVIRVDVSLDGGLTWQVAKLDGEEQRPRKAWAWRLWQLKAPVPAGQKELNIVCKAVDDGYNVQPDTVAPIWNLRGVLSNAWHRVHVYVSP

SEQ ID NO: 870713 - protein, 545 aa, Homo sapiens; identical to SEQ ID NO: 870712

SEQ ID NO: 870714 - protein, 545 aa, Homo sapiens; identical to SEQ ID NO: 870712

SEQ ID NO: 870715 - protein, 552 aa, Homo sapiens
MGERSATMLLLHRAVVLRLQQACRLKSIPSRICIQACSTNDSFQPQRPSLTFSGDNSSTQGWRVMGTLLGLGAVLAYQDHRCRAAQESTHIYTKEEVSSHTSPETGIWVTLGSEVFDVTEFVDLHPGGPSKLMLAAGGPLEPFWALYAVHNQSHVRELLAQYKIGELNPEDKVAPTVETSDPYADDPVRHPALKVNSQRPFNAEPPPELLTENYITPNPIFFTRNHLPVPNLDPDTYRLHVVGAPGGQSLSLSLDDLHNFPRYEITVTLQCAGNRRSEMTQVKEVKGLEWRTGAISTARWAGARLCDVLAQAGHQLCETEAHVCFEGLDSDPTGTAYGASIPLARAMDPEAEVLLAYEMNGQPLPRDHGFPVRVVVPGVVGARHVKWLGRVSVQPEESYSHWQRRDYKGFSPSVDWETVDFDSAPSIQELPVQSAITEPRDGETVESGEVTIKGYAWSGGGRAVIRVDVSLDGGLTWQVAKLDGEEQRPRKAWAWRLWQLKAPVPAGQKELNIVCKAVDDGYNVQPDTVAPIWNLRGVLSNAWHRVHVYVSP

SEQ ID NO: 870716 - protein, 545 aa, Homo sapiens; identical to SEQ ID NO: 870712

SEQ ID NO: 870717 - protein, 545 aa, Homo sapiens; identical to SEQ ID NO: 870712

SEQ ID NO: 870718 - protein, 355 aa, Homo sapiens
GRGVSALKGRWLLTENYITPNPIFFTRNHLPVPNLDPDTYRLHVVGAPGGQSLSLSLDDLHNFPRYEITVTLQCAGNRRSEMTQVKEVKGLEWRTGAISTARWAGARLCDVLAQAGHQLCETEAHVCFEGLDSDPTGTAYGASIPLARAMDPEAEVLLAYEMNGQPLPRDHGFPVRVVVPGVVGARHVKWLGRVSVQPEESYSHWQRRDYKGFSPSVDWETVDFDSAPSIQELPVQSAITEPRDGETVESGEVTIKGYAWSGGGRAVIRVDVSLDGGLTWQVAKLDGEEQRPRKAWAWRLWQLKAPVPAGQKELNIVCKAVDDGYNVQPDTVAPIWNLRGVLSNAWHRVHVYVSP

SEQ ID NO: 870719 - protein, 129 aa, Homo sapiens
MKILVALAVFFLVSTQLFAEEIGANDDLNYWSDWYDSDQIKEELPEPFEHLLQRIARRPKPQQFFGLMGKRDADSSIEKQVALLKALYGHGQISHKRHKTDSFVGLMGKRALNSVAYERSAMQNYERRR

SEQ ID NO: 870720 - protein, 111 aa, Homo sapiens
MKILVALAVFFLVSTQLFAEEIGANDDLNYWSDWYDSDQIKEELPEPFEHLLQRIARRPKPQQFFGLMGKRDADSSIEKQVALLKALYGHGQISHKMAYERSAMQNYERRR

SEQ ID NO: 870721 - protein, 114 aa, Homo sapiens
MKILVALAVFFLVSTQLFAEEIGANDDLNYWSDWYDSDQIKEELPEPFEHLLQRIARRPKPQQFFGLMGKRDAGHGQISHKRHKTDSFVGLMGKRALNSVAYERSAMQNYERRR

SEQ ID NO: 870722 - protein, 197 aa, Homo sapiens
SGGPDVMGIDELPSRKLSITQAKGEEAAELNIEQKVAWGECHVGLEAQGGWDKYRKALSRRKSALGPPSRRQLPRVRSDQRALGGTRETQHPAGLSVAKSNMKILVALAVFFLVSTQLFAEEIGANDDLNYWSDWYDSDQIKEELPEPFEHLLQRIARRPKPQQFFGLMGKRDAGHGQISHKMAYERSAMQNYERRR

SEQ ID NO: 870723 - protein, 217 aa, Homo sapiens
MREGRRQRHAREPAGDITVGGNTSTATTRRATKQKERHEGGHEGEGTTRGTEGRRAEEKRTSERDEVGDAGDEESGAEPGRGRREGGTRGTNMHARGRPKGRTKKKKRKNKRDTEGGSRKEEKEGKEELNGEAKGGADTEGDKRQEQETDHKKERRKGANEERARGQEETQAREEEEGAERRERRRRDEGKKTKNGRGKGKTEKQQQTTRDEARGAS

SEQ ID NO: 870724 - protein, 142 aa, Homo sapiens
TLSKRQPHPAGRATPLPHPTAASRLSAPRGTQGDRARCVTLGSQPTHLEAPMCHLTQERAAEAASRTAAPSPHPQDPEILLHGLQEVGGPGFGAEAGGVGGETAETPETPPSQGFSLVSQPQPSSCCSLACCGCKHFAEETA

SEQ ID NO: 870725 - protein, 140 aa, Homo sapiens
WDWLLIHQCLVVQENRNVCGSVPKEADTCNFRKYDLARRKYLHLKLFQNLKRIYRKMGKRHERPPHIKSNTSVLIVKLDARSYPRSNECSTGPAAQQDGRSRRRGCCSGLLRVWEKGAVCILCGPELGWVFEGSLEIQPL

SEQ ID NO: 870726 - protein, 112 aa, Homo sapiens
PIYDPALGGSPLTGNPTKRNLGCIISGFLPGLLEVAGWQPPDPVVFGVGRGRSPHLGCLTIWVKPAQKCMLGLPLLAKKAGPFLLSPGVSPPGRCWRSPWASLCCPDWEGVP

SEQ ID NO: 870727 - protein, 114 aa, Homo sapiens
GTTRGRHTCSSISPLLPPPAGIYRYSHAEGGSVMPRTLTLVLKGPGKASGIPRHIKVELFTTRGGLVFQHPSEYHTSPPALLELIRKKNRSLLQTGSLPESLCGLPSGQHLGLI

SEQ ID NO: 870728 - protein, 538 aa, Homo sapiens
MFFLYTDFFLSLVAVPAAAPVCQPKSATNGQPPAPAPTPTPRLSISSRATVVARMEGTSQGGLQTVMKWKTVVAIFVVVVVYLVTGGLVFRALEQPFESSQKNTIALEKAEFLRDHVCVSPQELETLIQHALDADNAGVSPIGNSSNNSSHWDLGSAFFFAGTVITTIGYGNIAPSTEGGKIFCILYAIFGIPLFGFLLAGIGDQLGTIFGKSIARVEKVFRKKQVSQTKIRVISTILFILAGCIVFVTIPAVIFKYIEGWTALESIYFVVVTLTTVGFGDFVAGGNAGINYREWYKPLVWFWILVGLAYFAAVLSMIGDWLRVLSKKTKEEVGEIKAHAAEWKANVTAEFRETRRRLSVEIHDKLQRAATIRSMERRRLGLDQRAHSLDMLSPEKRSVFAALDTGRFKASSQESINNRPNNLRLKGPEQLNKHGQGASEDNIINKFGSTSRLTKRKNKDLKKTLPEDVQKIYKTFRNYSLDEEKKEEETEKMCNSDNSSTAMLTDCIQQHAELENGMIPTDTKDREPENNSLLEDRN

SEQ ID NO: 870729 - protein, 490 aa, Homo sapiens
MGPVMPPSKKPESSGISVSSGLSQCYGGSGFSKALQEDDDLDFSLPDIRLEEGAMEDEELTNLNWLHESKNLLKSFGESVLRSVSPVQDLDDDTPPSPAHSDMPYDARQNPNCKPPYSFSCLIFMAIEDSPTKRLPVKDIYNWILEHFPYFANAPTGWKNSVRHNLSLNKCFKKVDKERSQSIGKGSLWCIDPEYRQNLIQALKKTPYHPHPHVFNTPPTCPQAYQSTSGPPIWPGSTFFKRNGALLQDPDIDAASAMMLLNTPPEIQAGFPPGVIQNGARVLSRGLFPGVRPLPITPIGVTAAMRNGITSCRMRTESEPSCGSPVVSGDPKEDHNYSSAKSSNARSTSPTSDSISSSSSSADDHYEFATKGSQEGSEGSEGSFRSHESPSDTEEDDRKHSQKEPKDSLGDSGYASQHKKRQHFAKARKVPSDTLPLKKRRTEKPPESDDEEMKEAAGSLLHLAGIRSCLNNITNRTAKGQKEQKETTKN

SEQ ID NO: 870730 - protein, 490 aa, Homo sapiens; identical to SEQ ID NO: 870729

SEQ ID NO: 870731 - protein, 518 aa, Homo sapiens
MPPSKKPESSGISVSSGLSQCYGGSGFSKALQEDDDLDFSLPDIRLEEGAMEDEELTNLNWLHESKNLLKSFGESVLRSVSPVQDLDDDTPPSPAHSDMPYDARQNPNCKPPYSFSCLIFMAIEDSPTKRLPVKDIYNWILEHFPYFANAPTGWKNSVRHNLSLNKCFKKVDKERSQSIGKGSLWCIDPEYRQNLIQALKKTPYHPHPHVFNTPPTCPQAYQREGVTKSLVLEEQKRKAGRSEMKLELLMRVSLCTSGPPIWPGSTFFKRNGALLQDPDIDAASAMMLLNTPPEIQAGFPPGVIQNGARVLSRGLFPGVRPLPITPIGVTAAMRNGITSCRMRTESEPSCGSPVVSGDPKEDHNYSSAKSSNARSTSPTSDSISSSSSSADDHYEFATKGSQEGSEGSEGSFRSHESPSDTEEDDRKHSQKEPKDSLGDSGYASQHKKRQHFAKARKVPSDTLPLKKRRTEKPPESDDEEMKEAAGSLLHLAGIRSCLNNITNRTAKGQKEQKETTKN

SEQ ID NO: 870732 - protein, 468 aa, Homo sapiens
MGPVMPPSKKPESSGISVSSGLSQCYGGSGFSKALQEDDDLDFSLPDIRLEEGAMEDEELTNLNWLHESKNLLKSFGESVLRSVSPVQDLDDDTPPSPAHSDMPYDARQNPNCKPPYSFSCLIFMAIEDSPTKRLPVKDIYNWILEHFPYFANAPTGWKNSVRHNLSLNKCFKKVDKERSQSIGKGSLWCIDPEYRQNLIQALKKTPYHPHPHVFNTPPTCPQAYQSTSGPPIWPGSTFFKRNGALLQVPPGVIQNGARVLSRGLFPGVRPLPITPIGVTAAMRNGITSCRMRTESEPSCGSPVVSGDPKEDHNYSSAKSSNARSTSPTSDSISSSSSSADDHYEFATKGSQEGSEGSEGSFRSHESPSDTEEDDRKHSQKEPKDSLGDSGYASQHKKRQHFAKARKVPSDTLPLKKRRTEKPPESDDEEMKEAAGSLLHLAGIRSCLNNITNRTAKGQKEQKETTKN

SEQ ID NO: 870733 - protein, 468 aa, Homo sapiens; identical to SEQ ID NO: 870732

SEQ ID NO: 870734 - protein, 468 aa, Homo sapiens; identical to SEQ ID NO: 870732

SEQ ID NO: 870735 - protein, 332 aa, Homo sapiens
MLGFSSLNRGHFPYFANAPTGWKNSVRHNLSLNKCFKKVDKERSQSIGKGSLWCIDPEYRQNLIQALKKTPYHPHPHVFNTPPTCPQAYQSTSGPPIWPGSTFFKRNGALLQVPPGVIQNGARVLSRGLFPGVRPLPITPIGVTAAMRNGITSCRMRTESEPSCGSPVVSGDPKEDHNYSSAKSSNARSTSPTSDSISSSSSSADDHYEFATKGSQEGSEGSEGSFRSHESPSDTEEDDRKHSQKEPKDSLGDSGYASQHKKRQHFAKARKVPSDTLPLKKRRTEKPPESDDEEMKEAAGSLLHLAGIRSCLNNITNRTAKGQKEQKETTKN

SEQ ID NO: 870736 - protein, 233 aa, Homo sapiens [sequence omitted]

SEQ ID NO: 870737 - protein, 370 aa, Homo sapiens
MGPVMPPSKKPESSGISVSSGLSQCYGGSGFSKALQEDDDLDFSLPDIRLEEGAMEDEELTNLNWLHESKNLLKSFGESVLRSVSPVQDLDDDTPPSPAHSDMPYDARQNPNCKPPYSFSCLIFMAIEDSPTKRLPVKDIYNWILEHFPYFANAPTGWKNSVRHNLSLNKCFKKVDKERSQSIGKGSLWCIDPEYRQNLIQALKKTPYHPHPHVFNTPPTCPQAYQSTSGPPIWPGSTFFKRNGALLQDPDIDAASAMMLLNTPPEIQAGFPPGVIQNGARVLSRGLFPGVRPLPITPIGVTAAMRQSVYTMIHLCDSSSQTYIVPELSATSIFLHLPLLGERRNSSVESIIIQRTCRNLSQQHKLQDQA

SEQ ID NO: 870738 - protein, 250 aa, Homo sapiens
MGPVMPPSKKPESSGISVSSGLSQCYGGSGFSKALQEDDDLDFSLPDIRLEEGAMEDEELTNLNWLHESKNLLKSFGESVLRSVSPVQDLDDDTPPSPAHSDMPYDARQNPNCKPPYSFSCLIFMAIEDSPTKRLPVKDIYNWILEHFPYFANAPTGWKNSVRHNLSLNKCFKKVDKERSQSIGKGSLWCIDPEYRQNLIQALKKTPYHPHPHVFNTPPTCPQAYQSTSGPPIWPGSTFFKRNGALLQEK

SEQ ID NO: 870739 - protein, 242 aa, Homo sapiens
MGPVMPPSKKPESSGISVSSGLSQCYGGSGFSKALQEDDDLDFSLPDIRLEEGAMEDEELTNLNWLHESKNLLKSFGESVLRSVSPVQDLDDDTPPSPAHSDMPYDARQNPNCKPPYSFSCLIFMAIEDSPTKRLPVKDIYNWILEHFPYFANAPTGWKNSVRHNLSLNKCFKKVDKERSQSIGKGSLWCIDPEYRQNLIQALKKTPHQVHPSGRAVPSSREMEPFSKMESYSCCPGWNAMA

SEQ ID NO: 870740 - protein, 468 aa, Homo sapiens; identical to SEQ ID NO: 870732

SEQ ID NO: 870741 - protein, 539 aa, Homo sapiens
MGPVMPPSKKPESSGISVSSGLSQCYGGSGFSKALQEDDDLDFSLPDIRLEEGAMEDEELTNLNWLHESKNLLKSFGESVLRSVSPVQDLDDDTPPSPAHSDMPYDARQNPNCKPPYSFSCLIFMAIEDSPTKRLPVKDIYNWILEHFPYFANAPTGWKNSVRHNLSLNKCFKKVDKERSQSIGKGSLWCIDPEYRQNLIQALKKTPYHPHPHVFNTPPTCPQAYQRDGVSPSWPGWSGTPDLVIHLPRLPKCWDYRREATEPGLVLNQITFPPTSTSGPPIWPGSTFFKRNGALLQDPDIDAASAMMLLNTPPEIQAGFPPGVIQNGARVLSRGLFPGVRPLPITPIGVTAAMRNGITSCRMRTESEPSCGSPVVSGDPKEDHNYSSAKSSNARSTSPTSDSISSSSSSADDHYEFATKGSQEGSEGSEGSFRSHESPSDTEEDDRKHSQKEPKDSLGDSGYASQHKKRQHFAKARKVPSDTLPLKKRRTEKPPESDDEEMKEAAGSLLHLAGIRSCLNNITNRTAKGQKEQKETTKN

SEQ ID NO: 870742 - protein, 468 aa, Homo sapiens; identical to SEQ ID NO: 870732

SEQ ID NO: 870743 - protein, 366 aa, Homo sapiens
MPYDARQNPNCKPPYSFSCLIFMAIEDSPTKRLPVKDIYNWILEHFPYFANAPTGWKNSVRHNLSLNKCFKKVDKERSQSIGKGSLWCIDPEYRQNLIQALKKTPYHPHPHVFNTPPTCPQAYQSTSGPPIWPGSTFFKRNGALLQVPPGVIQNGARVLSRGLFPGVRPLPITPIGVTAAMRNGITSCRMRTESEPSCGSPVVSGDPKEDHNYSSAKSSNARSTSPTSDSISSSSSSADDHYEFATKGSQEGSEGSEGSFRSHESPSDTEEDDRKHSQKEPKDSLGDSGYASQHKKRQHFAKARKVPSDTLPLKKRRTEKPPESDDEEMKEAAGSLLHLAGIRSCLNNITNRTAKGQKEQKETTKN

SEQ ID NO: 870744 - protein, 341 aa, Homo sapiens
SHVSADSNRGYSRGGRKVPNLQESRYREPGTESIGKGSLWCIDPEYRQNLIQALKKTPYHPHPHVFNTPPTCPQAYQSTSGPPIWPGSTFFKRNGALLQDPDIDAASAMMLLNTPPEIQAGFPPGVIQNGARVLSRGLFPGVRPLPITPIGVTAAMRNGITSCRMRTESEPSCGSPVVSGDPKEDHNYSSAKSSNARSTSPTSDSISSSSSSADDHYEFATKGSQEGSEGSEGSFRSHESPSDTEEDDRKHSQKEPKDSLGDSGYASQHKKRQHFAKARKVPSDTLPLKKRRTEKPPESDDEEMKEAAGSLLHLAGIRSCLNNITNRTAKGQKEQKETTKN

SEQ ID NO: 870745 - protein, 186 aa, Homo sapiens [sequence omitted]

SEQ ID NO: 870746 - protein, 286 aa, Homo sapiens
MGPVMPPSKKPESSGISVSSGLSQCYGGSGFSKALQEDDDLDFSLPDIRLEEGAMEDEELTNLNWLHESKNLLKSFGESVLRSVSPVQDLDDDTPPSPAHSDMPYDARQNPNCKPPYSFSCLIFMAIEDSPTKRLPVKDIYNWILEHFPYFANAPTGWKNSVRHNLSLNKCFKKVDKERSQSIGKGSLWCIDPEYRQNLIQALKKTPYHPHPHVFNTPPTCPQAYQSTSGPPIWPGSTFFKRNGALLQDGVLLLLPRLECNGVISAHCNLYSILGSSKILLPQPPK

SEQ ID NO: 870747 - protein, 289 aa, Homo sapiens
LGSNSADAGLWQAEGAILTHFTLCRKLQFGGRKAISRFQSGRHFPVGESAKGRGQFQEEGKACAQCTSFIPEARAVLDLVDQCPKQIQKGKFQVVAIEGLDATGKTTVTQSVADSLKAVLLKSPPSCIGQWRKIFDDEPTIIRRAFYSLGNYIVASEIAKESAKSPVIVDRYWHSTATYAIATEVSGGLQHLPPAHHPVYQWPEDLLKPDLILLLTVSPEERLQRLQGRGMEKTREEAELEANSVFRQKVEMSYQRMENPGCHVVDASPSREKVLQTVLSLIQNSFSEP

SEQ ID NO: 870748 - protein, 289 aa, Homo sapiens; identical to SEQ ID NO: 870747

SEQ ID NO: 870749 - protein, 449 aa, Homo sapiens
MAFARRLLRGPLSGPLLGRRGVCAGAMAPPRRFVLELPDCTLAHFALGADAPGDADAPDPRLAALLGPPERSYSLCVPVTPDAGCGARVRAARLHQRLLHQLRRGPFQRCQLLRLLCYCPGGQAGGAQQGFLLRDPLDDPDTRQALLELLGACQEAPRPHLGEFEADPRGQLWQRLWEVQDGRRLQVGCAQVVPVPEPPLHPVVPDLPSSVVFPDREAARAVLEECTSFIPEARAVLDLVDQCPKQIQKGKFQVVAIEGLDATGKTTVTQSVADSLKAVLLKSPPSCIGQWRKIFDDEPTIIRRAFYSLGNYIVASEIAKESAKSPVIVDRYWHSTATYAIATEVSGGLQHLPPAHHPVYQWPEDLLKPDLILLLTVSPEERLQRLQGRGMEKTREEAELEANSVFRQKVEMSYQRMENPGCHVVDASPSREKVLQTVLSLIQNSFSEP

SEQ ID NO: 870750 - protein, 160 aa, Homo sapiens
MVPKLFTSQICLLLLLGLMGVEGSLHARPPQFTRAQWFAIQHISLNPPRCTIAMRAINNYRWRCKNQNTFLRTTFANVVNVCGNQSIRCPHNRTLNNCHRSRFRVPLLHCDLINPGAQNISNCTYADRPGRRFYVVACDNRDPRDSPRYPVVPVHLDTTI

SEQ ID NO: 870751 - protein, 354 aa, Homo sapiens [sequence omitted]

SEQ ID NO: 870752 - protein, 333 aa, Homo sapiens
MNTTVMQGFNRSERCPRDTRIVQLVFPALYTVVFLTGILLNTLALWVFVHIPSSSTFIIYLKNTLVADLIMTLMLPFKILSDSHLAPWQLRAFVCRFSSVIFYETMYVGIVLLGLIAFDRFLKIIRPLRNIFLKKPVFAKTVSIFIWFFLFFISLPNMILSNKEATPSSVKKCASLKGPLGLKWHQMVNNICQFIFWTVFILMLVFYVVIAKKVYDSYRKSKSKDRKNNKKLEGKVFVVVAVFFVCFAPFHFARVPYTHSQTNNKTDCRLQNQLFIAKETTLFLAATNICMDPLIYIFLCKKFTEKLPCMQGRKTTASSQENHSSQTDNITLG

SEQ ID NO: 870753 - protein, 228 aa, Homo sapiens
MILVSQSCGLEGNLPSHYRLGSPDVASRRAPLGLACASPSFPPAESSRIFPPRLGFPLRGVRAPADCACAGPSRSRAFLCFSGLRAMAVTEASLLRQCPLLLPQNRSKTVYEGFISAQGRDFHLRIVLPEDLQLKNARLLCSWQLRTILSGYHRIVQQRMQHSPDLMSFMMELKMLLEVALKNRQELYALPPPPQFYSSLIEEIGTLGWDKDKVLLYCPGESHTPGLK

SEQ ID NO: 870754 - protein, 171 aa, Homo sapiens
IPATAQVALEIPRDTYGRDFHLRIVLPEDLQLKNARLLCSWQLRTILSGYHRIVQQRMQHSPDLMSFMMELKMLLEVALKNRQELYALPPPPQFYSSLIEEIGTLGWDKLVYADTCFSTIKLKAEDASGREHLITLKLKAKYPAESPDYFVDFPVPFCASWTPQEETSTLG

SEQ ID NO: 870755 - protein, 350 aa, Homo sapiens
MILVSQSCGLEGNLPSHYRLGSPDVASRRAPLGLACASPSFPPAESSRIFPPRLGFPLRGVRAPADCACAGPSRSRAFLCFSGLRAMAVTEASLLRQCPLLLPQNRSKTVYEGFISAQGRDFHLRIVLPEDLQLKNARLLCSWQLRTILSGYHRIVQQRMQHSPDLMSFMMELKMLLEVALKNRQELYALPPPPQFYSSLIEEIGTLGWDKLVYADTCFSTIKLKAEDASGREHLITLKLKAKYPAESPDYFVDFPVPFCASWTPQSSLISIYSQFLAAIESLKAFWDVMDEIDEKTWVLEPEKPPRSATARRIALGNNVSINIEVDPRHPTMLPECFFLGADHGMTSEI

SEQ ID NO: 870756 - protein, 350 aa, Homo sapiens; identical to SEQ ID NO: 870755

SEQ ID NO: 870757 - protein, 331 aa, Homo sapiens
MILVSQSCGLEGNLPSHYRLGSPDVASRRAPLGLACASPSFPPAESSRIFPPRLGFPLRGVRAPADCACAGPSRSRAFLCFSGLRAMAVTEASLLRQCPLLLPQNRSKTVYEGFISAQGRDFHLRIVLPEDLQLKNARLLCSWQLRTILSGYHRIVQQEVALKNRQELYALPPPPQFYSSLIEEIGTLGWDKLVYADTCFSTIKLKAEDASGREHLITLKLKAKYPAESPDYFVDFPVPFCASWTPQSSLISIYSQFLAAIESLKAFWDVMDEIDEKTWVLEPEKPPRSATARRIALGNNVSINIEVDPRHPTMLPECFFLGADHGMTSEI

SEQ ID NO: 870758 - protein, 350 aa, Homo sapiens; identical to SEQ ID NO: 870755

SEQ ID NO: 870759 - protein, 350 aa, Homo sapiens; identical to SEQ ID NO: 870755

SEQ ID NO: 870760 - protein, 350 aa, Homo sapiens; identical to SEQ ID NO: 870755

SEQ ID NO: 870761 - protein, 273 aa, Homo sapiens
MILVSQSCGLEGNLPSHYRLGSPDVASRRAPLGLACASPSFPPAESSRIFPPRLGFPLRGVRAPADCACAGPSRSRAFLCFSGLRAMAVTEASLLRQCPLLLPQNRSKTVYEGFISAQGRDFHLRIVLPEDLQLKNARLLCSWQLRTILSGYHRIVQQRMQHSPDLMSFMMELKMLLEVALKNRQELYALPPPPQFYSSLIEEIGTLGWDKLVYADTCFSTIKLKAEDASGREHLITLKLKAKYPAESPDYFVDFPVPFCASWTPQEETSTLG

SEQ ID NO: 870762 - protein, 242 aa, Homo sapiens
MILVSQSCGLEGNLPSHYRLGSPDVASRRAPLGLACASPSFPPAESSRIFPPRLGFPLRGVRAPADCACAGPSRSRAFLCFSGLRAMAVTEASLLRQCPLLLPQNRSKTVYEGFISAQGRDFHLRIVLPEDLQLKNARLLCSWQLRTILSGYHRIVQQRMQHSPDLMSFMMELKMLLEVALKNRQELYALPPPPQFYSSLIEEIGTLGWDNFKIFFLLAATRNWKRQGIDSLLEPPEGAHLC

SEQ ID NO: 870763 - protein, 461 aa, Homo sapiens
MILVSQSCGLEGNLPSHYRLGSPDVASRRAPLGLACASPSFPPAESSRIFPPRLGFPLRGVRAPADCACAGPSRSRAFLCFSGLRAMAVTEASLLRQCPLLLPQNRSKTVYEGFISAQGRDFHLRIVLPEDLQLKNARLLCSWQLRTILSGYHRIVQQRMQHSPDLMSFMMELKMLLEVALKNRQELYALPPPPQFYSSLIEEIGTLGWDKLVYADTCFSTIKLKAEDASGREHLITLKLKAKYPAESPDYFVDFPVPFCASWTPQSSLISIYSQFLAAIESLKAFWDVMDEIDEKTWVLEPEKPPRSATARRIALGNNVSINIEVDPRHPTMLPECFFLGADHVVKPLGIKLSRNIHLWDPENSVLQNLKDVLEIDFPARAILEKSDFTMDCGICYAYQLDGTIPDQVCDNSQCGQPFHQICLYEWLRGLLTSRQSFNIIFGECPYCSKPITLKMSGRKH

SEQ ID NO: 870764 - protein, 350 aa, Homo sapiens; identical to SEQ ID NO: 870755

SEQ ID NO: 870765 - protein, 291 aa, Homo sapiens
MILVSQSCGLEGNLPSHYRLGSPDVASRRAPLGLACASPSFPPAESSRIFPPRLGFPLRGVRAPADCACAGPSRSRAFLCFSGLRAMAVTEASLLRQCPLLLPQNRSKTVYEGFISAQEVALKNRQELYALPPPPQFYSSLIEEIGTLGWDKLVYADTCFSTIKLKAEDASGREHLITLKLKAKYPAESPDYFVDFPVPFCASWTPQSSLISIYSQFLAAIESLKAFWDVMDEIDEKTWVLEPEKPPRSATARRIALGNNVSINIEVDPRHPTMLPECFFLGADHGMTSEI

SEQ ID NO: 870766 - protein, 350 aa, Homo sapiens; identical to SEQ ID NO: 870755

SEQ ID NO: 870767 - protein, 313 aa, Homo sapiens
MILVSQSCGLEGNLPSHYRLGSPDVASRRAPLGLACASPSFPPAESSRIFPPRLGFPLRGVRAPADCACAGPSRSRAFLCFSGLRAMAVTEASLLRQCPLLLPQNRSKTVYEGFISAQSSLISIYSQFLAAIESLKAFWDVMDEIDEKTWVLEPEKPPRSATARRIALGNNVSINIEVDPRHPTMLPECFFLGADHVVKPLGIKLSRNIHLWDPENSVLQNLKDVLEIDFPARAILEKSDFTMDCGICYAYQLDGTIPDQVCDNSQCGQPFHQICLYEWLRGLLTSRQSFNIIFGECPYCSKPITLKMSGRKH

SEQ ID NO: 870768 - protein, 402 aa, Homo sapiens
TSALKARTPASVRAQCPPGGFGSAGGSRPRLLDTKVPHLLPFCSLSCLFCLTTAIMPRGQKSKLRAREKRRKAREETQGLKVAHATAAEKEECPSSSPVLGDTPTSSPAAGIPQKPQGAPPTTTAAAAVSCTESDEGAKCQGEENASFSQATTSTESSVKDPVAWEAGMLMHFILRKYKMREPIMKADMLKVVDEKYKDHFTEILNGASRRLELVFGLDLKEDNPSGHTYTLVSKLNLTNDGNLSNDWDFPRNGLLMPLLGVIFLKGNSATEEEIWKFMNVLGAYDGEEHLIYGEPRKFITQDLVQEKYLKYEQVPNSDPPRYQFLWGPRAYAETTKMKVLEFLAKMNGATPRDFPSHYEEALRDEEERAQVRSSVRARRRTTATTFRARSRAPFSRSSHPM

SEQ ID NO: 870769 - protein, 375 aa, Homo sapiens
LRISFALLQEPHHLPFCLHSCLLCLTTAIMPRGQKSKLRAREKRQRTRGQTQDLKVGQPTAAEKEESPSSSSSVLRDTASSSLAFGIPQEPQREPPTTSAAAAMSCTGSDKGDESQDEENASSSQASTSTERSLKDSLTRKTKMLVQFLLYKYKMKEPTTKAEMLKIISKKYKEHFPEIFRKVSQRTELVFGLALKEVNPTTHSYILVSMLGPNDGNQSSAWTLPRNGLLMPLLSVIFLNGNCAREEEIWEFLNMLGIYDGKRHLIFGEPRKLITQDLVQEKYLEYQQVPNSDPPRYQFLWGPRAHAETSKMKVLEFLAKVNDTTPNNFPLLYEEALRDEEERAGARPRVAARRGTTAMTSAYSRATSSSSSQPM

SEQ ID NO: 870770 - protein, 375 aa, Homo sapiens; identical to SEQ ID NO: 870769

SEQ ID NO: 870771 - protein, 375 aa, Homo sapiens; identical to SEQ ID NO: 870769

SEQ ID NO: 870772 - protein, 1352 aa, Homo sapiens
MAEARKRRELLPLIYHHLLRAGYVRAAREVKEQSGQKCFLAQPVTLLDIYTHWQQTSELGRKRKAEEDAALQAKKTRVSDPISTSESSEEEEEAEAETAKATPRLASTNSSVLGADLPSSMKEKAKAETEKAGKTGNSMPHPATGKTVANLLSGKSPRKSAEPSANTTLVSETEEEGSVPAFGAAAKPGMVSAGQADSSSEDTSSSSDETDVEVKASEKILQVRAASAPAKGTPGKGATPAPPGKAGAVASQTKAGKPEEDSESSSEESSDSEEETPAAKALLQAKASGKTSQVGAASAPAKESPRKGAAPAPPGKTGPAVAKAQAGKREEDSQSSSEESDSEEEAPAQAKPSGKAPQVRAASAPAKESPRKGAAPAPPRKTGPAAAQVQVGKQEEDSRSSSEESDSDREALAAMNAAQVKPLGKSPQVKPASTMGMGPLGKGAGPVPPGKVGPATPSAQVGKWEEDSESSSEESSDSSDGEVPTAVAPAQEKSLGNILQAKPTSSPAKGPPQKAGPVAVQVKAEKPMDNSESSEESSDSADSEEAPAAMTAAQAKPALKIPQTKACPKKTNTTASAKVAPVRVGTQAPRKAGTATSPAGSSPAVAGGTQRPAEDSSSSEESDSEEEKTGLAVTVGQAKSVGKGLQVKAASVPVKGSLGQGTAPVLPGKTGPTVTQVKAEKQEDSESSEEESDSEEAAASPAQVKTSVKKTQAKANPAAARAPSAKGTISAPGKVVTAAAQAKQRSPSKVKPPVRNPQNSTVLARGPASVPSVGKAVATAAQAQTGPEEDSGSSEEESDSEEEAETLAQVKPSGKTHQIRAALAPAKESPRKGAAPTPPGKTGPSAAQAGKQDDSGSSSEESDSDGEAPAAVTSAQVIKPPLIFVDPNRSPAGPAATPAQAQAASTPRKARASESTARSSSSESEDEDVIPATQCLTPGIRTNVVTMPTAHPRIAPKASMAGASSSKESSRISDGKKQEGPATQVSKKNPASLPLTQAALKVLAQKASEAQPPVARTQPSSGVDSAVGTLPATSPQSTSVQAKGTNKLRKPKLPEVQQATKAPESSDDSEDSSDSSSGSEEDGEGPQGAKSAHTLVGPTPSRTETLVEETAAESSEDDVVAPSQSLLSGYMTPGLTPANSQASKATPKLDSSPSVSSTLAAKDDPDGKQEAKPQQAAGMLSPKTGGKEAASGTTPQKSRKPKKGAGNPQASTLALQSNITQCLLGQPWPLNEAQVQASVVKVLTELLEQERKKVVDTTKESSRKGWESRKRKLSGDQPAARTPRSKKKKKLGAGEGGEASVSPEKTSTTSKGKAKRDKASGDVKEKKGKGSLGSQGAKDEPEEKTTEGDGDG

SEQ ID NO: 870773 - protein, 958 aa, Homo sapiens
MAEARKRRELLPLIYHHLLRAGYVRAAREVKEQSGQKCFLAQPVTLLDIYTHWQQTSELGRKRKAEEDAALQAKKTRVSDPISTSESSEEEEEAEAETAKATPRLASTNSSVLGADLPSSMKEKAKAETEKAGKTGNSMPHPATGKTVANLLSGKSPRKSAEPSANTTLVSETEEEGSVPAFGAAAKPGMVSAGQADSSSEDTSSSSDETDVEGKPSVKPAQVKASSVSTKESPARKAAPAPGKVGDVTPQVKGGALPPAKRAKKPEEESESSEEGSESEEEAPAGTRSQVKASEKILQVRAASAPAKGTPGKGATPAPPGKAGAVASQTKAGKPEEDSESSSEESSDSEEETPAAKALLQAKASGKTSQVGAASAPAKESPRKGAAPAPPGKTGPAVAKAQAGKREEDSQSSSEESDSEEEAPAQAKPSGKAPQVRAASAPAKESPRKGAAPAPPRKTGPAAAQVQVGKQEEDSRSSSEESDSDREALAAMNAAQVKPLGKSPQVKPASTMGMGPLGKGAGPVPPGKVGPATPSAQVGKWEEDSESSSEESSDSSDGEVPTAVAPAQEKSLGNILQAKPTSSPAKGPPQKAGPVAVQVKAEKPMDNSESSEESSDSADSEEAPAAMTAAQAKPALKIPQTKACPKKTNTTASAKVAPVRVGTQAPRKAGTATSPAGSSPAVAGGTQRPAEDSSSSEESDSEEEKTGLAVTVGQAKSVGKGLQVKAASVPVKGSLGQGTAPVLPGKTGPTVTQVKAEKQEDSESSEEESDSEEAAASPAQVKTSVKKTQAKANPAAARAPSAKGTISAPGKVVTAAAQAKQRSPSKVKPPVRNPQNSTVLARGPASVPSVGKAVATAAQAQTGPEEDSGSSEEESDSEEEAETLAQVKPSGKTHQIRAALAPAKESPRKGAAPTPPGKTGPSAAQAGKQDDSGSSSEESDSDGEAPAAVTSAQDQESS

SEQ ID NO: 870774 - protein, 1429 aa, Homo sapiens
MAEARKRRELLPLIYHHLLRAGYVRAAREVKEQSGQKCFLAQPVTLLDIYTHWQQTSELGRKRKAEEDAALQAKKTRVSDPISTSESSEEEEEAEAETAKATPRLASTNSSVLGADLPSSMKEKAKAETEKAGKTGNSMPHPATGKTVANLLSGKSPRKSAEPSANTTLVSETEEEGSVPAFGAAAKPGMVSAGQADSSSEDTSSSSDETDVEGKPSVKPAQVKASSVSTKESPARKAAPAPGKVGDVTPQVKGGALPPAKRAKKPEEESESSEEGSESEEEAPAGTRSQVKASEKILQVRAASAPAKGTPGKGATPAPPGKAGAVASQTKAGKPEEDSESSSEESSDSEEETPAAKALLQAKASGKTSQVGAASAPAKESPRKGAAPAPPGKTGPAVAKAQAGKREEDSQSSSEESDSEEEAPAQAKPSGKAPQVRAASAPAKESPRKGAAPAPPRKTGPAAAQVQVGKQEEDSRSSSEESDSDREALAAMNAAQVKPLGKSPQVKPASTMGMGPLGKGAGPVPPGKVGPATPSAQVGKWEEDSESSSEESSDSSDGEVPTAVAPAQEKSLGNILQAKPTSSPAKGPPQKAGPVAVQVKAEKPMDNSESSEESSDSADSEEAPAAMTAAQAKPALKIPQTKACPKKTNTTASAKVAPVRVGTQAPRKAGTATSPAGSSPAVAGGTQRPAEDSSSSEESDSEEEKTGLAVTVGQAKSVGKGLQVKAASVPVKGSLGQGTAPVLPGKTGPTVTQVKAEKQEDSESSEEESDSEEAAASPAQVKTSVKKTQAKANPAAARAPSAKGTISAPGKVVTAAAQAKQRSPSKVKPPVRNPQNSTVLARGPASVPSVGKAVATAAQAQTGPEEDSGSSEEESDSEEEAETLAQVKPSGKTHQIRAALAPAKESPRKGAAPTPPGKTGPSAAQAGKQDDSGSSSEESDSDGEAPAAVTSAQVIKPPLIFVDPNRSPAGPAATPAQAQAASTPRKARASESTARSSSSESEDEDVIPATQCLTPGIRTNVVTMPTAHPRIAPKASMAGASSSKESSRISDGKKQEGPATQVSKKNPASLPLTQAALKVLAQKASEAQPPVARTQPSSGVDSAVGTLPATSPQSTSVQAKGTNKLRKPKLPEVQQATKAPESSDDSEDSSDSSSGSEEDGEGPQGAKSAHTLVGPTPSRTETLVEETAAESSEDDVVAPSQSLLSGYMTPGLTPANSQASKATPKLDSSPSVSSTLAAKDDPDGKQEAKPQQAAGMLSPKTGGKEAASGTTPQKSRKPKKGAGNPQASTLALQSNITQCLLGQPWPLNEAQVQASVVKVLTELLEQERKKVVDTTKESSRKGWESRKRKLSGDQPAARTPRSKKKKKLGAGEGGEASVSPEKTSTTSKGKAKRDKASGDVKEKKGKGSLGSQGAKDEPEEKTTEGDGDG

SEQ ID NO: 870775 - protein, 1429 aa, Homo sapiens; identical to SEQ ID NO: 870774

SEQ ID NO: 870776 - protein, 1486 aa, Homo sapiens
MAEARKRRELLPLIYHHLLRAGYVRAAREVKEQSGQKCFLAQPVTLLDIYTHWQQTSELGRKRKAEEDAALQAKKTRVSDPISTSESSEEEEEAEAETAKATPRLASTNSSVLGADLPSSMKEKAKAETEKAGKTGNSMPHPATGKTVANLLSGKSPRKSAEPSANTTLVSETEEEGSVPAFGAAAKPGMVSAGQADSSSEDTSSSSDETDVEGKPSVKPAQVKASSVSTKESPARKAAPAPGKVGDVTPQVKGGALPPAKRAKKPEEESESSEEGSESEEEAPAGTRSQVKASEKILQVRAASAPAKGTPGKGATPAPPGKAGAVASQTKAGKPEEDSESSSEESSDSEEETPAAKALLQAKASGKTSQVGAASAPAKESPRKGAAPAPPGKTGPAVAKAQAGKREEDSQSSSEESDSEEEAPAQAKPSGKAPQVRAASAPAKESPRKGAAPAPPRKTGPAAAQVQVGKQEEDSRSSSEESDSDREALAAMNAAQVKPLGKSPQVKPASTMGMGPLGKGAGPVPPGKVGPATPSAQVGKWEEDSESSSEESSDSSDGEVPTAVAPAQEKSLGNILQAKPTSSPAKGPPQKAGPVAVQVKAEKPMDNSESSEESSDSADSEEAPAAMTAAQVRPGEGGCYMACLPHHSQHPRGAVLPQAEHGFWLVGQNRWGTLSSGTFSSLSLVSPQAKPALKIPQTKACPKKTNTTASAKVAPVRVGTQAPRKAGTATSPAGSSPAVAGGTQRPAEDSSSSEESDSEEEKTGLAVTVGQAKSVGKGLQVKAASVPVKGSLGQGTAPVLPGKTGPTVTQVKAEKQEDSESSEEESDSEEAAASPAQVKTSVKKTQAKANPAAARAPSAKGTISAPGKVVTAAAQAKQRSPSKVKPPVRNPQNSTVLARGPASVPSVGKAVATAAQAQTGPEEDSGSSEEESDSEEEAETLAQVKPSGKTHQIRAALAPAKESPRKGAAPTPPGKTGPSAAQAGKQDDSGSSSEESDSDGEAPAAVTSAQVIKPPLIFVDPNRSPAGPAATPAQAQAASTPRKARASESTARSSSSESEDEDVIPATQCLTPGIRTNVVTMPTAHPRIAPKASMAGASSSKESSRISDGKKQEGPATQVSKKNPASLPLTQAALKVLAQKASEAQPPVARTQPSSGVDSAVGTLPATSPQSTSVQAKGTNKLRKPKLPEVQQATKAPESSDDSEDSSDSSSGSEEDGEGPQGAKSAHTLVGPTPSRTETLVEETAAESSEDDVVAPSQSLLSGYMTPGLTPANSQASKATPKLDSSPSVSSTLAAKDDPDGKQEAKPQQAAGMLSPKTGGKEAASGTTPQKSRKPKKGAGNPQASTLALQSNITQCLLGQPWPLNEAQVQASVVKVLTELLEQERKKVVDTTKESSRKGWESRKRKLSGDQPAARTPRSKKKKKLGAGEGGEASVSPEKTSTTSKGKAKRDKASGDVKEKKGKGSLGSQGAKDEPEEKTTEGDGDG

SEQ ID NO: 870777 - protein, 991 aa, Homo sapiens
MAEARKRRELLPLIYHHLLRAGYVRAAREVKEQSGQKCFLAQPVTLLDIYTHWQQTSELGRKRKAEEDAALQAKKTRVSDPISTSESSEEEEEAEAETAKATPRLASTNSSVLGADLPSSMKEKAKAETEKAGKTGNSMPHPATGKTVANLLSGKSPRKSAEPSANTTLVSETEEEGSVPAFGAAAKPGMVSAGQADSSSEDTSSSSDETDVEGKPSVKPAQVKASSVSTKESPARKAAPAPGKVGDVTPQVKGGALPPAKRAKKPEEESESSEEGSESEEEAPAGTRSQVKASEKILQVRAASAPAKGTPGKGATPAPPGKAGAVASQTKAGKPEEDSESSSEESSDSEEETPAAKALLQAKASGKTSQVGAASAPAKESPRKGAAPAPPGKTGPAVAKAQAGKREEDSQSSSEESDSEEEAPAQAKPSGKAPQVRAASAPAKESPRKGAAPAPPRKTGPAAAQVQVGKQEEDSRSSSEESDSDREALAAMNAAQVKPLGKSPQVKPASTMGMGPLGKGAGPVPPGKVGPATPSAQVGKWEEDSESSSEESSDSSDGEVPTAVAPAQEKSLGNILQAKPTSSPAKGPPQKAGPVAVQVKAEKPMDNSESSEESSDSADSEEAPAAMTAAQAKPALKIPQTKACPKKTNTTASAKVAPVRVGTQAPRKAGTATSPAGSSPAVAGGTQRPAEDSSSSEESDSEEEKTGLAVTVGQAKSVGKGLQVKAASVPVKGSLGQGTAPVLPGKTGPTVTQVKAEKQEDSESSEEESDSEEAAASPAQVKTSVKKTQAKANPAAARAPSAKGTISAPGKVVTAAAQAKQRSPSKVKPPVRNPQNSTVLARGPASVPSVGKAVATAAQAQTGPEEDSGSSEEESDSEEEAETLAQVKPSGKTHQIRAALAPAKESPRKGAAPTPPGKTGPSAAQAGKQDDSGSSSEESDSDGEAPAAVTSAQQLAQLLHPHKPRLQAPRGRPEPRRAQPGAPPPRARMRT

SEQ ID NO: 870778 - protein, 765 aa, Homo sapiens
RCKLRRRYSGVISYEASFAVRYQRPAEDSSSSEESDSEEEKTGLAVTVGQAKSVGKGLQVKAASVPVKGSLGQGTAPVLPGKTGPTVTQVKAEKQEDSESSEEESDSEEAAASPAQVKTSVKKTQAKANPAAARAPSAKGTISAPGKVVTAAAQAKQRSPSKVKPPVRNPQNSTVLARGPASVPSVGKAVATAAQAQTGPEEDSGSSEEESDSEEEAETLAQVKPSGKTHQIRAALAPAKESPRKGAAPTPPGKTGPSAAQAGKQDDSGSSSEESDSDGEAPAAVTSAQVIKPPLIFVDPNRSPAGPAATPAQAQAASTPRKARASESTARSSSSESEDEDVIPATQCLTPGIRTNVVTMPTAHPRIAPKASMAGASSSKESSRISDGKKQEGPATQVSKKNPASLPLTQAALKVLAQKASEAQPPVARTQPSSGVDSAVGTLPATSPQSTSVQAKGTNKLRKPKLPEVQQATKAPESSDDSEDSSDSSSGSEEDGEGPQGAKSAHTLVGPTPSRTETLVEETAAESSEDDVVAPSQSLLSGYMTPGLTPANSQASKATPKLDSSPSVSSTLAAKDDPDGKQEAKPQQAAGMLSPKTGGKEAASGTTPQKSRKPKKGAGNPQASTLALQSNITQCLLGQPWPLNEAQVQASVVKVLTELLEQERKKVVDTTKESSRKGWESRKRKLSGDQPAARTPRSKKKKKLGAGEGGEASVSPEKTSTTSKGKAKRDKASGDVKEKKGKGSLGSQGAKDEPEEKTTEGDGDG

SEQ ID NO: 870779 - protein, 184 aa, Homo sapiens
MSPNSPRSVTPHSLSIGGKEAASGTTPQKSRKPKKGAGNPQASTLALQSNITQCLLGQPWPLNEAQVQASVVKVLTELLEQERKKVVDTTKESSRKGWESRKRKLSGDQPAARTPRSKKKKKLGAGEGGEASVSPEKTSTTSKGKAKRDKASGDVKEKKGKGSLGSQGAKDEPEEKTTEGDGDG

SEQ ID NO: 870780 - protein, 1376 aa, Homo sapiens
MAEARKRRELLPLIYHHLLRAGYVRAAREVKEQSGQKCFLAQPVTLLDIYTHWQQTSELGRKRKAEEDAALQAKKTRVSDPISTSESSEEEEEAEAETAKATPRLASTNSSVLGADLPSSMKEKAKAETEKAGKTGNSMPHPATGKTVANLLSGKSPRKSAEPSANTTLVSETEEEGSVPAFGAAAKPGMVSAGQADSSSEDTSSSSDETDVEGKPSVKPAQVKASSVSTKESPARKAAPAPGKVGDVTPQVKGGALPPAKRAKKPEEESESSEEGSESEEEAPAGTRSQVKASEKILQVRAASAPAKGTPGKGATPAPPGKAGAVASQTKAGKPEEDSESSSEESSDSEEETPAAKALLQAKASGKTSQVGAASAPAKESPRKGAAPAPPGKTGPAVAKAQAGKREEDSQSSSEESDSEEEAPAQAKPSGKAPQVRAASAPAKESPRKGAAPAPPRKTGPAAAQVQVGKQEEDSRSSSEESDSDREALAAMNAAQVKPLGKSPQVKPASTMGMGPLGKGAGPVPPGKVGPATPSAQVGKWEEDSESSSEESSDSSDGEVPTAVAPAQEKSLGNILQAKPTSSPAKGPPQKAGPVAVQVKAEKPMDNSESSEESSDSADSEEAPAAMTAAQAKPALKIPQTKACPKKTNTTASAKVAPVRVGTQAPRKAGTATSPAGSSPAVAGGTQRPAEDSSSSEESDSEEEKTGLAVTVGQAKSVGKGLQVKAASVPVKGSLGQGTAPVLPGKTGPTVTQVKAEKQEDSESSEEESDSEEAAASPAQVKTSVKKTQAKANPAAARAPSAKGTISAPGKVVTAAAQAKQRSPSKVKPPVRNPQNSTVLARGPASVPSVGKAVATAAQAQTGPEEDSGSSEEESDSEEEAETLAQVKPSGKTHQIRAALAPAKESPRKGAAPTPPGKTGPSAAQAGKQDDSGSSSEESDSDGEAPAAVTSAQVIKPPLIFVDPNRSPAGPAATPAQAQAASTPRKARASESTARSSSSESEDEDVIPATQCLTPGIRTNVVTMPTAHPRIAPKASMAGASSSKESSRISDGKKQEGPATQVSKKNPASLPLTQAALKVLAQKASEAQPPVARTQPSSGVDSAVGTLPATSPQSTSVQAKGTNKLRKPKLPEVQQATKAPESSDDSEDSSDSSSGSEEDGEGPQGAKSAHTLVGPTPSRTETLVEETAAESSEDDVVAPSQSLLSGYMTPGLTPANSQASKATPKLDSSPSVSSTLAAKDDPDGKQEAKPQQAAGMLSPKTGGKEAASGTTPQKSRKPKKGAGNPQASTLALQSNITQCLLGQPWPLNEAQVQASVVKVLTELLEQERKKVVDTTKESSRKGWESRKRKLSGDQPAARTPRSKKKKKKSDKRKKDK

SEQ ID NO: 870781 - protein, 130 aa, Homo sapiens
TPHAQRPRDFPPPCASVVKVLTELLEQERKKVVDTTKESSRKGWESRKRKLSGDQPAARTPRSKKKKKLGAGEGGEASVSPEKTSTTSKGKAKRDKASGDVKEKKGKGSLGSQGAKDEPEEKTTEGDGDG

SEQ ID NO: 870782 - protein, 178 aa, Homo sapiens
MESLPAPSSLLGTIRSVPQLSQICDPTFSLHRWKRGCFRHHTSEVPEAQERGWEPPSLNPGAAKQHPPGARRRRSWGPGKVGRPLFPQKRPPRLPRGKQRETKQVVMSRRRKGRGLLAPKGPRTSQKRRRQKGMGTVEGGDQSNPKSKKEKKKSDKRKKDKEKKEKKKKAKKGLNQRF

SEQ ID NO: 870783 - protein, 864 aa, Homo sapiens
MAEARKRRELLPLIYHHLLRAGYVRAAREVKEQSGQKCFLAQPVTLLDIYTHWQQTSELGRKRKAEEDAALQAKKTRVSDPISTSESSEEEEEAEAETAKATPRLASTNSSVLGADLPSSMKEKAKAETEKAGKTGNSMPHPATGKTVANLLSGKSPRKSAEPSANTTLVSETEEEGSVPAFGAAAKPGMVSAGQADSSSEDTSSSSDETDVEGKPSVKPAQVKASSVSTKESPARKAAPAPGKVGDVTPQVKGGALPPAKRAKKPEEESESSEEGSESEEEAPAGTRSQVKASEKILQVRAASAPAKGTPGKGATPAPPGKAGAVASQTKAGKPEEDSESSSEESSDSEEETPAAKALLQAKASGKTSQVGAASAPAKESPRKGAAPAPPGKTGPAVAKAQAGKREEDSQSSSEESDSEEEAPAQAKPSGKAPQVRAASAPAKESPRKGAAPAPPRKTGPAAAQVQVGKQEEDSRSSSEESDSDREALAAMNAAQVKPLGKSPQVKPASTMGMGPLGKGAGPVPPGKVGPATPSAQVGKWEEDSESSSEESSDSSDGEVPTAVAPAQEKSLGNILQAKPTSSPAKGPPQKAGPVAVQVKAEKPMDNSESSEESSDSADSEEAPAAMTAAQAKPALKIPQTKACPKKTNTTASAKVAPVRVGTQAPRKAGTATSPAGSSPAVAGGTQRPAEDSSSSEESDSEEEKTGLAVTVGQAKSVGKGLQVKAASVPVKGSLGQGTAPVLPGKTGPTVTQVKAEKQEDSESSEEESDSEEAAASPAQVKTQKEPGKATSAQKTSEKDIHPESVWVSASNVTTDSEPPIELAAEPGRGHTGKSSPSKKGQKRRQSGNRKRQVKEMNTHNQRV

SEQ ID NO: 870784 - protein, 141 aa, Homo sapiens
MAEARKRRELLPLIYHHLLRAGYVRAAREVKEQSGQKCFLAQPVTLLDIYTHWQQTSELGRKRKAEEDAALQAKKTRVSDPISTSESSEEEEEAEAETAKATPRLASTNSSVLGADLPSSMKEKAKKDEPEEKTTEGDGDG

SEQ ID NO: 870785 - protein, 125 aa, Homo sapiens
PTPACPPLSHAPHLTITALLPIHIKTLACGEAGPRRKWTSSHDLTPLPQHRTLHIDVYSICIFLSDLLSFHRPHMPKGLGTSHHLAPQIQLGLTCASSRAARSLADPEALSSSRQFFWLCFLFFF

SEQ ID NO: 870786 - protein, 1429 aa, Homo sapiens; identical to SEQ ID NO: 870774

SEQ ID NO: 870787 - protein, 1391 aa, Homo sapiens
MAEARKRRELLPLIYHHLLRAGYVRAAREVKEQSGQKCFLAQPVTLLDIYTHWQQTSELGRKRKAEEDAALQAKKTRVSDPISTSESSEEEEEAEAETAKATPRLASTNSSVLGADLPSSMKEKAKAETEKAGKTGNSMPHPATGKTVANLLSGKSPRKSAEPSANTTLVSETEEEGSVPAFGAAAKPGMVSAGQADSSSEDTSSSSDETDVEGKPSVKPAQVKASSVSTKESPARKAAPAPGKVGDVTPQVKGGALPPAKRAKKPEEESESSEEGSESEEEAPAGTRSQVKASEKILQVRAASAPAKGTPGKGATPAPPGKAGAVASQTKAGKPEEDSESSSEESSDSEEETPAAKALLQAKASGKTSQVGAASAPAKESPRKGAAPAPPGKTGPAVAKAQAGKREEDSQSSSEESDSEEEAPAQAKPSGKAPQVRAASAPAKESPRKGAAPAPPRKTGPAAAQVQVGKQEEDSRSSSEESDSDREALAAMNAAQVKPLGKSPQVKPASTMGMGPLGKGAGPVPPGKVGPATPSAQVGKWEEDSESSSEESSDSSDGEVPTAVAPAQEKSLGNILQAKPTSSPAKGPPQKAGPVAVQVKAEKPMDNSESSEESSDSADSEEAPAAMTAAQAKPALKIPQTKACPKKTNTTASAKVAPVRVGTQAPRKAGTATSPAGSSPAVAGGTQRPAEDSSSSEESDSEEEKTGLAVTVGQAKSVGKGLQVKAASVPVKGSLGQGTAPVLPGKTGPTVTQVKAEKQEDSESSEEESDSEEAAASPAQVKTSVKKTQAKANPAAARAPSAKGTISAPGKVVTAAAQAKQRSPSKVKPPVRNPQNSTVLARGPASVPSVGKAVATAAQAQTGPEEDSGSSEEESDSEEEAETLAQVKPSGKTHQIRAALAPAKESPRKGAAPTPPGKTGPSAAQAGKQDDSGSSSEESDSDGEAPAAVTSAQVIKPPLIFVDPNRSPAGPAATPAQAQAASTPRKARASESTARSSSSESEDEDVIPATQCLTPGIRTNVVTMPTAHPRIAPKASMAGASSSKESSRISDGKKQEGPATQVDSAVGTLPATSPQSTSVQAKGTNKLRKPKLPEVQQATKAPESSDDSEDSSDSSSGSEEDGEGPQGAKSAHTLVGPTPSRTETLVEETAAESSEDDVVAPSQSLLSGYMTPGLTPANSQASKATPKLDSSPSVSSTLAAKDDPDGKQEAKPQQAAGMLSPKTGGKEAASGTTPQKSRKPKKGAGNPQASTLALQSNITQCLLGQPWPLNEAQVQASVVKVLTELLEQERKKVVDTTKESSRKGWESRKRKLSGDQPAARTPRSKKKKKLGAGEGGEASVSPEKTSTTSKGKAKRDKASGDVKEKKGKGSLGSQGAKDEPEEKTTEGDGDG

SEQ ID NO: 870788 - protein, 1384 aa, Homo sapiens
MAEARKRRELLPLIYHHLLRAGYVRAAREVKEQSGQKCFLAQPVTLLDIYTHWQQTSELGRKRKAEEDAALQAKKTRVSDPISTSESSEEEEEAEAETAKATPRLASTNSSVLGADLPSSMKEKAKAETEKAGKTGNSMPHPATGKTVANLLSGKSPRKSAEPSANTTLVSETEEEGSVPAFGAAAKPGMVSAGQADSSSEDTSSSSDETDVEGKPSVKPAQVKASSVSTKESPARKAAPAPGKVGDVTPQVKGGALPPAKRAKKPEEESESSEEGSESEEEAPAGTRSQVKASEKILQVRAASAPAKGTPGKGATPAPPGKAGAVASQTKAGKPEEDSESSSEESSDSEEETPAAKALLQAKASGKTSQVGAASAPAKESPRKGAAPAPPGKTGPAVAKAQAGKREEDSQSSSEESDSEEEAPAQAKPSGKAPQVRAASAPAKESPRKGAAPAPPRKTGPAAAQVQVGKQEEDSRSSSEESDSDREALAAMNAAQVKPLGKSPQVKPASTMGMGPLGKGAGPVPPGKVGPATPSAQVGKWEEDSESSSEESSDSSDGEVPTAVAPAQEKSLGNILQAKPTSSPAKGPPQKAGPVAVQVKAEKPMDNSESSEESSDSADSEEAPAAMTAAQAKPALKIPQTKACPKKTNTTASAKVAPVRVGTQAPRKAGTATSPAGSSPAVAGGTQRPAEDSSSSEESDSEEEKTGLAVTVGQAKSVGKGLQVKAASVPVKGSLGQGTAPVLPGKTGPTVTQVKAEKQEDSESSEEESDSEEAAASPAQVKTSVKKTQAKANPAAARAPSAKGTISAPGKVVTAAAQAKQRSPSKVKPPVRNPQNSTVLARGPASVPSVGKAVATAAQAQTGPEEDSGSSEEESDSEEEAETLAQVKPSGKTHQIRAALAPAKESPRKGAAPTPPGKTGPSAAGPAATPAQAQAASTPRKARASESTARSSSSESEDEDVIPATQCLTPGIRTNVVTMPTAHPRIAPKASMAGASSSKESSRISDGKKQEGPATQVSKKNPASLPLTQAALKVLAQKASEAQPPVARTQPSSGVDSAVGTLPATSPQSTSVQAKGTNKLRKPKLPEVQQATKAPESSDDSEDSSDSSSGSEEDGEGPQGAKSAHTLVGPTPSRTETLVEETAAESSEDDVVAPSQSLLSGYMTPGLTPANSQASKATPKLDSSPSVSSTLAAKDDPDGKQEAKPQQAAGMLSPKTGGKEAASGTTPQKSRKPKKGAGNPQASTLALQSNITQCLLGQPWPLNEAQVQASVVKVLTELLEQERKKVVDTTKESSRKGWESRKRKLSGDQPAARTPRSKKKKKLGAGEGGEASVSPEKTSTTSKGKAKRDKASGDVKEKKGKGSLGSQGAKDEPEEKTTEGDGDG

SEQ ID NO: 870789 - protein, 372 aa, Homo sapiens
MPPQVSKKNPASLPLTQAALKVLAQKASEAQPPVARTQPSSGVDSAVGTLPATSPQSTSVQAKGTNKLRKPKLPEVQQATKAPESSDDSEDSSDSSSGSEEDGEGPQGAKSAHTLVGPTPSRTETLVEETAAESSEDDVVAPSQSLLSGYMTPGLTPANSQASKATPKLDSSPSVSSTLAAKDDPDGKQEAKPQQAAGMLSPKTGGKEAASGTTPQKSRKPKKGAGNPQASTLALQSNITQCLLGQPWPLNEAQVQASVVKVLTELLEQERKKVVDTTKESSRKGWESRKRKLSGDQPAARTPRSKKKKKLGAGEGGEASVSPEKTSTTSKGKAKRDKASGDVKEKKGKGSLGSQGAKDEPEEKTTEGDGDG

SEQ ID NO: 870790 - protein, 1429 aa, Homo sapiens; identical to SEQ ID NO: 870774

SEQ ID NO: 870791 - protein, 337 aa, Homo sapiens
MAEARKRRELLPLIYHHLLRAGYVRAAREVKEQSGQKCFLAQPVTLLDIYTHWQQTSELGRKRKAEEDAALQAKKTRVSDPISTSESSEEEEEAEAETAKATPRLASTNSSVLGADLPSSMKEKAKAETEKAGKTGNSMPHPATGKTVANLLSGKSPRKSAEPSANTTLVSETEEEGSVPAFGAAAKPGMVSAGQADSSSEDTSSSSDETDVEGKPSVKPAQVKASSVSTKESPARKAAPAPGKVGDVTPQVKGGALPPAKKGRARREDDRRGWGRLKVEIKATQRARRRRRNPTREKKTKKKKKRRRKQKKASTKDSESPSQKKKKKKKKTAEQTV

SEQ ID NO: 870792 - protein, 958 aa, Homo sapiens; identical to SEQ ID NO: 870773

SEQ ID NO: 870793 - protein, 47 aa, Homo sapiens
QAAFLTAGHDSGWVMAVGWGGGSLFHNGLLQSLLSGYMTPGLTPANS

SEQ ID NO: 870794 - protein, 87 aa, Homo sapiens
AEECLPGTESSRLPAAQCSPSPYYLPGLAGGLGAGWVWRAGAQSGLFFLNRPLPSSWLWPFTSIGQWFSKCGSLASSIRDMLNMQIL

SEQ ID NO: 870795 - protein, 38 aa, Homo sapiens
  misc_feature (21)..(21): Xaa can be any naturally occurring amino acid
  misc_feature (33)..(33): Xaa can be any naturally occurring amino acid
MEAGPPFLALSGGALAATWDXGGDRDPPQLGLXILSLL

SEQ ID NO: 870796 - protein, 131 aa, Homo sapiens
RTGISNSLELGPLAPSLFSPAGTQDALVHSRDGDRRVQRAWVGRRAPVSSRPLTLGYQTVSLQPHPRRRFPEGGVGGAPDFQKASYLAGVWGGHCYSEKNQDVPFSPPSVLTSAPARSPLLGGKWKKRRYF

SEQ ID NO: 870797 - protein, 917 aa, Homo sapiens
MAFIRKKQQEQQLQLYSKERFSLLLLNLEEYYFEQHRANHILHKGSHHERKIRGSLKICSKSVIFEPDSISQPIIKIPLRDCIKIGKHGENGANRHFTKAKSGGISLIFSQVYFIKEHNVVAPYKIERGKMEYVFELDVPGKVEDVVETLLQLHRASCLDKLGDQTAMITAILQSRLARTSFDKNRFQNISEKLHMECKAEMVTPLVTNPGHVCITDTNLYFQPLNGYPKPVVQITLQDVRRIYKRRHGLMPLGLEVFCTEDDLCSDIYLKFYEPQDRDDLYFYIATYLEHHVAEHTAESYMLQWQRGHLSNYQYLLHLNNLADRSCNDLSQYPVFPWIIHDYSSSELDLSNPGTFRDLSKPVGALNKERLERLLTRYQEMPEPKFMYGSHYSSPGYVLFYLVRIAPEYMLCLQNGRFDNADRMFNSIAETWKNCLDGATDFKELIPEFYGDDVSFLVNSLKLDLGKRQGGQMVDDVELPPWASSPEDFLQKSKDALESNYVSEHLHEWIDLIFGYKQKGSDAVGAHNVFHPLTYEGGVDLNSIQDPDEKVAMLTQILEFGQTPKQLFVTPHPRRITPKFKSLSQTSSYNASMADSPGEESFEDLTEESKTLAWNNITKLQLHEHYKIHKEAVTGITVSRNGSSVFTTSQDSTLKMFSKESKMLQRSISFSNMALSSCLLLPGDATVITSSWDNNVYFYSIAFGRRQDTLMGHDDAVSKICWHDNRLYSASWDSTVKVWSGVPAEMPGTKRHHFDLLAELEHDVSVDTISLNAASTLLVSGTKEGTVNIWDLTTATLMHQIPCHSGIVCDTAFSPDSRHVLSTGTDGCLNVIDVQTGMLISSMTSDEPQRCFVWDGNSVLSGSQSGELLVWDLLGAKISERIQGHTGAVTCIWMNEQCSSIITGGEDRQIIFWKLQY

SEQ ID NO: 870798 - protein, 394 aa, Homo sapiens
HAYATRSHPLTYEGGVDLNSIQDPDEKVAMLTQILEFGQTPKQLFVTPHPRRITPKFKSLSQTSSYNASMADSPGEESFEDLTEESKTLAWNNITKLQLHEHYKIHKEAVTGITVSRNGSSVFTTSQDSTLKMFSKESKMLQRSISFSNMALSSCLLLPGDATVITSSWDNNVYFYSIAFGRRQDTLMGHDDAVSKICWHDNRLYSASWDSTVKVWSGVPAEMPGTKRHHFDLLAELEHDVSVDTISLNAASTLLVSGTKEGTVNIWDLTTATLMHQIPCHSGIVCDTAFSPDSRHVLSTGTDGCLNVIDVQTGMLISSMTSDEPQRCFVWDGNSVLSGSQSGELLVWDLLGAKISERIQGHTGAVTCIWMNEQCSSIITGGEDRQIIFWKLQY

SEQ ID NO: 870799 - protein, 821 aa, Homo sapiens
MAFIRKKQQEQQLQLYSKERFSLLLLNLEEYYFEQHRANHILHKGSHHERKIRGSLKICSKSVIFEPDSISQPIIKIPLRDCIKIGKHGENGANRHFTKAKSGGISLIFSQVYFIKEHNVVAPYKIERGKMEYVFELDVPGKVEDVVETLLQLHRASCLDKLGDQTAMITAILQSRLARTSFDKNRFQNISEKLHMECKAEMVTPLVTNPGHVCITDTNLYFQPLNGYPKPVVQITLQDVRRIYKRRHGLMPLGLEVFCTEDDLCSDIYLKFYEPQDRDDLYFYIATYLEHHVAEHTAESYMLQWQRGHLSNYQYLLHLNNLADRSCNDLSQYPVFPWIIHDYSSSELDLSNPGTFRDLSKPVGALNKERLERLLTRYQEMPEPKFMYGSHYSSPGYVLFYLVRIAPEYMLCLQNGRFDNADRMFNSIAETWKNCLDGATDFKELIPEFYGDDVSFLVNSLKLDLGKRQGGQMVDDVELPPWASSPEDFLQKSKDALESNYVSEHLHEWIDLIFGYKQKGSDAVGAHNVFHPLTYEGGVDLNSIQDPDEKVAMLTQILEFGQTPKQLFVTPHPRRITPKFKSLSQTSSYNASMADSPGEESFEDLTEESKTLAWNNITKLQLHEHYKIHKEAVTGITVSRNGSSVFTTSQDSTLKMFSKESKMLQRSISFSNMALSSCLLLPGDATVITSSWDNNVYFYSIAFGRRQDTLMGHDDAVSKICWHDNRLYSASWDSTVKVWSGVPAEMPGTKRHHFDLLAELEHDVSVDTISLNAASTLLVSGTKEGTVNIWDLTTATLMHQIPCHSGIVCDTAFSPGRYYPF

SEQ ID NO: 870800 - protein, 821 aa, Homo sapiens; identical to SEQ ID NO: 870799

SEQ ID NO: 870801 - protein, 948 aa, Homo sapiens
MAFIRKKQQEQQLQLYSKERFSLLLLNLEEYYFEQHRANHILHKGSHHERKIRGSLKICSKSVIFEPDSISQPIIKIPLRDCIKIGKHGENGANRHFTKAKSGGISLIFSQVYFIKEHNVVAPYKIERGKMEYVFELDVPGKVEDVVETLLQLHRASCLDKLGDQTAMITAILQSRLARTSFDKNRFQNISEKLHMECKAEMVTPLVTNPGHVCITDTNLYFQPLNGYPKPVVQITLQDVRRIYKRRHGLMPLGLEVFCTEDDLCSDIYLKFYEPQDRDDLYFYIATYLEHHVAEHTAESYMLQWQRGHLSNYQYLLHLNNLADRSCNDLSQYPVFPWIIHDYSSSELDLSNPGTFRDLSKPVGALNKERLERLLTRYQEMPEPKFMYGSHYSSPGYVLFYLVRIAPEYMLCLQNGRFDNADRMFNSIAETWKNCLDGATDFKELIPEFYGDDVSFLVNSLKLDLGKRQGGQMVDDVELPPWASSPEDFLQKSKDALESNYVSEHLHEWIDLIFGYKQKGSDAVGAHNVFHPLTYEGGVDLNSIQDPDEKVAMLTQILEFGQTPKQLFVTPHPRRITPKFKSLSQTSSYNASMADSPGEESFEDLTEESKTLAWNNITKLQLHEHYKIHKEAVTGITVSRNGSSVFTTSQDSTLKMFSKESKMLQRSISFSNMALSSCLLLPGDATVITSSWDNNVYFYSIAFGRRQDTLMGHDDAVSKICWHDNRLYSASWDSTVKVWSGVPAEMPGTKRHHFDLLAELEHDVSVDTISLNAASTLLVSGTKEGTVNIWDLTTATLMHQIPCHSGIVCDTAFSPDSRHVLSTGTDGCLNVIDVQTGMLISSMTSDEPQRCFVWDGNSVLSGSQSGELLVWDLLGANDQGAVYPGGETDSIICNGDKAFSRNYDLLDFSNFTAVCRLLSTRMVGSLGEPDSEGGRSSDEVNILPAAHT

SEQ ID NO: 870802 - protein, 365 aa, Homo sapiens
MLTQILEFGQTPKQLFVTPHPRRITPKFKSLSQTSSYNASMADSPGEESFEDLTEESKTLAWNNITKLQLHEHYKIHKEAVTGITVSRNGSSVFTTSQDSTLKMFSKESKMLQRSISFSNMALSSCLLLPGDATVITSSWDNNVYFYSIAFGRRQDTLMGHDDAVSKICWHDNRLYSASWDSTVKVWSGVPAEMPGTKRHHFDLLAELEHDVSVDTISLNAASTLLVSGTKEGTVNIWDLTTATLMHQIPCHSGIVCDTAFSPDSRHVLSTGTDGCLNVIDVQTGMLISSMTSDEPQRCFVWDGNSVLSGSQSGELLVWDLLGAKISERIQGHTGAVTCIWMNEQCSSIITGGEDRQIIFWKLQY

SEQ ID NO: 870803 - protein, 821 aa, Homo sapiens; identical to SEQ ID NO: 870799

SEQ ID NO: 870804 - protein, 673 aa, Homo sapiens
EFASMAFIRKKQQEQQLQLYSKERFSLLLLNLEEYYFEQHRANHILHKGSHHERKIRGSLKICSKSVIFEPDSISQPIIKIPLRDCIKIGKHGENGANRHFTKAKSGGISLIFSQVYFIKEHNVVAPYKIERGKMEYVFELDVPGKVEDVVETLLQLHRASCLDKLGDQTAMITAILQSRLARTSFDKNRFQNISEKLHMECKAEMVTPLVTNPGHVCITDTNLYFQPLNGYPKPVVQITLQDVRRIYKRRHGLMPLGLEVFCTEDDLCSDIYLKFYEPQDRDDLYFYIATYLEHHVAEHTAESYMLQWQRGHLSNYQYLLHLNNLADRSCNDLSQYPVFPWIIHDYSSSELDLSNPGTFRDLSKPVGALNKERLERLLTRYQEMPEPKFMYGSHYSSPGYVLFYLVRIAPEYMLCLQNGRFDNADRMFNSIAETWKNCLDGATDFKELIPEFYGDDVSFLVNSLKLDLGKRQGGQMVDDVELPPWASSPEDFLQKSKDALESNYVSEHLHEWIDLIFGYKQKGSDAVGAHNVFHPLTYEGGVDLNSIQDPDEKVAMLTQILEFGQTPKQLFVTPHPRRITPKFKSLSQTSSYNASMADSPGEESFEDLTEESKTLAWNNITKLQLHEHYKIHKEAVTGITVSRNGSSVFTTSQDSTLKMFSKESFYQEMPLS

SEQ ID NO: 870805 - protein, 821 aa, Homo sapiens; identical to SEQ ID NO: 870799

SEQ ID NO: 870806 - protein, 137 aa, Homo sapiens
  misc_feature (1)..(1): Xaa can be any naturally occurring amino acid
  misc_feature (3)..(4): Xaa can be any naturally occurring amino acid
  misc_feature (11)..(12): Xaa can be any naturally occurring amino acid
XIXXFGILCTXXPCVHSPASQVSGGGIPTPVRGLGQRSRAIRKRESHSEPGPVGAGRPGHPGLGRLPSCTGAPATHPEGEAVIWLYGGARAVSLWGAGAVLRCFLPMGFWCRMSENQEQEVRVWSAENRWVKVGEGI

SEQ ID NO: 870807 - protein, 396 aa, Homo sapiens
  misc_feature (1)..(1): Xaa can be any naturally occurring amino acid
  misc_feature (3)..(4): Xaa can be any naturally occurring amino acid
  misc_feature (11)..(12): Xaa can be any naturally occurring amino acid
XIXXFGILCTXXPCVHSPASQVSGGGIPTPVRGLGQRSRAIRKRESHSEPGPVGAGRPGHPGLGRLPSCTGAPATHPEGEAVIWLYGGARAVSLWGAGAVLRSQPGSFVGSTYWLKSVFISRCFLPMGFWCRMSENQEQEEVITVRVQDPRVQNEGSWNSYVDYKIFLHTNSKAFTAKTSCVRRRYREFVWLRKQLQRNAGLVPVPELPGKSTFFGTSDEFIEKRRQGLQHFLEKVLQSVVLLSDSQLHLFLQSQLSVPEIEACVQGRSTMTVSDAILRYAMSNCGWAQEERQSSSHLAKGDQPKSCCFLPRSGRRSSPSPPPSEEKDHLEVWAPVVDSEVPSLESPTLPPLSSPLCCDFGRPKEGTSTLQSVRRAVGGDHAVPLDPGQLETVLEK

SEQ ID NO: 870808 - protein, 323 aa, Homo sapiens
VGLSVSSGTRDGGIALHPREGLSYHPGLRSQPGSFVGSTYWLKSVFISRCFLPMGFWCRMSENQEQEEVITVRVQDPRVQNEGSWNSYVDYKIFLHTNSKAFTAKTSCVRRRYREFVWLRKQLQRNAGLVPVPELPGKSTFFGTSDEFIEKRRQGLQHFLEKVLQSVVLLSDSQLHLFLQSQLSVPEIEACVQGRSTMTVSDAILRYAMSNCGWAQEERQSSSHLAKGDQPKSCCFLPRSGRRSSPSPPPSEEKDHLEVWAPVVDSEVPSLESPTLPPLSSPLCCDFGRPKEGTSTLQSVRRAVGGDHAVPLDPGQLETVLEK

SEQ ID NO: 870809 - protein, 303 aa, Homo sapiens
RAWGWAKFRATEGAGGMIDWMEGAGAVLRCFLPMGFWCRMSENQEQEEVITVRVQDPRVQNEGSWNSYVDYKIFLHTNSKAFTAKTSCVRRRYREFVWLRKQLQRNAGLVPVPELPGKSTFFGTSDEFIEKRRQGLQHFLEKVLQSVVLLSDSQLHLFLQSQLSVPEIEACVQGRSTMTVSDAILRYAMSNCGWAQEERQSSSHLAKGDQPKSCCFLPRSGRRSSPSPPPSEEKDHLEVWAPVVDSEVPSLESPTLPPLSSPLCCDFGRPKEGTSTLQSVRRAVGGDHAVPLDPGQLETVLEK

SEQ ID NO: 870810 - protein, 262 aa, Homo sapiens
MVCREQEVITVRVQDPRVQNEGSWNSYVDYKIFLHTNSKAFTAKTSCVRRRYREFVWLRKQLQRNAGLVPVPELPGKSTFFGTSDEFIEKRRQGLQHFLEKVLQSVVLLSDSQLHLFLQSQLSVPEIEACVQGRSTMTVSDAILRYAMSNCGWAQEERQSSSHLAKGDQPKSCCFLPRSGRRSSPSPPPSEEKDHLEVWAPVVDSEVPSLESPTLPPLSSPLCCDFGRPKEGTSTLQSVRRAVGGDHAVPLDPGQLETVLEK

SEQ ID NO: 870811 - protein, 376 aa, Homo sapiens
  misc_feature (1)..(1): Xaa can be any naturally occurring amino acid
  misc_feature (3)..(4): Xaa can be any naturally occurring amino acid
  misc_feature (11)..(12): Xaa can be any naturally occurring amino acid
XIXXFGILCTXXPCVHSPASQVSGGGIPTPVRGLGQRSRAIRKRESHSEPGPVGAGRPGHPGLGRLPSCTGAPATHPEGEAVIWLYGGARAVSLWGAGAVLRCFLPMGFWCRMSENQEQEEVITVRVQDPRVQNEGSWNSYVDYKIFLHTNSKAFTAKTSCVRRRYREFVWLRKQLQRNAGLVPVPELPGKSTFFGTSDEFIEKRRQGLQHFLEKVLQSVVLLSDSQLHLFLQSQLSVPEIEACVQGRSTMTVSDAILRYAMSNCGWAQEERQSSSHLAKGDQPKSCCFLPRSGRRSSPSPPPSEEKDHLEVWAPVVDSEVPSLESPTLPPLSSPLCCDFGRPKEGTSTLQSVRRAVGGDHAVPLDPGQLETVLEK

SEQ ID NO: 870812 - protein, 376 aa, Homo sapiens; identical to SEQ ID NO: 870811
  misc_feature (1)..(1): Xaa can be any naturally occurring amino acid
  misc_feature (3)..(4): Xaa can be any naturally occurring amino acid
  misc_feature (11)..(12): Xaa can be any naturally occurring amino acid

SEQ ID NO: 870813 - protein, 376 aa, Homo sapiens; identical to SEQ ID NO: 870811
  misc_feature (1)..(1): Xaa can be any naturally occurring amino acid
  misc_feature (3)..(4): Xaa can be any naturally occurring amino acid
  misc_feature (11)..(12): Xaa can be any naturally occurring amino acid

SEQ ID NO: 870814 - protein, 376 aa, Homo sapiens; identical to SEQ ID NO: 870811
  misc_feature (1)..(1): Xaa can be any naturally occurring amino acid
  misc_feature (3)..(4): Xaa can be any naturally occurring amino acid
  misc_feature (11)..(12): Xaa can be any naturally occurring amino acid

SEQ ID NO: 870815 - protein, 402 aa, Homo sapiens
  misc_feature (1)..(1): Xaa can be any naturally occurring amino acid
  misc_feature (3)..(4): Xaa can be any naturally occurring amino acid
  misc_feature (11)..(12): Xaa can be any naturally occurring amino acid
XIXXFGILCTXXPCVHSPASQVSGGGIPTPVRGLGQRSRAIRKRESHSEPGPVGAGRPGHPGLGRLPSCTGAPATHPEGEAVIWLYGGARAVSLWGAGAVLRCFLPMGFWCRMSENQEQEEVITVRVQDPRVQNEGSWNSYVDYKIFLHTNSKAFTAKTSCVRRRYREFVWLRKQLQRNAGLVPVPELPGKSTFFGTSDEFIEKRRQGLQHFLEKVLQSVVLLSDSQLHLFLQSQLSVPEIEACVQGRSTMTVSDAILRYAMSNCGWAQEERQSSSHLAKGDQPKSCCFLPRSGRRSSPSPPPSEEKDHLEVWAPVVDSEVPSLESPTLPPLSSPLCCDFGRPKEGTSTLQSVRRAVGGDHAVPLDPGQLETVLGLTQVGLGTGQVCGRLGCLVSSSHLCLG

SEQ ID NO: 870816 - protein, 290 aa, Homo sapiens
FAVPHPAPACTLRRPKCFLPMGFWCRMSENQEQEEVITVRVQDPRVQNEGSWNSYVDYKIFLHTNSKAFTAKTSCVRRRYREFVWLRKQLQRNAGLVPVPELPGKSTFFGTSDEFIEKRRQGLQHFLEKVLQSVVLLSDSQLHLFLQSQLSVPEIEACVQGRSTMTVSDAILRYAMSNCGWAQEERQSSSHLAKGDQPKSCCFLPRSGRRSSPSPPPSEEKDHLEVWAPVVDSEVPSLESPTLPPLSSPLCCDFGRPKEGTSTLQSVRRAVGGDHAVPLDPGQLETVLEK

SEQ ID NO: 870817 - protein, 376 aa, Homo sapiens; identical to SEQ ID NO: 870811
  misc_feature (1)..(1): Xaa can be any naturally occurring amino acid
  misc_feature (3)..(4): Xaa can be any naturally occurring amino acid
  misc_feature (11)..(12): Xaa can be any naturally occurring amino acid

SEQ ID NO: 870818 - protein, 376 aa, Homo sapiens; identical to SEQ ID NO: 870811
  misc_feature (1)..(1): Xaa can be any naturally occurring amino acid
  misc_feature (3)..(4): Xaa can be any naturally occurring amino acid
  misc_feature (11)..(12): Xaa can be any naturally occurring amino acid

SEQ ID NO: 870819 - protein, 150 aa, Homo sapiens
  misc_feature (1)..(1): Xaa can be any naturally occurring amino acid
  misc_feature (3)..(4): Xaa can be any naturally occurring amino acid
  misc_feature (11)..(12): Xaa can be any naturally occurring amino acid
XIXXFGILCTXXPCVHSPASQVSGGGIPTPVRGLGQRSRAIRKRESHSEPGPVGAGRPGHPGLGRLPSCTGAPATHPEGEAVIWLYGGARAVSLWGAGAVLRSQPGSFVGSTYWLKSVFISRCFLPMGFWCRMSENQEQEVRVWSAENRR

SEQ ID NO: 870820 - protein, 273 aa, Homo sapiens
MRGSQEVLLMWLLVLAVGGTEHAYRPGRRVCAVRAHGDPVSESFVQRVYQPFLTTCDGHRACSTYRTIYRTAYRRSPGLAPARPRYACCPGWKRTSGLPGACGAAICQPPCRNGGSCVQPGRCRCPAGWRGDTCQSDVDECSARRGGCPQRCVNTAGSYWCQCWEGHSLSADGTLCVPKGGPPRVAPNPTGVDSAMKEEVQRLQSRVDLLEEKLQLVLAPLHSLASQALEHGLPDPGSLLVHSFQQLGRIDSLSEQISFLEEQLGSCSCKKDS

SEQ ID NO: 870821 - protein, 297 aa, Homo sapiens
GRRVRAPDPAATQRRRPPRLEAQAMRGSQEVLLMWLLVLAVGGTEHAYRPGRRVCAVRAHGDPVSESFVQRVYQPFLTTCDGHRACSTYRTIYRTAYRRSPGLAPARPRYACCPGWKRTSGLPGACGAAICQPPCRNGGSCVQPGRCRCPAGWRGDTCQSDVDECSARRGGCPQRCVNTAGSYWCQCWEGHSLSADGTLCVPKGGPPRVAPNPTGVDSAMKEEVQRLQSRVDLLEEKLQLVLAPLHSLASQALEHGLPDPGSLLVHSFQQLGRIDSLSEQISFLEEQLGSCSCKKDS

SEQ ID NO: 870822 - protein, 273 aa, Homo sapiens; identical to SEQ ID NO: 870820

SEQ ID NO: 870823 - protein, 273 aa, Homo sapiens; identical to SEQ ID NO: 870820

SEQ ID NO: 870824 - protein, 217 aa, Homo sapiens
AARARPGSGAVGCVLSGLTGTLSPSRSCSVCTSPSSPPATGTGPAAPTAICQPPCRNGGSCVQPGRCRCPAGWRGDTCQSDVDECSARRGGCPQRCVNTAGSYWCQCWEGHSLSADGTLCVPKGGPPRVAPNPTGVDSAMKEEVQRLQSRVDLLEEKLQLVLAPLHSLASQALEHGLPDPGSLLVHSFQQLGRIDSLSEQISFLEEQLGSCSCKKDS

SEQ ID NO: 870825 - protein, 243 aa, Homo sapiens
GRRVRAPDPAATQRRRPPRLEAQAMRGSQEVLLMWLLVLAVGGTEHAYRPGRRVCAVRAHGDPVSESFVQRVYQPFLTTCDGHRACSTYRTIYRTAYRRSPGLAPARPRYACCPGWKRTSGLPGACGAAICQPPCRNGGSCVQPGRCRCPAGWRGDTCQSGVDSAMKEEVQRLQSRVDLLEEKLQLVLAPLHSLASQALEHGLPDPGSLLVHSFQQLGRIDSLSEQISFLEEQLGSCSCKKDS

SEQ ID NO: 870826 - protein, 273 aa, Homo sapiens; identical to SEQ ID NO: 870820

SEQ ID NO: 870827 - protein, 257 aa, Homo sapiens
MRGSQEVLLMWLLVLAVGGTEHAYRPGRRVCAVRAHGDPVSESFVQRVYQPFLTTCDGHRACSTYRTIYRTAYRRSPGLAPARPRYACCPGWKRTSGLPGACGAAICQPPCRNGGSCVQPGRCRCPAGWRGDTCQSDVDECSARRGGCPQRCVNTAGSYWCQCWEGHSLSADGTLCVPKGGPPRVAPNPTGVDSAMKEEVQRLQSRVDLLEEKLQLVLAPLHSLASQALEHGLPDPGSLLVHSLSKDTAFPRPAHQT

SEQ ID NO: 870828 - protein, 158 aa, Homo sapiens [sequence omitted]

SEQ ID NO: 870829 - protein, 86 aa, Homo sapiens
EPPCTKLALHGCKGGSCGQARQVGLRRCLQAASGPEAPARARVHLQSQDTAAATMATPGLQQHQVWQGWPRRGRERTGRAPHSPHS

SEQ ID NO: 870830 - protein, 122 aa, Homo sapiens
MEKEFTHRGGRAKMDKRALDHTIGEEQTESPATPIIRERGPFLNDAPRKYAAEADRTLDADTPCWRNGKSHENGPNHAEGDPTSDEKGRNSNQFCSMGGGTVVRKQGIMSGGQKDMVTDQYR

SEQ ID NO: 870831 - protein, 273 aa, Homo sapiens; identical to SEQ ID NO: 870820

SEQ ID NO: 870832 - protein, 307 aa, Homo sapiens
MRGSQEVLLMWLLVLAVGGTEHAYRPGRRVCAVRAHGDPVSESFVQRVYQPFLTTCDGHRACSTYRTIYRTAYRRSPGLAPARPRYACCPGWKRTSGLPGACGAAICQPPCRNGGSCVQPGRCRCPAGWRGDTCQSDVDECSARRGGCPQRCVNTAGSYWCQCWEGHSLSADGTLCVPKGGPPRVAPNPTGVDSAMKEEVQRLQSRVDLLEEKLQLVLAPLHSLASQALEHGLPDPGSLLVHSFQQLGRIDSLSEQISFLEEQLGSWSRSHLGVTERKARQGLPPLPPPLPREAPQTLAWDGLGSSL

SEQ ID NO: 870833 - protein, 273 aa, Homo sapiens; identical to SEQ ID NO: 870820

SEQ ID NO: 870834 - protein, 133 aa, Homo sapiens
TKLALHGCKGGSCGQARQVGLRRCLQAASGPEAPARARVHLQSQDTAAATMATPGLQQHQQPPGPGRHRWPPPPGGAAPAPVRGMTDSPPPGHPEEKATPPGGTGHEGLSGGAADVASGVGSGRHRARLPARP

SEQ ID NO: 870835 - protein, 79 aa, Homo sapiens
RRRPGTPSPLGLDAPTVGDQIGGGTHRPGHCLCSMRSVAGPSCCGLSPGQHRKAQAGKRLCSDPSVPSLEEKTLGGMLG

SEQ ID NO: 870836 - protein, 110 aa, Homo sapiens
LLKLLLHLCSWQNFYLSSPKYTLYFPVHIVSIFFPNRSIFLSFSFLLWLSFNFTSVVAFFTKSSPLTQKAVNPTSMSLSSRAFNVHITHQDMSFFQQARTDGLMCMWHMQ

SEQ ID NO: 870837 - protein, 261 aa, Homo sapiens
MAAAVPRAAFLSPLLPLLLGFLLLSAPHGGSGLHTKGALPLDTVTFYKVIPKSKFVLVKFDTQYPYGEKQDEFKRLAENSASSDDLLVAEVGISDYGDKLNMELSEKYKLDKESYPVFYLFRDGDFENPVPYTGAVKVGAIQRWLKGQGVYLGMPGCLPVYDALAGEFIRASGVEARQALLKQGQDNLSSVKETQKKWAEQYLKIMGKILDQGEDFPASEMTRIARLIEKNKMSDGKKEELQKSLNILTAFQKKGAEKEEL

SEQ ID NO: 870838 - protein, 261 aa, Homo sapiens; identical to SEQ ID NO: 870837

SEQ ID NO: 870839 - protein, 261 aa, Homo sapiens; identical to SEQ ID NO: 870837

SEQ ID NO: 870840 - protein, 261 aa, Homo sapiens; identical to SEQ ID NO: 870837

SEQ ID NO: 870841 - protein, 261 aa, Homo sapiens; identical to SEQ ID NO: 870837

SEQ ID NO: 870842 - protein, 242 aa, Homo sapiens
RYQRLSRMKDHGEDLRPRRLPLDTVTFYKVIPKSKFVLVKFDTQYPYGEKQDEFKRLAENSASSDDLLVAEVGISDYGDKLNMELSEKYKLDKESYPVFYLFRDGDFENPVPYTGAVKVGAIQRWLKGQGVYLGMPGCLPVYDALAGEFIRASGVEARQALLKQGQDNLSSVKETQKKWAEQYLKIMGKILDQGEDFPASEMTRIARLIEKNKMSDGKKEELQKSLNILTAFQKKGAEKEEL

SEQ ID NO: 870843 - protein, 160 aa, Homo sapiens
MELSEKYKLDKESYPVFYLFRDGDFENPVPYTGAVKVGAIQRWLKGQGVYLGMPGCLPVYDALAGEFIRASGVEARQALLKQGQDNLSSVKETQKKWAEQYLKIMGKILDQGEDFPASEMTRIARLIEKNKMSDGKKEELQKSLNILTAFQKKGAEKEEL

SEQ ID NO: 870844 - protein, 160 aa, Homo sapiens; identical to SEQ ID NO: 870843

SEQ ID NO: 870845 - protein, 179 aa, Homo sapiens
PVPETEQNVKIMGKILDHGEDFPASEIHGSPFDRVFYLFRDGDFENPVPYTGAVKVGAIQRWLKGQGVYLGMPGCLPVYDALAGEFIRASGVEARQALLKQGQDNLSSVKETQKKWAEQYLKIMGKILDQGEDFPASEMTRIARLIEKNKMSDGKKEELQKSLNILTAFQKKGAEKEEL

SEQ ID NO: 870846 - protein, 261 aa, Homo sapiens; identical to SEQ ID NO: 870837

SEQ ID NO: 870847 - protein, 261 aa, Homo sapiens; identical to SEQ ID NO: 870837

SEQ ID NO: 870848 - protein, 271 aa, Homo sapiens
MAAAVPRAAFLSPLLPLLLGFLLLSAPHGGSGLHTKGALPLDTVTFYKVIPKSKFVLVKFDTQYPYGEKQDEFKRLAENSASSDDLLVAEVGISDYGDKLNMELSEKYKLDKESYPVFYLFRDGDFENPVPYTGAVKVGAIQRWLKGQGVYLGMPGCLPVYDALAGEFIRASGVEARQALLKQGQDNLSSVKETQKKWAEQYLKIMGKILDQGEDFPASEMTRIARLIEKNKMSDGKRSCKKAVCDFPGFGGGREGRVNLLAVSPLWNIRG

SEQ ID NO: 870849 - protein, 237 aa, Homo sapiens
MAAAVPRAAFLSPLLPLLLGFLLLSAPHGGSGLHTKGALPLDTVTFYKVIPKSKFVLVKFDTQYPYGEKQDEFKRLAENSASSDDLLVAEVGISDYGDKLNMELSEKYKLDKESYPVFYLFRDGDFENPVPYTGAVKVGAIQRWLKGQGVYLGMPGCLPVYDALAGEFIRASGVEARQALLKQGQDNLSSVKETQKKWAEQYLKIMGKILDQGEDFPASEMTRIARLIEKNKMSDGR

SEQ ID NO: 870850 - protein, 154 aa, Homo sapiens
MAAAVPRAAFLSPLLPLLLGFLLLSAPHGGSGLHTKGALPLDTVTFYKVIPKSKFVLVKFDTQYPYGEKQDEFKRLAENSASSDDLLVAEVGISDYGDKLNMELSEKYKLDKESYPVFYLFRDGDFENPVPYTGAVKVGAIQRWLKGQGVLPEG

SEQ ID NO: 870851 - protein, 261 aa, Homo sapiens; identical to SEQ ID NO: 870837

SEQ ID NO: 870852 - protein, 266 aa, Homo sapiens
MQTGDMAAAVPRAAFLSPLLPLLLGFLLLSAPHGGSGLHTKGALPLDTVTFYKVIPKSKFVLVKFDTQYPYGEKQDEFKRLAENSASSDDLLVAEVGISDYGDKLNMELSEKYKLDKESYPVFYLFRDGDFENPVPYTGAVKVGAIQRWLKGQGVYLGMPGCLPVYDALAGEFIRASGVEARQALLKQGQDNLSSVKETQKKWAEQYLKIMGKILDQGEDFPASEMTRIARLIEKNKMSDGKKEELQKSLNILTAFQKKGAEKEEL

SEQ ID NO: 870853 - protein, 219 aa, Homo sapiens
MPTPLEVIPKSKFVLVKFDTQYPYGEKQDEFKRLAENSASSDDLLVAEVGISDYGDKLNMELSEKYKLDKESYPVFYLFRDGDFENPVPYTGAVKVGAIQRWLKGQGVYLGMPGCLPVYDALAGEFIRASGVEARQALLKQGQDNLSSVKETQKKWAEQYLKIMGKILDQGEDFPASEMTRIARLIEKNKMSDGKKEELQKSLNILTAFQKKGAEKEEL

SEQ ID NO: 870854 - protein, 258 aa, Homo sapiens
MAAAACTPRAPFPWIRSLSTRGPLGRGISPKSPWNTHLLSSIRPQVIPKSKFVLVKFDTQYPYGEKQDEFKRLAENSASSDDLLVAEVGISDYGDKLNMELSEKYKLDKESYPVFYLFRDGDFENPVPYTGAVKVGAIQRWLKGQGVYLGMPGCLPVYDALAGEFIRASGVEARQALLKQGQDNLSSVKETQKKWAEQYLKIMGKILDQGEDFPASEMTRIARLIEKNKMSDGKKEELQKSLNILTAFQKKGAEKEEL

SEQ ID NO: 870855 - protein, 261 aa, Homo sapiens; identical to SEQ ID NO: 870837

SEQ ID NO: 870856 - protein, 169 aa, Homo sapiens
SLSRGSQRCAIPTRVTCHHRRFDRVFYLFRDGDFENPVPYTGAVKVGAIQRWLKGQGVYLGMPGCLPVYDALAGEFIRASGVEARQALLKQGQDNLSSVKETQKKWAEQYLKIMGKILDQGEDFPASEMTRIARLIEKNKMSDGKKEELQKSLNILTAFQKKGAEKEEL

SEQ ID NO: 870857 - protein, 108 aa, Homo sapiens [sequence omitted]

SEQ ID NO: 870858 - protein, 261 aa, Homo sapiens
MAAAVPRAAFLSPLLPLLLGFLLLSAPHGGSGLHTKGALPLDTVTFYKVIPKSKFVLVKFDTQYPYGEKQDEFKRLAENSASSDDLLVAEVGISDYGDKLNMELSEKYKLDKESYPVFYLFRDGDFENPVPYTGAVKVGAIQRWLKGQGVYLGMPGCLPVYDALAGEFIRASGVEARQALLKQGQDNLSSVKETQKKWAEQYLKIMGKILDQGEDFPASEMTRIARLIEKNKMSDGKKEELQKSLNILTAFQKKGAENPPV

SEQ ID NO: 870859 - protein, 216 aa, Homo sapiens
MAAAVPRAAFLSPLLPLLLGFLLLSAPHGGSGLHTKGALPLDTVTFYKVIPKSKFVLVKFDTQYPYGEKQDEFKRLAENSASSDDLLVAEVGISDYGDKLNMELSEKYKLDKESYPVFYLFRDGDFENPVPYTGAVKVGAIQRWLKGQGVYLGMPGCLPVYDALAGEFIRASGVEARQALLKQGQDNLSSVKETQKKWAEQLRSMLLVIALSIGGT

SEQ ID NO: 870860 - protein, 116 aa, Homo sapiens
PSTVHVNFNFSTTSLELGIVSVVDTASCPRIYFPLLPLITDLMSFTWIAAGHAQPNHRQDDVAESNMHHFWVMTLGSMLLRRYASQTRGGARVPNFALLVESLFTISLGRRFYNVR

SEQ ID NO: 870861 - protein, 244 aa, Homo sapiens
CIQAKAGPPVMLRVPEPRPGEAKAEGAAPPTPSKPLTSFLIQDILRDGAQRQGGRTSSQRQRDPEPEPEPEPEGGRSRAGAQNDQLSTGPRAAPEEAETLAETEPERHLGSYLLDSENTSGALPRLPQTPKQPQKRSRAAFSHTQVIELERKFSHQKYLSAPERAHLAKNLKLTETQVKIWFQNRRYKTKRKQLSSELGDLEKHSSLPALKEEAFSRASLVSVYNSYPYYPYLYCVGSWSPAFW

SEQ ID NO: 870862 - protein, 201 aa, Homo sapiens
CIQAKAGPPDRCSGFRSRGPGRRKRRGPRRRPRPSRSRPSSSRTSCGTAPPEEAETLAETEPERHLGSYLLDSENTSGALPRLPQTPKQPQKRSRAAFSHTQVIELERKFSHQKYLSAPERAHLAKNLKLTETQVKIWFQNRRYKTKRKQLSSELGDLEKHSSLPALKEEAFSRASLVSVYNSYPYYPYLYCVGSWSPAFW

SEQ ID NO: 870863 - protein, 175 aa, Homo sapiens
CIQAKAGPPDDAQGSGAAARGGETPEEAETLAETEPERHLGSYLLDSENTSGALPRLPQTPKQPQKRSRAAFSHTQVIELERKFSHQKYLSAPERAHLAKNLKLTETQVKIWFQNRRYKTKRKQLSSELGDLEKHSSLPALKEEAFSRASLVSVYNSYPYYPYLYCVGSWSPAFW

SEQ ID NO: 870864 - protein, 104 aa, Homo sapiens
PAPPSNLCFSRVPPPPSVGPGLCPSPQTLHPLRIGPRPAGGRGPRALTSLAEGGGRLEEGVTGPRLSTSESSLPGLVLLWHRRRGRERGGRAPGAKAGGWPWKG

SEQ ID NO: 870865 - protein, 405 aa, Homo sapiens
MEASFVQTTMALGLSSKKASSRNVAVERKNLITVCRFSVKTLLEKYTAEPIDDSSEEFVNFAAILEQILSHRFKACAPAGPVSWFSSDGQRGFWDYIRLACSKVPNNCVSSIENMENISTARAKGRAWIRVALMEKRMSEYITTALRDTRTTRRFYDSGAIMLRDEATILTGMLIGLSAIDFSFCLKGEVLDGKTPVVIDYTPYLKFTQSYDYLTDEEERHSAESSTSEDNSPEHPYLPLVTDEDSWYSKWHKMEQKFRIVYAQKGYLEELVRLRESQLKDLEAENRRLQLQLEEAAAQNQREKRELEGVILELQEQLTGLIPSDHAPLAQGSKELTTPLVNQWPSLGTLNGAEGASNSKLYRRHSFMSTEPLSAEASLSSDSQRLGEGTRDEEPWGPIGSSEPN

SEQ ID NO: 870866 - protein, 405 aa, Homo sapiens; identical to SEQ ID NO: 870865

SEQ ID NO: 870867 - protein, 446 aa, Homo sapiens
MEASFVQTTMALGLSSKKASSRNVAVERKNLITVCRFSVKTLLEKYTAEPIDDSSEEFVNFAAILEQILSHRFKACAPAGPVSWFSSDGQRGFWDYIRLACSKVPNNCVSSIENMENISTARAKGRAWIRVALMEKRMSEYITTALRDTRTTRRFYDSGAIMLRDEATILTGMLIGLSAIDFSFCLKGEVLDGKTPVVIDYTPYLKFTQSYDYLTDEEERHSAESSTSEDNSPEHPYLPLVTDEDSWYSKWHKMEQKFRIVYAQKGYLEELVRLRESQLKDLEAENRRLQLQLEEAAAQNQREKRELEGVILELQEQLTGLIPSDHAPLAQGSKELTTPLVNQWPSLGTLNGAEGASNSKLYRRHSFMSTEPLSAEASLSSDSQRLGEGTRDEEPWGPIGKDPTPSMLGLCGSLASIPSCKSLASFKSNECLVSDSPEGSPALSPS

SEQ ID NO: 870868 - protein, 381 aa, Homo sapiens
MEASFVQTTMALGLSSKKASSRNVAVERKNLITVCRFSVKTLLEKYTAEPIDDSSEEFVNFAAILEQILSHRFKACAPAGPVSWFSSDGQRGFWDYIRLACSKVPNNCVSSIENMENISTARAKGRAWIRVALMEKRMSEYITTALRDTRTTRRFYDSGAIMLRDEATILTGMLIGLSAIDFSFCLKGEVLDGKTPVVIDYTPYLKFTQSYDYLTDEEERHSAESSTSEDNSPEHPYLPLVTDEDSWYSKWHKMEQKFRIVYAQKGYLEELVRLRESQLKDLEAENRRLQLQLEEAAAQNQREKRELEGVILELQEQLTGLIPSDHAPLAQGSKGKDPTPSMLGLCGSLASIPSCKSLASFKSNECLVSDSPEGSPALSPS

SEQ ID NO: 870869 - protein, 405 aa, Homo sapiens; identical to SEQ ID NO: 870865

SEQ ID NO: 870870 - protein, 338 aa, Homo sapiens
MEASFVQTTMALGLSSKKASSRNVAVERKNLITVCRFSVKTLLEKYTAEPIDDSSEEFVNFAAILEQILSHRFKACAPAGPVSWFSSDGQRGFWDYIRLACSKVPNNCVSSIENMENISTARAKGRAWIRVALMEKRMSEYITTALRDTRTTRRFYDSGAIMLRDEATILTGMLIGLSAIDFSFCLKGEVLDGKTPVVIDYTPYLKFTQSYDYLTDEEERHSAESSTSEDNSPEHPYLPLVTDEDSWYSKWHKMEQKFRIVYAQKGYLEELVRLRESQLKDLEAENRRLQLQLEEAAAQNQREKRELEGVILELQEQLTGLIPSDHTPLPRVRLPKIR

SEQ ID NO: 870871 - protein, 340 aa, Homo sapiens
HASPTRSTTRPISTARAKGRAWIRVALMEKRMSEYITTALRDTRTTRRFYDSGAIMLRDEATILTGMLIGLSAIDFSFCLKGEVLDGKTPVVIDYTPYLKFTQSYDYLTDEEERHSAESSTSEDNSPEHPYLPLVTDEDSWYSKWHKMEQKFRIVYAQKGYLEELVRLRESQLKDLEAENRRLQLQLEEAAAQNQREKRELEGVILELQEQLTGLIPSDHAPLAQGSKELTTPLVNQWPSLGTLNGAEGASNSKLYRRHSFMSTEPLSAEASLSSDSQRLGEGTRDEEPWGPIGKDPTPSMLGLCGSLASIPSCKSLASFKSNECLVSDSPEGSPALSPS

SEQ ID NO: 870872 - protein, 506 aa, Homo sapiens
MEASFVQTTMALGLSSKKASSRNVAVERKNLITVCRFSVKTLLEKYTAEPIDDSSEEFVNFAAILEQILSHRFKACAPAGPVSWFSSDGQRGFWDYIRLACSKVPNNCVSSIENMENISTARAKGRAWIRVALMEKRMSEYITTALRDTRTTRRFYDSGAIMLRDEATILTGMLIGLSAIDFSFCLKGEVLDGKTPVVIDYTPYLKFTQSYDYLTDEEERHSAESSTSEDNSPEHPYLPLVTDEDSWYSKWHKMEQKFRIVYAQKGYLEELVRLRESQLKDLEAENRRLQLQLEEAAAQNQREKRELEGVILELQEQLTGLIPSDHAPLAQGSKELTTPLVNQWPSLGTLNGAEGASNSKLYRRKAPARWGLGLRAGRPGEEGLPLPAHQLSLCRRHSFMSTEPLSAEASLSSDSQRLGEGTRDEEPWGPIETEFRQAGLELLTSSDSPTLASQSAGITGKDPTPSMLGLCGSLASIPSCKSLASFKSNECLVSDSPEGSPALSPS

SEQ ID NO: 870873 - protein, 405 aa, Homo sapiens; identical to SEQ ID NO: 870865

SEQ ID NO: 870874 - protein, 446 aa, Homo sapiens; identical to SEQ ID NO: 870867

SEQ ID NO: 870875 - protein, 478 aa, Homo sapiens
MEASFVQTTMALGLSSKKASSRNVAVERKNLITVCRFSVKTLLEKYTAEPIDDSSEEFVNFAAILEQILSHRFKACAPAGPVSWFSSDGQRGFWDYIRLACSKVPNNCVSSIENMENISTARAKGRAWIRVALMEKRMSEYITTALRDTRTTRRFYDSGAIMLRDEATILTGMLIGLSAIDFSFCLKGEVLDGKTPVVIDYTPYLKFTQSYDYLTDEEERHSAESSTSEDNSPEHPYLPLVTDEDSWYSKWHKMEQKFRIVYAQKGYLEELVRLRESQLKDLEAENRRLQLQLEEAAAQNQREKRELEGVILELQEQLTGLIPSDHAPLAQGSKELTTPLVNQWPSLGTLNGAEGASNSKLYRRKAPARWGLGLRAGRPGEEGLPLPAHQLSLCRRHSFMSTEPLSAEASLSSDSQRLGEGTRDEEPWGPIGKDPTPSMLGLCGSLASIPSCKSLASFKSNECLVSDSPEGSPALSPS

SEQ ID NO: 870876 - protein, 433 aa, Homo sapiens
MEASFVQTTMALGLSSKKASSRNVAVERKNLITVCRFSVKTLLEKYTAEPIDDSSEEFVNFAAILEQILSHRFKACAPAGPVSWFSSDGQRGFWDYIRLACSKVPNNCVSSIENMENISTARAKGRAWIRVALMEKRMSEYITTALRDTRTTRRFYDSGAIMLRDEATILTGMLIGLSAIDFSFCLKGEVLDGKTPVVIDYTPYLKFTQSYDYLTDEEERHSAESSTSEDNSPEHPYLPLVTDEDSWYSKWHKMEQKFRIVYAQKGYLEELVRLRESQLKDLEAENRRLQLQLEEAAAQNQREKRELEGVILELQEQLTGLIPSDHAPLAQGSKELTTPLVNQWPSLGTLNGAEGASNSKLYRRHSFMSTEPLSAEASLSSDSQRLGEGTRDEEPWGPIETEFRQAGLELLTSSDSPTLASQSAGITGSSEPN

SEQ ID NO: 870877 - protein, 478 aa, Homo sapiens; identical to SEQ ID NO: 870875

SEQ ID NO: 870878 - protein, 383 aa, Homo sapiens
MKDLGNPVLDEEGVAQREESAQGTPILGDGATGASPRLKGERGSRPACRSGRRIGLPSGWGGSKPTIAALGGGGALQGPAASSGPLPPHRRFYDSGAIMLRDEATILTGMLIGLSAIDFSFCLKGEVLDGKTPVVIDYTPYLKFTQSYDYLTDEEERHSAESSTSEDNSPEHPYLPLVTDEDSWYSKWHKMEQKFRIVYAQKGYLEELVRLRESQLKDLEAENRRLQLQLEEAAAQNQREKRELEGVILELQEQLTGLIPSDHAPLAQGSKELTTPLVNQWPSLGTLNGAEGASNSKLYRRHSFMSTEPLSAEASLSSDSQRLGEGTRDEEPWGPIGKDPTPSMLGLCGSLASIPSCKSLASFKSNECLVSDSPEGSPALSPS

SEQ ID NO: 870879 - protein, 555 aa, Homo sapiens
MTSPSSSPVFRLETLDGGQEDGSEADRGKLDFGSGLPPMESQFQGEDRKFAPQIRVNLNYRKGTGASQPDPNRFDRDRLFNAVSRGVPEDLAGLPEYLSKTSKYLTDSEYTEGSTGKTCLMKAVLNLKDGVNACILPLLQIDRDSGNPQPLVNAQCTDDYYRGHSALHIAIEKRSLQCVKLLVENGANVHARACGRFFQKGQGTCFYFAGRPHLKAEVGNSMLLTGHILILLGGIYLLVGQLWYFWRRHVFIWISFIDSYFEILFLFQALLTVVSQVLCFLAIEWYLPLLVSALVLGWLNLLYYTRGFQHTGIYSVMIQKVILRDLLRFLLIYLVFLFGFAVALVSLSQEAWRPEAPTGPNATESVQPMEGQEDEGNGAQYRGILEASLELFKFTIGMGELAFQEQLHFRGMVLLLLLAYVLLTYILLLNMLIALMSETVNSVATDSWSIWKLQKAISVLEMENGYWWCRKKQRAGVMLTVGTKPDGSPDERWCFRVEEVNWASWEQTLPTLCEDPSGAGVPRTLENPVLASPPKEDEDGASEENYVPVQLLQSN

SEQ ID NO: 870880 - protein, 764 aa, Homo sapiens
MTSPSSSPVFRLETLDGGQEDGSEADRGKLDFGSGLPPMESQFQGEDRKFAPQIRVNLNYRKGTGASQPDPNRFDRDRLFNAVSRGVPEDLAGLPEYLSKTSKYLTDSEYTEGSTGKTCLMKAVLNLKDGVNACILPLLQIDRDSGNPQPLVNAQCTDDYYRGHSALHIAIEKRSLQCVKLLVENGANVHARACGRFFQKGQGTCFYFGELPLSLAACTKQWDVVSYLLENPHQPASLQATDSQGNTVLHALVMISDNSAENIALVTSMYDGLLQAGARLCPTVQLEDIRNLQDLTPLKLAAKEGKIEIFRHILQREFSGLSHLSRKFTEWCYGPVRVSLYDLASVDSCEENSVLEIIAFHCKSPHRHRMVVLEPLNKLLQAKWDLLIPKFFLNFLCNLIYMFIFTAVAYHQPTLKKQAAPHLKAEVGNSMLLTGHILILLGGIYLLVGQLWYFWRRHVFIWISFIDSYFEILFLFQALLTVVSQVLCFLAIEWYLPLLVSALVLGWLNLLYYTRGFQHTGIYSVMIQKVILRDLLRFLLIYLVFLFGFAVALVSLSQEAWRPEAPTGPNATESVQPMEGQEDEGNGAQYRGILEASLELFKFTIGMGELAFQEQLHFRGMVLLLLLAYVLLTYILLLNMLIALMSETVNSVATDSWSIWKLQKAISVLEMENGYWWCRKKQRAGVMLTVGTKPDGSPDERWCFRVEEVNWASWEQTLPTLCEDPSGAGVPRTLENPVLASPPKEDEDGASEENYVPVQLLQSN

SEQ ID NO: 870881 - protein, 742 aa, Homo sapiens
MTSPSSSPVFRLETLDGGQEDGSEADRGKLDFGSGLPPMESQFQGEDRKFAPQIRVNLNYRKGTGASQPDPNRFDRDRLFNAVSRGVPEDLAGLPEYLSKTSKYLTDSEYTEGSTGKTCLMKAVLNLKDGVNACILPLLQIDRDSGNPQPLVNAQCTDDYYRGHSALHIAIEKRSLQCVKLLVENGANVHARACGRFFQKGQGTCFYFGELPLSLAACTKQWDVVSYLLENPHQPASLQATDSQGNTVLHALVMISDNSAENIALVTSMYDGLLQAGARLCPTVQLEDIRNLQDLTPLKLAAKEGKIEIFRHILQREFSGLSHLSRKFTEWCYGPVRVSLYDLASVDSCEENSVLEIIAFHCKSPHRHRMVVLEPLNKLLQAKWDLLIPKFFLNFLCNLIYMFIFTAVAYHQPTLKKQAAPHLKAEVGNSMLLTGHILILLGGIYLLVGQLWYFWRRHVFIWISFIDSYFEILFSVPGPAHSGVPGAVFPGHRVVPAPACVCAGAGLAEPALLYTWLPAHRHLQCHDPEALVSLSQEAWRPEAPTGPNATESVQPMEGQEDEGNGAQYRGILEASLELFKFTIGMGELAFQEQLHFRGMVLLLLLAYVLLTYILLLNMLIALMSETVNSVATDSWSIWKLQKAISVLEMENGYWWCRKKQRAGVMLTVGTKPDGSPDERWCFRVEEVNWASWEQTLPTLCEDPSGAGVPRTLENPVLASPPKEDEDGASEENYVPVQLLQSN

SEQ ID NO: 870882 - protein, 719 aa, Homo sapiens
MTSPSSSPVFRLETLDGGQEDGSEADRGKLDFGSGLPPMESQFQGEDRKFAPQIRVNLNYRKGTGASQPDPNRFDRDRLFNAVSRGVPEDLAGLPEYLSKTSKYLTDSEYTEGSTGKTCLMKAVLNLKDGVNACILPLLQIDRDSGNPQPLVNAQCTDDYYRGHSALHIAIEKRSLQCVKLLVENGANVHARACGRFFQKGQGTCFYFGELPLSLAACTKQWDVVSYLLENPHQPASLQATDSQGNTVLHALVMISDNSAENIALVTSMYDGLLQAGARLCPTVQLEDIRNLQDLTPLKLAAKEGKIEIFRHILQREFSGLSHLSRKFTEWCYGPVRVSLYDLASVDSCEENSVLEIIAFHCKSPHRHRMVVLEPLNKLLQAKWDLLIPKFFLNFLCNLIYMFIFTAVAYHQPTLKKQAAPHLKAEVGNSMLLTGHILILLGGIYLLVGQLWYFWRRHVFIWISFIDSYFEILFLFQALLTVVSQVLCFLAIEWYLPLLVSALVLGWLNLLYYTRGFQHTGIYSVMIQKVILRDLLRFLLIYLVFLFGFAVALVSLSQEAWRPEAPTGPNATESVQPMEGQEDEGNGAQYRGILEASLELFKFTIGMGELAFQEQLHFRGMVLLLLLAYVLLTYILLLNMLIALMSETVNSVATDSWSIWKLQKAISVLEMENGYWWCRKKQRAGVMLTVGTKPDGSPDERWCFRNSREPCPGFPSQGG

SEQ ID NO: 870883 - protein, 564 aa, Homo sapiens
GLCTCYHLHKRSYCADGGTIKPDDQRWVMENPHQPASLQATDSQGNTVLHALVMISDNSAENIALVTSMYDGLLQAGARLCPTVQLEDIRNLQDLTPLKLAAKEGKIEIFRHILQREFSGLSHLSRKFTEWCYGPVRVSLYDLASVDSCEENSVLEIIAFHCKSPHRHRMVVLEPLNKLLQAKWDLLIPKFFLNFLCNLIYMFIFTAVAYHQPTLKKQAAPHLKAEVGNSMLLTGHILILLGGIYLLVGQLWYFWRRHVFIWISFIDSYFEILFLFQALLTVVSQVLCFLAIEWYLPLLVSALVLGWLNLLYYTRGFQHTGIYSVMIQKVILRDLLRFLLIYLVFLFGFAVALVSLSQEAWRPEAPTGPNATESVQPMEGQEDEGNGAQYRGILEASLELFKFTIGMGELAFQEQLHFRGMVLLLLLAYVLLTYILLLNMLIALMSETVNSVATDSWSIWKLQKAISVLEMENGYWWCRKKQRAGVMLTVGTKPDGSPDERWCFRVEEVNWASWEQTLPTLCEDPSGAGVPRTLENPVLASPPKEDEDGASEENYVPVQLLQSN

SEQ ID NO: 870884 - protein, 175 aa, Homo sapiens [sequence omitted]

SEQ ID NO: 870885 - protein, 122 aa, Homo sapiens
LTGQGSKWVAQNPAEKKPVLLRASVSTRASLHSLPIWGATPLSGVGGEAVKAGKPQSCSVALRVEEVNWASWEQTLPTLCEDPSGAGVPRTLENPVLASPPKEDEDGASEENYVPVQLLQSN

SEQ ID NO: 870886 - protein, 680 aa, Homo sapiens
MTSPSSSPVFRLETLDGGQEDGSEADRGKLDFGSGLPPMESQFQGEDRKFAPQIRVNLNYRKGTGASQPDPNRFDRDRLFNAVSRGVPEDLAGLPEYLSKTSKYLTDSEYTEGSTGKTCLMKAVLNLKDGVNACILPLLQIDRDSGNPQPLVNAQCTDDYYRGHSALHIAIEKRSLQCVKLLVENGANVHARACGRFFQKGQGTCFYFGELPLSLAACTKQWDVVSYLLENPHQPASLQATDSQGNTVLHALVMISDNSAENIALVTSMYDGLLQAGARLCPTVQLEDIRNLQDLTPLKLAAKEGKIEIFRHILQREFSGLSHLSRKFTEWCYGPVRVSLYDLASVDSCEENSVLEIIAFHCKSPHRHRMVVLEPLNKLLQAKWDLLIPKFFLNFLCNLIYMFIFTAVAYHQPTLKKQAAPHLKAEVGNSMLLTGHILILLGGIYLLVGQLWYFWRRHVFIWISFIDSYFEILFLFQALLTVVSQVLCFLAIEWYLPLLVSALVLGWLNLLYYTRGFQHTGIYSVMIQKVILRDLLRFLLIYLVFLFGFAVALVSLSQEAWRPEAPTGPNATESVQPMEGQEDEGNGAQYRGILEASLELFKFTIGMGELAFQEQLHFRGMVLLLLLAYVLLTYILLLNMLIALMSETVNSVATDSWSIWKLQGGGGELGFMGADAAYAV

SEQ ID NO: 870887 - protein, 546 aa, Homo sapiens
MTSPSSSPVFRLETLDGGQEDGSEADRGKLDFGSGLPPMESQFQGEDRKFAPQIRVNLNYRKGTGASQPDPNRFDRDRLFNAVSRGVPEDLAGLPEYLSKTSKYLTDSEYTEGSTGKTCLMKAVLNLKDGVNACILPLLQIDRDSGNPQPLVNAQCTDDYYRGHSALHIAIEKRSLQCVKLLVENGANVHARACGRFFQKGQGTCFYFGELPLSLAACTKQWDVVSYLLENPHQPASLQATDSQGNTVLHALVMISDNSAENIALVTSMYDGLLQAGARLCPTVQLEDIRNLQDLTPLKLAAKEGKIEIFRHILQREFSGLSHLSRKFTEWCYGPVRVSLYDLASVDSCEENSVLEIIAFHCKSPHRHRMVVLEPLNKLLQAKWDLLIPKFFLNFLCNLIYMFIFTAVAYHQPTLKKQAAPHLKAEVGNSMLLTGHILILLGGIYLLVGQLWYFWRRHVFIWISFIDSYFEILFLFQALLTVVSQVLCFLAIEWYLPLLVSALVLGWLNLLYYTRGFQHTGIYSVMIQKGGGGELGFMGADAAYAV

SEQ ID NO: 870888 - protein, 742 aa, Homo sapiens
MGRLQLVVLGLTCCWAVASAAKLGAVYTEGGFVEGVNKKLGLLGDSVDIFKGIPFAAPTKALENPQPHPGWQGTLKAKNFKKRCLQATITQDSTYGDEDCLYLNIWVPQGRKQVSRDLPVMIWIYGGAFLMGSGHGANFLNNYLYDGEEIATRGNVIVVTFNYRVGPLGFLSTGDANLPGNYGLRDQHMAIAWVKRNIAAFGGDPNNITLFGESAGGASVSLQTLSPYNKGLIRRAISQSGVALSPWVIQKNPLFWAKKVAEKVGCPVGDAARMAQCLKVTDPRALTLAYKVPLAGLEYPMLHYVGFVPVIDGDFIPADPINLYANAADIDYIAGTNNMDGHIFASIDMPAINKGNKKVTEEDFYKLVSEFTITKGLRGAKTTFDVYTESWAQDPSQENKKKTVVDFETDVLFLVPTEIALAQHRANAKSAKTYAYLFSHPSRMPVYPKWVGADHADDIQYVFGKPFATPTGYRPQDRTVSKAMIAYWTNFAKTGDPNMGDSAVPTHWEPYTTENSGYLEITKKMGSSSMKRSLRTNFLRYWTLTYLALPTVTDQEATPVPPTGDSEATPVPPTGDSETAPVPPTGDSGAPPVPPTGDSGAPPVPPTGDSGAPPVPPTGDSGAPPVPPTGDSGAPPVPPTGDSGAPPVPPTGDSGAPPVPPTGDAGPPPVPPTGDSGAPPVPPTGDSGAPPVTPTGDSETAPVPPTGDSGAPPVPPTGDSEAAPVPPTDDSKEAQMPAVIRF

SEQ ID NO: 870889 - protein, 742 aa, Homo sapiens; identical to SEQ ID NO: 870888

SEQ ID NO: 870890 - protein, 742 aa, Homo sapiens; identical to SEQ ID NO: 870888

SEQ ID NO: 870891 - protein, 323 aa, Homo sapiens
MISPVHPEADAHHGAPATGCVGPHLLLGSGECREDPMLHYVGFVPVIDGDFIPADPINLYANAADIDYIAGTNNMDGHIFASIDMPAINKGNKKVTEEDFYKLVSEFTITKGLRGAKTTFDVYTESWAQDPSQENKKKTVVDFETDVLFLVPTEIALAQHRANAKSAKTYAYLFSHPSRMPVYPKWVGADHRDEIQYIFGEPFATPLRATGPKTGQSLKAMTAYWTNFAKTGDPNMGDSAVPTHWEPYTTENSGYLEITKKMGSSSMKRSLRTNFLRYWTLTYLALPTVTDQEASSMPSTGDSEATPISPDRQLRVCPRPCNG

SEQ ID NO: 870892 - protein, 91 aa, Homo sapiens
DPNMGDSAVPTHWEPYTTENSGYLEITKKMGSSSMKRSLRTNFLRYWTLTYLALPTVTDQEASSMPSTGDSEATPISPDRQLRVCPRPCNG

SEQ ID NO: 870893 - protein, 742 aa, Homo sapiens; identical to SEQ ID NO: 870888

SEQ ID NO: 870894 - protein, 742 aa, Homo sapiens; identical to SEQ ID NO: 870888

SEQ ID NO: 870895 - protein, 598 aa, Homo sapiens
MGRLQLVVLGLTCCWAVASAAKLGAVYTEGGFVEGVNKKLGLLGDSVDIFKGIPFAAPTKALENPQPHPGWQGTLKAKNFKKRCLQATITQDSTYGDEDCLYLNIWVPQGRKQVSRDLPVMIWIYGGAFLMGSGHGANFLNNYLYDGEEIATRGNVIVVTFNYRVGPLGFLSTGDANLPGNYGLRDQHMAIAWVKRNIAAFGGDPNNITLFGESAGGASVSLQTLSPYNKGLIRRAISQSGVALSPWVIQKNPLFWAKKVAEKVGCPVGDAARMAQCLKVTDPRALTLAYKVPLAGLEYPMLHYVGFVPVIDGDFIPADPINLYANAADIDYIAGTNNMDGHIFASIDMPAINKGNKKVTEEDFYKLVSEFTITKGLRGAKTTFDVYTESWAQDPSQENKKKTVVDFETDVLFLVPTEIALAQHRANAKSAKTYAYLFSHPSRMPVYPKWVGADHADDIQYVFGKPFATPTGYRPQDRTVSKAMIAYWTNFAKTGDPNMGDSAVPTHWEPYTTENSGYLEITKKMGSSSMKRSLRTNFLRYWTLTYLALPTVTDQEATPVPPTGDSEATPVPPTGDSETAPVPPTGDSGAPPPRAAHG

SEQ ID NO: 870896 - protein, 649 aa, Homo sapiens
MGRLQLVVLGLTCCWAVASAAKLGAVYTEGGFVEGVNKKLGLLGDSVDIFKGIPFAAPTKALENPQPHPGWQGTLKAKNFKKRCLQATITQDSTYGDEDCLYLNIWVPQGRKQVSRDLPVMIWIYGGAFLMGSGHGANFLNNYLYDGEEIATRGNVIVVTFNYRVGPLGFLSTGDANLPGNYGLRDQHMAIAWVKRNIAAFGGDPNNITLFGESAGGASVSLQTLSPYNKGLIRRAISQSGVALSPWVIQKNPLFWAKKVAEKVGCPVGDAARMAQCLKVTDPRALTLAYKVPLAGLEYPMLHYVGFVPVIDGDFIPADPINLYANAADIDYIAGTNNMDGHIFASIDMPAINKGNKKVTEEDFYKLVSEFTITKGLRGAKTTFDVYTESWAQDPSQENKKKTVVDFETDVLFLVPTEIALAQHRANAKSAKTYAYLFSHPSRMPVYPKWVGADHADDIQYVFGKPFATPTGYRPQDRTVSKAMIAYWTNFAKTGDPNMGDSAVPTHWEPYTTENSGYLEITKKMGSSSMKRSLRTNFLRYWTLTYLALPTVTDQEATPVPPTGDSEATPVPPTGDSETAPVPPTGDSGAPPVPPTGDSGAPPVPPCRPRVTPGPPLCPPRVTLRLPLCPPQMTPRKLRCLQSLGFSVP

SEQ ID NO: 870897 - protein, 107 aa, Homo sapiens [sequence omitted]

SEQ ID NO: 870898 - protein, 107 aa, Homo sapiens
  misc_feature (5)..(5): Xaa can be any naturally occurring amino acid
RWYPXGTLIAAVEARSKRPSRRLLLPPLASPLHQQPKGVAPLTNPGWRRRRARGGRGHNLVLFRKDVDDATLSRLELERKIESLMDEIEFLKKLHEEVSGPGIRGGF

SEQ ID NO: 870899 - protein, 146 aa, Homo sapiens
MDEIEFLKKLHEEELRDLQVSVESQQVQQVEVEATVKPELTAALRDIRAQYESIAAKNLQEAEEWYKSKYADLSDAANRNHEALRQAKQEMNESRRQIQSLTCEVDGLRGTNEALLRQLRELEEQFALEAGGYQAGLRGSRRSCDS

SEQ ID NO: 870900 - protein, 188 aa, Homo sapiens
SLGYPHFSVRGPVRRCQPEPRGPAPGQAGDERVPTPDPESNVRGGRAARHERGAAQAVERAGGAVRPGGGGLPGGAARLEEELRQLKEEMARHLREYQELLNVKMALDIEIATYRKLLEGEESRISVPVHSFASLNIKTTVPEVEPPQDSHSRKTVLIKTIETRNGEVVTESQKEQRSELDKSSAHSY

SEQ ID NO: 870901 - protein, 146 aa, Homo sapiens; identical to SEQ ID NO: 870899

SEQ ID NO: 870902 - protein, 186 aa, Homo sapiens
MVGGGDAQGEDAEHNLVLFRKDVDDATLSRLELERKIESLMDEIEFLKKLHEEELRDLQVSVESQQVQQVEVEATVKPELTAALRDIRAQYESIAAKNLQEAEEWYKSKYADLSDAANRNHEALRQAKQEMNESRRQIQSLTCEVDGLRGTNEALLRQLRELEEQFALEAGGYQAGLRGSRRSCDS

SEQ ID NO: 870903 - protein, 91 aa, Homo sapiens
EMNPVPQMEMLKSPVFCVAQAGSCRPELFLFGHLVSSPGVMATVAEPRKPRRNQRMETHGSNGKSSDPGFPKEHWSRKMLCEKVFPGRRNL

SEQ ID NO: 870904 - protein, 264 aa, Homo sapiens
MEALPPVRSSLLGNLLQVTRLSVLLVQNRDHLYNFLLLKINLFNHWVSGLAQEARGSCNWQAHLPLGAAACPLGQALRAGLALIQVPVWLVLQGPRLMWAGMWGSTKGLGLALLSAWEQLGLSVAIWTDLFLSCLHGLMLVALLLVVVTWRVCQKSHCFRLGRQLSKALQVNCVVRKLLVQLRRLYWWVETMTALTSWHLAYLITWTTCLASHLLQAAFEHTTQLAEAQEVEPQEVSGSSLLPSLSASSDSESGTVLPEQETPR

SEQ ID NO: 870905 - protein, 240 aa, Homo sapiens
MLVQNRDHLYNFLLLKINLFNHWVSGLAQEARGSCNWQAHLPLGAAACPLGQALRAGLALIQVPVWLVLQGPRLMWAGMWGSTKGLGLALLSAWEQLGLSVAIWTDLFLSCLHGLMLVALLLVVVTWRVCQKSHCFRLGRQLSKALQVNCVVRKLLVQLRRLYWWVETMTALTSWHLAYLITWTTCLASHLLQAAFEHTTQLAEAQEVEPQEVSGSSLLPSLSASSDSESGTVLPEQETP

SEQ ID NO: 870906 - protein, 116 aa, Homo sapiens
TAAVLAVSAVCLERSCGGIRTSCLAPEVPSSLLSPLSAFTAVSCNVGGLHLGLQGPWESSRTPRPCLNCAINFQSYHEPTSPHRASVATMWASPVQTTEHSTMTGHSYKSRDHQSC

SEQ ID NO: 870907 - protein, 164 aa, Homo sapiens
  misc_feature (4)..(4): Xaa can be any naturally occurring amino acid
APKXLFCLILDMTSGHAAEVQEQHSSKTVAARLRLSVTAMTGFTRAEFGTASAKTKRKQEKGPKAKMKLMVLVFTIGLTLLLGVQAMPANRLSCYRKILKDHNCHNLPEGVADLTQIDVNVQDHFWDGKGCEMICYCNFSELLCCPKDVFFGPKISFVIPCNNQ

SEQ ID NO: 870908 - protein, 104 aa, Homo sapiens
MKLMVLVFTIGLTLLLGVQAMPANRLSCYRKILKDHNCHNLPEGVADLTQIDVNVQDHFWDGKGCEMICYCNFSELLCCPKVRKWYHKVYCLEMYAEQLLATSS

SEQ ID NO: 870909 - protein, 122 aa, Homo sapiens
  misc_feature (18)..(18): Xaa can be any naturally occurring amino acid
IPGLQEFGTRARAIRKEXKGPKAKMKLMVLVFTIGLTLLLGVQAMPANRLSCYRKILKDHNCHNLPEGVADLTQIDVNVQDHFWDGKGCEMICYCNFSELLCCPKDVFFGPKISFVIPCNNQ

SEQ ID NO: 870910 - protein, 98 aa, Homo sapiens
MKLMVLVFTIGLTLLLGVQAMPANRLSCYRKILKDHNCHNLPEGVADLTQIDVNVQDHFWDGKGCEMICYCNFSELLCCPKDVFFGPKISFVIPCNNQ

SEQ ID NO: 870911 - protein, 134 aa, Homo sapiens
SRASLWGPVGLKGWAGSGDGHLAALVGAREPTLLPSVLSLLLLCCTSWRVSGDLERHLCVVGEGGPRMHQTQGRAISDVSYLIPATSLHRGSHHHIVGDDVGPGDPLAPKGQAGALCCSPVAFRPHTLGFFCNA

SEQ ID NO: 870912 - protein, 263 aa, Homo sapiens
MSLQSRLSGRLAQLRAAGQLLVPPRPRPGHLAGATRTRSSTCGPPAFLGVFGRRARTSAGVGAWGAAAVGRTAGVRTWAPLAMAAKVDLSTSTDWKEAKSFLKGLSDKQREEHYFCKDFVRLKKIPTWKEMAKGVAVKVEEPRYKKDKQLNEKISLLRSDITKLEVDAIVNAVDGCIHRAAGPLLTDECRTLQSCKTGKAKITGGYRLPAKCESPTRPQLWAQTGRPCVTGTSGVRPPQECWGTPQGALLNLKGQDPAPTPHT

SEQ ID NO: 870913 - protein, 325 aa, Homo sapiens
MSLQSRLSGRLAQLRAAGQLLVPPRPRPGHLAGATRTRSSTCGPPAFLGVFGRRARTSAGVGAWGAAAVGRTAGVRTWAPLAMAAKVDLSTSTDWKEAKSFLKGLSDKQREEHYFCKDFVRLKKIPTWKEMAKGVAVKVEEPRYKKDKQLNEKISLLRSDITKLEVDAIVNAANSSLLGGGGVDGCIHRAAGPLLTDECRTLQSCKTGKAKITGGYRLPAKYVIHTVGPIAYGEPSASQAAELRSCYLSSLDLLLEHRLRSVAFPCISTGVFGYPCEAAAEIVLATLREWLEQHKDKVDRLIICVFLEKDEDIYRSRLPHYFPVA

SEQ ID NO: 870914 - protein, 334 aa, Homo sapiens
MSLQSRLSGRLAQLRAAGQLLVPPRPRPGHLAGATRTRSSTCGPPAFLGVFGRRARTSAGVGAWGAAAVGRTAGVRTWAPLAMAAKVDLSTSTDWKEAKSFLKGLSDKQREEHYFCKDFVRLKKIPTWKEMAKGVAVKVEEPRYKKDKQLNEKISLLRSDITKLEVDAIVNAANSSLLGGGGVDGCIHRAAGPLLTDECRTLQSCKTGKAKITGGYRLPAKYVIHTVGPIAYGEPSASQAAELRSCYLSSLDLLLEHRLRSVAFPCISTGVFGYPCEAAAEIVLATLREWLEQHKDKVDRLIICVFLEKDEDIYRSRLPHYFPVDPPSGPRSQL

SEQ ID NO: 870915 - protein, 265 aa, Homo sapiens
TALTYGEAVGRTAGVRTWAPLAMAAKVDLSTSTDWKEAKSFLKGLSDKQREEHYFCKDFVRLKKIPTWKEMAKGVAVKVEEPRYKKDKQLNEKISLLRSDITKLEVDAIVNAANSSLLGGGGVDGCIHRAAGPLLTDECRTLQSCKTGKAKITGGYRLPAKYVIHTVGPIAYGEPSASQAAELRSCYLSSLDLLLEHRLRSVAFPCISTGVFGYPCEAAAEIVLATLREWLEQHKDKVDRLIICVFLEKDEDIYRSRLPHYFPVA

SEQ ID NO: 870916 - protein, 276 aa, Homo sapiens
MSLQSRLSGRLAQLRAAGQLLVPPRPRPGHLAGATRTRSSTCGPPAFLGVFGRRARTSAGVGAWGAAAVGRTAGVRTWAPLAMAAKVDLSTSTDWKEAKSFLKGLSDKQREEHYFCKDFVRLKKIPTWKEMAKGVAVKVEEPRYKKDKQLNEKISLLRSDITKLEVDAIVNAANSSLLGGGGVDGCIHRAAGPLLTDECRTLQSCKTGKAKITGGYRLPAKYVIHTVGPIAYGEPSASQAAELRSCYLSSLDLLLEHRLRSVVRDGPRGRAGGGAQ

SEQ ID NO: 870917 - protein, 163 aa, Homo sapiens
MCCTWAADSGANSSLLGGGGVDGCIHRAAGPLLTDECRTLQSCKTGKAKITGGYRLPAKYVIHTVGPIAYGEPSASQAAELRSCYLSSLDLLLEHRLRSVAFPCISTGVFGYPCEAAAEIVLATLREWLEQHKDKVDRLIICVFLEKDEDIYRSRLPHYFPVA

SEQ ID NO: 870918 - protein, 174 aa, Homo sapiens
MSLQSRLSGRLAQLRAAGQLLVPPRPRPGHLAGATRTRSSTCGPPAFLGVFGRRARTSAGVGAWGAAAVGRTAGVRTWAPLAMAAKVDLSTSTDWKEAKSFLKGLSDKQREEHYFCKDFVRLKKIPTWKEMAKGVAVKVEEPRYKKDKQLNEKISLLRSDITKLEVDAIVNAGA

SEQ ID NO: 870919 - protein, 105 aa, Homo sapiens
PHYFPVGTCPAPPHGPPLPRSTLGAGSHCPLPSSLRLPQPTLTGTGKQGLAPCGGPGPRLTRPLTPAHPQAGRETTGQPGRSGTPIDTSDSALPSDPPSGPRSQL

SEQ ID NO: 870920 - protein, 199 aa, Homo sapiens
MLASLVHVPADGPQDQEEEDQSHCPADDARQGQARHGASVLLLVECGGRAIAVGCLCLGTHRCLISYVGIAGLHGDHADDVGGLGLQGCQQVLCLVPLHQGLRDGAHGWAVAQAQPTEPERGGGERGLPRDADGVCRQGLHVDGQGLGAITRGHGVVNVGVGEAQPWPFGLEGKQGTLGRGGRGVVAGRGLGSRIGHAA

SEQ ID NO: 870921 - protein, 325 aa, Homo sapiens; identical to SEQ ID NO: 870913

SEQ ID NO: 870922 - protein, 313 aa, Homo sapiens
MSLQSRLSGRLAQLRAAGQLLVPPRPRPGHLAGATRTRSSTCGPPAFLGVFGRRARTSAGVGAWGAAAVGRTAGVRTWAPLAMAAKVDLSTSTDWKEAKSFLKGLSDKQREEHYFCKDFVRLKKIPTWKEMAKGVAVKVEEPRYKKDKQLNEKISLLRSDITKLEVDAIVNAANSSLLGGGGVDGCIHRAAGPLLTDECRTLQSCKTGKAKITGGYRLPAKYVIHTVGPIAYGEPSASQAAELRSCYLSSLDLLLEHRLRSVAFPCISTGVFGYPCEAAAEIVLATLREWLEQHKDKDEDIYRSRLPHYFPVA

SEQ ID NO: 870923 - protein, 367 aa, Homo sapiens
MSLQSRLSGRLAQLRAAGQLLVPPRPRPGHLAGATRTRSSTCGPPAFLGVFGRRARTSAGVGAWGAAAVGRTAGVRTWAPLAMAAKVDLSTSTDWKEAKSFLKGLSDKQREEHYFCKDFVRLKKIPTWKEMAKGVAVKVEEPRYKKDKQLNEKISLLRSDITKLEVDAIVNAANSSLLGGGGVDGCIHRAAGPLLTDECRTLQSCKTGKAKITGGYRLPAKYVIHTVGPIAYGEPSASQAAELRSCYLSSLDLLLEHRLRSVAFPCISTGVFGESGRKARTRSGRWTQTPGGAGADRGVGGGQSLGLTPAPPASGYPCEAAAEIVLATLREWLEQHKDKVDRLIICVFLEKDEDIYRSRLPHYFPVA

SEQ ID NO: 870924 - protein, 240 aa, Homo sapiens
DVGRGRGALCACGFGLEGAHRGGGLRGGGSALGGKGVSCPLLPRPAGGSEGAEDRVDPRRSDPVAPRRRHPHSGAHRLRGAQRQSGCRAPQLLPEQSGPAAGAPAPLGGEGRPAGEGGRRGAVTMFQPPLTPPRPGVPLHLHRRVWWVWKKGKDQEWAVDPDAGRGRGGQGSGRGQSLGLTPAPPASGYPCEAAAEIVLATLREWLEQHKDKVDRLIICVFLEKDEDIYRSRLPHYFPVA

SEQ ID NO: 870925 - protein, 188 aa, Homo sapiens
MSLQSRLSGRLAQLRAAGQLLVPPRPRPGHLAGATRTRSSTCGPPAFLGVFGRRARTSAGVGAWGAAAVGRTAGVRTWAPLAMAAKVDLSTSTDWKEAKSFLKGLSDKQREEHYFCKDFVRLKKIPTWKEMAKGVAVKVEEPRYKKDKQLNEKISLLRSDITKLEVDAIVNADSHSQEDPVPAWNPRE

SEQ ID NO: 870926 - protein, 105 aa, Homo sapiens
KGFAQRDFSEAPKFTQPLADCTTVTGYNTQLFCCVRASPRPKIIWLKNKMDIQGNPKYRALTHLGICSLEIRKPGPFDGGIYTCKAVNPLGEASVDCRVDVKVPN

SEQ ID NO: 870927 - protein, 109 aa, Homo sapiens
SAGRRGGAGGEQGLGARAAPLGAGPPPLRSAPQAGHGWGRRAVTMSALGSPVRAYDFLLKFLLVGDSDVGKGEILASLQDGAAESPYGHPADSSDVAVAKSEGQRCPGD

SEQ ID NO: 870928 - protein, 322 aa, Homo sapiens
SAGRRGGAGGEQGLGARAAPLGAGPPPLRSAPQAGHGWGRRAVTMSALGSPVRAYDFLLKFLLVGDSDVGKGEILASLQDGAAESPYGHPAGIDYKTTTILLDGRRVKLQLWDTSGQGRFCTIFRSYSRGAQGVILVYDIANRWSFDGIDRWIKEIDEHAPGVPKILVGNRLHLAFKRQVPTEQAQAYAERLGVTFFEVSPLCNFNITESFTELARIVLLRHGMDRLWRPSKVLSLQDLCCRAVVSCTPVHLVDKLPLPIALRSHLKSFSMANGLNARMMHGGSYSLTTSSTHKRSSLRKVKLVRPPQSPPKNCTRNSCKIS

SEQ ID NO: 870929 - protein, 239 aa, Homo sapiens
MPSLTLSAGIDYKTTTILLDGRRVKLQLWDTSGQGRFCTIFRSYSRGAQGVILVYDIANRWSFDGIDRWIKEIDEHAPGVPKILVGNRLHLAFKRQVPTEQAQAYAERLGVTFFEVSPLCNFNITESFTELARIVLLRHGMDRLWRPSKVLSLQDLCCRAVVSCTPVHLVDKLPLPIALRSHLKSFSMANGLNARMMHGGSYSLTTSSTHKRSSLRKVKLVRPPQSPPKNCTRNSCKIS

SEQ ID NO: 870930 - protein, 139 aa, Homo sapiens
MSALGSPVRAYDFLLKFLLVGDSDVGKGEILASLQDGAAESPYGHPAGIDYKTTTILLDGRRVKLQLWDTSGQGRFCTIFRSYSRGAQGVILVYDIANRWSFDGIDRWIKEIDESRSRSWPGSCCCGMGWTGSGGRARC

SEQ ID NO: 870931 - protein, 101 aa, Homo sapiens
HADVRSRGSRKVLSLQDLCCRAVVSCTPVHLVDKLPLPIALRSHLKSFSMANGLNARMMHGGSYSLTTSSTHKRSSLRKVKLVRPPQSPPKNCTRNSCKIS

SEQ ID NO: 870932 - protein, 115 aa, Homo sapiens
MSALGSPVRAYDFLLKFLLVGDSDVGKGEILASLQDGAAESPYGHPAGIDYKTTTILLDGRRVKLQLWDTSGQGRFCTIFRSYSRGAQGVILVYDIANRWSFDGIDRWIKEIDEC

SEQ ID NO: 870933 - protein, 216 aa, Homo sapiens
VCKDGLSKRGPMLRFWVDMNSWGVPRPRAPTLRRQQNLTEVTHAPRLSPARYHAPGVPKILVGNRLHLAFKRQVPTEQAQAYAERLGVTFFEVSPLCNFNITESFTELARIVLLRHGMDRLWRPSKVLSLQDLCCRAVVSCTPVHLVDKLPLPIALRSHLKSFSMANGLNARMMHGGSYSLTTSSTHKRSSLRKVKLVRPPQSPPKNCTRNSCKIS

SEQ ID NO: 870934 - protein, 322 aa, Homo sapiens; identical to SEQ ID NO: 870928

SEQ ID NO: 870935 - protein, 322 aa, Homo sapiens; identical to SEQ ID NO: 870928

SEQ ID NO: 870936 - protein, 1594 aa, Homo sapiens
KHVALTLWDQLGDGTPQHHQKSVELFYQLHNLVPSSSICEDVISQQLTHKDKKIRMEAHAKFAVLWHLTRDLHINKSSSFVRSFDRSLFIMLDSLNSLDGSTSSVGQAWLNQVLQRHDIARVLEPLLLLLLHPKTQRVSVQRVQAERYWNKSPCYPGEESDKHFMQNFACSNVSQVQLITSKGNGEKPLTMDEIENFSLTVNPLSDRLSLLSTSSETIPMVVSDFDLPDQQIEILQSSDSGCSQSSAGDNLSYEVDPETVNAQEDSQMPKESSPDDDVQQVVFDLICKVVSGLEVESASVTSQLEIEAMPPKCSDIDPDEETIKIEDDSIQQSQNALLSNESSQFLSVSAEGGHECVANGISRNSSSPCISGTTHTLHDSSVASIETKSRQRSHSSIQFSFKEKLSEKVSEKETIVKESGKQPGAKPKVKLARKKDDDKKKSSNEKLKQTSVFFSDGLDLENWYSCGEGDISEIESDMGSPGSRKSPNFNIHPLYQHVLLYLQLYDSSRTLYAFSAIKAILKTNPIAFVNAISTTSVNNAYTPQLSLLQNLLARHRISVMGKDFYSHIPVDSNHNFRSSMYIEILISLCLYYMRSHYPTHVKVTAQDLIGNRNMQMMSIEILTLLFTELAKVIESSAKGFPSFISDMLSKCKVQKVILHCLLSSIFSAQKWHSEKMAGKNLVAVEEGFSEDSLINFSEDEFDNGSTLQSQLLKVLQRLIVLEHRVMTIPEENETGFDFVVSDLEHISPHQPMTSLQYLHAQPITCQGMFLCAVIRALHQHCACKMHPQWIGLITSTLPYMGKVLQRVVVSVTLQLCRNLDNLIQQYKYETGLSDSRPLWMASIIPPDMILTLLEGITAIIHYCLLDPTTQYHQLLVSVDQKHLFEARSGILSILHMIMSSVTLLWSILHQADSSEKMTIAASASLTTINLGATKNLRQQILELLGPISMNHGVHFMAAIAFVWNERRQNKTTTRTKVIPAASEEQLLLVELVRSISVMRAETVIQTVKEVLKQPPAIAKDKKHLSLEVCMLQFFYAYIQRIPVPNLVDSWASLLILLKDSIQLSLPAPGQFLILGVLNEFIMKNPSLENKKDQRDLQDVTHKIVDAIGAIAGSSLEQTTWLRRNLEVKPSPKIMVDGTNLESDVEDMLSPAMETANITPSVYSVHALTLLSEVLAHLLDMVFYSDEKERVIPLLVNIMHYVVPYLRNHSAHNAPSYRACVQLLSSLSGYQYTRRAWKKEAFDLFMDPSFFQMDASCVNHWRAIMDNLMTHDKTTFRDLMTRVAVAQSSSLNLFANRDVELEQRAMLLKRLAFAIFSSEIDQYQKYLPDIQERLVESLRLPQVPTLHSQVFLFFRVLLLRMSPQHLTSLWPTMITELVQVFLLMEQELTADEDISRTSGPSVAGLETTYTGGNGFSTSYNSQRWLNLYLSACKFLDLALALPSENLPQFQMYRWAFIPEASDDSGLEVRRQGIHQREFKPYVVRLAKLLRKRAKKNPEEDNSGRTLGWEPGHLLLTICTVRSMEQLLPFFNVLSQVFNSKVTSRCGGHSGSPILYSNAFPNKDMKLENHKPCSSKARQKIEEMVEKDFLEGMIKT

SEQ ID NO: 870937 - protein, 812 aa, Homo sapiens
MSIAQQWIGLITSTLPYMGKVLQRVVVSVTLQLCRNLDNLIQQYKYETGLSDSRPLWMASIIPPDMILTLLEGITAIIHYCLLDPTTQYHQLLVSVDQKHLFEARSGILSILHMIMSSVTLLWSILHQADSSEKMTIAASASLTTINLGATKNLRQQILELLGPISMNHGVHFMAAIAFVWNERRQNKTTTRTKVIPAASEEQLLLVELVRSISVMRAETVIQTVKEVLKQPPAIAKDKKHLSLEVCMLQFFYAYIQRIPVPNLVDSWASLLILLKDSIQLSLPAPGQFLILGVLNEFIMKNPSLENKKDQRDLQDVTHKIVDAIGAIAGSSLEQTTWLRRNLEVKPSPKIMVDGTNLESDVEDMLSPAMETANITPSVYSVHALTLLSEVLAHLLDMVFYSDEKERVIPLLVNIMHYVVPYLRNHSAHNAPSYRACVQLLSSLSGYQYTRRAWKKEAFDLFMDPSFFQMDASCVNHWRAIMDNLMTHDKTTFRDLMTRVAVAQSSSLNLFANRDVELEQRAMLLKRLAFAIFSSEIDQYQKYLPDIQERLVESLRLPQVPTLHSQVFLFFRVLLLRMSPQHLTSLWPTMITELVQVFLLMEQELTADEDISRTSGPSVAGLETTYTGGNGFSTSYNSQRWLNLYLSACKFLDLALALPSENLPQFQMYRWAFIPEASDDSGLEVRRQGIHQREFKPYVVRLAKLLRKRAKKNPEEDNSGRTLGWEPGHLLLTICTVRSMEQLLPFFNVLSQVFNSKVTSRCGGHSGSPILYSNAFPNKDMKLENHKPCSSKARQKIEEMVEKDFLEGMIKT

SEQ ID NO: 870938 - protein, 331 aa, Homo sapiens [sequence omitted]

SEQ ID NO: 870939 - protein, 1490 aa, Homo sapiens
  misc_feature (1478)..(1478): Xaa can be any naturally occurring amino acid
KHVALTLWDQLGDGTPQHHQKSVELFYQLHNLVPSSSICEDVISQQLTHKDKKIRMEAHAKFAVLWHLTRDLHINKSSSFVRSFDRSLFIMLDSLNSLDGSTSSVGQAWLNQVLQRHDIARVLEPLLLLLLHPKTQRVSVQRVQAERYWNKSPCYPGEESDKHFMQNFACSNVSQVQLITSKGNGEKPLTMDEIENFSLTVNPLSDRLSLLSTSSETIPMVVSDFDLPDQQIEILQSSDSGCSQSSAGDNLSYEVDPETVNAQEDSQMPKESSPDDDVQQVVFDLICKVVSGLEVESASVTSQLEIEAMPPKCSDIDPDEETIKIEDDSIQQSQNALLSNESSQFLSVSAEGGHECVANGISRNSSSPCISGTTHTLHDSSVASIETKSRQRSHSSIQFSFKEKLSEKVSEKETIVKESGKQPGAKPKVKLARKKDDDKKKSSNEKLKQTSVFFSDGLDLENWYSCGEGDISEIESDMGSPGSRKSPNFNIHPLYQHVLLYLQLYDSSRTLYAFSAIKAILKTNPIAFVNAISTTSVNNAYTPQLSLLQNLLARHRISVMGKDFYSHIPVDSNHNFRSSMYIEILISLCLYYMRSHYPTHVKVTAQDLIGNRNMQMMSIEILTLLFTELAKVIESSAKGFPSFISDMLSKCKVQKVILHCLLSSIFSAQKWHSEKMAGKNLVAVEEGFSEDSLINFSEDEFDNGSTLQSQLLKVLQRLIVLEHRVMTIPEENETGFDFVVSDLEHISPHQPMTSLQYLHAQPITCQGMFLCAVIRALHQHCACKMHPQWIGLITSTLPYMGKVLQRVVVSVTLQLCRNLDNLIQQYKYETGLSDSRPLWMASIIPPDMILTLLEGITAIIHYCLLDPTTQYHQLLVSVDQKHLFEARSGILSILHMIMSSVTLLWSILHQADSSEKMTIAASASLTTINLGATKNLRQQILELLGPISMNHGVHFMAAIAFVWNERRQNKTTTRTKVIPAASEEQLLLVELVRSISVMRAETVIQTVKEVLKQPPAIAKDKKHLSLEVCMLQFFYAYIQRIPVPNLVDSWASLLILLKDSIQLSLPAPGQFLILGVLNEFIMKNPSLENKKDQRDLQDVTHKIVDAIGAIAGSSLEQTTWLRRNLEVKPSPKIMVDGTNLESDVEDMLSPAMETANITPSVYSVHALTLLSEVLAHLLDMVFYSDEKERVIPLLVNIMHYVVPYLRNHSAHNAPSYRACVQLLSSLSGYQYTRRAWKKEAFDLFMDPSFFQMDASCVNHWRAIMDNLMTHDKTTFRDLMTRVAVAQSSSLNLFANRDVELEQRAMLLKRLAFAIFSSEIDQYQKYLPDIQERLVESLRLPQVPTLHSQVFLFFRVLLLRMSPQHLTSLWPTMITELVQVFLLMEQELTADEDISRTSGPSVAGLETTYTGGNGFSTSYNSQRWLNLYLLVPNSARGELVSSFFFFFFALSGFIDVSHSVIINSSVNCTSMINYFLFAXEFKCKINTTCVV

SEQ ID NO: 870940 - protein, 1594 aa, Homo sapiens; identical to SEQ ID NO: 870936

SEQ ID NO: 870941 - protein, 1559 aa, Homo sapiens
KHVALTLWDQLGDGTPQHHQKSVELFYQLHNLVPSSSICEDVISQQLTHKDKKIRMEAHAKFAVLWHLTRDLHINKSSSFVRSFDRSLFIMLDSLNSLDGSTSSVGQAWLNQVLQRHDIARVLEPLLLLLLHPKTQRVSVQRVQAERYWNKSPCYPGEESDKHFMQNFACSNVSQVQLITSKGNGEKPLTMDEIENFSLTVNPLSDRLSLLSTSSETIPMVVSDFDLPDQQIEILQSSDSGCSQSSAGDNLSYEVDPETVNAQEDSQMPKESSPDDDVQQVVFDLICKVVSGLEVESASVTSQLEIEAMPPKCSDIDPDEETIKIEDDSIQQSQNALLSNESSQFLSVSAEGGHECVANGISRNSSSPCISGTTHTLHDSSVASIETKSRQRSHSSIQFSFKEKLSEKVSEKETIVKESGKQPGAKPKVKLARKKDDDKKKSSNEKLKQTSVFFSDGLDLENWYSCGEGDISEIESDMGSPGSRKSPNFNIHPLYQHVLLYLQLYDSSRTLYAFSAIKAILKTNPIAFVNAISTTSVNNAYTPQLSLLQNLLARHRISVMGKDFYSHIPVDSNHNFRSSMYIEILISLCLYYMRSHYPTHVKVTAQDLIGNRNMQMMSIEILTLLFTELAKVIESSAKGFPSFISDMLSKCKVQKVILHCLLSSIFSAQKWHSEKMAGKNLVAVEEGFSEDSLINFSEDEFDNGSTLQSQLLKVLQRLIVLEHRVMTIPEENETGFDFVVSDLEHISPHQPMTSLQYLHAQPITCQGMFLCAVIRALHQHCACKMHPQWIGLITSTLPYMGKVLQRVVVSVTLQLCRNLDNLIQQYKYETGLSDSRPLWMASIIPPDMILTLLEGITAIIHYCLLDPTTQYHQLLVSVDQKHLFEARSGILSILHMIMSSVTLLWSILHQADSSEKMTIAASASLTTINLGATKNLRQQILELLGPISMNHGVHFMAAIAFVWNERRQNKTTTRTKVIPAASEEQLLLVELVRSISVMRAETVIQTVKEVLKQPPAIAKDKKHLSLEVCMLQFFYAYIQRVLNEFIMKNPSLENKKDQRDLQDVTHKIVDAIGAIAGSSLEQTTWLRRNLEVKPSPKIMVDGTNLESDVEDMLSPAMETANITPSVYSVHALTLLSEVLAHLLDMVFYSDEKERVIPLLVNIMHYVVPYLRNHSAHNAPSYRACVQLLSSLSGYQYTRRAWKKEAFDLFMDPSFFQMDASCVNHWRAIMDNLMTHDKTTFRDLMTRVAVAQSSSLNLFANRDVELEQRAMLLKRLAFAIFSSEIDQYQKYLPDIQERLVESLRLPQVPTLHSQVFLFFRVLLLRMSPQHLTSLWPTMITELVQVFLLMEQELTADEDISRTSGPSVAGLETTYTGGNGFSTSYNSQRWLNLYLSACKFLDLALALPSENLPQFQMYRWAFIPEASDDSGLEVRRQGIHQREFKPYVVRLAKLLRKRAKKNPEEDNSGRTLGWEPGHLLLTICTVRSMEQLLPFFNVLSQVFNSKVTSRCGGHSGSPILYSNAFPNKDMKLENHKPCSSKARQKIEEMVEKDFLEGMIKT

SEQ ID NO: 870942 - protein, 1594 aa, Homo sapiens; identical to SEQ ID NO: 870936

SEQ ID NO: 870943 - protein, 1224 aa, Homo sapiens
KHVALTLWDQLGDGTPQHHQKSVELFYQLHNLVPSSSICEDVISQQLTHKDKKIRMEAHAKFAVLWHLTRDLHINKSSSFVRSFDRSLFIMLDSLNSLDGSTSSVGQAWLNQVLQRHDIARVLEPLLLLLLHPKTQRVSVQRVQAERYWNKSPCYPGEESDKHFMQNFACSNVSQVQLITSKGNGEKPLTMDEIENFSLTVNPLSDRLSLLSTSSETIPMVVSDFDLPDQQIEILQSSDSGCSQSSAGDNLSYEVDPETVNAQEDSQMPKESSPDDDVQQVVFDLICKVVSGLEVESASVTSQLEIEAMPPKCSDIDPDEETIKIEDDSIQQSQNALLSNESSQFLSVSAEGGHECVANGISRNSSSPCISGTTHTLHDSSVASIETKSRQRSHSSIQFSFKEKLSEKVSEKETIVKESGKQPGAKPKVKLARKKDDDKKKSSNEKLKQTSVFFSDGLDLENWYSCGEGDISEIESDMGSPGSRKSPNFNIHPLYQHVLLYLQLYDSSRTLYAFSAIKAILKTNPIAFVNAISTTSVNNAYTPQLSLLQNLLARHRISVMGKDFYSHIPVDSNHNFRSSMYIEILISLCLYYMRSHYPTHVKVTAQDLIGNRNMQMMSIEILTLLFTELAKVIESSAKGFPSFISDMLSKCKVQKVILHCLLSSIFSAQKWHSEKMAGKNLVAVEEGFSEDSLINFSEDEFDNGSTLQSQLLKVLQRLIVLEHRVMTIPEENETGFDFVVSDLEHISPHQPMTSLQYLHAQPITCQGMFLCAVIRALHQHCACKMHPQWIGLITSTLPYMGKVLQRVVVSVTLQLCRNLDNLIQQYKYETGLSDSRPLWMASIIPPDMILTLLEGITAIIHYCLLDPTTQYHQLLVSVDQKHLFEARSGILSILHMIMSSVTLLWSILHQADSSEKMTIAASASLTTINLGATKNLRQQILELLGPISMNHGVHFMAAIAFVWNERRQNKTTTRTKVIPAASEEQLLLVELVRSISVMRAETVIQTVKEVLKQPPAIAKDKKHLSLEVCMLQFFYAYIQRVLNEFIMKNPSLENKKDQRDLQDVTHKIVDAIGAIAGSSLEQTTWLRRNLEVKPSPKIMVDGTNLESDVEDMLSPAMETANITPSVYSVHALTLLSEVLAHLLDMVFYSDEKERVIPLLVNIMHYVVPYLRNHSAHNAPSYRACVQLLSSLSGYQYTRRAWKKEAFDLFMDPSFFQMDASCVNQ

SEQ ID NO: 870944 - protein, 111 aa, Homo sapiens
MDYLGVKSRGSGADLGGEAAGNPARNAQSLSTRIPPSEVPGVQILFAVNSSSSHVWWLVVSRVLQFCIARSIFVRALSVGIGVSRLGVRLSLGGELILPRGTRRHSKPKTA

SEQ ID NO: 870945 - protein, 1114 aa, Homo sapiens
MLKTEKTKPEVLEAHYGSAEPEKVLRVLHRDAILAQEKSIGEDVYEKPISELDRLEEKQKETYRRMLEQLLLAEKCHRRTVYELENEKHKHTDYMNKSDDFTNLLEQERERLKKLLEQEKAYQARKEKENAKRLNKLRDELVKLKSFALMLVDERQMHIEQLGLQSQKVQDLTQKLREEEEKLKAITSKSKEDRQKLLKLEVDFEHKASRFSQEHEEMNAKLANQESHNRQLRLKLVGLTQRIEELEETNKNLQKAEEELQELRDKIAKGECGNSSLMAEVENLRKRVLEMEGKDEEITKTESQCRELRKKLQEEEHHSKELRLEVEKLQKRMSELEKLEEAFSKSKSECTQLHLNLEKEKNLTKDLLNELEVVKSRVKELECSESRLEKAELSLKDDLTKLKSFTVMLVDERKNMMEKIKQEERKVDGLNKNFKVEQGKVMDVTEKLIEESKKLLKLKSEMEEKVYNLTRERDELIGKLKSEEEKSSELSCSVDLLKKRLDGIEEVEREITRGRSRKGSELTCPEDNKIKELTLEIERLKKRLQQLEVVEGDLMKTEDEYDQLEQKFRTEQDKANFLSQQLEEIKHQIAKNKAIEKGEVVSQEAELRHRFRLEEAKSRDLKAEVQALKEKIHELMNKEDQLSQLQVDYSVLQQRFMEEENKNKNMGQEVLNLTKELELSKRYSRALRPSVNGRRMVDVPVTSTGVQTDAVSGEAAEEETPAVFIRKSFQEENHIMSNLRQVGLKKPVERSSVLDRYPPAANELTMRKSWIPWMRKRENGPSITQEKGPRTNSSPGHPGEVVLSPKQGQPLHIRVTPDHENSTATLEITSPTSEEFFSSTTVIPTLGNQKPRITIIPSPNVMPQKQKSGDTTLGPERAMSPVTITTFSREKTPESGRGAFADRPTSPIQIMTVSTSAAPAEIAVSPESQEMPMGRTILKVTPEKQTVPTPVRKYNSNANIITTEDNKIHIHLGSQFKRSPGTSGEGVSPVITVRPVNVTAEKEVSTGTVLRSPRNHLSSRPGASKVTSTITITPVTTSSARGTQSVSGQDGSSQRPTPTRIPMSKGMKAGKPVVAAPGAGNLTKFEPRAETQSMKIELKKSAASSTTSLGGGKG

SEQ ID NO: 870946 - protein, 1143 aa, Homo sapiens
LRPSVNGRRMVDVPVTSTGVQTDAVSGEAAEEETPAVFIRKSFQEENHIDEKVLRVLHRDAILAQEKSIGEDVYEKPISELDRLEEKQKETYRRMLEQLLLAEKCHRRTVYELENEKHKHTDYMNKSDDFTNLLEQERERLKKLLEQEKAYQARKEKENAKRLNKLRDELVKLKSFALMLVDERQMHIEQLGLQSQKVQDLTQKLREEEEKLKAITSKSKEDRQKLLKLEVDFEHKASRFSQEHEEMNAKLANQESHNRQLRLKLVGLTQRIEELEETNKNLQKAEEELQELRDKIAKGECGNSSLMAEVENLRKRVLEMEGKDEEITKTESQCRELRKKLQEEEHHSKELRLEVEKLQKRMSELEKLEEAFSKSKSECTQLHLNLEKEKNLTKDLLNELEVVKSRVKELECSESRLEKAELSLKDDLTKLKSFTVMLVDERKNMMEKIKQEERKVDGLNKNFKVEQGKVMDVTEKLIEESKKLLKLKSEMEEKVYNLTRERDELIGKLKSEEEKSSELSCSVDLLKKRLDGIEEVEREITRGRSRKGSELTCPEDNKIKELTLEIERLKKRLQQLEVVEGDLMKTEDEYDQLEQKFRTEQDKANFLSQQLEEIKHQIAKNKAIEKGEVVSQEAELRHRFRLEEAKSRDLKAEVQALKEKIHELMNKEDQLSQLQVDYSVLQQRFMEEENKNKNMGQEVLNLTKELELSKRYSRALRPSVNGRRMVDVPVTSTGVQTDAVSGEAAEEETPAVFIRKSFQEENHIMSNLRQVGLKKPVERSSVLDRYPPAANELTMRKSWIPWMRKRENGPSITQEKGPRTNSSPGHPGEVVLSPKQGQPLHIRVTPDHENSTATLEITSPTSEEFFSSTTVIPTLGNQKPRITIIPSPNVMPQKQKSGDTTLGPERAMSPVTITTFSREKTPESGRGAFADRPTSPIQIMTVSTSAAPAEIAVSPESQEMPMGRTILKVTPEKQTVPTPVRKYNSNANIITTEDNKIHIHLGSQFKRSPGTSGEGVSPVITVRPVNVTAEKEVSTGTVLRSPRNHLSSRPGASKVTSTITITPVTTSSARGTQSVSGQDGSSQRPTPTRIPMSKGMKAGKPVVAAPGAGNLTKFEPRAETQSMKIELKKSAASSTTSLGGGKG

SEQ ID NO: 870947 - protein, 1078 aa, Homo sapiens
MLKTEKTKPEVLEAHYGSAEPEKVLRVLHRDAILAQEKSIGEDVYEKPISELDRLEEKQKETYRRMLEQLLLAEKCHRRTVYELENEKHKHTDYMNKSDDFTNLLEQERERLKKLLEQEKAYQARKEKENAKRLNKLRDELVKLKSFALMLVDERQMHIEQLGLQSQKVQDLTQKLREEEEKLKAITSKSKEDRQKLLKLEVDFEHKASRFSQEHEEMNAKLANQESHNRQLRLKLVGLTQRIEELEETNKNLQKAEEELQELRDKIAKGECGNSSLMAEVENLRKRVLEMEGKDEEITKTESQCRELRKKLQEEEHHSKELRLEVEKLQKRMSELEKLEEAFSKSKSECTQLHLNLEKEKNLTKDLLNELEVVKSRVKELECSESRLEKAELSLKDDLTKLKSFTVMLVDERKNMMEKIKQEERKVDGLNKNFKVEQGKVMDVTEKLIEESKKLLKLKSEMEEKVYNLTRERDELIGKLKSEEEKSSELSCSVDLLKKRLDGIEEVEREITRGRSRKGSELTCPEDNKIKELTLEIERLKKRLQQLEVVEGDLMKTEDEYDQLEQKFRTEQDKANFLSQQLEEIKHQIAKNKAIEKGEVVSQEAELRHRFRLEEAKSRDLKAEVQALKEKIHELMNKEDQLSQLQVDYSVLQQRFMEEENKNKNMGQEVLNLTKELELSKRYSRALRPSVNGRRMVDVPVTSTGVQTDAVSGEAAEEETPAVFIRKSFQEENHIMSNLRQVGLKKPVERSSVLDRYPPAANELTMRKSWIPWMRKRENGPSITQEKGPRTNSSPGHPGEVVLSPKQGQPLHIRVTPDHENSTATLEITSPTSEEFFSSTTVIPTLGNQKPRITIIPSPNVMPQKQKSGDTTLGPERAMSPVTITTFSREKTPESGRGAFADRPTSPIQIMTVSTSAAPAEIAVSPESQEMPMGRTILKVTPEKQTVPTPVRKYNSNANIITTEDNKIHIHLGSQFKRSPGTSGEGVSPVITVRPVNVTAEKEVSTGTVLRSPRNHLSSRPGASKVTSTITITPVTTSSARGTQSVSGQDGSSQRPTPTRIPMSKESIIIHQLRMNSR

SEQ ID NO: 870948 - protein, 965 aa, Homo sapiens
MLVDERQMHIEQLGLQSQKVQDLTQKLREEEEKLKAITSKSKEDRQKLLKLEVDFEHKASRFSQEHEEMNAKLANQESHNRQLRLKLVGLTQRIEELEETNKNLQKAEEELQELRDKIAKGECGNSSLMAEVENLRKRVLEMEGKDEEITKTESQCRELRKKLQEEEHHSKELRLEVEKLQKRMSELEKLEEAFSKSKSECTQLHLNLEKEKNLTKDLLNELEVVKSRVKELECSESRLEKAELSLKDDLTKLKSFTVMLVDERKNMMEKIKQEERKVDGLNKNFKVEQGKVMDVTEKLIEESKKLLKLKSEMEEKVYNLTRERDELIGKLKSEEEKSSELSCSVDLLKKRLDGIEEVEREITRGRSRKGSELTCPEDNKIKELTLEIERLKKRLQQLEVVEGDLMKTEDEYDQLEQKFRTEQDKANFLSQQLEEIKHQIAKNKAIEKGEVVSQEAELRHRFRLEEAKSRDLKAEVQALKEKIHELMNKEDQLSQLQVDYSVLQQRFMEEENKNKNMGQEVLNLTKELELSKRYSRALRPSVNGRRMVDVPVTSTGVQTDAVSGEAAEEETPAVFIRKSFQEENHIMSNLRQVGLKKPVERSSVLDRYPPAANELTMRKSWIPWMRKRENGPSITQEKGPRTNSSPGHPGEVVLSPKQGQPLHIRVTPDHENSTATLEITSPTSEEFFSSTTVIPTLGNQKPRITIIPSPNVMPQKQKSGDTTLGPERAMSPVTITTFSREKTPESGRGAFADRPTSPIQIMTVSTSAAPAEIAVSPESQEMPMGRTILKVTPEKQTVPTPVRKYNSNANIITTEDNKIHIHLGSQFKRSPGTSGEGVSPVITVRPVNVTAEKEVSTGTVLRSPRNHLSSRPGASKVTSTITITPVTTSSARGTQSVSGQDGSSQRPTPTRIPMSKGMKAGKPVVAAPGAGNLTKFEPRAETQSMKIELKKSAASSTTSLGGGKG

SEQ ID NO: 870949 - protein, 453 aa, Homo sapiens
MLKTEKTKPEVLEAHYGSAEPEKVLRVLHRDAILAQEKSIGEDVYEKPISELDRLEEKQKETYRRMLEQLLLAEKCHRRTVYELENEKHKHTDYMNKSDDFTNLLEQERERLKKLLEQEKAYQARKEKENAKRLNKLRDELVKLKSFALMLVDERQMHIEQLGLQSQKVQDLTQKLREEEEKLKAITSKSKEDRQKLLKLEVDFEHKASRFSQEHEEMNAKLANQESHNRQLRLKLVGLTQRIEELEETNKNLQKAEEELQELRDKIAKGECGNSSLMAEVENLRKRVLEMEGKDEEITKTESQCRELRKKLQEEEHHSKELRLEVEKLQKRMSELEKLEEAFSKSKSECTQLHLNLEKEKNLTKDLLNELEVVKSRVKELECSESRLEKAELSLKDDLTKLKSFTVMLVDERKNMMEKIKQEERKVDGLNKNFKVEQGKVMDVTEKLIASQI

SEQ ID NO: 870950 - protein, 70 aa, Homo sapiens
IQQGWGRSTGTRAVFAHPMTPRTGSGKQEVPGGCGRKCPKASLSPGCPRGSDFPPLPASWLSPEMLRVTA

SEQ ID NO: 870951 - protein, 168 aa, Homo sapiens
AASARRPLPLPAQALQLGQSGGGSGEEWTPLARMVLESVARIVKVQLPAYLKRLPVPESITGFARLTVSEWLRLLPFLGVLALLGYLAVRPFLPKKKQQKDSLINLKIQKENPKVVNEINIEDLCLTKAAYCRCWRSKTFPACDGSHNKHNELTGDNVGPLILKKKEV

SEQ ID NO: 870952 - protein, 168 aa, Homo sapiens; identical to SEQ ID NO: 870951

SEQ ID NO: 870953 - protein, 160 aa, Homo sapiens
RSCLGNACEAVSGCLMPQGLLSSELSPVSFRGKIPGFCREGAELGTGQSLSSPVLLIALFSEWLRLLPFLGVLALLGYLAVRPFLPKKKQQKDSLINLKIQKENPKVVNEINIEDLCLTKAAYCRCWRSKTFPACDGSHNKHNELTGDNVGPLILKKKEV

SEQ ID NO: 870954 - protein, 80 aa, Homo sapiens
AASARRPLPLPAQALQLGQSGGGSGEEWTPLARMVLESVARIVKVQLPAYLKRLPVPESITGFARLTESCSCHPGWSAMA

SEQ ID NO: 870955 - protein, 183 aa, Homo sapiens
AASARRPLPLPAQALQLGQSGGGSGEEWTPLARMVLESVARIVKVQLPAYLKRLPVPESITGFARLTVSEWLRLLPFLGVLALLGYLAVRPFLPKKKQQKDSLINLKIQKENPKVVNEINIEDLCLTKAAYCRCWRSKTVRCLFTCTLKFCSARIVSPLKSPVLKFFKMREFSVIFGIERPYS

SEQ ID NO: 870956 - protein, 168 aa, Homo sapiens; identical to SEQ ID NO: 870951

SEQ ID NO: 870957 - protein, 168 aa, Homo sapiens; identical to SEQ ID NO: 870951

SEQ ID NO: 870958 - protein, 168 aa, Homo sapiens; identical to SEQ ID NO: 870951

SEQ ID NO: 870959 - protein, 433 aa, Homo sapiens
MLAATVLTLALLGNAHACSKGTSHEAGIVCRITKPALLVLNHETAKVIQTAFQRASYPDITGEKAMMLLGQVKYGLHNIQISHLSIASSQVELVEAKSIDVSIQNVSVVFKGTLKYGYTTAWWLGIDQSIDFEIDSAIDLQINTQLTCDSGRVRTDAPDCYLSFHKLLLHLQGEREPGWIKQLFTNFISFTLKLVLKGQICKEINVISNIMADFVQTRAASILSDGDIGVDISLTGDPVITASYLESHHKAVLETWGFNTNQEIFQEVVGGFPSQAQVTVHCLKMPKISCQNKGVVVNSSVMVKFLFPRPDQQHSVAYTFEEDIVTTVQASYSKKKLFLSLLDFQITPKTVSNLTESSSESVQSFLQSMITAVGIPEVMSRLEVVFTALMNSKGVSLFDIINPEIITRDGFLLLQMDFGFPEHLLVDFLQSLS

SEQ ID NO: 870960 - protein, 493 aa, Homo sapiens [sequence omitted]

SEQ ID NO: 870961 - protein, 246 aa, Homo sapiens
MLAATVLTLALLGNAHACSKGTSHEAGIVCRITKPALLVLNHETAKVIQTAFQRASYPDITGEKAMMLLGQVKYGLHNIQISHLSIASSQVELVEAKSIDVSIQNVSVVFKGTLKYGYTTAWWLGIDQSIDFEIDSAIDLQINTQLTCDSGRVRTDAPDCYLSFHKLLLHLQGEREAWVGSKAAVHKISSSFNLLKAGSLNRDRNPAKGEFNAHFFLNHSWAPEFLGSQDPGVLAQAFPFPRNRHA

SEQ ID NO: 870962 - protein, 1103 aa, Homo sapiens
MTACARRAGGLPDPGLCGPAWWAPSLPRLPRALPRLPLLLLLLLLQPPALSAVFTVGVLGPWACDPIFSRARPDLAARLAAARLNRDPGLAGGPRFEVALLPEPCRTPGSLGAVSSALARVSGLVGPVNPAACRPAELLAEEAGIALVPWGCPWTQAEGTTAPAVTPAADALYALLRAFGWARVALVTAPQDLWVEAGRSLSTALRARGLPVASVTSMEPLDLSGAREALRKVRDGPRVTAVIMVMHSVLLGGEEQRYLLEAAEELGLTDGSLVFLPFDTIHYALSPGPEALAALANSSQLRRAHDAVLTLTRHCPSEGSVLDSLRRAQERRELPSDLNLQQVSPLFGTIYDAVFLLARGVAEARAAAGGRWVSGAAVARHIRDAQVPGFCGDLGGDEEPPFVLLDTDAAGDRLFATYMLDPARGSFLSAGTRMHFPRGGSAPGPDPSCWFDPNNICGGGLEPGLVFLGFLLVVGMGLAGAFLAHYVRHRLLHMQMVSGPNKIILTVDDITFLHPHGGTSRKVAQGSRSSLGARSMSDIRSGPSQHLDSPNIGVYEGDRVWLKKFPGDQHIAIRPATKTAFSKLQELRHENVALYLGLFLARGAEGPAALWEGNLAVVSEHCTRGSLQDLLAQREIKLDWMFKSSLLLDLIKGIRYLHHRGVAHGRLKSRNCIVDGRFVLKITDHGHGRLLEAQKVLPEPPRAEDQLWTAPELLRDPALERRGTLAGDVFSLAIIMQEVVCRSAPYAMLELTPEEVVQRVRSPPPLCRPLVSMDQAPVECILLMKQCWAEQPELRPSMDHTFDLFKNINKGRKTNIIDSMLRMLEQYSSNLEDLIRERTEELELEKQKTDRLLTQMLPPSVAEALKTGTPVEPEYFEQVTLYFSDIVGFTTISAMSEPIEVVDLLNDLYTLFDAIIGSHDVYKVETIGDAYMVASGLPQRNGQRHAAEIANMSLDILSAVGTFRMRHMPEVPVRIRIGLHSGPCVAGVVGLTMPRYCLFGDTVNTASRMESTGLPYRIHVNLSTVGILRALDSGYQVELRGRTELKGKGAEDTFWLVGRRGFNKPIPKPPDLQPGSSNHGISLQEIPPERRRKLEKARPGQFS

SEQ ID NO: 870963 - protein, 463 aa, Homo sapiens
MFKSSLLLDLIKGIRYLHHRGVAHGRLKSRNCIVDGRFVLKITDHGHGRLLEAQKVLPEPPRAEDQLWTAPELLRDPALERRGTLAGDVFSLAIIMQEVVCRSAPYAMLELTPEEVVQRVRSPPPLCRPLVSMDQAPVECILLMKQCWAEQPELRPSMDHTFDLFKNINKGRKTNIIDSMLRMLEQYSSNLEDLIRERTEELELEKQKTDRLLTQMLPPSVAEALKTGTPVEPEYFEQVTLYFSDIVGFTTISAMSEPIEVVDLLNDLYTLFDAIIGSHDVYKVETIGDAYMVASGLPQRNGQRHAAEIANMSLDILSAVGTFRMRHMPEVPVRIRIGLHSGPCVAGVVGLTMPRYCLFGDTVNTASRMESTGLPYRIHVNLSTVGILRALDSGYQVELRGRTELKGKGAEDTFWLVGRRGFNKPIPKPPDLQPGSSNHGISLQEIPPERRRKLEKARPGQFS

SEQ ID NO: 870964 - protein, 343 aa, Homo sapiens
MKTPRMVVMAPRTLFLLLSGALTLTETWAGSHSMRYFSAAVSRPGRGEPRFIAMGYVDDTQFVRFDSDSACPRMEPRAPWVEQEGPEYWEEETRNTKAHAQTDRMNLQTLRGYYNQSEASSHTLQWMIGCDLGSDGRLLRGYEQYAYDGKDYLALNEDLRSWTAADTAAQISKRKCEAANVAEQRRAYLEGTCVEWLHRYLENGKEMLQRADPPKTHVTHHPVFDYEATLRCWALGFYPAEIILTWQRDGEDQTQDVELVETRPAGDGTFQKWAAVVVPSGEEQRYTCHVQHEGLPEPLMLRWKQSSLPTIPIMGIVAGLVVLAAVVTGAAVAAVLWRKKSSD

SEQ ID NO: 870965 - protein, 464 aa, Homo sapiens
MKTPRMVVMAPRTLFLLLSGALTLTETWAGSHSMRYFSAAVSRPGRGEPRFIAMGYVDDTQFVRFDSDSACPRMEPRAPWVEQEGPEYWEEETRNTKAHAQTDRMNLQTLRGYYNQSEASSHTLQWMIGCDLGSDGRLLRGYEQYAYDGKDYLALNEDLRSWTAADTAAQISKRKCEAANVAEQRRAYLEGTCVEWLHRYLENGKEMLQRADPPKTHVTHHPVFDYEATLRCWALGFYPAEIILTWQRDGEDQTQDVELVETRPAGDGTFQKWAAVVVPSGEEQRYTCHVQHEGLPEPLMLRWKYRREMEASCLLGKAGASLKTFNRVGGEGWGSETLTFTSFPRAVFPAHHPHHGYRCWPGCPCSCSHWSCGRCCAVEEEELRLKRRELLSGCNVKQLPCVGLSGKSLCDFKNPDFSLCRDQPTPVPTMTLFLMLNCIPSPITFPVPEKGLGCLRLCLKFVVH

SEQ ID NO: 870966 - protein, 343 aa, Homo sapiens; identical to SEQ ID NO: 870964

SEQ ID NO: 870967 - protein, 159 aa, Homo sapiens
MKTPRMVVMAPRTLFLLLSGALTLTETWAGSHSMRYFSAAVSRPGRGEPRFIAMGYVDDTQFVRFDSDSACPRMEPRAPWVEQEGPEYWEEETRNTKAHAQTDRMNLQTLRGYYNQSEAKQSSLPTIPIMGIVAGLVVLAAVVTGAAVAAVLWRKKSSD

SEQ ID NO: 870968 - protein, 343 aa, Homo sapiens; identical to SEQ ID NO: 870964

SEQ ID NO: 870969 - protein, 328 aa, Homo sapiens
MKTPRMVVMAPRTLFLLLSGALTLTETWAGSHSMRYFSAAVSRPGRGEPRFIAMGYVDDTQFVRFDSDSACPRMEPRAPWVEQEGPEYWEEETRNTKAHAQTDRMNLQTLRGYYNQSEASSHTLQWMIGCDLGSDGRLLRGYEQYAYDGKDYLALNEDLRSWTAADTAAQISKRKCEAANVAEQRRAYLEGTCVEWLHRYLENGKEMLQRADPPKTHVTHHPVFDYEATLRCWALGFYPAEIILTWQRDGEDQTQDVELVETRPAGDGTFQKWAAVVVPSGEEQRYTCHVQHEGLPEPLMLRWRAIFPAFLYPNVVFVVLHTSSRCPS

SEQ ID NO: 870970 - protein, 251 aa, Homo sapiens
MKTPRMVVMAPRTLFLLLSGALTLTETWAGSHSMRYFSAAVSRPGRGEPRFIAMGYVDDTQFVRFDSDSACPRMEPRAPWVEQEGPEYWEEETRNTKAHAQTDRMNLQTLRGYYNQSEANPPKTHVTHHPVFDYEATLRCWALGFYPAEIILTWQRDGEDQTQDVELVETRPAGDGTFQKWAAVVVPSGEEQRYTCHVQHEGLPEPLMLRWKQSSLPTIPIMGIVAGLVVLAAVVTGAAVAAVLWRKKSSD

SEQ ID NO: 870971 - protein, 130 aa, Homo sapiens
PISIQSTLHPVHTPSRSLLHPVHTPSCLHPIQSTPRPVHTLSSTHPIQSTPHPDHTPSSTHPIQYTPLLVYTPSRPHPIQSTLHPVHTPSRPHLTQTTPHPVHTPSSPHPIQTTLYPVHAPYRPYPIQTT

SEQ ID NO: 870972 - protein, 483 aa, Homo sapiens
HGSQLIPRYRVAAGSRAPRLCFPRGSGDMARKALKLASWTSMALAASGIYFYSNKYLDPNDFGAVRVGRAVATTAVISYDYLTSLKSVPYGSEEYLQLRSKIHDLFQSFDDTPLGTASLAQVHKAVLHDGRTVAVKVQHPKVRAQSSKDILLMEVLVLAVKQLFPEFEFMWLVDEAKKNLPLELDFLNEGRNAEKVSQMLRHFDFLKVPRIHWDLSTERVLLMEFVDGGQVNDRDYMERNKIDVNEISRHLGKMYSEMIFVNGFVHCDPHPGNVLVRKHPGTGKAEIVLLDHGLYQMLTEEFRLNYCHLWQSLIWTDMKRVKEYSQRLGAGDLYPLFACMLTARSWDSVNRGISQAPVTATEDLEIRNNAANYLPQISHLLNHVPRQMLLILKTNDLLRGIEAALGTRASASSFLNMSRCCIRALAEHKKKNTCSFFRRTQISFSEAFNLWQINLHELILRVKGLKLADRVLALICWLFPAPL

SEQ ID NO: 870973 - protein, 551 aa, Homo sapiens
HGSQLIPRYRVAAGSRAPRLCFPRGSGDMARKALKLASWTSMALAASGIYFYSNKYLDPNDFGAVRVGRAVATTAVISYDYLTSLKSVPYGSEEYLQLRSKVHLRSARRLCELCCANRGTFIKVGQHLGALDYLLPEEYTSTLKVLHSQAPQSSMQEIRQVIREDLGKEIHDLFQSFDDTPLGTASLAQVHKAVLHDGRTVAVKVQHPKVRAQSSKDILLMEVLVLAVKQLFPEFEFMWLVDEAKKNLPLELDFLNEGRNAEKVSQMLRHFDFLKVPRIHWDLSTERVLLMEFVDGGQVNDRDYMERNKIDVNEISRHLGKMYSEMIFVNGFVHCDPHPGNVLVRKHPGTGKAEIVLLDHGLYQMLTEEFRLNYCHLWQSLIWTDMKRVKEYSQRLGAGDLYPLFACMLTARSWDSVNRGISQAPVTATEDLEIRNNAANYLPQISHLLNHVPRQMLLILKTNDLLRGIEAALGTRASASSFLNMSRCCIRALAEHKKKNTCSFFRRTQISFSEAFNLWQINLHELILRVKGLKLADRVLALICWLFPAPL

SEQ ID NO: 870974 - protein, 254 aa, Homo sapiens
RIDVSGEELPPAPLLFQISRHLGKMYSEMIFVNGFVHCDPHPGNVLVRKHPGTGKAEIVLLDHGLYQMLTEEFRLNYCHLWQSLIWTDMKRVKEYSQRLGAGDLYPLFACMLTARSWDSVNRGISQAPVTATEDLEIRNNAANYLPQISHLLNHVPRQMLLILKTNDLLRGIEAALGTRASASSFLNMSRCCIRALAEHKKKNTCSFFRRTQISFSEAFNLWQINLHELILRVKGLKLADRVLALICWLFPAPL

SEQ ID NO: 870975 - protein, 310 aa, Homo sapiens
RDCVSRNNNNNKKEMGQKVVRPDVGDSPTRSDVEVPRIHWDLSTERVLLMEFVDGGQVNDRDYMERNKIDVNEISRHLGKMYSEMIFVNGFVHCDPHPGNVLVRKHPGTGKAEIVLLDHGLYQMLTEEFRLNYCHLWQSLIWTDMKRVKEYSQRLGAGDLYPLFACMLTARSWDSVNRGISQAPVTATEDLEIRNNAANYLPQISHLLNHVPRQMLLILKTNDLLRGIEAALGTRASASSFLNMSRCCIRALAEHKKKNTCSFFRRTQISFSEAFNLWQINLHELILRVKGLKLADRVLALICWLFPAPL

SEQ ID NO: 870976 - protein, 147 aa, Homo sapiens
HGSQLIPRYRVAAGSRAPRLCFPRGSGDMARKALKLASWTSMALAASGIYFYSNKYLDPNDFGAVRVGRAVATTAVISYDYLTSLKSVPYGSEEYLQLRSKSLAVSPRLECIGVISAHCNLYLLGSSDSPASASQVAGTTEIMACHL

SEQ ID NO: 870977 - protein, 590 aa, Homo sapiens
HGSQLIPRYRVAAGSRAPRLCFPRGSGDMARKALKLASWTSMALAASGIYFYSNKYLDPNDFGAVRVGRAVATTAVISYDYLTSLKSVPYGSEEYLQLRSKSLAVSPRLECIGVISAHCNLYLLGSSDSPASASQELGLQVHLRSARRLCELCCANRGTFIKVGQHLGALDYLLPEEYTSTLKVLHSQAPQSSMQEIRQVIREDLGKEIHDLFQSFDDTPLGTASLAQVHKAVLHDGRTVAVKVQHPKVRAQSSKDILLMEVLVLAVKQLFPEFEFMWLVDEAKKNLPLELDFLNEGRNAEKVSQMLRHFDFLKVPRIHWDLSTERVLLMEFVDGGQVNDRDYMERNKIDVNEISRHLGKMYSEMIFVNGFVHCDPHPGNVLVRKHPGTGKAEIVLLDHGLYQMLTEEFRLNYCHLWQSLIWTDMKRVKEYSQRLGAGDLYPLFACMLTARSWDSVNRGISQAPVTATEDLEIRNNAANYLPQISHLLNHVPRQMLLILKTNDLLRGIEAALGTRASASSFLNMSRCCIRALAEHKKKNTCSFFRRTQISFSEAFNLWQINLHELILRVKGLKLADRVLALICWLFPAPL

SEQ ID NO: 870978 - protein, 485 aa, Homo sapiens
HGSQLIPRYRVAAGSRAPRLCFPRGSGDMARKALKLASWTSMALAASGIYFYSNKYLDPNDFGAVRVGRAVATTAVISYDYLTSLKSVPYGSEEYLQLRSKVHLRSARRLCELCCANRGTFIKVGQHLGALDYLLPEEYTSTLKVLHSQAPQSSMQEIRQVIREDLGKEIHDLFQSFDDTPLGTASLAQVHKAVLHDGRTVAVKVQHPKVRAQSSKDILLMEVLVLAVKQLFPEFEFMWLVDEAKKNLPLELDFLNEGRNAEKVSQMLRHFDFLKVPRIHWDLSTERVLLMEFVDGGQVNDRDYMERNKIDVNEISRHLGKMYSEMIFVNGFVHCDPHPGNVLVRKHPGTGKAEIVLLDHGLYQDLEIRNNAANYLPQISHLLNHVPRQMLLILKTNDLLRGIEAALGTRASASSFLNMSRCCIRALAEHKKKNTCSFFRRTQISFSEAFNLWQINLHELILRVKGLKLADRVLALICWLFPAPL

SEQ ID NO: 870979 - protein, 173 aa, Homo sapiens [sequence omitted]

SEQ ID NO: 870980 - protein, 51 aa, Homo sapiens
PPRIASGARGNAAKALLENFGFELVIQYNENRQKVQKKGKSGEGENTDKLE

SEQ ID NO: 870981 - protein, 256 aa, Homo sapiens
AGSGAAASRPRRIRPAPAGLELDPELGKLEKQAQTRKPRYGKSLSKESFPRFTPRLHQGTAWAYGLPNPKRPQPRAGIRPSGREGRRRPQSAGAGGARPQDARGWVGRREGRQQARGCFPSVRTAGPGGHFESAKRGGKMAAWAPGRSPRQGPAEPLLPFVQPRGPQKRNARRERPVRSPQTDARLFITARPRGKSGCRLPAHSPPDPPSRLPGPRSRSRRARLCVSWLLGRKRLPDMLWSQKTAKREAEAPVARV

SEQ ID NO: 870982 - protein, 75 aa, Homo sapiens
  misc_feature (62)..(62): Xaa can be any naturally occurring amino acid
MTCAHCRTPLQKGQTAYQRKGLPQLFCSSSCLTTFSKKPSGKKTCTFCKKEILENKDRLVGXGFVLGGFPSHEVP

SEQ ID NO: 870983 - protein, 1358 aa, Homo sapiens
MDPSDFPSPFDPLTLPEKPLAGDLPVDMEFGEDLLESQTAPTRGWAPPGPSPSSGALDLLDTPAGLEKDPGVLDGATELLGLGGLLYKAPSPPEVDHGPEGTLAWDAGDQTLEPGPGGQTPEVVPPDPGAGANSCSPEGLLEPLAPDSPITLQSPHIEEEETTSIATARRGSPGQEEELPQGQPQSPNAPPSPSVGETLGDGINSSQTKPGGSSPPAHPSLPGDGLTAKASEKPPERKRSERVRRAEPPKPEVVDSTESIPVSDEDSDAMVDDPNDEDFVPFRPRRSPRMSLRSSVSQRAGRSAVGTKMTCAHCRTPLQKGQTAYQRKGLPQLFCSSSCLTTFSKKPSGKKTCTFCKKEIWNTKDSVVAQTGSGGSFHEFCTSVCLSLYEAQQQRPIPQSGDPADATRCSICQKTGEVLHEVSNGSVVHRLCSDSCFSKFRANKGLKTNCCDQCGAYIYTKTGSPGPELLFHEGQQKRFCNTTCLGAYKKKNTRVYPCVWCKTLCKNFEMLSHVDRNGKTSLFCSLCCTTSYKVKQAGLTGPPRPCSFCRRSLSDPCYYNKVDRTVYQFCSPSCWTKFQRTSPEGGIHLSCHYCHSLFSGKPEVLDWQDQVFQFCCRDCCEDFKRLRGVVSQCEHCRQEKLLHEKLRFSGVEKSFCSEGCVLLYKQDFTKKLGLCCITCTYCSQTCQRGVTEQLDGSTWDFCSEDCKSKYLLWYCKAARCHACKRQGKLLETIHWRGQIRHFCNQQCLLRFYSQQNQPNLDTQSGPESLLNSQSPESKPQTPSQTKVENSNTIPVKTRSAPTAPTPPPPPPPATPRKNKAAMCKPLMQNRGVSCKVEMKSKGSQTEEWKPQVIVLPIPVPIFVPVPMHLYCQKVPVPFSMPIPVPVPMFLPTTLESTDKIVETIEELKVKIPSNPLEADILAMAEMIAEAEELDKASSDLCDLVSNQSAEGLLEDCDLFGPARDDVLAMAVKMANVLDEPGQDLEADFPKNPLDINPSVDFLFDCGLVGPEDVSTEQDLPRTMRKGQKRLVLSESCSRDSMSSQPSCTGLNYSYGVNAWKCWVQSKYANGETSKGDELRFGPKPMRIKEDILACSAAELNYGLAQFVREITRPNGERYEPDSIYYLCLGIQQYLLENNRMVNIFTDLYYLTFVQELNKSLSTWQPTLLPNNTVFSRVEEEHLWECKQLGVYSPFVLLNTLMFFNTKFFGLQTAEEHMQLSFTNVVRQSRKCTTPRGTTKVVSIRYYAPVRQRKGRDTGPGKRKREDEAPILEQRENRMNPLRCPVKFYEFYLSKCPESLRTRNDVFYLQPERSCIAESPLWYSVIPMDRSMLESMLNRILAVREIYEELGRPGEEDLD

SEQ ID NO: 870984 - protein, 827 aa, Homo sapiens
MDPSDFPSPFVTPVYYNKVDRTVYQFCSPSCWTKFQRTSPEGGIHLSCHYCHSLFSGKPEVLDWQDQVFQFCCRDCCEDFKRLRGVVSQCEHCRQEKLLHEKLRFSGVEKSFCSEGCVLLYKQDFTKKLGLCCITCTYCSQTCQRGVTEQLDGSTWDFCSEDCKSKYLLWYCKAARCHACKRQGKLLETIHWRGQIRHFCNQQCLLRFYSQQNQPNLDTQSGPESLLNSQSPESKPQTPSQTKVENSNTVRTPEENGNLGKIPVKTRSAPTAPTPPPPPPPATPRKNKAAMCKPLMQNRGVSCKVEMKSKGSQTEEWKPQVIVLPIPVPIFVPVPMHLYCQKVPVPFSMPIPVPVPMFLPTTLESTDKIVETIEELKVKIPSNPLEADILAMAEMIAEAEELDKASSDLCDLVSNQSAEGLLEDCDLFGPARDDVLAMAVKMANVLDEPGQDLEADFPKNPLDINPSVDFLFDCGLVGPEDVSTEQDLPRTMRKGQKRLVLSESCSRDSMSSQPSCTGLNYSYGVNAWKCWVQSKYANGETSKGDELRFGPKPMRIKEDILACSAAELNYGLAQFVREITRPNGERYEPDSIYYLCLGIQQYLLENNRMVNIFTDLYYLTFVQELNKSLSTWQPTLLPNNTVFSRVEEEHLWECKQLGVYSPFVLLNTLMFFNTKFFGLQTAEEHMQLSFTNVVRQSRKCTTPRGTTKVVSIRYYAPVRQRKGRDTGPGKRKREDEAPILEQRENRMNPLRCPVKFYEFYLSKCPESLRTRNDVFYLQPERSCIAESPLWYSVIPMDRSMLESMLNRILAVREIYEELGRPGEEDLD

SEQ ID NO: 870985 - protein, 1370 aa, Homo sapiens
MDPSDFPSPFDPLTLPEKPLAGDLPVDMEFGEDLLESQTAPTRGWAPPGPSPSSGALDLLDTPAGLEKDPGVLDGATELLGLGGLLYKAPSPPEVDHGPEGTLAWDAGDQTLEPGPGGQTPEVVPPDPGAGANSCSPEGLLEPLAPDSPITLQSPHIEEEETTSIATARRGSPGQEEELPQGQPQSPNAPPSPSVGETLGDGINSSQTKPGGSSPPAHPSLPGDGLTAKASEKPPERKRSERVRRAEPPKPEVVDSTESIPVSDEDSDAMVDDPNDEDFVPFRPRRSPRMSLRSSVSQRAGRSAVGTKMTCAHCRTPLQKGQTAYQRKGLPQLFCSSSCLTTFSKKPSGKKTCTFCKKEIWNTKDSVVAQTGSGGSFHEFCTSVCLSLYEAQQQRPIPQSGDPADATRCSICQKTGEVLHEVSNGSVVHRLCSDSCFSKFRANKGLKTNCCDQCGAYIYTKTGSPGPELLFHEGQQKRFCNTTCLGAYKKKNTRVYPCVWCKTLCKNFEMLSHVDRNGKTSLFCSLCCTTSYKVKQAGLTGPPRPCSFCRRSLSDPCYYNKVDRTVYQFCSPSCWTKFQRTSPEGGIHLSCHYCHSLFSGKPEVLDWQDQVFQFCCRDCCEDFKRLRGVVSQCEHCRQEKLLHEKLRFSGVEKSFCSEGCVLLYKQDFTKKLGLCCITCTYCSQTCQRGVTEQLDGSTWDFCSEDCKSKYLLWYCKAARCHACKRQGKLLETIHWRGQIRHFCNQQCLLRFYSQQNQPNLDTQSGPESLLNSQSPESKPQTPSQTKVENSNTVRTPEENGNLGKIPVKTRSAPTAPTPPPPPPPATPRKNKAAMCKPLMQNRGVSCKVEMKSKGSQTEEWKPQVIVLPIPVPIFVPVPMHLYCQKVPVPFSMPIPVPVPMFLPTTLESTDKIVETIEELKVKIPSNPLEADILAMAEMIAEAEELDKASSDLCDLVSNQSAEGLLEDCDLFGPARDDVLAMAVKMANVLDEPGQDLEADFPKNPLDINPSVDFLFDCGLVGPEDVSTEQDLPRTMRKGQKRLVLSESCSRDSMSSQPSCTGLNYSYGVNAWKCWVQSKYANGETSKGDELRFGPKPMRIKEDILACSAAELNYGLAQFVREITRPNGERYEPDSIYYLCLGIQQYLLENNRMVNIFTDLYYLTFVQELNKSLSTWQPTLLPNNTVFSRVEEEHLWECKQLGVYSPFVLLNTLMFFNTKFFGLQTAEEHMQLSFTNVVRQSRKCTTPRGTTKVVSIRYYAPVRQRKGRDTGPGKRKREDEAPILEQRENRMNPLRCPVKFYEFYLSKCPESLRTRNDVFYLQPERSCIAESPLWYSVIPMDRSMLESMLNRILAVREIYEELGRPGEEDLD

SEQ ID NO: 870986 - protein, 1156 aa, Homo sapiens
MDPSDFPSPFDPLTLPEKPLAGDLPVDMEFGEDLLESQTAPTRGWAPPGPSPSSGALDLLDTPAGLEKDPGVLDGATELLGLGGLLYKAPSPPEVDHGPEGTLAWDAGDQTLEPGPGGQTPEVVPPDPGAGANSCSPEGLLEPLAPDSPITLQSPHIEEEETTSIATARRGSPGQEEELPQGQPQSPNAPPSPSVGETLGDGINSSQTKPGGSSPPAHPSLPGDGLTAKASEKPPERKRSERVRRAEPPKPEVVDSTESIPVSDEDSDAMVDDPNDEDFVPFRPRRSPRMSLRSSVSQRAGRSAVGTKMTCAHCRTPLQKGQTAYQRKGLPQLFCSSSCLTTFSKKPSGKKTCTFCKKEIWNTKDSVVAQTGSGGSFHEFCTSVCLSLYEAQQQRPIPQSGDPADATRCSICQKTGEVLHEVSNGSVVHRLCSDSCFSKFRANKGLKTNCCDQCGAYIYTKTGSPGPELLFHEGQQKRFCNTTCLGAYKKKNTRVYPCVWCKTLCKNFEMLSHVDRNGKTSLFCSLCCTTSYKVKQAGLTGPPRPCSFCRRSLSDPCYYNKVDRTVYQFCSPSCWTKFQRTSPEGGIHLSCHYCHSLFSGKPEVLDWQDQVFQFCCRDCCEDFKRLRGVVSQCEHCRQEKLLHEKLRFSGVEKSFCSEGCVLLYKQDFTKKLGLCCITCTYCSQTCQRGVTEQLDGSTWDFCSEDCKSKYLLWYCKAARCHACKRQGKLLETIHWRGQIRHFCNQQCLLRFYSQQNQPNLDTQSGPESLLNSQSPESKPQTPSQTKVENSNTVRTPEENGNLGKIPVKTRSAPTAPTPPPPPPPATPRKNKAAMCKPLMQNRGVSCKVEMKSKGSQTEEWKPQVIVLPIPVPIFVPVPMHLYCQKVPVPFSMPIPVPVPMFLPTTLESTDKIVETIEELKVKIPSNPLEADILAMAEMIAEAEELDKASSDLCDLVSNQSAEGLLEDCDLFGPARDDVLAMAVKMANVLDEPGQDLEADFPKNPLDINPSVDFLFDCGLVGPEDVSTEQDLPRTMRKGQKRLVLSESCSRDSMSSQPSCTGLNYSYGVNAWKCWVQSKYANGETSKGDELRFGPKPMRIKEDILACSAAELNYGLAQFVREITRPNGERYEPDSIYYLCLGIQQVPLVHHLTSCHS

SEQ ID NO: 870987 - protein, 1370 aa, Homo sapiens; identical to SEQ ID NO: 870985

SEQ ID NO: 870988 - protein, 83 aa, Homo sapiens
  misc_feature (2)..(2): Xaa can be any naturally occurring amino acid
RXDALSMLSNMLRSMGITEYQRGDSAMQDRFRLQVEHIVASPEALWYSVIPMDRSMLESMLNRILAVREIYEELGRPGEEDLD

SEQ ID NO: 870989 - protein, 495 aa, Homo sapiens
MDPSDFPSPFDPLTLPEKPLAGDLPVDMEFGEDLLESQTAPTRGWAPPGPSPSSGALDLLDTPAGLEKDPGVLDGATELLGLGGLLYKAPSPPEVDHGPEGTLAWDAGDQTLEPGPGGQTPEVVPPDPGAGANSCSPEGLLEPLAPDSPITLQSPHIEEEETTSIATARRGSPGQEEELPQGQPQSPNAPPSPSVGETLGDGINSSQTKPGGSSPPAHPSLPGDGLTAKASEKPPERKRSERVRRAEPPKPEVVDSTESIPVSDEDSDAMVDDPNDEDFVPFRPRRSPRMSLRSSVSQRAGRSAVGTKMTCAHCRTPLQKGQTAYQRKGLPQLFCSSSCLTTFSKKPSGKKTCTFCKKEIWNTKDSVVAQTGSGGSFHEFCTSVCLSLYEAQQQRPIPQSGDPADATRCSICQKTGEVLHEVSNGSVVHRLCSDSCFSKFRANKGLKTNCCDQCGAYIYTKTGSPGPELLFHEGQQKRFCNTTCLGAYKKVGPRE

SEQ ID NO: 870990 - protein, 1104 aa, Homo sapiens
MDPSDFPSPFDPLTLPEKPLAGDLPVDMEFGEDLLESQTAPTRGWAPPGPSPSSGALDLLDTPAGLEKDPGVLDGATELLGLGGLLYKAPSPPEVDHGPEGTLAWDAGDQTLEPGPGGQTPEVVPPDPGAGANSCSPEGLLEPLAPDSPITLQSPHIEEEETTSIATARRGSPGQEEELPQGQPQSPNAPPSPSVGETLGDGINSSQTKPGGSSPPAHPSLPGDGLTAKASEKPPERKRSERVRRAEPPKPEVVDSTESIPVSDEDSDAMVDDPNDEDFVPFRPRRSPRMSLRSSVSQRAGRSAVGTKMTCAHCRTPLQKGQTAYQRKGLPQLFCSSSCLTTFSKKPSGKKTCTFCKKEIWNTKDSVVAQTGSGGSFHEFCTSVCLSLYEAQQQRPIPQSGDPADATRCSICQKTGEVLHEVSNGSVVHRLCSDSCFSKFRANKGLKTNCCDQCGAYIYTKTGSPGPELLFHEGQQKRFCNTTCLGAYKKKNTRVYPCVWCKTLCKNFEMLSHVDRNGKTSLFCSLCCTTSYKVKQAGLTGPPRPCSFCRRSLSDPCYYNKVDRTVYQFCSPSCWTKFQRTSPEGGIHLSCHYCHSLFSGKPEVLDWQDQVFQFCCRDCCEDFKRLRGVVSQCEHCRQEKLLHEKLRFSGVEKSFCSEGCVLLYKQDFTKKLGLCCITCTYCSQTCQRGVTEQLDGSTWDFCSEDCKSKYLLWYCKAARCHACKRQGKLLETIHWRGQIRHFCNQQCLLRFYSQQNQPNLDTQSGPESLLNSQSPESKPQTPSQTKVENSNTVRTPEENGNLGKIPVKTRSAPTAPTPPPPPPPATPRKNKAAMCKPLMQNRGVSCKVEMKSKGSQTEEWKPQVIVLPIPVPIFVPVPMHLYCQKVPVPFSMPIPVPVPMFLPTTLESTDKIVETIEELKVKIPSNPLEADILAMAEMIAEAEELDKASSDLCDLVSNQSAEGLLEDCDLFGPARDDVLAMAVKMANVLDEPGQDLEADFPKNPLDINPSVDFLFDCGLVGPEDVSTEQDLPRTMRKGQKRLVLSESCSRDSMSSQPSCTGLNYSYGVNAWKCWVQSKYANGETSKVLKKEHWAPNPILLKKDI

SEQ ID NO: 870991 - protein, 646 aa, Homo sapiens
GGGAGRGRRGGAGAGKGARGRDGRKMAALKEDRSYGLSCGRVSDGSKVSVFHVKLTDSALRAFESYRARQDSVSLRPSIRFQGSQGHISIPQPDCPAEARTFSFYLSNIGRDNPQGSFDCIQQYVSSHGEVHLDCLGSIQDKITVCATDDSYQKARQSMAQAEEETRSRSAIVIKAGGRYLGKKVQFRKPAPGATDAVPSRKRATPINLASAIRKSGASAVSGGSGVSQRPFRDRVLHLLALRPYRKAELLLRLQKDGLTQADKDALDGLLQQVANMSAKDGTCTLQDCMYKDVQKDWPGYSEGDQQLLKRVLVRKLCQPQSTGSLLGDPAASSPPGERGRSASPPQKRLQPPDFIDPLANKKPRISHFTQRAQPAVNGKLGVPNGREALLPTPGPPASTDTLSSSTHLPPRLEPPRAHDPLADVSNDLGHSGRDCEHGEAAAPAPTVRLGLPLLTDCAQPSRPHGSPSRSKPKKKSKKHKDKERAAEDKPRAQLPDCAPATHATPGAPADTPGLNGTCSVSSVPTSTSETPDYLLKYAAISSSEQRQSYKNDFNAEYSEYRDLHARIERITRRFTQLDAQLRQLSQGSEEYETTRGQILQEYRKIKKTNTNYSQEKHRCEYLHSKLAHIKRLIAEYDQRQLQAWP

SEQ ID NO: 870992 - protein, 695 aa, Homo sapiens
WSSRLSHLLQDRQEKKFPKPLLVSPRKSSLHHQNQEKPPPVNKQENAGTLNILSTLSNGNSSKQKIPADGVHRIRVDFKNSPCVCQRMLLLCPESTKTAPVSSRAVGKVERTSCKTSHLDSVSLRPSIRFQGSQGHISIPQPDCPAEARTFSFYLSNIGRDNPQGSFDCIQQYVSSHGEVHLDCLGSIQDKITVCATDDSYQKARQSMAQAEEETRSRSAIVIKAGGRYLGKKVQFRKPAPGATDAVPSRKRATPINLASAIRKSGASAVSGGSGVSQRPFRDRVLHLLALRPYRKAELLLRLQKDGLTQADKDALDGLLQQVANMSAKDGTCTLQDCMYKDVQKDWPGYSEGDQQLLKRVLVRKLCQPQSTGSLLGDPAASSPPGERGRSASPPQKRLQPPDFIDPLANKKPRISHFTQRAQPAVNGKLGVPNGREALLPTPGPPASTDTLSSSTHLPPRLEPPRAHDPLADVSNDLGHSGRDCEHGEAAAPAPTVRLGLPLLTDCAQPSRPHGSPSRSKPKKKSKKHKDKERAAEDKPRAQLPDCAPATHATPGAPADTPGLNGTCSVSSVPTSTSETPDYLLKYAAISSSEQRQSYKNDFNAEYSEYRDLHARIERITRRFTQLDAQLRQLSQGSEEYETTRGQILQEYRKIKKTNTNYSQEKHRCEYLHSKLAHIKRLIAEYDQRQLQAWP

SEQ ID NO: 870993 - protein, 680 aa, Homo sapiens
VVIPPQPPTTGPPRKEVPKTTPSEPKKKQPPPPESGPEQSKQKKVAPRPSIPVKQKPKEKEKPPPVNKQENAGTLNILSTLSNGNSSKQKIPADGVHRIRVDFKDSVSLRPSIRFQGSQGHISIPQPDCPAEARTFSFYLSNIGRDNPQGSFDCIQQYVSSHGEVHLDCLGSIQDKITVCATDDSYQKARQSMAQAEEETRSRSAIVIKAGGRYLGKKVQFRKPAPGATDAVPSRKRATPINLASAIRKSGASAVSGGSGVSQRPFRDRVLHLLALRPYRKAELLLRLQKDGLTQADKDALDGLLQQVANMSAKDGTCTLQDCMYKDVQKDWPGYSEGDQQLLKRVLVRKLCQPQSTGSLLGDPAASSPPGERGRSASPPQKRLQPPDFIDPLANKKPRISHFTQRAQPAVNGKLGVPNGREALLPTPGPPASTDTLSSSTHLPPRLEPPRAHDPLADVSNDLGHSGRDCEHGEAAAPAPTVRLGLPLLTDCAQPSRPHGSPSRSKPKKKSKKHKDKERAAEDKPRAQLPDCAPATHATPGAPADTPGLNGTCSVSSVPTSTSETPDYLLKYAAISSSEQRQSYKNDFNAEYSEYRDLHARIERITRRFTQLDAQLRQLSQGSEEYETTRGQILQEYRKIKKTNTNYSQEKHRCEYLHSKLAHIKRLIAEYDQRQLQAWP

SEQ ID NO: 870994 - protein, 564 aa, Homo sapiens [sequence omitted]

SEQ ID NO: 870995 - protein, 647 aa, Homo sapiens
GGGAGRGRRGGAGAGKGARGRDGRKMAALKEDRSYGLSCGRVSDGSKVSVFHVKLTDSALRAFESYRARQDSVSLRPSIRFQGSQGHISIPQPDCPAEARTFSFYLSNIGRDNPQGSFDCIQQYVSSHGEVHLDCLGSIQDKITVCATDDSYQKARQSMAQAEEETRSRSAIVIKAGGRYLGKKVQFRKPAPGATDAVPSRKRATPINLASAIRKSGASAVSGGSGVSQRPFRDRVLHLLALRPYRKAELLLRLQKDGLTQADKDALDGLLQQVANMSAKDGTCTLQDCMYKDVQKDWPGYSEGDQQLLKRVLVRKLCQPQSTGSLLGDPAASSPPGERGRSASPPQKRLQPPDFIDPLANKKPRISHFTQRAQPAVNGKLGVPNGREALLPTPGPPASTDTLSSSTHLPPRLEPPRAHDPLADVSNDLGHSGRDCEHGEAAAPAPTVRLGLPLLTDCAQPSRPHGSPSRSKPKKKSKKHKDKERAAEDKPRAQLPDCAPATHATPGAPADTPGLNGTCSVSSVPTSTSETPDYLLKYAAISSSEQRQSYKNDFNAEYSEYRDLHARIERITRRFTQLDAQLRQLSQGSEEYEVEPPRCLLCPGSGGSQGPLGRAPSPPRAWWPQSLALPQAALLPLVHSMQQPHGS

SEQ ID NO: 870996 - protein, 364 aa, Homo sapiens
GGGAGRGRRGGAGAGKGARGRDGRKMAALKEDRSYGLSCGRVSDGSKVSVFHVKLTDSALRAFESYRARQDSVSLRPSIRFQGSQGHISIPQPDCPAEARTFSFYLSNIGRDNPQGSFDCIQQYVSSHGEVHLDCLGSIQDKITVCATDDSYQKARQSMAQAEEETRSRSAIVIKAGGRYLGKKVQFRKPAPGATDAVPSRKRATPINLASAIRKSGASAVSGGSGVSQRPFRDRVLHLLALRPYRKAELLLRLQKDGLTQADKDALDGLLQQVGAAPMSCLYQWSPQMVLCGWDGPEHGDWDWDWQGRALPGVSHRFRTCLRARASWIRTSLGGHGCVSGHGPDCPGLRGGLSMEPRPSFTVC

SEQ ID NO: 870997 - protein, 131 aa, Homo sapiens
GGGAGRGRRGGAGAGKGARGRDGRKMAALKEDRSYGLSCGRVSDGSKVSVFHVKLTDSALRAFESYRARQDSVSLRPSIRFQGSQGVSFCLNHSYLESWDWYSLRSVLARWVQQQLMAVFGPCLPPCKAGF

SEQ ID NO: 870998 - protein, 166 aa, Homo sapiens
WSSRLSHLLQDRQEKKFPKPLLVSPRKSSLHHQNQEKPPPVNKQENAGTLNILSTLSNGNSSKQKIPADGVHRIRVDFKDSVSLRPSIRFQGSQGHISIPQPDCPAEARTFSFYLSNIGRDNPQGSFDCIQQYVSSHGEVHLDCLGSIQDKITVCWCRCGVSGCVV

SEQ ID NO: 870999 - protein, 488 aa, Homo sapiens
MAQAEEETRSRSAIVIKAGGRYLGKKVQFRKPAPGATDAVPSRKRATPINLASAIRKSGASAVSGGSGVSQRPFRDRVLHLLALRPYRKAELLLRLQKDGLTQADKDALDGLLQQVANMSAKDGTCTLQDCMYKDVQKDWPGYSEGDQQLLKRVLVRKLCQPQSTGSLLGDPAASSPPGERGRSASPPQKRLQPPDFIDPLANKKPRISHFTQRAQPAVNGKLGVPNGREALLPTPGPPASTDTLSSSTHLPPRLEPPRAHDPLADVSNDLGHSGRDCEHGEAAAPAPTVRLGLPLLTDCAQPSRPHGSPSRSKPKKKSKKHKDKERAAEDKPRAQLPDCAPATHATPGAPADTPGLNGTCSVSSVPTSTSETPDYLLKYAAISSSEQRQSYKNDFNAEYSEYRDLHARIERITRRFTQLDAQLRQLSQGSEEYETTRGQILQEYRKIKKTNTNYSQEKHRCEYLHSKLAHIKRLIAEYDQRQLQAWP

SEQ ID NO: 871000 - protein, 575 aa, Homo sapiens
HQAHFCTQAHFCTQAHISIPQPDCPAEARTFSFYLSNIGRDNPQGSFDCIQQYVSSHGEVHLDCLGSIQDKITVCATDDSYQKARQSMAQAEEETRSRSAIVIKAGGRYLGKKVQFRKPAPGATDAVPSRKRATPINLASAIRKSGASAVSGGSGVSQRPFRDRVLHLLALRPYRKAELLLRLQKDGLTQADKDALDGLLQQVANMSAKDGTCTLQDCMYKDVQKDWPGYSEGDQQLLKRVLVRKLCQPQSTGSLLGDPAASSPPGERGRSASPPQKRLQPPDFIDPLANKKPRISHFTQRAQPAVNGKLGVPNGREALLPTPGPPASTDTLSSSTHLPPRLEPPRAHDPLADVSNDLGHSGRDCEHGEAAAPAPTVRLGLPLLTDCAQPSRPHGSPSRSKPKKKSKKHKDKERAAEDKPRAQLPDCAPATHATPGAPADTPGLNGTCSVSSVPTSTSETPDYLLKYAAISSSEQRQSYKNDFNAEYSEYRDLHARIERITRRFTQLDAQLRQLSQGSEEYETTRGQILQEYRKIKKTNTNYSQEKHRCEYLHSKLAHIKRLIAEYDQRQLQAWP

SEQ ID NO: 871001 - protein, 396 aa, Homo sapiens
GGGAGRGRRGGAGAGKGARGRDGRKMAALKEDRSYGLSCGRVSDGSKVSVFHVKLTDSALRAFESYRARQDSVSLRPSIRFQGSQGHISIPQPDCPAEARTFSFYLSNIGRDNPQGSFDCIQQYVSSHGEVHLDCLGSIQDKITVCATDDSYQKARQSMAQAEEETRSRSAIVIKAGGRYLGKKVQFRKPAPGATDAVPSRKRATPINLASAIRKSGASAVSGGSGVSQRPFRDRVLHLLALRPYRKAELLLRLQKDGLTQADKDALDGLLQQVANMSAKDGTCTLQDCMYKDVQKDWPGYSEGDQQLLKRVLVRKLCQPQSTGSLLGDPAASSPPGERGRSASPPQKRLQPPDFIDPLANKKPRISHFTQRASTLSLWGKREVPGFWTSRVSLVN

SEQ ID NO: 871002 - protein, 153 aa, Homo sapiens
TAGLHVQGCAEGLAWLLGGGPAAAEAGARPVMPPPIPQHVPTRMKAARAYPEDAGVVLCGPEGHRAWEQDGRVQVGLSGHPPYCPRGAPGCPVVGEGHAHRVGRRCESLAPTLESSDKRPQSAETLLSCPQLPFMLPSTTWASPQGLGSSLTF

SEQ ID NO: 871003 - protein, 533 aa, Homo sapiens
MTKKRIAVIGGGVSGLSSIKCCVEEGLEPVCFERTDDIGGLWRFQENPEEGRASIYKSVIINTSKEMMCFSDYPIPDHYPNFMHNAQVLEYFRMYAKEFDLLKYIRFKTTVCSVKKQPDFATSGQWEVVTESEGKKEMNVFDGVMVCTGHHTNAHLPLESFPGIEKFKGQYFHSRDYKNPEGFTGKRVIIIGIGNSGGDLAVEISQTAKQVFLSTRRGAWILNRVGDYGYPADVLFSSRLTHFIWKICGQSLANKYLEKKINQRFDHEMFGLKPKHRALSQHPTLNDDLPNRIISGLVKVKGNVKEFTETAAIFEDGSREDDIDAVIFATGYSFDFPFLEDSVKVVKNKISLYKKVFPPNLERPTLAIIGLIQPLGAIMPISELQGRWATQVFKGLKTLPSQSEMMAEISKAQEEIDKRYVESQRHTIQGDYIDTMEELADLVGVRPNLLSLAFTDPKLALHLLLGPCTPIHYRVQGPGKWDGARKAILTTDDRIRKPLMTRVVERSSSMTSTMTIGKFMLALAFFAIIIAYF

SEQ ID NO: 871004 - protein, 486 aa, Homo sapiens
MTKKRIAVIGGGVSGLSSIKCCVEEGLEPVCFERTDDIGGLWRFQENPEEGRASIYKSVIINTSKEMMCFSDYPIPDHYPNFMHNAQVLEYFRMYAKEFDLLKYIRFKTTVCSVKKQPDFATSGQWEVVTESEGKKEMNVFDGVMVCTGHHTNAHLPLESFPGIEKFKGQYFHSRDYKNPEGFTGKRVIIIGIGNSGGDLAVEISQTAKQVFLSTRRGAWILNRVGDYGYPADVLFSSRLTHFIWKICGQSLANKYLEKKINQRFDHEMFGLKPKHRALSQHPTLNDDLPNRIISGLVKVKGNVKEFTETAAIFEDGSREDDIDAVIFATGYSFDFPFLEDSVKVVKNKISLYKKVFPPNLERPTLAIIGLIQPLGAIMPISELQGRWATQVFKGLKTLPSQSEMMAEISKAQEEIDKRYVESQRHTIQGDYIDTMEELADLVGVRPNLLSLAFTDPKLALHLLLGPCTPIHYRVQGPGKWDGARS

SEQ ID NO: 871005 - protein, 396 aa, Homo sapiens
MNVFDGVMVCTGHHTNAHLPLESFPGIEKFKGQYFHSRDYKNPEGFTGKRVIIIGIGNSGGDLAVEISQTAKQVFLSTRRGAWILNRVGDYGYPADVLFSSRLTHFIWKICGQSLANKYLEKKINQRFDHEMFGLKPKHRALSQHPTLNDDLPNRIISGLVKVKGNVKEFTETAAIFEDGSREDDIDAVIFATGYSFDFPFLEDSVKVVKNKISLYKKVFPPNLERPTLAIIGLIQPLGAIMPISELQGRWATQVFKGLKTLPSQSEMMAEISKAQEEIDKRYVESQRHTIQGDYIDTMEELADLVGVRPNLLSLAFTDPKLALHLLLGPCTPIHYRVQGPGKWDGARKAILTTDDRIRKPLMTRVVERSSSMTSTMTIGKFMLALAFFAIIIAYF

SEQ ID NO: 871006 - protein, 480 aa, Homo sapiens
MTSEGSGGSSSKEMMCFSDYPIPDHYPNFMHNAQVLEYFRMYAKEFDLLKYIRFKTTVCSVKKQPDFATSGQWEVVTESEGKKEMNVFDGVMVCTGHHTNAHLPLESFPGIEKFKGQYFHSRDYKNPEGFTGKRVIIIGIGNSGGDLAVEISQTAKQVFLSTRRGAWILNRVGDYGYPADVLFSSRLTHFIWKICGQSLANKYLEKKINQRFDHEMFGLKPKHRALSQHPTLNDDLPNRIISGLVKVKGNVKEFTETAAIFEDGSREDDIDAVIFATGYSFDFPFLEDSVKVVKNKISLYKKVFPPNLERPTLAIIGLIQPLGAIMPISELQGRWATQVFKGLKTLPSQSEMMAEISKAQEEIDKRYVESQRHTIQGDYIDTMEELADLVGVRPNLLSLAFTDPKLALHLLLGPCTPIHYRVQGPGKWDGARKAILTTDDRIRKPLMTRVVERSSSMTSTMTIGKFMLALAFFAIIIAYF

SEQ ID NO: 871007 - protein, 533 aa, Homo sapiens; identical to SEQ ID NO: 871003

SEQ ID NO: 871008 - protein, 264 aa, Homo sapiens [sequence omitted]

SEQ ID NO: 871009 - protein, 286 aa, Homo sapiens
MTKKRIAVIGGGVSGLSSIKCCVEEGLEPVCFERTDDIGGLWRFQENPEEGRASIYKSVIINTSKEMMCFSDYPIPDHYPNFMHNAQVLEYFRMYAKEFDLLKYIRFKTTVCSVKKQPDFATSGQWEVVTESEGKKEMNVFDGVMVCTGHHTNAHLPLESFPGIEKFKGQYFHSRDYKNPEGFTGKRVIIIGIGNSGGDLAVEISQTAKQVFLSTRRGAWILNRVGDYGYPADVLFSSRLTHFIWKICGQSLANKYLEKKINQRFDHEMFGLKPKHRYVPRMGVQG

SEQ ID NO: 871010 - protein, 533 aa, Homo sapiens; identical to SEQ ID NO: 871003

SEQ ID NO: 871011 - protein, 515 aa, Homo sapiens
MTKCVEEGLEPVCFERTDDIGGLWRFQENPEEGRASIYKSVIINTSKEMMCFSDYPIPDHYPNFMHNAQVLEYFRMYAKEFDLLKYIRFKTTVCSVKKQPDFATSGQWEVVTESEGKKEMNVFDGVMVCTGHHTNAHLPLESFPGIEKFKGQYFHSRDYKNPEGFTGKRVIIIGIGNSGGDLAVEISQTAKQVFLSTRRGAWILNRVGDYGYPADVLFSSRLTHFIWKICGQSLANKYLEKKINQRFDHEMFGLKPKHRALSQHPTLNDDLPNRIISGLVKVKGNVKEFTETAAIFEDGSREDDIDAVIFATGYSFDFPFLEDSVKVVKNKISLYKKVFPPNLERPTLAIIGLIQPLGAIMPISELQGRWATQVFKGLKTLPSQSEMMAEISKAQEEIDKRYVESQRHTIQGDYIDTMEELADLVGVRPNLLSLAFTDPKLALHLLLGPCTPIHYRVQGPGKWDGARKAILTTDDRIRKPLMTRVVERSSSMTSTMTIGKFMLALAFFAIIIAYF

SEQ ID NO: 871012 - protein, 480 aa, Homo sapiens; identical to SEQ ID NO: 871006

SEQ ID NO: 871013 - protein, 172 aa, Homo sapiens
MTKKRIAVIGGGVSGLSSIKCCVEEGLEPVCFERTDDIGGLWRFQENPEEGRASIYKSVIINTSKEMMCFSDYPIPDHYPNFMHNAQVLEYFRMYAKEFDLLKYIRFKTTVCSVKKQPDFATSGQWEVVTESEGKKEMNVFDGVMVCTGHHTNAHLPLESFPGEQLTRKEDP

SEQ ID NO: 871014 - protein, 943 aa, Homo sapiens [sequence omitted]

SEQ ID NO: 871015 - protein, 283 aa, Homo sapiens
  misc_feature (212)..(212): Xaa can be any naturally occurring amino acid
MAASGLDHLKNGYRRRFCRPSRARDINTEQGQNVLEILQDCFEEKSLANDFSTNSTKSVPNSTRKIKDTCIQSPSKECQKSHPKSVPVSSKKKEASLQFVVEPSEATNRSVQAHEVHQKILATDVSSKNTPDSKKISSRNINDHHSEADEEFYLSVGSPSVLLDAKTSVSQNVIPSSAQKRETYTFENSVNMLPSSTEVSVKTKKSNLGKSXYNITALGSGRETSRATGDREDYEHQTIQVYTTRPRGGTPTKKSVVTCTDNNNAGAPSTPSALHHAAPAQGT

SEQ ID NO: 871016 - protein, 925 aa, Homo sapiens
MAASGLDHLKNGYRRRFCRPSRARDINTEQGQNVLEILQDCFEEKSLANDFSTNSTKSVPNSTRKISVPVSSKKKEASLQFVVEPSEATNRSVQAHEVHQKILATDVSSKNTPDSKKISSRNINDHHSEADEEFYLSVGSPSVLLDAKTSVSQNVIPSSAQKRETYTFENSVNMLPSSTEVSVKTKKRLNFDDKVMLKKIEIDNKVSDEEDKTSEGQERKPSGSSQNRIRDSEYEIQRQAKKSFSTLFLETVKRKSESSPIVRHAATAPPHSCPPDDTKLIEDEFIIDESDQSFASRSWITIPRKAGSLKQRTISPAESTALFQGRKSREKHHNILPKTLANDKHSHKPHPVETSQPSDKTVLDTSYALIGETVNNYRSTKYEMYSKNAEKPSRSKRTIKQKQRRKFMAKPAEEQLDVGQSKDENIHTSHITQDEFQRNSDRNMEEHEEMGNDCVSKKQMPPVGSKKSSTRKDKEESKKKRFSSESKNKLVPEEVTSTVTKSRRISRRPSDWWVVKSEESPVYSNSSVRNELPMHHNSSRKSTKKTNQSSKNIRKKTIPLKRQKTATKGNQRVQKFLNAEGSGGIVGHDEISRCSLSEPLESDEADLAKKKNLDCSRSTRSSKNEDNIMTAQNVPLKPQTSGYTCNIPTESNLDSGEHKTSVLEESGPSRLNNNYLMSGKNDVDDEEVHGSSDDSKQSKVIPKNRIHHKLVLPSNTPNVRRTKRTRLKPLEYWRGERIDYQGRPSGGFVISGVLSPDTISSKRKAKENIGKVNKKSNKKRICLDNDERKTNLMVNLGIPLGDPLQPTRVKDPETREIILMDLVRPQDTYQFFVKHGELKVYKTLDTPFFSTGKLILGPQEEKGKQHVGQDILVFYVNFGDLLCTLHETPYILSTGDSFYVPSGNYYNIKNLRNEESVLLFTQIKR

SEQ ID NO: 871017 - protein, 785 aa, Homo sapiens
NICDTDVIPSSAQKCKSLSLGTRWNYTFENSVNMLPSSTEVSVKTKKRLNFDDKVMLKKIEIDNKVSDEEDKTSEGQERKPSGSSQNRIRDSEYEIQRQAKKSFSTLFLETVKRKSESSPIVRHAATAPPHSCPPDDTKLIEDEFIIDESDQSFASRSWITIPRKAGSLKQRTISPAESTALFQGRKSREKHHNILPKTLANDKHSHKPHPVETSQPSDKTVLDTSYALIGETVNNYRSTKYEMYSKNAEKPSRSKRTIKQKQRRKFMAKPAEEQLDVGQSKDENIHTSHITQDEFQRNSDRNMEEHEEMGNDCVSKKQMPPVGSKKSSTRKDKEESKKKRFSSESKNKLVPEEVTSTVTKSRRISRRPSDWWVVKSEESPVYSNSSVRNELPMHHNSSRKSTKKTNQSSKNIRKKTIPLKRQKTATKGNQRVQKFLNAEGSGGIVGHDEISRCSLSEPLESDEADLAKKKNLDCSRSTRSSKNEDNIMTAQNVPLKPQTSGYTCNIPTESNLDSGEHKTSVLEESGPSRLNNNYLMSGKNDVDDEEVHGSSDDSKQSKVIPKNRIHHKLVLPSNTPNVRRTKRTRLKPLEYWRGERIDYQGRPSGGFVISGVLSPDTISSKRKAKENIGKVNKKSNKKRICLDNDERKTNLMVNLGIPLGDPLQPTRVKDPETREIILMDLVRPQDTYQFFVKHGELKVYKTLDTPFFSTGKLILGPQEEKGKQHVGQDILVFYVNFGDLLCTLHETPYILSTGDSFYVPSGNYYNIKNLRNEESVLLFTQIKR

SEQ ID NO: 871018 - protein, 943 aa, Homo sapiens [sequence omitted]

SEQ ID NO: 871019 - protein, 542 aa, Homo sapiens
MYSKNAEKPSRSKRTIKQKQRRKFMAKPAEEQLDVGQSKDENIHTSHITQDEFQRNSDRNMEEHEEMGNDCVSKKQMPPVGSKKSSTRKDKEESKKKRFSSESKNKLVPEEVTSTVTKSRRISRRPSDWWVVKSEESPVYSNSSVRNELPMHHNSSRKSTKKTNQSSKNIRKKTIPLKRQKTATKGNQRVQKFLNAEGSGGIVGHDEISRCSLSEPLESDEADLAKKKNLDCSRSTRSSKNEDNIMTAQNVPLKPQTSGYTCNIPTESNLDSGEHKTSVLEESGPSRLNNNYLMSGKNDVDDEEVHGSSDDSKQSKVIPKNRIHHKLVLPSNTPNVRRTKRTRLKPLEYWRGERIDYQGRPSGGFVISGVLSPDTISSKRKAKENIGKVNKKSNKKRICLDNDERKTNLMVNLGIPLGDPLQPTRVKDPETREIILMDLVRPQDTYQFFVKHGELKVYKTLDTPFFSTGKLILGPQEEKGKQHVGQDILVFYVNFGDLLCTLHETPYILSTGDSFYVPSGNYYNIKNLRNEESVLLFTQIKR

SEQ ID NO: 871020 - protein, 774 aa, Homo sapiens [sequence omitted]

SEQ ID NO: 871021 - protein, 728 aa, Homo sapiens
MAASGLDHLKNGYRRRFCRPSRARDINTEQGQNVLEILQDCFEEKSLANDFSTNSTKSVPNSTRKIKDTCIQSPSKECQKSHPKSVPVSSKKKEASLQFVVEPSEATNRSVQAHEVHQKILATDVSSKNTPDSKKISSRNINDHHSEADEEFYLSVGSPSVLLDAKTSVSQNVIPSSAQKRETYTFENSVNMLPSSTEVSVKTKKRLNFDDKVMLKKIEIDNKVSDEEDKTSEGQERKPSGSSQNRIRDSEYEIQRQAKKSFSTLFLETVKRKSESSPIVRHAATAPPHSCPPDDTKLIEDEFIIDESDQSFASRSWITIPRKAGSLKQRTISPAESTALFQGRKSREKHHNILPKTLANDKHSHKPHPVETSQPSDKTVLDTSYALIGETVNNYRSTKYEMYSKNAEKPSRSKRTIKQKQRRKFMAKPAEEQLDVGQSKDENIHTSHITQDEFQRNSDRNMEEHEEMGNDCVSKKQMPPVGSKKSSTRKDKEESKKKRFSSESKNKLVPEEVTSTVTKSRRISRRPSDWWVVKSEESPVYSNSSVRNELPMHHNSSRKSTKKTNQSSKNIRKKTIPLKRQKTATKGNQRVQKFLNAEGSGGIVGHDEISRCSLSEPLESDEADLAKKKNLDCSRSTRSSKNEDNIMTAQNVPLKPQTSGYTCNIPTESNLDSGEHKTSVLEESGPSRLNNNYLMSGKNDVDDEEVHGSSGKLLFFFCLDFYGIMNME

SEQ ID NO: 871022 - protein, 206 aa, Homo sapiens [sequence omitted]

SEQ ID NO: 871023 - protein, 943 aa, Homo sapiens [sequence omitted]

SEQ ID NO: 871024 - protein, 934 aa, Homo sapiens
MAASGLDHLKNGYRRRFCRPSRARDINTEQGQNVLEILQDCFEEKSLANDFSTNSTKSVPNSTRKIKDTCIQSPSKECQKSHPKSVPVSSKKKEASLQFVVEPSEATNRSVQAHEVHQKILATDVSSKNTPDSKKISSRNINDHHSEADEEFYLSVGSPSVLLDAKTSVSQNVIPSSAQKRETYTFENSVNMLPSSTEVSVKTKKRLNFDDKVMLKKIEIDNKVSDEEDKTSEGQERKPSGSSQNRIRDSEYEIQRQAKKSFSTLFLETVKRKSESSPIVRHAATAPPHSCPPDDTKLIEDEFIIDESDQSFASRSWITIPRKAGSLKQRTISPAESTALFQGRKSREKHHNILPKTLANDKHSHKPHPVETSQPSDKTVLDTSYALIGETVNNYRSTKYEMYSKNAEKPSRSKRTIKQKQRRKFMAKPAEEQLDVGQSKDENIHTSHITQDEFQRNSDRNMEEHEEMGNDCVSKKQMPPVGSKKSSTRKDKEESKKKRFSSESKNKLVPEEVTSTVTKSRRISRRPSDWWVVKSEESPVYSNSSVRNELPMHHNSSRKSTKKTNQSSKNIRKKTIPLKRQKTATKGNQRVQKFLNAEGSGGIVGHDEISRCSLSEPLESDEADLAKKKNLDCSRSTRSSKNEDNIMTAQNVPLKPQTSGYTCNIPTESNLDSGEHKTSVLEESGPSRLNNNYLMSGKNDVDDEEVHGSSDDSKQSKVIPKNRIHHKLVLPSNTPNVRRTKRTRLKPLEYWRGERIDYQGRPSGGFVISGVLSPDTISSKRKAKENIGKVNKKSNKKRICLDNDERIPLGDPLQPTRVKDPETREIILMDLVRPQDTYQFFVKHGELKVYKTLDTPFFSTGKLILGPQEEKGKQHVGQDILVFYVNFGDLLCTLHETPYILSTGDSFYVPSGNYYNIKNLRNEESVLLFTQIKR

SEQ ID NO: 871025 - protein, 943 aa, Homo sapiens [sequence omitted]

SEQ ID NO: 871026 - protein, 420 aa, Homo sapiens
LDKLTNFRLSLNPSGPVYSNSSVRNELPMHHNSSRKSTKKTNQSSKNIRKKTIPLKRQKTATKGNQRVQKFLNAEGSGGIVGHDEISRCSLSEPLESDEADLAKKKNLDCSRSTRSSKNEDNIMTAQNVPLKPQTSGYTCNIPTESNLDSGEHKTSVLEESGPSRLNNNYLMSGKNDVDDEEVHGSSDDSKQSKVIPKNRIHHKLVLPSNTPNVRRTKRTRLKPLEYWRGERIDYQGRPSGGFVISGVLSPDTISSKRKAKENIGKVNKKSNKKRICLDNDERKTNLMVNLGIPLGDPLQPTRVKDPETREIILMDLVRPQDTYQFFVKHGELKVYKTLDTPFFSTGKLILGPQEEKGKQHVGQDILVFYVNFGDLLCTLHETPYILSTGDSFYVPSGNYYNIKNLRNEESVLLFTQIKR

SEQ ID NO: 871027 - protein, 764 aa, Homo sapiens
MAASGLDHLKNGYRRRFCRPSRARDINTEQGQNVLEILQDCFEEKSLANDFSTNSTKSVPNSTRKIKDTCIQSPSKECQKSHPKSVPVSSKKKEASLQFVVEPSEATNRSVQAHEVHQKILATDVSSKNTPDSKKISSRNINDHHSEADEEFYLSVGSPSVLLDAKTSVSQNVIPSSAQKRETYTFENSVNMLPSSTEVSVKTKKRLNFDDKVMLKKIEIDNKVSDEEDKTSEGQERKPSGSSQNRIRDSEYEIQRQAKKSFSTLFLETVKRKSESSPIVRHAATAPPHSCPPDDTKLIEDEFIIDESDQSFASRSWITIPRKAGSLKQRTISPAESTALFQGRKSREKHHNILPKTLANDKHSHKPHPVETSQPSDKTVLDTSYALIGETVNNYRSTKYEMYSKNAEKPSRSKRTIKQKQRRKFMAKPAEEQLDVGQSKDENIHTSHITQDEFQRNSDRNMEEHEEMGNDCVSKKQMPPVGSKKSSTRKDKEESKKKRFSSESKNKLVPEEVTSTVTKSRRISRRPSDWWVVKSEESPVYSNSSVRNELPMHHNSSRKSTKKTNQSSKNIRKKTIPLKRQKTATKGNQRVQKFLNAEGSGGIVGHDEISRCSLSEPLESDEADLAKKKNLDCSRSTRSSKNEDNIMTAQNVPLKPQTSGYTCNIPTESNLDSGEHKTSVLEESGPSRLNNNYLMSGKNDVDDEEVHGSSDDSKQSKVIPKNRIHHKLVLPSNTPNVRRTKRTRLKPLEYWRGEQILKLHSVVT

SEQ ID NO: 871028 - protein, 500 aa, Homo sapiens
MAASGLDHLKNGYRRRFCRPSRARDINTEQGQNVLEILQDCFEEKSLANDFSTNSTKSVPNSTRKIKDTCIQSPSKECQKSHPKSVPVSSKKKEASLQFVVEPSEATNRSVQAHEVHQKILATDVSSKNTPDSKKISSRNINDHHSEADEEFYLSVGSPSVLLDAKTSVSQNVIPSSAQKRETYTFENSVNMLPSSTEVSVKTKKRLNFDDKVMLKKIEIDNKVSDEEDKTSEGQERKPSGSSQNRIRDSEYEIQRQAKKSFSTLFLETVKRKSESSPIVRHAATAPPHSCPPDDTKLIEDEFIIDESDQSFASRSWITIPRKAGSLKQRTISPAESTALFQGRKSREKHHNILPKTLANDKHSHKPHPVETSQPSDKTVLDTSYALIGETVNNYRSTKYEMYSKNAEKPSRSKRTIKQKQRRKFMAKPAEEQLDVGQSKDENIHTSHITQDEFQRNSDRNMEEHEEMGNDCVSKKQMPPVGSQKGSTEKIGGFLKERFS

SEQ ID NO: 871029 - protein, 132 aa, Homo sapiens
RGGEGKRGGEGRGGKERGGEGKRGEGRGREGREGQGRAEPGRQPSEEGRRPQPKASRACPGPGLHRPGLWGSQGRHPRSAKPRVPEAQGWRQPGSAYGQARIQTCASLGRLSPGDTKISSLTLVFLGLTSAS

SEQ ID NO: 871030 - protein, 166 aa, Homo sapiens
MLRGVLGKTFRLVGYTIQYGCIAHCAFEYVGGVVMCSGPSMEPTIQNSDIVFAENLSRHFYGIQRGDIVIAKSPSDPKSNICKRVIGLEGDKILTTSPSDFFKSHSYVPMGHVWLEGDNLQNSTDSRCYGPIPYGLIRGRIFFKIWPLSDFGFLRASPNGHRFSDD

SEQ ID NO: 871031 - protein, 136 aa, Homo sapiens
EKCALRKDGRLRRGPGEKGPPVSWLRVSRVLWGPRGDIVIAKSPSDPKSNICKRVIGLEGDKILTTSPSDFFKSHSYVPMGHVWLEGDNLQNSTDSRCYGPIPYGLIRGRIFFKIWPLSDFGFLRASPNGHRFSDD

SEQ ID NO: 871032 - protein, 80 aa, Homo sapiens
MISAFPTEVPLAKAVKFCMIHSRTLEGQCTKRCLNLLNILVSRLNSGTKNRVLHNFFPASRKSLFRLYRVYAGSSQLLGD

SEQ ID NO: 871033 - protein, 81 aa, Homo sapiens
NIRPNAFQIKGNLFREQQRTLYSMSYMNKCWEIYLAYCRPSAAPPHEPTMKMRHFLWMLKDFKMINKELTAATFMEVIAED

SEQ ID NO: 871034 - protein, 519 aa, Homo sapiens
RQPRVRGRAASERFGEQTLPSVAMDCYRTSLSSSWIYPTVILCLFGFFSMMRPSEPFLIPYLSGPDKNLTSAEITNEIFPVWTYSYLVLLLPVFVLTDYVRYKPVIILQGISFIITWLLLLFGQGVKTMQVVEFFYGMVTAAEVAYYAYIYSVVSPEHYQRVSGYCRSVTLAAYTAGSVLAQLLVSLANMSYFYLNVISLASVSVAFLFSLFLPMPKKSMFFHAKPSREIKKSSSVNPVLEETHEGEAPGCEEQKPTSEILSTSGKLNKGQLNSLKPSNVTVDVFVQWFQDLKECYSSKRLFYWSLWWAFATAGFNQVLNYVQILWDYKAPSQDSSIYNGAVEAIATFGGAVAAFAVGYVKVNWDLLGELALVVFSVVNAGSLFLMHYTANIWACYAGYLIFKSSYMLLITIAVFQIAVNLNVERYALVFGINTFIALVIQTIMTVIVVDQRGLNLPVSIQFLVYGSYFAVIAGIFLMRSMYITYSTKSQKDVQSPAPSENPDVSHPEEESNIIMSTKL

SEQ ID NO: 871035 - protein, 122 aa, Homo sapiens
RVRGRAASERFGEQTLPSVGKNISGGELIEEAPSSLGLSSVASLFPGLESWGRVPGSAGLGYTLSRVRSSPPTPQPACWDSPKWVCLEFPFAAFWKRRLNKIMIPVKCQHLLWLHPTFTDFN

SEQ ID NO: 871036 - protein, 75 aa, Homo sapiens
ESSAACAGCVSRGTHGKARKKRKSTPTPHPREEEQPHSPPVGRRAPSRRARRKKSTPTPGPQHPAGFLATSPHPS

SEQ ID NO: 871037 - protein, 98 aa, Homo sapiens
FHFFTMEAATKTQLCLSKTLMPAGRLLPPTPAPSRASLRSGGRVPLQLVCGRATRRPGCLPSTPTGDSTKEAWALCTRQPRFPHSIVFPKETIRLGMV

SEQ ID NO: 871038 - protein, 116 aa, Homo sapiens
YGNTKPLSHYKADCGQGSPGSGQSKPALMAYLPQQLSHISHEQNSLFLMKPKPGNMPFRSLVPPGQEQNPSSVPVQAQATSVGTQPPAVSVASSHNSSPYLSSQQQAAVMAALKAL

SEQ ID NO: 871039 - protein, 111 aa, Homo sapiens
NESTYSMKYPGSLSSTVHSENSHKENSKKEILPVSSCESSIFDYEEDIPSVTRQVPSRKYTNIRKIEKDSPFIHMHRHPNENTLGKNSFNFSDLNHSKNKVSSEGNEKEQH

SEQ ID NO: 871040 - protein, 111 aa, Homo sapiens [sequence omitted]

SEQ ID NO: 871041 - protein, 144 aa, Homo sapiens
GAQGSLIKLIPPPQCAQQRTPRPADLGKPSFSTTHLPFLEPWRQWRRPRLNCSSSAGTSSACCCRCSGTPCRSWHTRCRGPGGRCWGSAGSEPPTEAPAPSPGRPYHQVLLCISASTGASAAQECGVPCVPSPEEHLARSVRGQ

SEQ ID NO: 871042 - protein, 112 aa, Homo sapiens
MAAVAAASAELLIIGWYIFRVLLQGGSWVSRRRCSGTPCRSWHTRCRGPGGRCWGSAGSEPPTEAPAPSPGRPYHQVLLCISASTGASAAQECGVPCVPSPEEHLARSVRGQ

SEQ ID NO: 871043 - protein, 122 aa, Homo sapiens
WSSRILNEINPPPPVRPTADSETSGSRQTLFLDHPPTILGTMAAVAAASAELLIIGWYIFRVLLQVFLECCIYWVGFAFRNPPGTQPIARSEVFRYSLQKLAYTVSRTGRQVLGERRQRAPN

SEQ ID NO: 871044 - protein, 123 aa, Homo sapiens
GGGRVLKAAATAAAAVRPTADSETSGSRQTLFLDHPPTILGTMAAVAAASAELLIIGWYIFRVLLQVFLECCIYWVGFAFRNPPGTQPIARSEVFRYSLQKLAYTVSRTGRQVLGERRQRAPN

SEQ ID NO: 871045 - protein, 144 aa, Homo sapiens; identical to SEQ ID NO: 871041

SEQ ID NO: 871046 - protein, 230 aa, Homo sapiens
RLQLGRRPRGTKGGRIGGEGAGRGQAKPGGSACCSCPRAPPPPPSPRSRAERSRRANPSQPAGVPEAVAQGGARRSHVAPAAAMADSGTAGGAALAAPAPGPGSGGPGPRVYFQSPPGAAGEGPGGADDEGPVRRQGKVTVKYDRKELRKRLNLEEWILEQLTRLYDCQEEEIPELEIDVDELLDMESDDARAARVKELLVDCYKPTEAFISGLLDKIRGMQKLSTPQKK

SEQ ID NO: 871047 - protein, 88 aa, Homo sapiens
GPQPRAPLTPSLQLRLMSLPPPPPPPQEEEIPELEIDVDELLDMESDDARAARVKELLVDCYKPTEAFISGLLDKIRGMQKLSTPQKK

SEQ ID NO: 871048 - protein, 230 aa, Homo sapiens; identical to SEQ ID NO: 871046

SEQ ID NO: 871049 - protein, 147 aa, Homo sapiens
CRRGTCERRAPPCATASGTAGGGPGPRVYFQSPPGAAGEGPGGADDEGPVRRQGKVTVKYDRKELRKRLNLEEWILEQLTRLYDCQEEEIPELEIDVDELLDMESDDARAARVKELLVDCYKPTEAFISGLLDKIRGMQKLSTPQKK

SEQ ID NO: 871050 - protein, 79 aa, Homo sapiens
TAWVDPRVRQLTRLYDCQEEEIPELEIDVDELLDMESDDARAARVKELLVDCYKPTEAFISGLLDKIRGMQKLSTPQKK

SEQ ID NO: 871051 - protein, 230 aa, Homo sapiens; identical to SEQ ID NO: 871046

SEQ ID NO: 871052 - protein, 147 aa, Homo sapiens; identical to SEQ ID NO: 871049

SEQ ID NO: 871053 - protein, 84 aa, Homo sapiens
DPPPDQPDREWILEQLTRLYDCQEEEIPELEIDVDELLDMESDDARAARVKELLVDCYKPTEAFISGLLDKIRGMQKLSTPQKK

SEQ ID NO: 871054 - protein, 286 aa, Homo sapiens
RLQLGRRPRGTKGGRIGGEGAGRGQAKPGGSACCSCPRAPPPPPSPRSRAERSRRANPSQPAGVPEAVAQGGARRSHVAPAAAMADSGTAGGAALAAPAPGPGSGGPGPRVYFQSPPGAAGEGPGGADDEGPVRRQGKVTVKYDRKELRKRLNLEEWILEQLTRLYDCQEEEIPELEIDVDELLDMESDDARAARVKELLVDCYKPTEVRDFLGGWRGWQGEGSPAPVILGSGLLNVYPPTPSSLHFWPAGQDPGHAEAEHTPEEVRVPDPGERWLPQDNRCPPTS

SEQ ID NO: 871055 - protein, 141 aa, Homo sapiens
GALYTLISGSLTDTQRMTYTNHILLYLPRDQQKGPVGVYDEGPVRRQGKVTVKYDRKELRKRLNLEEWILEQLTRLYDCQEEEIPELEIDVDELLDMESDDARAARVKELLVDCYKPTEAFISGLLDKIRGMQKLSTPQKK

SEQ ID NO: 871056 - protein, 205 aa, Homo sapiens
RLQLGRRPRGTKGGRIGGEGAGRGQAKPGGSACCSCPRAPPPPPSPRSRAERSRRANPSQPAGVPEAVAQGGARRSHVAPAAAMADSGTAGGAALAAPAPGPGSGGPGPRVYFQSPPGAAGEGPGGADDEGPVRRQGKVTVKYDRKELRKRLNLEEWILEQLTRLYDCQEEEIPELEIDVDELLDMESDDARAARVKELLQDPLL

SEQ ID NO: 871057 - protein, 137 aa, Homo sapiens
  misc_feature (3)..(4): Xaa can be any naturally occurring amino acid
GRXXAAGPRARGGPGPRVYFQSPPGAAGEGPGGADDEGPVRRQGKVTVKYDRKELRKRLNLEEWILEQLTRLYDCQEEEIPELEIDVDELLDMESDDARAARVKELLVDCYKPTEAFISGLLDKIRGMQKLSTPQKK

SEQ ID NO: 871058 - protein, 230 aa, Homo sapiens; identical to SEQ ID NO: 871046

SEQ ID NO: 871059 - protein, 216 aa, Homo sapiens
RRWSLLRSGSLVDATPCCHAWLVLFPVSACVLHVDVCALTALHCVPLCCAWPWLDMLCTCWWCAAGCLCCAPVPPVCLWHVVLCPCDHCCLHFKMHPPVWPACDDVCPGAVGLDDEGPVRRQGKVTVKYDRKELRKRLNLEEWILEQLTRLYDCQEEEIPELEIDVDELLDMESDDARAARVKELLVDCYKPTEAFISGLLDKIRGMQKLSTPQKK

SEQ ID NO: 871060 - protein, 230 aa, Homo sapiens; identical to SEQ ID NO: 871046

SEQ ID NO: 871061 - protein, 230 aa, Homo sapiens; identical to SEQ ID NO: 871046

SEQ ID NO: 871062 - protein, 286 aa, Homo sapiens; identical to SEQ ID NO: 871054

SEQ ID NO: 871063 - protein, 204 aa, Homo sapiens
RLQLGRRPRGTKGGRIGGEGAGRGQAKPGGSACCSCPRAPPPPPSPRSRAERSRRANPSQPAGVPEAVAQGGARRSHVAPAAAMADSGTAGGAALAAPAPGPGSGGPGPRVYFQSPPGAAGEGPGGADDEGPVRRQGKVTVKYDRKELRKRLNLEEWILEQLTRLYDCQEEEIPELEIDVDEAFISGLLDKIRGMQKLSTPQKK

SEQ ID NO: 871064 - protein, 2137 aa, Homo sapiens
MTSATEFENVGNQPPYSRINARWDAPDDELDNDNSSARLFERSRIKALADEREVVQKKTFTKWVNSHLARVSCRITDLYKDLRDGRMLIKLLEVLSGEMLPKPTKGKMRIHCLENVDKALQFLKEQRVHLENMGSHDIVDGNHRLVLGLIWTIILRFQIQDIVVQTQEGRETRSAKDALLLWCQMKTAGYPHVNVTNFTSSWKDGLAFNALIHKHRPDLIDFDKLKDSNARHNLEHAFNVAERQLGIIPLLDPEDVFTENPDEKSIITYVVAFYHYFSKMKVLAVEGKRVGKVIDHAIETEKMIEKYSGLASDLLTWIEQTITVLNSRKFANSLTGVQQQLQAFSTYRTVEKPPKFQEKGNLEVLLFTIQSRMRANNQKVYTPHDGKLVSDINRAWESLEEAGYRRELALRNELIRQEKLEQLARRFDRKAAMRETWLNENQRLVAQDNFGYDLAAVEAAKKKHEAIETDTAAYEERVRALEDLAQELEKENYHDQKRITARKDNILRLWSYLQELLQSRRQRLETTLALQKLFQDMLHSIDWMDEIKAHLLSAEFGKHLLEVEDLLQKHKLMEADIAIQGDKVKAITAATLKFTEGKGYQPCDPQVIQDRMSHLEQCFEELSNMAAGARTQLEQSKRLWKFFWEMDEAESWIKEKEQIYSSLDYGKDLTSVLILQRKHKAFEDELRGLDAHLEQIFQEAHGMVARKQFGHPQIEARIKEVSAQWDQLKDLAAFCKKNLQDAENFFQFQGDADDLKAWLQDAHRLLSGEDVGQDEGATRALGKKHKDFLEELEESRGVMEHLEQQAQGFPEEFRDSPDVTHRLQALRELYQQVVAQADLRQQRLQEALDLYTVFGETDACELWMGEKEKWLAEMEMPDTLEDLEVVQHRFDILDQEMKTLMTQIDGVNLAANSLVESGHPRSREVKQYQDHLNTRWQAFQTLVSERREAVDSALRVHNYCVDCEETSKWITDKTKVVESTKDLGRDLAGIIAIQRKLSGLERDVAAIQARVDALERESQQLMDSHPEQKEDIGQRQKHLEELWQGLQQSLQGQEDLLGEVSQLQAFLQDLDDFQAWLSITQKAVASEDMPESLPEAEQLLQQHAGIKDEIDGHQDSYQRVKESGEKVIQGQTDPEYLLLGQRLEGLDTGWDALGRMWESRSHTLAQCLGFQEFQKDAKQAEAILSNQEYTLAHLEPPDSLEAAEAGIRKFEDFLGSMENNRDKVLSPVDSGNKLVAEGNLYSDKIKEKVQLIEDRHRKNNEKAQEASVLLRDNLELQNFLQNCQELTLWINDKLLTSQDVSYDEARNLHNKWLKHQAFVAELASHEGWLENIDAEGKQLMDEKPQFTALVSQKLEALHRLWDELQATTKEKTQHLSAARSSDLRLQTHADLNKWISAMEDQLRSDDPGKDLTSVNRMLAKLKRVEDQVNVRKEELGELFAQVPSMGEEGGDADLSIEKRFLDLLEPLGRRKKQLESSRAKLQISRDLEDETLWVEERLPLAQSADYGTNLQTVQLFMKKNQTLQNEILGHTPRVEDVLQRGQQLVEAAEIDCQDLEERLGHLQSSWDRLREAAAGRLQRLRDANEAQQYYLDADEAEAWIGEQELYVISDEIPKDEEGAIVMLKRHLRQQRAVEDYGRNIKQLASRAQGLLSAGHPEGEQIIRLQGQVDKHYAGLKDVAEERKRKLENMYHLFQLKRETDDLEQWISEKELVASSPEMGQDFDHVTLLRDKFRDFARETGAIGQERVDNVNAFIERLIDAGHSEAATIAEWKDGLNEMWADLLELIDTRMQLLAASYDLHRYFYTGAEILGLIDEKHRELPEDVGLDASTAESFHRVHTAFERDVHLLGVQVQQFQDVATRLQTAYAGEKAEAIQNKEQEVSAAWQALLDACAGRRTQLVDTADKFRFFSMARDLLSWMESIIRQIETQERPRDVSSVELLMKYHQGINAEIETRSKNFSACLELGESLLQRQHQASEEIREKLQQVMSRRKEMNEKWEARWERLRMLLEVCQFSRDASVAEAWLIAQEPYLASGDFGHTVDSVEKLIKRHEAFEKSTASWAERFAALEKPTTLELKERQIAERPAEETGPQEEEGETAGEAPVSHHAATERTSPVSLWSRLSSSWESLQPEPSHPY

SEQ ID NO: 871065 - protein, 2328 aa, Homo sapiens
MTSATEFENVGNQPPYSRINARWDAPDDELDNDNSSARLFERSRIKALADEREVVQKKTFTKWVNSHLARVSCRITDLYKDLRDGRMLIKLLEVLSGEMLPKPTKGKMRIHCLENVDKALQFLKEQRVHLENMGSHDIVDGNHRLVLGLIWTIILRFQIQDIVVQTQEGRETRSAKDALLLWCQMKTAGYPHVNVTNFTSSWKDGLAFNALIHKHRPDLIDFDKLKDSNARHNLEHAFNVAERQLGIIPLLDPEDVFTENPDEKSIITYVVAFYHYFSKMKVLAVEGKRVGKVIDHAIETEKMIEKYSGLASDLLTWIEQTITVLNSRKFANSLTGVQQQLQAFSTYRTVEKPPKFQEKGNLEVLLFTIQSRMRANNQKVYTPHDGKLVSDINRAWESLEEAGYRRELALRNELIRQEKLEQLARRFDRKAAMRETWLNENQRLVAQDNFGYDLAAVEAAKKKHEAIETDTAAYEERVRALEDLAQELEKENYHDQKRITARKDNILRLWSYLQELLQSRRQRLETTLALQKLFQDMLHSIDWMDEIKAHLLSAEFGKHLLEVEDLLQKHKLMEADIAIQGDKVKAITAATLKFTEGKGYQPCDPQVIQDRMSHLEQCFEELSNMAAGARTQLEQSKRLWKFFWEMDEAESWIKEKEQIYSSLDYGKDLTSVLILQRKHKAFEDELRGLDAHLEQIFQEAHGMVARKQFGHPQIEARIKEVSAQWDQLKDLAAFCKKNLQDAENFFQFQGDADDLKAWLQDAHRLLSGEDVGQDEGATRALGKKHKDFLEELEESRGVMEHLEQQAQGFPEEFRDSPDVTHRLQALRELYQQVVAQADLRQQRLQEALDLYTVFGETDACELWMGEKEKWLAEMEMPDTLEDLEVVQHRFDILDQEMKTLMTQIDGVNLAANSLVESGHPRSREVKQYQDHLNTRWQAFQTLVSERREAVDSALRVHNYCVDCEETSKWITDKTKVVESTKDLGRDLAGIIAIQRKLSGLERDVAAIQARVDALERESQQLMDSHPEQKEDIGQRQKHLEELWQGLQQSLQGQEDLLGEVSQLQAFLQDLDDFQAWLSITQKAVASEDMPESLPEAEQLLQQHAGIKDEIDGHQDSYQRVKESGEKVIQGQTDPEYLLLGQRLEGLDTGWDALGRMWESRSHTLAQCLGFQEFQKDAKQAEAILSNQEYTLAHLEPPDSLEAAEAGIRKFEDFLGSMENNRDKVLSPVDSGNKLVAEGNLYSDKIKEKVQLIEDRHRKNNEKAQEASVLLRDNLELQNFLQNCQELTLWINDKLLTSQDVSYDEARNLHNKWLKHQAFVAELASHEGWLENIDAEGKQLMDEKPQFTALVSQKLEALHRLWDELQATTKEKTQHLSAARSSDLRLQTHADLNKWISAMEDQLRSDDPGKDLTSVNRMLAKLKRVEDQVNVRKEELGELFAQVPSMGEEGGDADLSIEKRFLDLLEPLGRRKKQLESSRAKLQISRDLEDETLWVEERLPLAQSADYGTNLQTVQLFMKKNQTLQNEILGHTPRVEDVLQRGQQLVEAAEIDCQDLEERLGHLQSSWDRLREAAAGRLQRLRDANEAQQYYLDADEAEAWIGEQELYVISDEIPKDEEGAIVMLKRHLRQQRAVEDYGRNIKQLASRAQGLLSAGHPEGEQIIRLQGQVDKHYAGLKDVAEERKRKLENMYHLFQLKRETDDLEQWISEKELVASSPEMGQDFDHVTLLRDKFRDFARETGAIGQERVDNVNAFIERLIDAGHSEAATIAEWKDGLNEMWADLLELIDTRMQLLAASYDLHRYFYTGAEILGLIDEKHRELPEDVGLDASTAESFHRVHTAFERDVHLLGVQVQQFQDVATRLQTAYAGEKAEAIQNKEQEVSAAWQALLDACAGRRTQLVDTADKFRFFSMARDLLSWMESIIRQIETQERPRDVSSVELLMKYHQGINAEIETRSKNFSACLELGESLLQRQHQASEEIREKLQQVMSRRKEMNEKWEARWERLRMLLEVCQFSRDASVAEAWLIAQEPYLASGDFGHTVDSVEKLIKRHEAFEKSTASWAERFAALEKPTTLELKERQIAERPAEETGPQEEEGETAGEAPVSHHAATERTSPGEEEGTWPQNLQQPPPPGQHKDGQKSTGDERPTTEPLFKVLDTPLSEGDEPATLPAPRDHGQSVQMEGYLGRKHDLEGPNKKASNRSWNNLYCVLRNSELTFYKDAKNLALGMPYHGEEPLALRHAICEIAANYKKKKHVFKLRLSNGSEWLFHGKDEEEMLSWLQGVSTAINESQSIRVKAQSLPLPSLSGPDASLGKKDKEKRFSFFPKKK

SEQ ID NO: 871066 - protein, 2272 aa, Homo sapiens
MTSATEFENVGNQPPYSRINARWDAPDDELDNDNSSARLFERSRIKALADEREVVQKKTFTKWVNSHLARVSCRITDLYKDLRDGRMLIKLLEVLSGEMLPKPTKGKMRIHCLENVDKALQFLKEQRVHLENMGSHDIVDGNHRLVLGLIWTIILRFQIQDIVVQTQEGRETRSAKDALLLWCQMKTAGYPHVNVTNFTSSWKDGLAFNALIHKHRPDLIDFDKLKDSNARHNLEHAFNVAERQLGIIPLLDPEDVFTENPDEKSIITYVVAFYHYFSKMKVLAVEGKRVGKVIDHAIETEKMIEKYSGLASDLLTWIEQTITVLNSRKFANSLTGVQQQLQAFSTYRTVEKPPKFQEKGNLEVLLFTIQSRMRANNQKVYTPHDGKLVSDINRAWESLEEAGYRRELALRNELIRQEKLEQLARRFDRKAAMRETWLNENQRLVAQDNFGYDLAAVEAAKKKHEAIETDTAAYEERVRALEDLAQELEKENYHDQKRITARKDNILRLWSYLQELLQSRRQRLETTLALQKLFQDMLHSIDWMDEIKAHLLSAEFGKHLLEVEDLLQKHKLMEADIAIQGDKVKAITAATLKFTEGKGYQPCDPQVIQDRMSHLEQCFEELSNMAAGARTQLEQSKRLWKFFWEMDEAESWIKEKEQIYSSLDYGKDLTSVLILQRKHKAFEDELRGLDAHLEQIFQEAHGMVARKQFGHPQIEARIKEVSAQWDQLKDLAAFCKKNLQDAENFFQFQGDADDLKAWLQDAHRLLSGEDVGQDEGATRALGKKHKDFLEELEESRGVMEHLEQQAQGFPEEFRDSPDVTHRLQALRELYQQVVAQADLRQQRLQEALDLYTVFGETDACELWMGEKEKWLAEMEMPDTLEDLEVVQHRFDILDQEMKTLMTQIDGVNLAANSLVESGHPRSREVKQYQDHLNTRWQAFQTLVSERREAVDSALRVHNYCVDCEETSKWITDKTKVVESTKDLGRDLAGIIAIQRKLSGLERDVAAIQARVDALERESQQLMDSHPEQKEDIGQRQKHLEELWQGLQQSLQGQEDLLGEVSQLQAFLQDLDDFQAWLSITQKAVASEDMPESLPEAEQLLQQHAGIKDEIDGHQDSYQRVKESGEKVIQGQTDPEYLLLGQRLEGLDTGWDALGRMWESRSHTLAQCLGFQEFQKDAKQAEAILSNQEYTLAHLEPPDSLEAAEAGIRKFEDFLGSMENNRDKVLSPVDSGNKLVAEGNLYSDKIKEKVQLIEDRHRKNNEKAQEASVLLRDNLELQNFLQNCQELTLWINDKLLTSQDVSYDEARNLHNKWLKHQAFVAELASHEGWLENIDAEGKQLMDEKPQFTALVSQKLEALHRLWDELQATTKEKTQHLSAARSSDLRLQTHADLNKWISAMEDQLRSDDPGKDLTSVNRMLAKLKRVEDQVNVRKEELGELFAQVPSMGEEGGDADLSIEKRFLDLLEPLGRRKKQLESSRAKLQISRDLEDETLWVEERLPLAQSADYGTNLQTVQLFMKKNQTLQNEILGHTPRVEDVLQRGQQLVEAAEIDCQDLEERLGHLQSSWDRLREAAAGRLQRLRDANEAQQYYLDADEAEAWIGEQELYVISDEIPKDEEGAIVMLKRHLRQQRAVEDYGRNIKQLASRAQGLLSAGHPEGEQIIRLQGQVDKHYAGLKDVAEERKRKLENMYHLFQLKRETDDLEQWISEKELVASSPEMGQDFDHVTLLRDKFRDFARETGAIGQERVDNVNAFIERLIDAGHSEAATIAEWKDGLNEMWADLLELIDTRMQLLAASYDLHRYFYTGAEILGLIDEKHRELPEDVGLDASTAESFHRVHTAFERDVHLLGVQVQQFQDVATRLQTAYAGEKAEAIQNKEQEVSAAWQALLDACAGRRTQLVDTADKFRFFSMARDLLSWMESIIRQIETQERPRDVSSVELLMKYHQGINAEIETRSKNFSACLELGESLLQRQHQASEEIREKLQQVMSRRKEMNEKWEARWERLRMLLEVCQFSRDASVAEAWLIAQEPYLASGDFGHTVDSVEKLIKRHEAFEKSTASWAERFAALEKPTTLELKERQIAERPAEETGPQEEEGETAGEAPVSHHAATERTSPGEEEGTWPQNLQQPPPPGQHKDGQKSTGDERPTTEPLFKVLDTPLSEGDEPATLPAPRDHGQSVQMEGYLGRKHDLEGPNKKASNRSWNNLYCVLRNSELTFYKDAKNLALGMPYHGEEPLALRHAICEIAANYKKKKHVFKLRLNNGSEWLFSLQG

SEQ ID NO: 871067 - protein, 2208 aa, Homo sapiens
MTSATEFENVGNQPPYSRINARWDAPDDELDNDNSSARLFERSRIKALADEREVVQKKTFTKWVNSHLARVSCRITDLYKDLRDGRMLIKLLEVLSGEMLPKPTKGKMRIHCLENVDKALQFLKEQRVHLENMGSHDIVDGNHRLVLGLIWTIILRFQIQDIVVQTQEGRETRSAKDALLLWCQMKTAGYPHVNVTNFTSSWKDGLAFNALIHKHRPDLIDFDKLKDSNARHNLEHAFNVAERQLGIIPLLDPEDVFTENPDEKSIITYVVAFYHYFSKMKVLAVEGKRVGKVIDHAIETEKMIEKYSGLASDLLTWIEQTITVLNSRKFANSLTGVQQQLQAFSTYRTVEKPPKFQEKGNLEVLLFTIQSRMRANNQKVYTPHDGKLVSDINRAWESLEEAGYRRELALRNELIRQEKLEQLARRFDRKAAMRETWLNENQRLVAQDNFGYDLAAVEAAKKKHEAIETDTAAYEERVRALEDLAQELEKENYHDQKRITARKDNILRLWSYLQELLQSRRQRLETTLALQKLFQDMLHSIDWMDEIKAHLLSAEFGKHLLEVEDLLQKHKLMEADIAIQGDKVKAITAATLKFTEGKGYQPCDPQVIQDRMSHLEQCFEELSNMAAGARTQLEQSKRLWKFFWEMDEAESWIKEKEQIYSSLDYGKDLTSVLILQRKHKAFEDELRGLDAHLEQIFQEAHGMVARKQFGHPQIEARIKEVSAQWDQLKDLAAFCKKNLQDAENFFQFQGDADDLKAWLQDAHRLLSGEDVGQDEGATRALGKKHKDFLEELEESRGVMEHLEQQAQGFPEEFRDSPDVTHRLQALRELYQQVVAQADLRQQRLQEALDLYTVFGETDACELWMGEKEKWLAEMEMPDTLEDLEVVQHRFDILDQEMKTLMTQIDGVNLAANSLVESGHPRSREVKQYQDHLNTRWQAFQTLVSERREAVDSALRVHNYCVDCEETSKWITDKTKVVESTKDLGRDLAGIIAIQRKLSGLERDVAAIQARVDALERESQQLMDSHPEQKEDIGQRQKHLEELWQGLQQSLQGQEDLLGEVSQLQAFLQDLDDFQAWLSITQKAVASEDMPESLPEAEQLLQQHAGIKDEIDGHQDSYQRVKESGEKVIQGQTDPEYLLLGQRLEGLDTGWDALGRMWESRSHTLAQCLGFQEFQKDAKQAEAILSNQNTLWLTWSPQTPWKLQRLEIRKFEDFWLLRMDTGWNALGRMWEIRSHTLAQCLGFQEFQKDAKQAEAILSNEYTLAHLEPPDSLEAAEAGIRKFEDFLGSMENNRDKVLSPVDSGNKLVAEGNLYSDKIKEKVQLIEDRHRKNNEKAQEASVLLRDNLELQNFLQNCQELTLWINDKLLTSQDVSYDEARNLHNKWLKHQAFVAELASHEGWLENIDAEGKQLMDEKPQFTALVSQKLEALHRLWDELQATTKEKTQHLSAARSSDLRLQTHADLNKWISAMEDQLRSDDPGKDLTSVNRMLAKLKRVEDQVNVRKEELGELFAQVPSMGEEGGDADLSIEKRFLDLLEPLGRRKKQLESSRAKLQISRDLEDETLWVEERLPLAQSADYGTNLQTVQLFMKKNQTLQNEILGHTPRVEDVLQRGQQLVEAAEIDCQDLEERLGHLQSSWDRLREAAAGRLQRLRDANEAQQYYLDADEAEAWIGEQELYVISDEIPKDEEGAIVMLKRHLRQQRAVEDYGRNIKQLASRAQGLLSAGHPEGEQIIRLQGQVDKHYAGLKDVAEERKRKLENMYHLFQLKRETDDLEQWISEKELVASSPEMGQDFDHVTLLRDKFRDFARETGAIGQERVDNVNAFIERLIDAGHSEAATIAEWKDGLNEMWADLLELIDTRMQLLAASYDLHRYFYTGAEILGLIDEKHRELPEDVGLDASTAESFHRVHTAFERDVHLLGVQVQQFQDVATRLQTAYAGEKAEAIQNKEQEVSAAWQALLDACAGRRTQLVDTADKFRFFSMARDLLSWMESIIRQIETQERPRDVSSVELLMKYHQGINAEIETRSKNFSACLELGESLLQRQHQASEEIREKLQQVMSRRKEMNEKWEARWERLRMLLEVCQFSRDASVAEAWLIAQEPYLASGDFGHTVDSVEKLIKRHEAFEKSTASWAERFAALEKPTTLELKERQIAERPAEETGPQEEEGETAGEAPVSHHAATERTSPVSLWSRLSSSWESLQPEPSHPY

SEQ ID NO: 871068 - protein, 2106 aa, Homo sapiens
MTSATEFENVGNQPPYSRINARWDAPDDELDNDNSSARLFERSRIKALADEREVVQKKTFTKWVNSHLARVSCRITDLYKDLRDGRMLIKLLEVLSGEMLPKPTKGKMRIHCLENVDKALQFLKEQRVHLENMGSHDIVDGNHRLVLGLIWTIILRFQIQDIVVQTQEGRETRSAKDALLLWCQMKTAGYPHVNVTNFTSSWKDGLAFNALIHKHRPDLIDFDKLKDSNARHNLEHAFNVAERQLGIIPLLDPEDVFTENPDEKSIITYVVAFYHYFSKMKVLAVEGKRVGKVIDHAIETEKMIEKYSGLASDLLTWIEQTITVLNSRKFANSLTGVQQQLQAFSTYRTVEKPPKFQEKGNLEVLLFTIQSRMRANNQKVYTPHDGKLVSDINRAWESLEEAGYRRELALRNELIRQEKLEQLARRFDRKAAMRETWLNENQRLVAQDNFGYDLAAVEAAKKKHEAIETDTAAYEERVRALEDLAQELEKENYHDQKRITARKDNILRLWSYLQELLQSRRQRLETTLALQKLFQDMLHSIDWMDEIKAHLLSAEFGKHLLEVEDLLQKHKLMEADIAIQGDKVKAITAATLKFTEGKGYQPCDPQVIQDRMSHLEQCFEELSNMAAGARTQLEQSKRLWKFFWEMDEAESWIKEKEQIYSSLDYGKDLTSVLILQRKHKAFEDELRGLDAHLEQIFQEAHGMVARKQFGHPQIEARIKEVSAQWDQLKDLAAFCKKNLQDAENFFQFQGDADDLKAWLQDAHRLLSGEDVGQDEGATRALGKKHKDFLEELEESRGVMEHLEQQAQGFPEEFRDSPDVTHRLQALRELYQQVVAQADLRQQRLQEALDLYTVFGETDACELWMGEKEKWLAEMEMPDTLEDLEVVQHRFDILDQEMKTLMTQIDGVNLAANSLVESGHPRSREVKQYQDHLNTRWQAFQTLVSERREAVDSALRVHNYCVDCEETSKWITDKTKVVESTKDLGRDLAGIIAIQRKLSGLERDVAAIQARVDALERESQQLMDSHPEQKEDIGQRQKHLEELWQGLQQSLQGQEDLLGEVSQLQAFLQDLDDFQAWLSITQKAVASEDMPESLPEAEQLLQQHAGIKDEIDGHQDSYQRVKESGEKVIQGQTDPEYLLLGQRLEGLDTGWDALGRMWESRSHTLAQCLGFQEFQKDAKQAEAILSNQEYTLAHLEPPDSLEAAEAGIRKFEDFLGSMENNRDKVLSPVDSGNKLVAEGNLYSDKIKEKVQLIEDRHRKNNEKAQEASVLLRDNLELQNFLQNCQELTLWINDKLLTSQDVSYDEARNLHNKWLKHQAFVAELASHEGWLENIDAEGKQLMDEKPQFTALVSQKLEALHRLWDELQATTKEKTQHLSAARSSDLRLQTHADLNKWISAMEDQLRSDDPGKDLTSVNRMLAKLKRVEDQVNVRKEELGELFAQVPSMGEEGGDADLSIEKRFLDLLEPLGRRKKQLESSRAKLQISRDLEDETLWVEERLPLAQSADYGTNLQTVQLFMKKNQTLQNEILGHTPRVEDVLQRGQQLVEAAEIDCQDLEERLGHLQSSWDRLREAAAGRLQRLRDANEAQQYYLDADEAEAWIGEQELYVISDEIPKDEEGAIVMLKRHLRQQRAVEDYGRNIKQLASRAQGLLSAGHPEGEQIIRLQGQVDKHYAGLKDVAEERKRKLENMYHLFQLKRETDDLEQWISEKELVASSPEMGQDFDHVTLLRDKFRDFARETGAIGQERVDNVNAFIERLIDAGHSEAATIAEWKDGLNEMWADLLELIDTRMQLLAASYDLHRYFYTGAEILGLIDEKHRELPEDVGLDASTAESFHRVHTAFERDVHLLGVQVQQFQDVATRLQTAYAGEKAEAIQNKEQEVSAAWQALLDACAGRRTQLVDTADKFRFFSMARDLLSWMESIIRQIETQERPRDVSSVELLMKYHQGINAEIETRSKNFSACLELGESLLQRQHQASEEIREKLQQVMSRRKEMNEKWEARWERLRMLLEVCQFSRDASVAEAWLIAQEPYLASGDFGHTVDSVEKLIKRHEAFEKSTASWAERFAALEKPTTASRGGRRDSRGGSSFPPCGHRENVPGQSLVSFV

SEQ ID NO: 871069 - protein, 2259 aa, Homo sapiens
MTSATEFENVGNQPPYSRINARWDAPDDELDNDNSSARLFERSRIKALADEREVVQKKTFTKWVNSHLARVSCRITDLYKDLRDGRMLIKLLEVLSGEMLPKPTKGKMRIHCLENVDKALQFLKEQRVHLENMGSHDIVDGNHRLVLGLIWTIILRFQIQDIVVQTQEGRETRSAKDALLLWCQMKTAGYPHVNVTNFTSSWKDGLAFNALIHKHRPDLIDFDKLKDSNARHNLEHAFNVAERQLGIIPLLDPEDVFTENPDEKSIITYVVAFYHYFSKMKVLAVEGKRVGKVIDHAIETEKMIEKYSGLASDLLTWIEQTITVLNSRKFANSLTGVQQQLQAFSTYRTVEKPPKFQEKGNLEVLLFTIQSRMRANNQKVYTPHDGKLVSDINRAWESLEEAGYRRELALRNELIRQEKLEQLARRFDRKAAMRETWLNENQRLVAQDNFGYDLAAVEAAKKKHEAIETDTAAYEERVRALEDLAQELEKENYHDQKRITARKDNILRLWSYLQELLQSRRQRLETTLALQKLFQDMLHSIDWMDEIKAHLLSAEFGKHLLEVEDLLQKHKLMEADIAIQGDKVKAITAATLKFTEGKGYQPCDPQVIQDRMSHLEQCFEELSNMAAGARTQLEQSKRLWKFFWEMDEAESWIKEKEQIYSSLDYGKDLTSVLILQRKHKAFEDELRGLDAHLEQIFQEAHGMVARKQFGHPQIEARIKEVSAQWDQLKDLAAFCKKNLQDAENFFQFQGDADDLKAWLQDAHRLLSGEDVGQDEGATRALGKKHKDFLEELEESRGVMEHLEQQAQGFPEEFRDSPDVTHRLQALRELYQQVVAQADLRQQRLQEALDLYTVFGETDACELWMGEKEKWLAEMEMPDTLEDLEVVQHRFDILDQEMKTLMTQIDGVNLAANSLVESGHPRSREVKQYQDHLNTRWQAFQTLVSERREAVDSALRVHNYCVDCEETSKWITDKTKVVESTKDLGRDLAGIIAIQRKLSGLERDVAAIQARVDALERESQQLMDSHPEQKEDIGQRQKHLEELWQGLQQSLQGQEDLLGEVSQLQAFLQDLDDFQAWLSITQKAVASEDMPESLPEAEQLLQQHAGIKDEIDGHQDSYQRVKESGEKVIQGQTDPEYLLLGQRLEGLDTGWDALGRMWESRSHTLAQCLGFQEFQKDAKQAEAILSNQEYTLAHLEPPDSLEAAEAGIRKFEDFLGSMENNRDKVLSPVDSGNKLVAEGNLYSDKIKEKVQLIEDRHRKNNEKAQEASVLLRDNLELQNFLQNCQELTLWINDKLLTSQDVSYDEARNLHNKWLKHQAFVAELASHEGWLENIDAEGKQLMDEKPQFTALVSQKLEALHRLWDELQATTKEKTQHLSAARSSDLRLQTHADLNKWISAMEDQLRSDDPGKDLTSVNRMLAKLKRVEDQVNVRKEELGELFAQVPSMGEEGGDADLSIEKRFLDLLEPLGRRKKQLESSRAKLQISRDLEDETLWVEERLPLAQSADYGTNLQTVQLFMKKNQTLQNEILGHTPRVEDVLQRGQQLVEAAEIDCQDLEERLGHLQSSWDRLREAAAGRLQRLRDANEAQQYYLDADEAEAWIGEQELYVISDEIPKDEEGAIVMLKRHLRQQRAVEDYGRNIKQLASRAQGLLSAGHPEGEQIIRLQGQVDKHYAGLKDVAEERKRKLENMYHLFQLKRETDDLEQWISEKELVASSPEMGQDFDHVTLLRDKFRDFARETGAIGQERVDNVNAFIERLIDAGHSEAATIAEWKDGLNEMWADLLELIDTRMQLLAASYDLHRYFYTGAEILGLIDEKHRELPEDVGLDASTAESFHRVHTAFERDVHLLGVQVQQFQDVATRLQTAYAGEKAEAIQNKEQEVSAAWQALLDACAGRRTQLVDTADKFRFFSMARDLLSWMESIIRQIETQERPRDVSSVELLMKYHQGINAEIETRSKNFSACLELGESLLQRQHQASEEIREKLQQVMSRRKEMNEKWEARWERLRMLLEVCQFSRDASVAEAWLIAQEPYLASGDFGHTVDSVEKLIKRHEAFEKSTASWAERFAALEKPTTLELKERQIAERPAEETGPQEEEGETAGEAPVSHHAATERTSPGEEEGTWPQNLQQPPPPGQHKDGQKSTGDERPTTEPLFKVLDTPLSEGDEPATLPAPRDHGQSVQMEGYLGRKHDLEGPNKKASNRSWNNLYCVLRNSELTFYKDAKNLALGMPYHGEEPLALRHAICEIAANYKKKKHVFKLR

SEQ ID NO: 871070 - protein, 1830 aa, Homo sapiens
MTSATEFENVGNQPPYSRINARWDAPDDELDNDNSSARLFERSRIKALADEREVVQKKTFTKWVNSHLARVSCRITDLYKDLRDGRMLIKLLEVLSGEMLPKPTKGKMRIHCLENVDKALQFLKEQRVHLENMGSHDIVDGNHRLVLGLIWTIILRFQIQDIVVQTQEGRETRSAKDALLLWCQMKTAGYPHVNVTNFTSSWKDGLAFNALIHKHRPDLIDFDKLKDSNARHNLEHAFNVAERQLGIIPLLDPEDVFTENPDEKSIITYVVAFYHYFSKMKVLAVEGKRVGKVIDHAIETEKMIEKYSGLASDLLTWIEQTITVLNSRKFANSLTGVQQQLQAFSTYRTVEKPPKFQEKGNLEVLLFTIQSRMRANNQKVYTPHDGKLVSDINRAWESLEEAGYRRELALRNELIRQEKLEQLARRFDRKAAMRETWLNENQRLVAQDNFGYDLAAVEAAKKKHEAIETDTAAYEERVRALEDLAQELEKENYHDQKRITARKDNILRLWSYLQELLQSRRQRLETTLALQKLFQDMLHSIDWMDEIKAHLLSAEFGKHLLEVEDLLQKHKLMEADIAIQGDKVKAITAATLKFTEGKGYQPCDPQVIQDRMSHLEQCFEELSNMAAGARTQLEQSKRLWKFFWEMDEAESWIKEKEQIYSSLDYGKDLTSVLILQRKHKAFEDELRGLDAHLEQIFQEAHGMVARKQFGHPQIEARIKEVSAQWDQLKDLAAFCKKNLQDAENFFQFQGDADDLKAWLQDAHRLLSGEDVGQDEGATRALGKKHKDFLEELEESRGVMEHLEQQAQGFPEEFRDSPDVTHRLQALRELYQQVVAQADLRQQRLQEALDLYTVFGETDACELWMGEKEKWLAEMEMPDTLEDLEVVQHRFDILDQEMKTLMTQIDGVNLAANSLVESGHPRSREVKQYQDHLNTRWQAFQTLVSERREAVDSALRVHNYCVDCEETSKWITDKTKVVESTKDLGRDLAGIIAIQRKLSGLERDVAAIQARVDALERESQQLMDSHPEQKEDIGQRQKHLEELWQGLQQSLQGQEDLLGEVSQLQAFLQDLDDFQAWLSITQKAVASEDMPESLPEAEQLLQQHAGIKDEIDGHQDSYQRVKESGEKVIQGQTDPEYLLLGQRLEGLDTGWDALGRMWESRSHTLAQCLGFQEFQKDAKQAEAILSNQEYTLAHLEPPDSLEAAEAGIRKFEDFLGSMENNRDKVLSPVDSGNKLVAEGNLYSDKIKEKVQLIEDRHRKNNEKAQEASVLLRDNLELQNFLQNCQELTLWINDKLLTSQDVSYDEARNLHNKWLKHQAFVAELASHEGWLENIDAEGKQLMDEKPQFTALVSQKLEALHRLWDELQATTKEKTQHLSAARSSDLRLQTHADLNKWISAMEDQLRSDDPGKDLTSVNRMLAKLKRVEDQVNVRKEELGELFAQVPSMGEEGGDADLSIEKRFLDLLEPLGRRKKQLESSRAKLQISRDLEDETLWVEERLPLAQSADYGTNLQTVQLFMKKNQTLQNEILGHTPRVEDVLQRGQQLVEAAEIDCQDLEERLGHLQSSWDRLREAAAGRLQRLRDANEAQQYYLDADEAEAWIGEQELYVISDEIPKDEEGAIVMLKRHLRQQRAVEDYGRNIKQLASRAQGLLSAGHPEGEQIIRLQGQVDKHYAGLKDVAEERKRKLENMYHLFQLKRETDDLEQWISEKELVASSPEMGQDFDHVTLLRDKFRDFARETGAIGQERVDNVNAFIERLIDAGHSEAATIAEWKDGLNEMWADLLELIDTRMQLLAASYDLHRYFYTGAEILGPINEKVSLACPRILGLYSI

SEQ ID NO: 871071 - protein, 131 aa, Homo sapiens
CSSTETPLGLWTTPSVARSNEPALPARGRSGRRRSLGRELAPGTPSDCGVSLSVLLSGCPPRSLVVSVGAQALKNLLVAGPRAQERCQRAGASPEPREEGCNGSPIVDRDIRIPSPGSLKTSPEFGSWKEL

SEQ ID NO: 871072 - protein, 124 aa, Homo sapiens
MEGEACAGTWVARGPAPVLGGQGLSGPCTRSGRLVPLAPGSEGLSTWASSCRGGTGSPSTAGLPALTTLELSPGLSHLPAGQGSGLAACHAQASLRWAPCEARASRMGASHCSTAPGPVHCPRA

SEQ ID NO: 871073 - protein, 131 aa, Homo sapiens; identical to SEQ ID NO: 871071

SEQ ID NO: 871074 - protein, 131 aa, Homo sapiens; identical to SEQ ID NO: 871071

SEQ ID NO: 871075 - protein, 124 aa, Homo sapiens; identical to SEQ ID NO: 871072

SEQ ID NO: 871076 - protein, 131 aa, Homo sapiens; identical to SEQ ID NO: 871071

SEQ ID NO: 871077 - protein, 124 aa, Homo sapiens; identical to SEQ ID NO: 871072

SEQ ID NO: 871078 - protein, 85 aa, Homo sapiens
CSSTETPLGLWTTPSVARSNEPALPARGRSGRRRSLGRELAPGTPSDCGVSLSVLLSGCPPRSLVVSVGAQALKNLLVAGPRGNC

SEQ ID NO: 871079 - protein, 51 aa, Homo sapiens
WQPELMNKTGEYVGISPPLLCLHSSSESGDSRNFLGVTVPSKLQVALGERK

SEQ ID NO: 871080 - protein, 105 aa, Homo sapiens
RWSLTLWPRLHEYSSTLWGKPPFPSLAFSQEGNVSSPLLASCLVPHTLLPGRRGRSSWKWIEPVFLCEPASPRHLVSRFSCRPEFHRAGPAHGGLWRPTLLVAGQ

SEQ ID NO: 871081 - protein, 307 aa, Homo sapiens
MRASEQQHRPRVAAQLLGHVEVEVLAHGAHHQPLPTVGHDLQRQRHKVVEGGVQHQCTQLRVGHGGPGGREAANRPAVDHQVRGREVQAVQCVLDHHVHGVGVVLREGHASAAAEAGVVPAQHGVAGLERCRQTAHLVEARVAFAADDEARPVHVAARVLAAVHEHSVDLVAVTGHQLGAPAVVALHEALLALLQQRQQRARHQGHGAGVHEPAAQRVGQRVASELAGQLAELLQEALRLAARPTWRPPQRIPAQASRPAATTRPPRLPRRSAPGGCCSGPRRARHPSGRPRASRGMGRCSWRSGRS

SEQ ID NO: 871082 - protein, 307 aa, Homo sapiens; identical to SEQ ID NO: 871081

SEQ ID NO: 871083 - protein, 312 aa, Homo sapiens
MVMVLSESLSTRGADSIACGTFSRELHTPKKMSQGPTLFSCGIMENDRWRDLDRKCPLQIDQPSTSIWECLPEKDSSLWHREAVTACAVTSLIKDLSISDHNGNPSAPPSKRQCRSLSFSDEMSSCRTSWRPLGSKVWTPVEKRRCYSGGSVQRYSNGFSTMQRSSSFSLPSRANVLSSPCDQAGLHHRFGGQPCQGVPGSAPCGQAGDTWSPDLHPVGGGRLDLQRSLSCSHEQFSFVEYCPPSANSTPASTPELARRSSGLSRSRSQPCVLNDKKVGVKRRRPEEVQEQRPSLDLAKMAQAAQCRLLLRE

SEQ ID NO: 871084 - protein, 422 aa, Homo sapiens
MVMVLSESLSTRGADSIACGTFSRELHTPKKMSQGPTLFSCGIMENDRWRDLDRKCPLQIDQPSTSIWECLPEKDSSLWHREAVTACAVTSLIKDLSISDHNGNPSAPPSKRQCRSLSFSDEMSSCRTSWRPLGSKVWTPVEKRRCYSGGSVQRYSNGFSTMQRSSSFSLPSRANVLSSPCDQAGLHHRFGGQPCQGVPGSAPCGQAGDTWSPDLHPVGGGRLDLQRSLSCSHEQFSFVEYCPPSANSTPASTPELARRSSGLSRSRSQPCVLNDKKVGVKRRRPEEVQEQRPSLDLAKMAQNCQTFSSLSCLSAGTEDCGPQSPFARHVSNTRAWTALLSASGPGGRTPAGTPVPEPLPPSFDDHLACQEDLSCEESDSCALDEDCGRRAEPAAAWRDRGAPGNSLCSLDGELDIEQIEKN

SEQ ID NO: 871085 - protein, 422 aa, Homo sapiens; identical to SEQ ID NO: 871084

SEQ ID NO: 871086 - protein, 300 aa, Homo sapiens
MSSCRTSWRPLGSKVWTPVEKRRCYSGGSVQRYSNGFSTMQRSSSFSLPSRANVLSSPCDQAGLHHRFGGQPCQGVPGSAPCGQAGDTWSPDLHPVGGGRLDLQRSLSCSHEQFSFVEYCPPSANSTPASTPELARRSSGLSRSRSQPCVLNDKKVGVKRRRPEEVQEQRPSLDLAKMAQNCQTFSSLSCLSAGTEDCGPQSPFARHVSNTRAWTALLSASGPGGRTPAGTPVPEPLPPSFDDHLACQEDLSCEESDSCALDEDCGRRAEPAAAWRDRGAPGNSLCSLDGELDIEQIEKN

SEQ ID NO: 871087 - protein, 422 aa, Homo sapiens; identical to SEQ ID NO: 871084

SEQ ID NO: 871088 - protein, 422 aa, Homo sapiens; identical to SEQ ID NO: 871084

SEQ ID NO: 871089 - protein, 306 aa, Homo sapiens
PSLWRPQRPSRTWSEMSSGADGGGGAAVAARSDKGSPGEDGFVPSALGTREHWDAVYERELQTFREYGDTGEIWFGEESMNRLIRWMQKHKIPLDASVLDIGTGNGVFLVELAKFGFSNITGIDYSPSAIQLSGSIIEKEGLSNIKLKVEDFLNLSTQLSGFHICIDKGTFDAISLNPDNAIEKRKQYVKSLSRVLKVKGFFLITSCNWTKEELLNEFSEGWSTVAGFWLTAALTSWAQAIFSTSASRVGGTTGTHHHAWIIFVFLAETRFCHVVQAGLELLGSSDSPTWPPKVLGLYHARPSLAF

SEQ ID NO: 871090 - protein, 422 aa, Homo sapiens; identical to SEQ ID NO: 871084

SEQ ID NO: 871091 - protein, 251 aa, Homo sapiens
PSLWRPQRPSRTWSEMSSGADGGGGAAVAARSDKGSPGEDGFVPSALGTREHWDAVYERELQTFREYGDTGEIWFGEESMNRLIRWMQKHKIPLDASVLDIGTGNGVFLVELAKFGFSNITGIDYSPSAIQLSGSIIEKEGLSNIKLKVEDFLNLSTQLSGFHICIDKGTFDAISLNPDNAIEKRKQYVKSLSRVLKVKGFFLITSCNWTKEELLNEFSEGFELLEELPTPKFSFGGRSGNSVAALVFQKM

SEQ ID NO: 871092 - protein, 306 aa, Homo sapiens; identical to SEQ ID NO: 871089

SEQ ID NO: 871093 - protein, 270 aa, Homo sapiens
PSLWRPQRPSRTWSEMSSGADGGGGAAVAARSDKGSPGEDGFVPSALGTREHWDAVYERELQTFREYGDTGEIWFGEESMNRLIRWMQKHKIPLDASVLDIGTGNGVFLVELAKFGFSNITGIDYSPSAIQLSGSIIEKEGLSNIKLKVEDFLNLSTQLSGFHICIDKGTFDAISLNPDNAIEKRKQYVKSLSRVLKVKGFFLITSCNWTKEELLNEFSEGWSTVAGFWLTAALTSWAQAIFSTSASRDLNFSKSYQHPSSALEADLETV

SEQ ID NO: 871094 - protein, 148 aa, Homo sapiens
PSLWRPQRPSRTWSEMSSGADGGGGAAVAARSDKGSPGEDGFVPSALGTREHWDAVYERELQTFREYGDTGEIWFGEESMNRLIRWMQKHKIPLDASVLDIGTGNGVFLVELAKFGFSNITGIDYSPSAIQLSGSIIEKEGLSNIKLK

SEQ ID NO: 871095 - protein, 422 aa, Homo sapiens; identical to SEQ ID NO: 871084

SEQ ID NO: 871096 - protein, 422 aa, Homo sapiens; identical to SEQ ID NO: 871084

SEQ ID NO: 871097 - protein, 116 aa, Homo sapiens
RPPAGEHQNLEPGPSSADQTSQSPAPVEGTGPLPSRDSVSPGEAENSCFPSSLHGSVTHQAQDFSSAPSSLRLPLWLWRVGRAGVVSPCVGQLQPGLPPSQIPSQGKYRGASVMFA

SEQ ID NO: 871098 - protein, 422 aa, Homo sapiens; identical to SEQ ID NO: 871084

SEQ ID NO: 871099 - protein, 422 aa, Homo sapiens; identical to SEQ ID NO: 871084

SEQ ID NO: 871100 - protein, 111 aa, Homo sapiens
PSLWRPQRPSRTWSEMSSGADGGGGAAVAARSDKGSPGEDGFVPSALGTREHWDAVYERELQTFREYGDTGEIWFGEESMNRLIRWMQKHKIPLDASVLDIGTGNGKIWFL

SEQ ID NO: 871101 - protein, 306 aa, Homo sapiens; identical to SEQ ID NO: 871089

SEQ ID NO: 871102 - protein, 161 aa, Homo sapiens
PSLWRPQRPSRTWSEMSSGADGGGGAAVAARSDKGSPGEDGFVPSALGTREHWDAVYERELQTFREYGDTGEIWFGEESMNRLIRWMQKHKIPLDASVLDIGTGNGVFLVELAKFGFSNITGIDYSPSAIQLSGSIIEKEGLSNIKLKGVESKRLFSNNVM

SEQ ID NO: 871103 - protein, 305 aa, Homo sapiens
MVMVLSESLSTRGADSIACGTFSRELHTPKKMSQGPTLFSCGIMENDRWRDLDRKCPLQIDQPSTSIWECLPEKDSSLWHREAVTACAVTSLIKDLSISDHNGNPSAPPSKRQCRSLSFSDEMSSCRTSWRPLGSKVWTPVEKRRCYSGGSVQRYSNGFSTMQRSSSFSLPSRANVLSSPCDQAGLHHRFGGQPCQGVPGSAPCGQAGDTWSPDLHPVGGGRLDLQRSLSCSHEQFSFVEYCPPSANSTPASTPELARRSSGLSRSRSQPCVLNDKKVGVKRRRPEEVQEQRPSLDLAKMAQIAP

SEQ ID NO: 871104 - protein, 71 aa, Homo sapiens
AYPGVAEASCEAGESLEPEEAEVAVSQERDRKFREEELRHQEQGRKFLEEEQRLRRQERERKFLKEEQQLR

SEQ ID NO: 871105 - protein, 200 aa, Homo sapiens
EEEELQRQKRKQRYRDEDQRSDLKWQWEPEKENAVRDNKVYCKGRENEQFRQLEDSQLRDRQSQQDLQHLLGEQQERDREQERRRWQQRDRHFPEEEQLEREEQKEAKRRDRKSQEEKQLLREEREEKRRRQETDRKFREEEQLLQEREEQPLRRQERDRKFREEELRHQEQGRKFLEEEQRLRRQERERKFLKEEQQLR

SEQ ID NO: 871106 - protein, 114 aa, Homo sapiens
MHSEHVTLAGNKTVTRLSRVSALPVKQAQPLHIPSYSLFIHDKKTVLTNNHSTATGKGEKKRNLCGLNRHQDCSLTSPLATQTHTFHTKPPCATVRRQWEAGLLVSANKNPSIL

SEQ ID NO: 871107 - protein, 237 aa, Homo sapiens
MSPLWWGFLLSCLGCKILPGAQGQFPRVCMTVDSLVNKECCPRLGAESANVCGSQQGRGQCTEVRADTRPWSGPYILRNQDDRELWPRKFFHRTCKCTGNFAGYNCGDCKFGWTGPNCERKKPPVIRQNIHSLSPQEREQFLGALDLAKKRVHPDYVITTQHWLGLLGPNGTQPQFANCSVYDFFVWLHYYSVRDTLLGGFFPWLKVYYYRFVIGLRVWQWEVISCKLIKRATTRQP

SEQ ID NO: 871108 - protein, 519 aa, Homo sapiens
MSPLWWGFLLSCLGCKILPGAQGQFPRVCMTVDSLVNKECCPRLGAESANVCGSQQGRGQCTEVRADTRPWSGPYILRNQDDRELWPRKFFHRTCKCTGNFAGYNCGDCKFGWTGPNCERKKPPVIRQNIHSLSPQEREQFLGALDLAKKRVHPDYVITTQHWLGLLGPNGTQPQFANCSVYDFFVWLHYYSVRDTLLGPGRPYRAIDFSHQGPAFVTWHRYHLLCLERDLQRLIGNESFALPYWNFATGRNECDVCTDQLFGAARPDDPTLISRNSRFSSWETVCDSLDDYNHLVTLCNGTYEGLLRRNQMGRNSMKLPTLKDIRDCLSLQKFDNPPFFQNSTFSFRNALEGFDKADGTLDSQVMSLHNLVHSFLNGTNALPHSAANDPIFVVLHSFTDAIFDEWMKRFNPPADAWPQELAPIGHNRMYNMVPFFPPVTNEELFLTSDQLGYSYAIDLPVSVEETPGWPTTLLVVMGTLVALVGLFVLLAFLQYRRLRKGYTPLMETHLSSKRYTEEA

SEQ ID NO: 871109 - protein, 237 aa, Homo sapiens; identical to SEQ ID NO: 871107

SEQ ID NO: 871110 - protein, 477 aa, Homo sapiens
MSPLWWGFLLSCLGCKILPGAQGQFPRVCMTVDSLVNKECCPRLGAESANVCGSQQGRGQCTEVRADTRPWSGPYILRNQDDRELWPRKFFHRTCKCTGNFAGYNCGDCKFGWTGPNCERKKPPVIRQNIHSLSPQEREQFLGALDLAKKRVHPDYVITTQHWLGLLGPNGTQPQFANCSVYDFFVWLHYYSVRDTLLGPGRPYRAIDFSHQGPAFVTWHRYHLLCLERDLQRLIGNESFALPYWNFATGRNECDVCTDQLFGAARPDDPTLISRNSRFSSWETVCDSLDDYNHLVTLCNGTYEGLLRRNQMGRNSMKLPTLKDIRDCLSLQKFDNPPFFQNSTFSFRNALEGFDKADGTLDSQVMSLHNLVHSFLNGTNALPHSAANDPIFVVLHSFTDAIFDEWMKRFNPPADAWPQELAPIGHNRMYNMVPFFPPVTNEELFLTSDQLGYSYAIDLPDFQANFICSYLVSVHQE

SEQ ID NO: 871111 - protein, 423 aa, Homo sapiens
MSPLWWGFLLSCLGCKILPGAQGQFPRVCMTVDSLVNKECCPRLGAESANVCGSQQGRGQCTEVRADTRPWSGPYILRNQDDRELWPRKFFHRTCKCTGNFAGYNCGDCKFGWTGPNCERKKPPVIRQNIHSLSPQEREQFLGALDLAKKRVHPDYVITTQHWLGLLGPNGTQPQFANCSVYDFFVWLHYYSVRDTLLGPGRPYRAIDFSHQGPAFVTWHRYHLLCLERDLQRLIGNESFALPYWNFATGRNECDVCTDQLFGAARPDDPTLISRNSRFSSWETVCDSLDDYNHLVTLCNGTYEGLLRRNQMGRNSMKLPTLKDIRDCLSLQKFDNPPFFQNSTFSFRNALEGFDKADGTLDSQVMSLHNLVHSFLNGTNALPHSAANDPIFVKRESDQGTPFPACAGNHEPGRLYSDFLLLA

SEQ ID NO: 871112 - protein, 519 aa, Homo sapiens; identical to SEQ ID NO: 871108

SEQ ID NO: 871113 - protein, 482 aa, Homo sapiens
YCKPINKYRITLSKEGCLKAGEAVNLNMRQFDLSPITLRSLWLILYQFLYYVASDEKLFPHNALGLFLSIDVRLINVAEYSQLLMNADQLSLIIGKQTICTKHDNSELSGYILLCNHQIMRNKNETIFTTMFRLIMMDPTSEKSMALEISRQISSAHIWFLCIRSETEVQGVACLSRPLSTGMNECKEWVLRDLQRLIGNESFALPYWNFATGRNECDVCTDQLFGAARPDDPTLISRNSRFSSWETVCDSLDDYNHLVTLCNGTYEGLLRRNQMGRNSMKLPTLKDIRDCLSLQKFDNPPFFQNSTFSFRNALEGFDKADGTLDSQVMSLHNLVHSFLNGTNALPHSAANDPIFVVLHSFTDAIFDEWMKRFNPPADAWPQELAPIGHNRMYNMVPFFPPVTNEELFLTSDQLGYSYAIDLPVSVEETPGWPTTLLVVMGTLVALVGLFVLLAFLQYRRLRKGYTPLMETHLSSKRYTEEA

SEQ ID NO: 871114 - protein, 456 aa, Homo sapiens
MSPLWWGFLLSCLGCKILPGAQGQFPRVCMTVDSLVNKECCPRLGAESANVCGSQQGRGQCTEVRADTRPWSGPYILRNQDDRELWPRKFFHRTCKCTGNFAGYNCGDCKFGWTGPNCERKKPPVIRQNIHSLSPQEREQFLGALDLAKKRVHPDYVITTQHWLGLLGPNGTQPQFANCSVYDFFVWLHYYSVRDTLLGPGRPYRAIDFSHQGPAFVTWHRYHLLCLERDLQRLIGNESFALPYWNFATGRNECDVCTDQLFGAARPDDPTLISRNSRFSSWETVCDSLDDYNHLVTLCNGTYEGLLRRNQMGRNSMKLPTLKDIRDCLSLQKFDNPPFFQNSTFSFRNALEGFDKADGTLDSQVMSLHNLVHSFLNGTNALPHSAANDPIFVVLHSFTDAIFDEWMKRFNPPADALVALVGLFVLLAFLQYRRLRKGYTPLMETHLSSKRYTEEA

SEQ ID NO: 871115 - protein, 88 aa, Homo sapiens
KQWYQRRVAITAGGYILLCNHQIMRNKNETIFTTMFRLIMMDPTSEKLMALEISRQISSAHIWFLCIRSETEVLGRGLSVEAPLYWNE

SEQ ID NO: 871116 - protein, 1829 aa, Homo sapiens
TVVPIVLPTGVPPPSITWYKDAAVVEVEKLTRFRQRNDGGLQISGLVPDDTGMFQCFARNAAGEVQTSTYLAVTSIAPNITRGPLDSTVIDGMSVVLACETSGAPRPAITWQKGERILASGSVQLPRFTPLESGSLLISPTHISDAGTYTCLATNSRGVDEASADLVVWARTRITKPPQDQSVIKGTQASMVCGVTHDPRVTIRYIWEKDGATLGTESHPRIRLDRNGSLHISQTWSGDIGTYTCRVISAGGNDSRSAHLRVRQLPHAPEHPVATLSTVERRAINLTWTKPFDGNSPLIRYILEMSENNAPWTVLLASVDPKATSVTVKGLVPARSYQFRLCAVNDVGKGQFSKDTERVSLPEEPPTAPPQNVIASGRTNQSIMIQWQPPPESHQNGILKGYIIRYCLAGLPVGYQFKNITDADVNNLLLEDLIIWTNYEIEVAAYNSAGLGVYSSKVTEWTLQGVPTVPPGNVHAEATNSTTIRFTWNAPSPQFINGINQGYKLIAWEPEQEEEVTMVTARPNFQDSIHVGFVSGLKKFTEYFTSVLCFTTPGDGPRSTPQLVRTHEDVPGPVGHLSFSEILDTSLKVSWQEPGEKNGILTGYRISWEEYNRTNTRVTHYLPNVTLEYRVTGLTALTTYTIEVAAMTSKGQGQVSASTISSGVPPELPGPPTNLGISNIGPRSVTLQFRPGYDGKTSISRWLVEAQVGVVGEGEEWLLIHQLSNEPDARSMEVPDLNPFTCYSFRMRQVNIVGTSPPSQPSRKIQTLQAPPDMAPANVSLRTASETSLWLRWMPLPEMEYNGNPESVGYKIKYSRSDGHGKTLSHVVQDRVERDYTIEDLEEWTEYRVQVQAFNAIGSGPWSQTVVGRTRESVPSSGPTNVSALATTSSSMLVRWSEVPEADRNGLVLGYKVMYKEKDSDTQPRFWLVEGNSSRSAQLTGLGKYVLYEVQVLAFTRIGDGSPSHPPILERTLDDVPGPPMGILFPEVRTTSVRLIWQPPAAPNGIILAYQITHRLNTTTANTATVEVLAPSARQYTATGLKPESVYLFRITAQTRKGWGEAAEALVVTTEKRDRPQPPSRPMVQQEDVRARSVLLSWEPGSDGLSPVRYYTIQTRELPSGRWALHSASVSHNASSFIVDRLKPFTSYKFRVKATNDIGDSEFSEESESLTTLQAAPDEAPTILSVTPHTTTSVLIRWQPPAEDKINGILLGFRIRYRELLYEGLRGFTLRGINNPGATWAELTYLNKHRRYEIRMSVYNAVGEGPSSPPQEVFVGEAVPTAAPRNVVVHGATATQLDVTWEPPPLDSQNGDIQGYKIYFWEAQRGNLTERVKTLFPAENSVKLKNLTGYTAYMVSVAAFNAAGDGPRSTPTQGQTQQAAPSAPSSVKFSELTTTSVNVSWEAPQFPNGILEGYRLVYEPCSPVDGVSKIVTVDVKGNSPLWLKVKDLAEGVTYRFRIRAKTFTYGPEIEANVTTGPGEGAPGPPGVPIIVRYSSAIAIHWSSGDPGKGPITRYVIEARPSDEGLWDILIKDIPKEVSSYTFSMDILKPGVSYDFRVIAVNDYGFGTPSSPSQSVPAQKANPFYEEWWFLVVIALVGLIFILLLVFVLIIRGQSKKYAKKTDSGNSAKSGALGHSEMMSLDESSFPALELNNRRLSVKNSFCRKNGLYTRSPPRPSPGSLHYSDEDVTKYNDLIPAESSSLTEKPSEISDSQGSDSEYEVDSNHQKAHSFVNHYISDPTYYNSWRRQQRGISRAQAYSYTESDSGEPDHTTVTNSTSTQQGSLFRPKASRTPTPQNPPNPPSQQSTLYRPPSSLAPGSRAPIAGFSSFV

SEQ ID NO: 871117 - protein, 1992 aa, Homo sapiens
TVVPIVLPTGVPPPSITWYKDAAVVEVEKLTRFRQRNDGGLQISGLVPDDTGMFQCFARNAAGEVQTSTYLAVTSIAPNITRGPLDSTVIDGMSVVLACETSGAPRPAITWQKGERILASGSVQLPRFTPLESGSLLISPTHISDAGTYTCLATNSRGVDEASADLVVWARTRITKPPQDQSVIKGTQASMVCGVTHDPRVTIRYIWEKDGATLGTESHPRIRLDRNGSLHISQTWSGDIGTYTCRVISAGGNDSRSAHLRVRQLPHAPEHPVATLSTVERRAINLTWTKPFDGNSPLIRYILEMSENNAPWTVLLASVDPKATSVTVKGLVPARSYQFRLCAVNDVGKGQFSKDTERVSLPEEPPTAPPQNVIASGRTNQSIMIQWQPPPESHQNGILKGYIIRYCLAGLPVGYQFKNITDADVNNLLLEDLIIWTNYEIEVAAYNSAGLGVYSSKVTEWTLQGVPTVPPGNVHAEATNSTTIRFTWNAPSPQFINGINQGYKLIAWEPEQEEEVTMVTARPNFQDSIHVGFVSGLKKFTEYFTSVLCFTTPGDGPRSTPQLVRTHEDVPGPVGHLSFSEILDTSLKVSWQEPGEKNGILTGYRISWEEYNRTNTRVTHYLPNVTLEYRVTGLTALTTYTIEVAAMTSKGQGQVSASTISSGVPPELPGPPTNLGISNIGPRSVTLQFRPGYDGKTSISRWLVEAQVGVVGEGEEWLLIHQLSNEPDARSMEVPDLNPFTCYSFRMRQVNIVGTSPPSQPSRKIQTLQAPPDMAPANVSLRTASETSLWLRWMPLPEMEYNGNPESVGYKIKYSRSDGHGKTLSHVVQDRVERDYTIEDLEEWTEYRVQVQAFNAIGSGPWSQTVVGRTRESVPSSGPTNVSALATTSSSMLVRWSEVPEADRNGLVLGYKVMYKEKDSDTQPRFWLVEGNSSRSAQLTGLGKYVLYEVQVLAFTRIGDGSPSHPPILERTLDDVPGPPMGILFPEVRTTSVRLIWQPPAAPNGIILAYQITHRLNTTTANTATVEVLAPSARQYTATGLKPESVYLFRITAQTRKGWGEAAEALVVTTEKRDRPQPPSRPMVQQEDVRARSVLLSWEPGSDGLSPVRYYTIQTRELPSGRWALHSASVSHNASSFIVDRLKPFTSYKFRVKATNDIGDSEFSEESESLTTLQAAPDEAPTILSVTPHTTTSVLIRWQPPAEDKINGILLGFRIRYRELLYEGLRGFTLRGINNPGATWAELTSMYSMRNLSRPSLTQYELDNLNKHRRYEIRMSVYNAVGEGPSSPPQEVFVGEAVPTAAPRNVVVHGATATQLDVTWEPPPLDSQNGDIQGYKIYFWEAQRGNLTERVKTLFPAENSVKLKNLTGYTAYMVSVAAFNAAGDGPRSTPTQGQTQQAAPSAPSSVKFSELTTTSVNVSWEAPQFPNGILEGYRLVYEPCSPVDGVSKIVTVDVKGNSPLWLKVKDLAEGVTYRFRIRAKTFTYGPEIEANVTTGPGEGAPGPPGVPIIVRYSSAIAIHWSSGDPGKGPITRYVIEARPSDEGLWDILIKDIPKEVSSYTFSMDILKPGVSYDFRVIAVNDYGFGTPSSPSQSVPAQKANPFYEEWWFLVVIALVGLIFILLLVFVLIIRGQSKKYAKKTDSGNSAKSGALGHSEMMSLDESSFPALELNNRRLSVKNSFCRKNGLYTRSPPRPSPGSLHYSDEDVTKYNDLIPAESSSLTEKPSEISDSQGSDSEYEVDSNHQKAHSFVNHYISDPTYYNSWRRQQRGISRAQAYSYTESDSGEPDHTTVTNSTSTQQGSLFRPKASRTPTPQNPPNPPSQQSTLYRPPSKAGVQKEGENRERMCVAQQLFSFEMVGFTAPLGITRSWGSGCVTAMDTEWGGHLERERERRLRTGGRQAGVAEGRKSFWMSSQLPPSSPSRTPGPTAAALCKKNGHPGGHAYLLSLLLLPSMHHHCGWQASDSLIQTPCPVLATSTAHLPCSTSPPSIWFI

SEQ ID NO: 871118 - protein, 1597 aa, Homo sapiens
TVVPIVLPTGVPPPSITWYKDAAVVEVEKLTRFRQRNDGGLQISGLVPDDTGMFQCFARNAAGEVQTSTYLAVTSIAPNITRGPLDSTVIDGMSVVLACETSGAPRPAITWQKGERILASGSVQLPRFTPLESGSLLISPTHISDAGTYTCLATNSRGVDEASADLVVWARTRITKPPQDQSVIKGTQASMVCGVTHDPRVTIRYIWEKDGATLGTESHPRIRLDRNGSLHISQTWSGDIGTYTCRVISAGGNDSRSAHLRVRQLPHAPEHPVATLSTVERRAINLTWTKPFDGNSPLIRYILEMSENNAPWTVLLASVDPKATSVTVKGLVPARSYQFRLCAVNDVGKGQFSKDTERVSLPEEPPTAPPQNVIASGRTNQSIMIQWQPPPESHQNGILKGYIIRYCLAGLPVGYQFKNITDADVNNLLLEDLIIWTNYEIEVAAYNSAGLGVYSSKVTEWTLQGVPTVPPGNVHAEATNSTTIRFTWNAPSPQFINGINQGYKLIAWEPEQEEEVTMVTARPNFQDSIHVGFVSGLKKFTEYFTSVLCFTTPGDGPRSTPQLVRTHEDVPGPVGHLSFSEILDTSLKVSWQEPGEKNGILTGYRISWEEYNRTNTRVTHYLPNVTLEYRVTGLTALTTYTIEVAAMTSKGQGQVSASTISSGVPPELPGPPTNLGISNIGPRSVTLQFRPGYDGKTSISRWLVEAQVGVVGEGEEWLLIHQLSNEPDARSMEVPDLNPFTCYSFRMRQVNIVGTSPPSQPSRKIQTLQAPPDMAPANVSLRTASETSLWLRWMPLPEMEYNGNPESVGYKIKYSRSDGHGKTLSHVVQDRVERDYTIEDLEEWTEYRVQVQAFNAIGSGPWSQTVVGRTRESVPSSGPTNVSALATTSSSMLVRWSEVPEADRNGLVLGYKVMYKEKDSDTQPRFWLVEGNSSRSAQLTGLGKYVLYEVQVLAFTRIGDGSPSHPPILERTLDDVPGPPMGILFPEVRTTSVRLIWQPPAAPNGIILAYQITHRLNTTTANTATVEVLAPSARQYTATGLKPESVYLFRITAQTRKGWGEAAEALVVTTEKRDRPQPPSRPMVQQEDVRARSVLLSWEPGSDGLSPVRYYTIQTRELPSGRWALHSASVSHNASSFIVDRLKPFTSYKFRVKATNDIGDSEFSEESESLTTLQAAPDEAPTILSVTPHTTTSVLIRWQPPAEDKINGILLGFRIRYRELLYEGLRGFTLRGINNPGATWAELTSMYSMRNLSRPSLTQYELDNLNKHRRYEIRMSVYNAVGEGPSSPPQEVFVGEAVPTAAPRNVVVHGATATQLDVTWEPPPLDSQNGDIQGYKIYFWEAQRGNLTERVKTLFPAENSVKLKNLTGYTAYMVSVAAFNAAGDGPRSTPTQGQTQQAAPSAPSSVKFSELTTTSVNVSWEAPQFPNGILEGYRLVYEPCSPVDGVSKIVTVDVKGNSPLWLKVKDLAEGVTYRFRIRAKTFTYGPEIEANVTTGPGEGAPGPPGVPIIVRYSSAIAIHWSSGDPGKGPITRYVIEARPSGAPRPAGLRPHSSLSPFFLGPSTWGTCLCPPPEKALVLLQVKSPGPVEEWETGLGGS

SEQ ID NO: 871119 - protein, 1481 aa, Homo sapiens
SRRLGGKRVHIARRDRGNSLQLSTGDFTAVDPQSIMIQWQPPPESHQNGILKGYIIRYCLAGLPVGYQFKNITDADVNNLLLEDLIIWTNYEIEVAAYNSAGLGVYSSKVTEWTLQGVPTVPPGNVHAEATNSTTIRFTWNAPSPQFINGINQGYKLIAWEPEQEEEVTMVTARPNFQDSIHVGFVSGLKKFTEYFTSVLCFTTPGDGPRSTPQLVRTHEDVPGPVGHLSFSEILDTSLKVSWQEPGEKNGILTGYRISWEEYNRTNTRVTHYLPNVTLEYRVTGLTALTTYTIEVAAMTSKGQGQVSASTISSGVPPELPGPPTNLGISNIGPRSVTLQFRPGYDGKTSISRWLVEAQVGVVGEGEEWLLIHQLSNEPDARSMEVPDLNPFTCYSFRMRQVNIVGTSPPSQPSRKIQTLQAPPDMAPANVSLRTASETSLWLRWMPLPEMEYNGNPESVGYKIKYSRSDGHGKTLSHVVQDRVERDYTIEDLEEWTEYRVQVQAFNAIGSGPWSQTVVGRTRESVPSSGPTNVSALATTSSSMLVRWSEVPEADRNGLVLGYKVMYKEKDSDTQPRFWLVEGNSSRSAQLTGLGKYVLYEVQVLAFTRIGDGSPSHPPILERTLDDVPGPPMGILFPEVRTTSVRLIWQPPAAPNGIILAYQITHRLNTTTANTATVEVLAPSARQYTATGLKPESVYLFRITAQTRKGWGEAAEALVVTTEKRDRPQPPSRPMVQQEDVRARSVLLSWEPGSDGLSPVRYYTIQTRELPSGRWALHSASVSHNASSFIVDRLKPFTSYKFRVKATNDIGDSEFSEESESLTTLQAAPDEAPTILSVTPHTTTSVLIRWQPPAEDKINGILLGFRIRYRELLYEGLRGFTLRGINNPGATWAELTYLNKHRRYEIRMSVYNAVGEGPSSPPQEVFVGEAVPTAAPRNVVVHGATATQLDVTWEPPPLDSQNGDIQGYKIYFWEAQRGNLTERVKTLFPAENSVKLKNLTGYTAYMVSVAAFNAAGDGPRSTPTQGQTQQAAPSAPSSVKFSELTTTSVNVSWEAPQFPNGILEGYRLVYEPCSPVDGVSKIVTVDVKGNSPLWLKVKDLAEGVTYRFRIRAKTFTYGPEIEANVTTGPGEGAPGPPGVPIIVRYSSAIAIHWSSGDPGKGPITRYVIEARPSDEGLWDILIKDIPKEVSSYTFSMDILKPGVSYDFRVIAVNDYGFGTPSSPSQSVPAQKANPFYEEWWFLVVIALVGLIFILLLVFVLIIRGQSKKYAKKTDSGNSAKSGALGHSEMMSLDESSFPALELNNRRLSVKNSFCRKNGLYTRSPPRPSPGSLHYSDEDVTKYNDLIPAESSSLTEKPSEISDSQGSDSEYEVDSNHQKAHSFVNHYISDPTYYNSWRRQQRGISRAQAYSYTESDSGEPDHTTVTNSTSTQQGSLFRPKASRTPTPQNPPNPPSQQSTLYRPPSSLAPGSRAPIAGFSSFV

SEQ ID NO: 871120 - protein, 30 aa, Homo sapiens
CRNSQHQRYLLQGLLGGFLEERNANEYDCK

SEQ ID NO: 871121 - protein, 1060 aa, Homo sapiens
AAQQPVGRRGGASGAGGGRRGTPRPRAGAGPGFQVSSGGCRLSKMRRFLRPGHDPVRERLKRDLFQFNKTVEHGFPHQPSALGYSPSLHILAIGTRSGAIKLYGAPGVEFMGLHQENNAVTQIHLLPGQCQLVTLLDDNSLHLWSLKVKGGASELQEDESFTLRGPPGAAPSATQITVVLPHSSCELLYLGTESGNVFVVQLPAFRALEDRTISSDAVLQRLPEEARHRRVFEMVEALQEHPRDPNQILIGYSRGLVVIWDLQGSRVLYHFLSSQQLENIWWQRDGRLLVSCHSDGSYCQWPVSSEAQQPEPLRSLVPYGPFPCKAITRILWLTTRQGLPFTIFQGGMPRASYGDRHCISVIHDGQQTAFDFTSRVIGFTVLTEADPAASLLNDPYALVVLAEEELVVIDLQTAGWPPVQLPYLASLHCSAITCSHHVSNIPLKLWERIIAAGSRQNAHFSTMEWPIDGGTSLTPAPPQRDLLLTGHEDGTVRFWDASGVCLRLLYKLSTVRVFLTDTDPNENFSAQGEDEWPPLRKVGSFDPYSDDPRLGIQKIFLCKYSGYLAVAGTAGQVLVLELNDEAAEQAVEQVEADLLQDQEGYRWKGHERLAARSGPVRFEPGFQPFVLVQCQPPAVVTSLALHSEWRLVAFGTSHGFGLFDHQQRRQVFVKCTLHPSDQLALEGPLSRVKSLKKSLRQSFRRMRRSRVSSRKRHPAGPPGEAQEGSAKAERPGLQNMELAPVQRKIEARSAEDSFTGFVRTLYFADTYLKDSSRHCPSLWAGTNGGTIYAFSLRVPPAERRMDEPVRAEQAKEIQLMHRAPVVGILVLDGHSVPLPEPLEVAHDLSKSPDMQGSHQLLVVSEEQFKVFTLPKVSAKLKLKLTALEGSRVRRVSVAHFGSRRAEDYGEHHLAVLTNLGDIQVVSLPLLKPQVRYSCIRREDVSGIASCVFTKYGQGFYLISPSEFERFSLSTKWLVEPRCLVDSAETKNHRPGNGAGPKKAPSRARNSGTQSDGEEKQPGLVMERALLSDERAATGVHIEPPWGAASAMAEQSEWLSVQAAR

SEQ ID NO: 871122 - protein, 102 aa, Homo sapiens
RGSRIASVFHQIWQGFYLISPSEFERFSLSTKWLVEPRCLVDSAETKNHRPGNGAGPKKAPSRARNSGTQSDGEEKQPGLVMERALLSDEKILKEIQSTGTE

SEQ ID NO: 871123 - protein, 1021 aa, Homo sapiens
MRRFLRPGHDPVRERLKRDLFQFNKTVEHGFPHQPSALGYSPSLHILAIGTRSGAIKLYGAPGVEFMGLHQENNAVTQIHLLPGQCQLVTLLDDNSLHLWSLKVKGGASELQEDESFTLRGPPGAAPSATQITVVLPHSSCELLYLGTESGNVFVVQLPAFRALEDRTISSDAVLQRLPEEARHRRVFEMVEALQEHPRDPNQILIGYSRGLVVIWDLQGSRVLYHFLSSQQLENIWWQRDGRLLVSCHSDGSYCQWPVSSEAQQPEPLRSLVPYGPFPCKAITRILWLTTRQGLPFTIFQGGMPRASYGDRHCISVIHDGQQTAFDFTSRVIGFTVLTEADPAASLLNDPYALVVLAEEELVVIDLQTAGWPPVQLPYLASLHCSAITCSHHVSNIPLKLWERIIAAGSRQNAHFSTMEWPIDGGTSLTPAPPQRDLLLTGHEDGTVRFWDASGVCLRLLYKLSTVRVFLTDTDPNENFSAQGEDEWPPLRKVGSFDPYSDDPRLGIQKIFLCKYSGYLAVAGTAGQVLVLELNDEAAEQAVEQVEADLLQDQEGYRWKGHERLAARSGPVRFEPGFQPFVLVQCQPPAVVTSLALHSEWRLVAFGTSHGFGLFDHQQRRQVFVKCTLHPSDQLALEGPLSRVKSLKKSLRQSFRRMRRSRVSSRKRHPAGPPGEAQEGSAKAERPGLQNMELAPVQRKIEARSAEDSFTGFVRTLYFADTYLKDSSRHCPSLWAGTNGGTIYAFSLRVPPAERRMDEPVRAEQAKEIQLMHRAPVVGILVLDGHSVPLPEPLEVAHDLSKSPDMQGSHQLLVVSEEQFKVFTLPKVSAKLKLKLTALEGSRVRRVSVAHFGSRRAEDYGEHHLAVLTNLGDIQVVSLPLLKPQVRYSCIRREDVSGIASCVFTKYGQGFYLISPSEFERFSLSTKWLVEPRCLVDSAETKNHRPGNGAGPKKAPSRARNSGTQSDGEEKQPGLVMERALLSDERVLKEIQSTLEGDRGSGNWRSHRAAVGCSLSNGGAE

SEQ ID NO: 871124 - protein, 1044 aa, Homo sapiens
AAQQPVGRRGGASGAGGGRRGTPRPRAGAGPGFQVSSGGCRLSKMRRFLRPGHDPVRERLKRDLFQFNKTVEHGFPHQPSALGYSPSLHILAIGTRSGAIKLYGAPGVEFMGLHQENNAVTQIHLLPGQCQLVTLLDDNSLHLWSLKVKGGASELQEDESFTLRGPPGAAPSATQITVVLPHSSCELLYLGTESGNVFVVQLPAFRALEDRTISSDAVLQRLPEEARHRRVFEMVEALQEHPRDPNQILIGYSRGLVVIWDLQGSRVLYHFLSSQQLENIWWQRDGRLLVSCHSDGSYCQWPVSSEAQQPEPLRSLVPYGPFPCKAITRILWLTTRQGLPFTIFQGGMPRASYGDRHCISVIHDGQQTAFDFTSRVIGFTVLTEADPAASLLNDPYALVVLAEEELVVIDLQTAGWPPVQLPYLASLHCSAITCSHHVSNIPLKLWERIIAAGSRQNAHFSTMEWPIDGGTSLTPAPPQRDLLLTGHEDGTVRFWDASGVCLRLLYKLSTVRVFLTDTDPNENFSAQGEDEWPPLRKVGSFDPYSDDPRLGIQKIFLCKYSGYLAVAGTAGQVLVLELNDEAAEQAVEQVEADLLQDQEGYRWKGHERLAARSGPVRFEPGFQPFVLVQCQPPAVVTSLALHSEWRLVAFGTSHGFGLFDHQQRRQVFVKCTLHPSDQLALEGPLSRVKSLKKSLRQSFRRMRRSRVSSRKRHPAGPPGEAQEGSAKAERPGLQNMELAPVQRKIEARSAEDSFTGFVRTLYFADTYLKDSSRHCPSLWAGTNGGTIYAFSLRVPPAERRMDEPVRAEQAKEIQLMHRAPVVGILVLDGHSVPLPEPLEVAHDLSKSPDMQGSHQLLVVSEEQFKVFTLPKVSAKLKLKLTALEGSRVRRVSVAHFGSRRAEDYGEHHLAVLTNLGDIQVVSLPLLKPQVRYSCIRREDVSGIASCVFTKYGQGFYLISPSEFERFSLSTKWLVEPRCLVDSAETKNHRPGNGAGPKKAPSRARNSGTQSDGEEKQPGLVMERALLSDERVLKEIQSTLEGDRG

SEQ ID NO: 871125 - protein, 1040 aa, Homo sapiens
AAQQPVGRRGGASGAGGGRRGTPRPRAGAGPGFQVSSGGCRLSKMRRFLRPGHDPVRERLKRDLFQFNKTVEHGFPHQPSALGYSPSLHILAIGTRSGAIKLYGAPGVEFMGLHQENNAVTQIHLLPGQCQLVTLLDDNSLHLWSLKVKGGASELQEDESFTLRGPPGAAPSATQITVVLPHSSCELLYLGTESGNVFVVQLPAFRALEDRTISSDAVLQRLPEEARHRRVFEMVEALQEHPRDPNQILIGYSRGLVVIWDLQGSRVLYHFLSSQQLENIWWQRDGRLLVSCHSDGSYCQWPVSSEAQQPEPLRSLVPYGPFPCKAITRILWLTTRQGLPFTIFQGGMPRASYGDRHCISVIHDGQQTAFDFTSRVIGFTVLTEADPAASLLNDPYALVVLAEEELVVIDLQTAGWPPVQLPYLASLHCSAITCSHHVSNIPLKLWERIIAAGSRQNAHFSTMEWPIDGGTSLTPAPPQRDLLLTGHEDGTVRFWDASGVCLRLLYKLSTVRVFLTDTDPNENFSAQGEDEWPPLRKVGSFDPYSDDPRLGIQKIFLCKYSGYLAVAGTAGQVLVLELNDEAAEQAVEQVEADLLQDQEGYRWKGHERLAARSGPVRFEPGFQPFVLVQCQPPAVVTSLALHSEWRLVAFGTSHGFGLFDHQQRRQVFVKCTLHPSDQLALEGPLSRVKSLKKSLRQSFRRMRRSRVSSRKRHPAGPPGEAQEGSAKAERPGLQNMELAPVQRKIEARSAEDSFTGFVRTLYFADTYLKDSSRHCPSLWAGTNGGTIYAFSLRVPPAERRMDEPVRAEQAKEIQLMHRAPVVGILVLDGHSVPLPEPLEVAHDLSKSPDMQGSHQLLVVSEEQFKVFTLPKVSAKLKLKLTALEGSRVRRVSVAHFGSRRAEDYGEHHLAVLTNLGDIQVVSLPLLKPQVRYSCIRREDVSGIASCVFTKYGQGFYLISPSEFERFSLSTKWLVEPRCLVDSAETKNHRPGNGAGPKKAPSRARNSGTQSDGEALGPGLPHPDLSKERESQAEEGPGGAP

SEQ ID NO: 871126 - protein, 1065 aa, Homo sapiens
AAQQPVGRRGGASGAGGGRRGTPRPRAGAGPGFQVSSGGCRLSKMRRFLRPGHDPVRERLKRDLFQFNKTVEHGFPHQPSALGYSPSLHILAIGTRSGAIKLYGAPGVEFMGLHQENNAVTQIHLLPGQCQLVTLLDDNSLHLWSLKVKGGASELQEDESFTLRGPPGAAPSATQITVVLPHSSCELLYLGTESGNVFVVQLPAFRALEDRTISSDAVLQRLPEEARHRRVFEMVEALQEHPRDPNQILIGYSRGLVVIWDLQGSRVLYHFLSSQQLENIWWQRDGRLLVSCHSDGSYCQWPVSSEAQQPEPLRSLVPYGPFPCKAITRILWLTTRQGLPFTIFQGGMPRASYGDRHCISVIHDGQQTAFDFTSRVIGFTVLTEADPAASLLNDPYALVVLAEEELVVIDLQTAGWPPVQLPYLASLHCSAITCSHHVSNIPLKLWERIIAAGSRQNAHFSTMEWPIDGGTSLTPAPPQRDLLLTGHEDGTVRFWDASGVCLRLLYKLSTVRVFLTDTDPNENFSAQGEDEWPPLRKVGSFDPYSDDPRLGIQKIFLCKYSGYLAVAGTAGQVLVLELNDEAAEQAVEQVEADLLQDQEGYRWKGHERLAARSGPVRFEPGFQPFVLVQCQPPAVVTSLALHSEWRLVAFGTSHGFGLFDHQQRRQVFVKCTLHPSDQLALEGPLSRVKSLKKSLRQSFRRMRRSRVSSRKRHPAGPPGEAQEGSAKAERPGLQNMELAPVQRKIEARSAEDSFTGFVRTLYFADTYLKDSSRHCPSLWAGTNGGTIYAFSLRVPPAERRMDEPVRAEQAKEIQLMHRAPVVGILVLDGHSVPLPEPLEVAHDLSKSPDMQGSHQLLVVSEEQFKVFTLPKVSAKLKLKLTALEGSRVRRVSVAHFGSRRAEDYGEHHLAVLTNLGDIQVVSLPLLKPQVRYSCIRREDVSGIASCVFTKYGQGFYLISPSEFERFSLSTKWLVEPRCLVDSAETKNHRPGNGAGPKKAPSRARNSGTQSDGEEKQPGLVMERALLSDERVLKEIQSTLEGDRGSGNWRSHRAAVGCSLSNGGAE

SEQ ID NO: 871127 - protein, 1084 aa, Homo sapiens
AAQQPVGRRGGASGAGGGRRGTPRPRAGAGPGFQVSSGGCRLSKMRRFLRPGHDPVRERLKRDLFQFNKTVEHGFPHQPSALGYSPSLHILAIGTRSGAIKLYGAPGVEFMGLHQENNAVTQIHLLPGQCQLVTLLDDNSLHLWSLKVKGGASELQEDESFTLRGPPGAAPSATQITVVLPHSSCELLYLGTESGNVFVVQLPAFRALEDRTISSDAVLQRLPEEARHRRVFEMVEALQEHPRDPNQILIGYSRGLVVIWDLQGSRVLYHFLSSQQLENIWWQRDGRLLVSCHSDGSYCQWPVSSEAQQPEPLRSLVPYGPFPCKAITRILWLTTRQGLPFTIFQGGMPRASYGDRHCISVIHDGQQTAFDFTSRVIGFTVLTEADPAASLLNDPYALVVLAEEELVVIDLQTAGWPPVQLPYLASLHCSAITCSHHVSNIPLKLWERIIAAGSRQNAHFSTMEWPIDGGTSLTPAPPQRDLLLTGHEDGTVRFWDASGVCLRLLYKLSTVRVFLTDTDPNENFSAQGEDEWPPLRKVGSFDPYSDDPRLGIQKIFLCKYSGYLAVAGTAGQVLVLELNDEAAEQAVEQVEADLLQDQEGYRWKGHERLAARSGPVRFEPGFQPFVLVQCQPPAVVTSLALHSEWRLVAFGTSHGFGLFDHQQRRQVFVKCTLHPSDQLALEGPLSRVKSLKKSLRQSFRRMRRSRVSSRKRHPAGPPGEAQEGSAKAERPGLQNMELAPVQRKIEARSAEDSFTGFVRTLYFADTYLKDSSRHCPSLWAGTNGGTIYAFSLRVPPAERRMDEPVRAEQAKEIQLMHRAPVVGILVLDGHSVPLPEPLEVAHDLSKSPDMQGSHQLLVVSEEQFKVFTLPKVSAKLKLKLTALEGSRVRRVSVAHFGSRRAEDYGEHHLAVLTNLGDIQVVSLPLLKPQVRYSCIRREDVSGIASCVFTKYGQGFYLISPSEFERFSLSTKWLVEPRCLVDSAETKNHRPGNGAGPKKAPSRARNSGLTVMAREAAGLEMSAPGQDERVRRKSQALGGTRERTGGPSSPRGAPTRGQTRPTHTGEDQSEAPGRAPTEAGPQQER

SEQ ID NO: 871128 - protein, 958 aa, Homo sapiens
AAQQPVGRRGGASGAGGGRRGTPRPRAGAGPGFQVSSGGCRLSKMRRFLRPGHDPVRERLKRDLFQFNKTVEHGFPHQPSALGYSPSLHILAIGTRSGAIKLYGAPGVEFMGLHQENNAVTQIHLLPGQCQLVTLLDDNSLHLWSLKVKGGASELQEDESFTLRGPPGAAPSATQITVVLPHSSCELLYLGTESGNVFVVQLPAFRALEDRTISSDAVLQRLPEEARHRRVFEMVEALQEHPRDPNQILIGYSRGLVVIWDLQGSRVLYHFLSSQQLENIWWQRDGRLLVSCHSDGSYCQWPVSSEAQQPEPLRSLVPYGPFPCKAITRILWLTTRQGLPFTIFQGGMPRASYGDRHCISVIHDGQQTAFDFTSRVIGFTVLTEADPAASLLNDPYALVVLAEEELVVIDLQTAGWPPVQLPYLASLHCSAITCSHHVSNIPLKLWERIIAAGSRQNAHFSTMEWPIDGGTSLTPAPPQRDLLLTGHEDGTVRFWDASGVCLRLLYKLSTVRVFLTDTDPNENFSAQGEDEWPPLRKVGSFDPYSDDPRLGIQKIFLCKYSGYLAVAGTAGQVLVLELNDEAAEQAVEQVEADLLQDQEGYRWKGHERLAARSGPVRFEPGFQPFVLVQCQPPAVVTSLALHSEWRLVAFGTSHGFGLFDHQQRRQVFVKCTLHPSDQLALEGPLSRVKSLKKSLRQSFRRMRRSRVSSRKRHPAGPPGEAQEGSAKAERPGLQNMELAPVQRKIEARSAEDSFTGFVRTLYFADTYLKDSSRHCPSLWAGTNGGTIYAFSLRVPPAERRMDEPVRAEQAKEIQLMHRAPVVGILVLDGHSVPLPEPLEVAHDLSKSPDMQGSHQLLVVSEEQFKVFTLPKVSAKLKLKLTALEGSRVRRVSVAHFGSRRAEDYGEHHLAVLTNLGDIQVVSLPLLKPQVRYSCIRREDVSGIASCVFTKYGQEAFLP

SEQ ID NO: 871129 - protein, 400 aa, Homo sapiens
AAQQPVGRRGGASGAGGGRRGTPRPRAGAGPGFQVSSGGCRLSKMRRFLRPGHDPVRERLKRDLFQFNKTVEHGFPHQPSALGYSPSLHILAIGTRSGAIKLYGAPGVEFMGLHQENNAVTQIHLLPGQCQLVTLLDDNSLHLWSLKVKGGASELQEDESFTLRGPPGAAPSATQITVVLPHSSCELLYLGTESGNVFVVQLPAFRALEDRTISSDAVLQRLPEEARHRRVFEMVEALQEHPRDPNQILIGYSRGLVVIWDLQGSRVLYHFLSSQQLENIWWQRDGRLLVSCHSDGSYCQWPVSSEAQQPEPLRSLVPYGPFPCKAITRILWLTTRQGLPFTIFQGGMPRASYGDRHCISVIHDGQQTAFDFTSRVIGFTVLTEADPAASRRASGVGAQG

SEQ ID NO: 871130 - protein, 365 aa, Homo sapiens
AAQQPVGRRGGASGAGGGRRGTPRPRAGAGPGFQVSSGGCRLSKMRRFLRPGHDPVRERLKRDLFQFNKTVEHGFPHQPSALGYSPSLHILAIGTRSGAIKLYGAPGVEFMGLHQENNAVTQIHLLPGQCQLVTLLDDNSLHLWSLKVKGGASELQEDESFTLRGPPGAAPSATQITVVLPHSSCELLYLGTESGNVFVVQLPAFRALEDRTISSDAVLQRLPEEARHRRVFEMVEALQEHPRDPNQILIGYSRGLVVIWDLQGSRVLYHFLSSQQLENIWWQRDGRLLVSCHSDGSYCQWPVSSEAQQPEPLRSLVPYVGELREWVPRVRCGRHGAGPSVKTGPGAVAPACNPSAVGGQGGRIA

SEQ ID NO: 871131 - protein, 758 aa, Homo sapiens
MEEKPGKRVGRHSCMPLGCLSWLGPCLPARCIPPGALCQGALSSLCMQSQGYCPHLLPSWRWKGFAQAAKNRAFWICRCPGSNPGASDSTELGCFLLAPAPDPCPVPQAFDDPYALVVLAEEELVVIDLQTAGWPPVQLPYLASLHCSAITCSHHVSNIPLKLWERIIAAGSRQNAHFSTMEWPIDGGTSLTPAPPQRDLLLTGHEDGTVRFWDASGVCLRLLYKLSTVRVFLTDTDPNENFSAQGEDEWPPLRKVGSFDPYSDDPRLGIQKIFLCKYSGYLAVAGTAGQVLVLELNDEAAEQAVEQVEADLLQDQEGYRWKGHERLAARSGPVRFEPGFQPFVLVQCQPPAVVTSLALHSEWRLVAFGTSHGFGLFDHQQRRQVFVKCTLHPSDQLALEGPLSRVKSLKKSLRQSFRRMRRSRVSSRKRHPAGPPGEAQEGSAKAERPGLQNMELAPVQRKIEARSAEDSFTGFVRTLYFADTYLKDSSRHCPSLWAGTNGGTIYAFSLRVPPAERRMDEPVRAEQAKEIQLMHRAPVVGILVLDGHSVPLPEPLEVAHDLSKSPDMQGSHQLLVVSEEQFKVFTLPKVSAKLKLKLTALEGSRVRRVSVAHFGSRRAEDYGEHHLAVLTNLGDIQVVSLPLLKPQVRYSCIRREDVSGIASCVFTKYGQGFYLISPSEFERFSLSTKWLVEPRCLVDSAETKNHRPGNGAGPKKAPSRARNSGTQSDGEALGPGLPHPDLSKERESQAEEGPGGAP

SEQ ID NO: 871132 - protein, 1065 aa, Homo sapiens; identical to SEQ ID NO: 871126

SEQ ID NO: 871133 - protein, 1040 aa, Homo sapiens; identical to SEQ ID NO: 871125

SEQ ID NO: 871134 - protein, 932 aa, Homo sapiens
AAQQPVGRRGGASGAGGGRRGTPRPRAGAGPGFQVSSGGCRLSKMRRFLRPGHDPVRERLKRDLFQFNKTVEHGFPHQPSALGYSPSLHILAIGTRSGAIKLYGAPGVEFMGLHQENNAVTQIHLLPGQCQLVTLLDDNSLHLWSLKVKGGASELQEDESFTLRGPPGAAPSATQITVVLPHSSCELLYLGTESGNVFVVQLPAFRALEDRTISSDAVLQRLPEEARHRRVFEMVEALQEHPRDPNQILIGYSRGLVVIWDLQGSRVLYHFLSSQQLENIWWQRDGRLLVSCHSDGSYCQWPVSSEAQQPEPLRSLVPYGPFPCKAITRILWLTTRQGLPFTIFQGGMPRASYGDRHCISVIHDGQQTAFDFTSRVIGFTVLTEADPAASLLNDPYALVVLAEEELVVIDLQTAGWPPVQLPYLASLHCSAITCSHHVSNIPLKLWERIIAAGSRQNAHFSTMEWPIDGGTSLTPAPPQRDLLLTGHEDGTVRFWDASGVCLRLLYKLSTVRVFLTDTDPNENFSAQGEDEWPPLRKVGSFDPYSDDPRLGIQKIFLCKYSGYLAVAGTAGQVLVLELNDEAAEQAVEQVEADLLQDQEGYRWKGHERLAARSGPVRFEPGFQPFVLVQCQPPAVVTSLALHSEWRLVAFGTSHGFGLFDHQQRRQVFVKCTLHPSDQLALEGPLSRVKSLKKSLRQSFRRMRRSRVSSRKRHPAGPPGEAQEGSAKAERPGLQNMELAPVQRKIEARSAEDSFTGFVRTLYFADTYLKDSSRHCPSLWAGTNGGTIYAFSLRVPPAERRMDEPVRAEQAKEIQLMHRAPVVGILVLDGHSVPLPEPLEVAHDLSKSPDMQGSHQLLVVSEEQFKVFTLPKVSAKLKLKLTALEGSRVRRVSVAHFGSRRAEDYGEHHLAVLTNLGDIQVVSLPLLKPQAST

SEQ ID NO: 871135 - protein, 412 aa, Homo sapiens
TTRNLDQHTSSGGRSLLCTLHPSDQLALEGPLSRVKSLKKSLRQSFRRMRRSRVSSRKRHPAGPPGEAQEGSAKAERPGLQNMELAPVQRKIEARSAEDSFTGFVRTLYFADTYLKDSSRHCPSLWAGTNGGTIYAFSLRVPPAERRMDEPVRAEQAKEIQLMHRAPVVGILVLDGHSVPLPEPLEVAHDLSKSPDMQGSHQLLVVSEEQFKVFTLPKVSAKLKLKLTALEGSRVRRVSVAHFGSRRAEDYGEHHLAVLTNLGDIQVVSLPLLKPQVRYSCIRREDVSGIASCVFTKYGQGFYLISPSEFERFSLSTKWLVEPRCLVDSAETKNHRPGNGAGPKKAPSRARNSGTQSDGEEKQPGLVMERALLSDERVLKEIQSTLEGDRGSGNWRSHRAAVGCSLSNGGAE

SEQ ID NO: 871136 - protein, 340 aa, Homo sapiens [sequence omitted]

SEQ ID NO: 871137 - protein, 297 aa, Homo sapiens
AAQQPVGRRGGASGAGGGRRGTPRPRAGAGPGFQVSSGGCRLSKMRRFLRPGHDPVRERLKRDLFQFNKTVEHGFPHQPSALGYSPSLHILAIGTRSGAIKLYGAPGVEFMGLHQENNAVTQIHLLPGQCQLVTLLDDNSLHLWSLKVKGGASELQEDESFTLRGPPGAAPSATQITVVLPHSSCELLYLGTESGNVFVVQLPAFRALEDRTISSDAVLQRLPEEARHRRVFEMVEALQEHPRDPNQILIGYSRGLVVIWDLQGSRVLYHFLSSQQLENIWWQRDGRLLVSCHSDGS

SEQ ID NO: 871138 - protein, 128 aa, Homo sapiens
QLENIWWQRDGRLLVSCHSDGSYCQWPVSSEAQQPEPLRSLVPYAVFHPPGRAHPQCLLDSGAGCSILKQTPGPERVKALSKATQQGSPHPVSWGTSRSKIPKHRSTMWMWHELEGSVPVGTDTCLRV

SEQ ID NO: 871139 - protein, 77 aa, Homo sapiens
RNPLQETSAYLSVIKNLFTTVTYHVLPIRILASVLHSIYSTAFFTVFLMPKLGLLHQSAHVHALNSHSHLFHSPLNC

SEQ ID NO: 871140 - protein, 587 aa, Homo sapiens
MPTALCPRVLAPKESEEPRKMRSPPGENPSPQGELPSPESSRRLFRRFRYQEAAGPREALQRLWDLCGGWLRPERHTKEQILELLVLEQFLAILPREIQSWVRAQEPESGEQAVAAVEALEREPGRPWQWLKHCEDPVVIDDGDSPLDQEQEQLPVEPHSDLAKNQDAQPITLAQCLGLPSRPPSQLSGDPVLQDAFLLQEENVRDTQQVTTLQLPPSRVSPFKDMILCFSEEDWSLLDPAQTGFYGEFIIGEDYGVSMPPNDLAAQPDLSQGEENEPRVPELQDLQGKEVPQVSYLDSPSLQPFQVEERRKREELQVPEFQACPQTVVPQNTYPAGGNPRSLENSLDEEVTIEIVLSSSGDEDSQHGPYCTEELGSPTEKQRSLPASHRSSTEAGGEVQTSKKSYVCPNCGKIFRWRVNFIRHLRSRREQEKPHECSVCGELFSDSEDLDGHLESHEAQKPYRCGACGKSFRLNSHLLSHRRIHLQPDRLQPVEKREQAASEDADKGPKEPLENGKAKLSFQCCECGKAFQRHDHLARHRSHFHLKDKARPFQCRYCVKSFTQNYDLLRHERLHMKRRSKQALNSY

SEQ ID NO: 871141 - protein, 567 aa, Homo sapiens
MRSPPGENPSPQGELPSPESSRRLFRRFRYQEAAGPREALQRLWDLCGGWLRPERHTKEQILELLVLEQFLAILPREIQSWVRAQEPESGEQAVAAVEALEREPGRPWQWLKHCEDPVVIDDGDSPLDQEQEQLPVEPHSDLAKNQDAQPITLAQCLGLPSRPPSQLSGDPVLQDAFLLQEENVRDTQQVTTLQLPPSRVSPFKDMILCFSEEDWSLLDPAQTGFYGEFIIGEDYGVSMPPNDLAAQPDLSQGEENEPRVPELQDLQGKEVPQVSYLDSPSLQPFQVEERRKREELQVPEFQACPQTVVPQNTYPAGGNPRSLENSLDEEVTIEIVLSSSGDEDSQHGPYCTEELGSPTEKQRSLPASHRSSTEAGGEVQTSKKSYVCPNCGKIFRWRVNFIRHLRSRREQEKPHECSVCGELFSDSEDLDGHLESHEAQKPYRCGACGKSFRLNSHLLSHRRIHLQPDRLQPVEKREQAASEDADKGPKEPLENGKAKLSFQCCECGKAFQRHDHLARHRSHFHLKDKARPFQCRYCVKSFTQNYDLLRHERLHMKRRSKQALNSY

SEQ ID NO: 871142 - protein, 587 aa, Homo sapiens; identical to SEQ ID NO: 871140

SEQ ID NO: 871143 - protein, 567 aa, Homo sapiens; identical to SEQ ID NO: 871141

SEQ ID NO: 871144 - protein, 159 aa, Homo sapiens
EDPPCWPTCSVCGELFSDSEDLDGHLESHEAQKPYRCGACGKSFRLNSHLLSHRRIHLQPDRLQPVEKREQAASEDADKGPKEPLENGKAKLSFQCCECGKAFQRHDHLARHRSHFHLKDKARPFQCRYCVKSFTQNYDLLRHERLHMKRRSKQALNSY

SEQ ID NO: 871145 - protein, 567 aa, Homo sapiens; identical to SEQ ID NO: 871141

SEQ ID NO: 871146 - protein, 123 aa, Homo sapiens
ARARPPRRRLPAQSPALRKVRAGEKATPLFFRRLHLPPSRAVAFRMIGRRGLDGPGKEPGACGDPASASTPGRAGWEDEDGCPGLPPPQEGFRPDAGRELQAVSSICKGLNNKNSDFGSGASR

SEQ ID NO: 871147 - protein, 587 aa, Homo sapiens; identical to SEQ ID NO: 871140

SEQ ID NO: 871148 - protein, 623 aa, Homo sapiens
MPTALCPRVLAPKESEEPRKMRSPPGENPSPQGELPSPESSRRLFRRFRYQEAAGPREALQRLWDLCGGWLRPERHTKEQILELLVLEQFLAILPREIQSWVRAQEPESGEQAVAAVEALEREPGRPWQWLKHCEDPVVIDDGDSPLDQEQEQLPVEPHSDLAKNQDAQPITLAQCLGLPSRPPSQLSGDPVLQDAFLLQEENVRDTQQVTTLQLPPRIFQFNNHRSNGYILEMLGSGGKKAQIISVLSQIYVSRVSPFKDMILCFSEEDWSLLDPAQTGFYGEFIIGEDYGVSMPPNDLAAQPDLSQGEENEPRVPELQDLQGKEVPQVSYLDSPSLQPFQVEERRKREELQVPEFQACPQTVVPQNTYPAGGNPRSLENSLDEEVTIEIVLSSSGDEDSQHGPYCTEELGSPTEKQRSLPASHRSSTEAGGEVQTSKKSYVCPNCGKIFRWRVNFIRHLRSRREQEKPHECSVCGELFSDSEDLDGHLESHEAQKPYRCGACGKSFRLNSHLLSHRRIHLQPDRLQPVEKREQAASEDADKGPKEPLENGKAKLSFQCCECGKAFQRHDHLARHRSHFHLKDKARPFQCRYCVKSFTQNYDLLRHERLHMKRRSKQALNSY

SEQ ID NO: 871149 - protein, 567 aa, Homo sapiens; identical to SEQ ID NO: 871141

SEQ ID NO: 871150 - protein, 567 aa, Homo sapiens; identical to SEQ ID NO: 871141

SEQ ID NO: 871151 - protein, 567 aa, Homo sapiens; identical to SEQ ID NO: 871141

SEQ ID NO: 871152 - protein, 325 aa, Homo sapiens
MRSPPGENPSPQGELPSPESSRRLFRRFRYQEAAGPREALQRLWDLCGGWLRPERHTKEQILELLVLEQFLAILPREIQSWVRAQEPESGEQAVAAVEALEREPGRPWQWLKHCEDPVVIDDGDSPLDQEQEQLPVEPHSDLAKNQDAQPITLAQCLGLPSRPPSQLSGDPVLQDAFLLQEENVRDTQQVTTLQLPPSRVSPFKDMILCFSEEDWSLLDPAQTGFYGEFIIGEDYGVSMPPNDLAAQPDLSQGEENEPRVPELQDLQGKEVPQVSYLDSPSLQPFQVEERRKREELQVPEFQACPQTVVPQNTYPVPAGSVSAGI

SEQ ID NO: 871153 - protein, 98 aa, Homo sapiens
  misc_feature (16)..(17): Xaa can be any naturally occurring amino acid
  misc_feature (19)..(19): Xaa can be any naturally occurring amino acid
  misc_feature (21)..(21): Xaa can be any naturally occurring amino acid
  misc_feature (28)..(29): Xaa can be any naturally occurring amino acid
RGGPRPRPEQIRFLAXXVXRXEILFIHXXPVSFSNYLKKYHNTICGRHPIGVLLNAITELQKNGMNMSFSFLNYAQSSQCRNWQDSSVSYAAGALTVH

SEQ ID NO: 871154 - protein, 351 aa, Homo sapiens
GGAGRGRRRAAGLEGPAGGGAGPAVSRPLAEPLLPPPPPPPHSSSCTIGGTGTKMSNRVVCREASHAGSWYTASGPQLNAQLEGWLSQVQSTKRPARAIIAPHAGYTYCGSCAAHAYKQVDPSITRRIFILGPSHHVPLSRCALSSVDIYRTPLYDLRIDQKIYGELWKTGMFERMSLQTDEDEHSIEMHLPYTAKAMESHKDEFTIIPVLVGALSESKEQEFGKLFSKYLADPSNLFVVSSDFCHWGQRFRYSYYDESQGEIYRSIEHLDKMGMSIIEQLDPVSFSNYLKKYHNTICGRHPIGVLLNAITELQKNGMNMSFSFLNYAQSSQCRNWQDSSVSYAAGALTVH

SEQ ID NO: 871155 - protein, 297 aa, Homo sapiens
MSNRVVCREASHAGSWYTASGPQLNAQLEGWLSQVQSTKRPARAIIAPHAGYTYCGSCAAHAYKQVDPSITRRIFILGPSHHVPLSRCALSSVDIYRTPLYDLRIDQKIYGELWKTGMFERMSLQTDEDEHSIEMHLPYTAKAMESHKDEFTIIPVLVGALSESKEQEFGKLFSKYLADPSNLFVVSSDFCHWGQRFRYSYYDESQGEIYRSIEHLDKMGMSIIEQLDPVSFSNYLKKYHNTICGRHPIGVLLNAITELQKNGMNMSFSFLNYAQSSQCRNWQDSSVSYAAGALTVH

SEQ ID NO: 871156 - protein, 297 aa, Homo sapiens; identical to SEQ ID NO: 871155

SEQ ID NO: 871157 - protein, 328 aa, Homo sapiens
VHVEIPRRVGSGAGHAQWAGPVRVASGTGTKMSNRVVCREASHAGSWYTASGPQLNAQLEGWLSQVQSTKRPARAIIAPHAGYTYCGSCAAHAYKQVDPSITRRIFILGPSHHVPLSRCALSSVDIYRTPLYDLRIDQKIYGELWKTGMFERMSLQTDEDEHSIEMHLPYTAKAMESHKDEFTIIPVLVGALSESKEQEFGKLFSKYLADPSNLFVVSSDFCHWGQRFRYSYYDESQGEIYRSIEHLDKMGMSIIEQLDPVSFSNYLKKYHNTICGRHPIGVLLNAITELQKNGMNMSFSFLNYAQSSQCRNWQDSSVSYAAGALTVH

SEQ ID NO: 871158 - protein, 297 aa, Homo sapiens; identical to SEQ ID NO: 871155

SEQ ID NO: 871159 - protein, 180 aa, Homo sapiens
MFERMSLQTDEDEHSIEMHLPYTAKAMESHKDEFTIIPVLVGALSESKEQEFGKLFSKYLADPSNLFVVSSDFCHWGQRFRYSYYDESQGEIYRSIEHLDKMGMSIIEQLDPVSFSNYLKKYHNTICGRHPIGVLLNAITELQKNGMNMSFSFLNYAQSSQCRNWQDSSVSYAAGALTVH

SEQ ID NO: 871160 - protein, 301 aa, Homo sapiens
MQILPKKPLHCRGTGDLYDLFISQLTGHKDEFTIIPVLVGALSESKEQEFGKLFSKYLADPSNLFVVSSDFCHSGRRIFILGPSHHVPLSRCALSSVDIYRTPLYDLRIDQKIYGELWKTGMFERMSLQTDEDEHSIEMHLPYTAKAMESHKDEFTIIPVLVGALSESKEQEFGKLFSKYLADPSNLFVVSSDFCHWGQRFRYSYYDESQGEIYRSIEHLDKMGMSIIEQLDPVSFSNYLKKYHNTICGRHPIGVLLNAITELQKNGMNMSFSFLNYAQSSQCRNWQDSSVSYAAGALTVH

SEQ ID NO: 871161 - protein, 201 aa, Homo sapiens
MQDIRTVGLVLPMLINKWIRLLPGEFSSLGLLIMCPSLDVHFPVWIYIGHLCMTFVLTKRFTENCGRQECLNACLCRQMKMNTVLKCICLIQLKPWKGQRFRYSYYDESQGEIYRSIEHLDKMGMSIIEQLDPVSFSNYLKKYHNTICGRHPIGVLLNAITELQKNGMNMSFSFLNYAQSSQCRNWQDSSVSYAAGALTVH

SEQ ID NO: 871162 - protein, 147 aa, Homo sapiens
MSNRVVCREASHAGSWYTASGPQLNAQLEGWLSQVQSTKRPARAIIAPHAGYTYCGSCAAHAYKQVDPSITRRIFILGPSHHVPLSRCALSSVDIYRTPLYDLRIDQKIYGELWKTGMFERMSLQTDEDEHSIEMHLPYTAKAMERV

SEQ ID NO: 871163 - protein, 123 aa, Homo sapiens
MSNRVVCREASHAGSWYTASGPQLNAQLEGWLSQVQSTKRPARAIIAPRDGSFTSLGNNAMQDIRTVGLVLPMLINKWIRLLRKKCSFVLSRRSLRIYCFVIEVICFLYLLLLCTQFHEGFDF

SEQ ID NO: 871164 - protein, 112 aa, Homo sapiens
MQDIRTVGLVLPMLINKWIRLLPGEFSSLGLLIMCPSLDVHFPVWIYIGHLCMTFVLTKRFTENCGRQECLNACLCRQMKMNTVLKCICLIQLKPWKAIRMSLPLFLYWLEL

SEQ ID NO: 871165 - protein, 297 aa, Homo sapiens; identical to SEQ ID NO: 871155

SEQ ID NO: 871166 - protein, 297 aa, Homo sapiens; identical to SEQ ID NO: 871155

SEQ ID NO: 871167 - protein, 206 aa, Homo sapiens
MSNRVVCREASHAGSWYTASGPQLNAQLEGWLSQVQSTKRPARAIIAPHAGYTYCGSCAAHAYKQVDPSITRRIFILGPSHHVPLSRCALSSVDIYRTPLYDLRIDQKIYGELWKTGMFERMSLQTDEDEHSIEMHLPYTAKAMESHKDEFTIIPVLVGALSESKEQEFGKLFSKYLADPSNLFVVSSDFCHWGYEYYRTIRPCIF

SEQ ID NO: 871168 - protein, 147 aa, Homo sapiens; identical to SEQ ID NO: 871162

SEQ ID NO: 871169 - protein, 116 aa, Homo sapiens
  misc_feature (116)..(116): Xaa can be any naturally occurring amino acid
LFFCSICVMEFVIRSVRWFGSVMCGRWCYCPRAQSVCVWLPSSALVPSLFHWPRSVSRGSCSCRVLFLAVLFLWLFVFLFFFFFFFCFRLFLFFVFFFLFCVFLFFFFFVFFLPSX

SEQ ID NO: 871170 - protein, 214 aa, Homo sapiens
MSRKKTPKSKGASTPAASTLPTANGARPARSGTALSGPDAPPNGPLQPGRPSLGGGVDFYDVAFKVMLVGDSGVGKTCLLVRFKDGAFLAGTFISTVGIDFRNKVLDVDGVKVKLQMWDTAGQERFRSVTHAYYRDAHALLLLYDVTNKASFDNIQAWLTEIHEYAQHDVALMLLGNKVDSAHERVVKREDGEKLAKVSQGRGVVRGCPWRLRA

SEQ ID NO: 871171 - protein, 214 aa, Homo sapiens; identical to SEQ ID NO: 871170

SEQ ID NO: 871172 - protein, 214 aa, Homo sapiens
MSRKKTPKSKGASTPAASTLPTANGARPARSGTALSGPDAPPNGPLQPGRPSLGGGVDFYDVAFKVMLVGDSGVGKTCLLVRFKDGAFLAGTFISTVGIDFRNKVLDVDGVKVKLQMWDTAGQERFRSVTHAYYRDAHALLLLYDVTNKASFDNIQAWLTEIHEYAQHDVALMLLGNKVDSAHERVVKREDGEKLAKVHKAFGFSGAVIIFDIF

SEQ ID NO: 871173 - protein, 256 aa, Homo sapiens
MSRKKTPKSKGASTPAASTLPTANGARPARSGTALSGPDAPPNGPLQPGRPSLGGGVDFYDVAFKVMLVGDSGVGKTCLLVRFKDGAFLAGTFISTVGIDFRNKVLDVDGVKVKLQMWDTAGQERFRSVTHAYYRDAHALLLLYDVTNKASFDNIQAWLTEIHEYAQHDVALMLLGNKVDSAHERVVKREDGEKLAKEYGLPFMETSAKTGLNVDLAFTAIAKELKQRSMKAPSEPRFRLHDYVKREGRGASCCRP

SEQ ID NO: 871174 - protein, 214 aa, Homo sapiens; identical to SEQ ID NO: 871170

SEQ ID NO: 871175 - protein, 188 aa, Homo sapiens
MSRKKTPKSKGASTPAASTLPTANGARPARSGTALSGPDAPPNGPLQPGRPSLGGGVDFYDVAFKVMLVGDSGVGKTCLLVRFKDGAFLAGTFISTVGIDFRNKVLDVDGVKVKLQMWDTAGQERFRSVTHAYYRDAHALLLLYDVTNKASFDNIQAWLTEIHEYAQHDVALMLLGNKVDSGHELMGE

SEQ ID NO: 871176 - protein, 371 aa, Homo sapiens
GLVEKEGRGAGVGAVPQPRSSSHPGQFSRRAVTGGICPGTRSTVLCVSKMEADLSGFNIDAPRWDQRTFLGRVKHFLNITDPRTVFVSERELDWAKVMVEKSRMGVVPPGTQVEQLLYAKKLYDSAFHPDTGEKMNVIGRMSFQLPGGMIITGFMLQFYRTMPAVIFWQWVNQSFNALVNYTNRNAASPTSVRQMALSYFTATTTAVATAVGMNMLTKKAPPLVGRWVPFAAVAAANCVNIPMMRQQELIKGICVKDRNENEIGHSRRAAAIGITQVVISRITMSAPGMILLPVIMERLEKLHFMQKVKVLHAPLQVMLSGCFLIFMVPVACGLFPQKCELPVSYLEPKLQDTIKAKYGELEPYVYFNKGL

SEQ ID NO: 871177 - protein, 371 aa, Homo sapiens
WSFTLRDQAGVQRCDLGSSQPPPLGFKRFSCLSLPSSWDYRSTVLCVSKMEADLSGFNIDAPRWDQRTFLGRVKHFLNITDPRTVFVSERELDWAKVMVEKSRMGVVPPGTQVEQLLYAKKLYDSAFHPDTGEKMNVIGRMSFQLPGGMIITGFMLQFYRTMPAVIFWQWVNQSFNALVNYTNRNAASPTSVRQMALSYFTATTTAVATAVGMNMLTKKAPPLVGRWVPFAAVAAANCVNIPMMRQQELIKGICVKDRNENEIGHSRRAAAIGITQVVISRITMSAPGMILLPVIMERLEKLHFMQKVKVLHAPLQVMLSGCFLIFMVPVACGLFPQKCELPVSYLEPKLQDTIKAKYGELEPYVYFNKGL

SEQ ID NO: 871178 - protein, 132 aa, Homo sapiens
PTCSSVLPSGKYFLELLLKEREPLGSWSDFRRSPGESLPALPSASPWSLPVLLPVIMERLEKLHFMQKVKVLHAPLQVMLSGCFLIFMVPVACGLFPQKCELPVSYLEPKLQDTIKAKYGELEPYVYFNKGL

SEQ ID NO: 871179 - protein, 371 aa, Homo sapiens; identical to SEQ ID NO: 871176

SEQ ID NO: 871180 - protein, 128 aa, Homo sapiens
MRQQELIKGICVKDRNENEIGHSRRAAAIGITQVVISRITMSAPGMILLPVIMERLEKLHFMQKVKVLHAPLQVMLSGCFLIFMVPVACGLFPQKCELPVSYLEPKLQDTIKAKYGELEPYVYFNKGL

SEQ ID NO: 871181 - protein, 202 aa, Homo sapiens
WSFTLRDQAGVQRCDLGSSQPPPLGFKRFSCLSLPSSWDYRSTVLCVSKMEADLSGFNIDAPRWDQRTFLGRVKHFLNITDPRTVFVSERELDWAKVMVEKSRMGVVPPGTQVEQLLYAKKLYDSAFHPDTGEKMNVIGRMSFQLPGGMIITGFMLQFYRTMPAVIFWQWVNQSFNALVNYTNRNAASPTSVSLAASHHGKA

SEQ ID NO: 871182 - protein, 385 aa, Homo sapiens
GLVEKEGRGAGVGAVPQPRSSSHPGQFSRRAVTGGICPGTRSTVLCVSKMEADLSGFNIDAPRWDQRTFLGRVKHFLNITDPRTVFVSERELDWAKVMVEKSRMGVVPPGTQVEQLLYAKKLYDSAFHPDTGEKMNVIGRMSFQLPGGMIITGFMLQFYRTMPAVIFWQWVNQSFNALVNYTNRNAASPTSVRQMALSYFTATTTAVATAVGMNMLTKKAPPLVGRWVPFAAVAAANCVFIDQKFTAGAHKGSCSEGQELQHEDGAFPGELRGIGHPPQVVISSDSPKSAPWDDLGWQVIIGKAEKLAFMQKSRGPGTPIGGHGEGGLLILMVPGGVAFPQNGNCHSIGTSPKHIGSWNVLCRRSGPRGVQYTSGEVLRRERGGA

SEQ ID NO: 871183 - protein, 126 aa, Homo sapiens
IWDREGKLGILATERHLKIGGRKGVGGFGDVLEYVNEGSGGVLEALGKAKPVFLSFNLFQENYGQKEAEKVARVKALYEELDLPAVFLQYEEDSYSHIMALIEQYAAPLPPAVFLGLARKIYKRRK

SEQ ID NO: 871184 - protein, 90 aa, Homo sapiens
  misc_feature (10)..(10): Xaa can be any naturally occurring amino acid
  misc_feature (46)..(46): Xaa can be any naturally occurring amino acid
IWLRYDSGSXTHNMYREYRDLTTAALSPSATETWVPGTRPSPLHSXLPAVFLQYEEDSYSHIMALIEQYAAPLPPAVFLGLARKIYKRRK

SEQ ID NO: 871185 - protein, 167 aa, Homo sapiens
MNGDQNSDVYAQEKQDFVQHFSQIVRVLTEDEMGHPEIGDAIARLKEVLEYNAIGGKYNRGLTVVVAFRELVEPRKQDADSLQRAWTVGWCVELLQAFFLVADDIMDSSLTRRGQICWYQKPGVGLDAINDANLLEACIYRLLKLYCREQPYYLKPDRALPAEFLSD

SEQ ID NO: 871186 - protein, 167 aa, Homo sapiens; identical to SEQ ID NO: 871185

SEQ ID NO: 871187 - protein, 167 aa, Homo sapiens; identical to SEQ ID NO: 871185

SEQ ID NO: 871188 - protein, 167 aa, Homo sapiens; identical to SEQ ID NO: 871185

SEQ ID NO: 871189 - protein, 167 aa, Homo sapiens; identical to SEQ ID NO: 871185

SEQ ID NO: 871190 - protein, 167 aa, Homo sapiens; identical to SEQ ID NO: 871185

SEQ ID NO: 871191 - protein, 167 aa, Homo sapiens; identical to SEQ ID NO: 871185

SEQ ID NO: 871192 - protein, 251 aa, Homo sapiens
MLSPQRALLCNLNHIHLQHVSLGLHLSRRPELQEGPLSTPPPPGDTGGKESRGPCSGTLVDANSNSPAVPCRCCQEHGPGLENRQDPSQEEEGAASPSDPGCSSSLSSCSDLSPDESPVSVYLRDLPGDEDAHPQPSIIPLEQGSPLASAGPGTCSPDSFCCSPDSCSGASSSPDPGLDSNCNALTTCQDVPSPGLEEEDERAEQDLPTSELLEADDGKIDAGKTEPSWKINPIWKIDTEKTKAEWKTTEN

SEQ ID NO: 871193 - protein, 167 aa, Homo sapiens; identical to SEQ ID NO: 871185

SEQ ID NO: 871194 - protein, 167 aa, Homo sapiens; identical to SEQ ID NO: 871185

SEQ ID NO: 871195 - protein, 167 aa, Homo sapiens; identical to SEQ ID NO: 871185

SEQ ID NO: 871196 - protein, 167 aa, Homo sapiens; identical to SEQ ID NO: 871185

SEQ ID NO: 871197 - protein, 167 aa, Homo sapiens; identical to SEQ ID NO: 871185

SEQ ID NO: 871198 - protein, 167 aa, Homo sapiens; identical to SEQ ID NO: 871185

SEQ ID NO: 871199 - protein, 167 aa, Homo sapiens; identical to SEQ ID NO: 871185

SEQ ID NO: 871200 - protein, 167 aa, Homo sapiens; identical to SEQ ID NO: 871185

SEQ ID NO: 871201 - protein, 167 aa, Homo sapiens; identical to SEQ ID NO: 871185

SEQ ID NO: 871202 - protein, 167 aa, Homo sapiens; identical to SEQ ID NO: 871185

SEQ ID NO: 871203 - protein, 196 aa, Homo sapiens
MNGDQNSDVYAQEKQDFVQHFSQIVRVLTEDEMGHPEIGDAIARLKEVLEYNAIGGKYNRGLTVVVAFRELVEPRKQDADSLQRAWTVGWCVELLQAFFLVADDIMDSSLTRRGQICWYQKPGVGLDAINDANLLEACIYRLLKLYCREQPYYLKPDRALPAGVLQTGPDAQRVPMVALASIGHAHLAGFREFLSD

SEQ ID NO: 871204 - protein, 229 aa, Homo sapiens
MNGDQNSDVYAQEKQDFVQHFSQIVRVLTEDEMGHPEIGDAIARLKEVLEYNAIGGKYNRGLTVVVAFRELVEPRKQDADSLQRAWTVGWCVELLQAFFLVADDIMDSSLTRRGQICWYQKPGVGLDAINDANLLEACIYRLLKLYCREQPYYLKPDRALPAGVLQTGPDAQRVPMVALASIGHAHLAGFRVQDCSVPGRERKRGRVLGSGVVVVARKGFSVLCNWKKG

SEQ ID NO: 871205 - protein, 167 aa, Homo sapiens; identical to SEQ ID NO: 871185

SEQ ID NO: 871206 - protein, 203 aa, Homo sapiens
MLAKMASCTSVIILTIRLGSDATSEPGNRALCSSLRMNGDQNSDVYAQEKQDFVQHFSQIVRVLTEDEMGHPEIGDAIARLKEVLEYNAIGGKYNRGLTVVVAFRELVEPRKQDADSLQRAWTVGWCVELLQAFFLVADDIMDSSLTRRGQICWYQKPGVGLDAINDANLLEACIYRLLKLYCREQPYYLKPDRALPAEFLSD

SEQ ID NO: 871207 - protein, 251 aa, Homo sapiens; identical to SEQ ID NO: 871192

SEQ ID NO: 871208 - protein, 167 aa, Homo sapiens; identical to SEQ ID NO: 871185

SEQ ID NO: 871209 - protein, 167 aa, Homo sapiens; identical to SEQ ID NO: 871185

SEQ ID NO: 871210 - protein, 167 aa, Homo sapiens; identical to SEQ ID NO: 871185

SEQ ID NO: 871211 - protein, 167 aa, Homo sapiens; identical to SEQ ID NO: 871185

SEQ ID NO: 871212 - protein, 167 aa, Homo sapiens; identical to SEQ ID NO: 871185

SEQ ID NO: 871213 - protein, 167 aa, Homo sapiens; identical to SEQ ID NO: 871185

SEQ ID NO: 871214 - protein, 167 aa, Homo sapiens; identical to SEQ ID NO: 871185

SEQ ID NO: 871215 - protein, 167 aa, Homo sapiens; identical to SEQ ID NO: 871185

SEQ ID NO: 871216 - protein, 167 aa, Homo sapiens; identical to SEQ ID NO: 871185

SEQ ID NO: 871217 - protein, 167 aa, Homo sapiens; identical to SEQ ID NO: 871185

SEQ ID NO: 871218 - protein, 167 aa, Homo sapiens; identical to SEQ ID NO: 871185

SEQ ID NO: 871219 - protein, 167 aa, Homo sapiens; identical to SEQ ID NO: 871185

SEQ ID NO: 871220 - protein, 167 aa, Homo sapiens; identical to SEQ ID NO: 871185

SEQ ID NO: 871221 - protein, 167 aa, Homo sapiens; identical to SEQ ID NO: 871185

SEQ ID NO: 871222 - protein, 229 aa, Homo sapiens; identical to SEQ ID NO: 871204

SEQ ID NO: 871223 - protein, 219 aa, Homo sapiens
MNGDQNSDVYAQEKQDFVQHFSQIVRVLTEDEMGHPEIGDAIARLKEVLEYNAIGGKYNRGLTVVVAFRELVEPRKQDADSLQRAWTVGWCVELLQAFFLVADDIMDSSLTRRGQICWYQKPGVGLDAINDANLLEACIYRLLKLYCREQPYYLKPDRALPAGTNLLSSTRTAFYSFLPSYKLQPCTWAGIDGEKEHANAKKILLEMGGVFRLVLSDSG

SEQ ID NO: 871224 - protein, 108 aa, Homo sapiens
MASASCSPGRPLASPEPGWQPVINYIDIKFEDYLNAESRVNRCQMPGNRVQCCLYFIAPSGHGDRSHYVAQVILDLLASSDPPTLVSQSAGITDVNYQPSQRAEGFQF

SEQ ID NO: 871225 - protein, 33 aa, Homo sapiens
MTSAHFCPLLEQRRQSWDRTSSPRTNIQCDCGY

SEQ ID NO: 871226 - protein, 114 aa, Homo sapiens
MPHKVFLNCNINLYFQLFTLLSTTFIKTCLHRLLVSIWNGKVSFNTFFFTLCSRAEGVQNHAQFNSPEELCNLYLASTWKKKTIYKNTKLLKCSSTISRLSDSYLQKDRMFVYW

SEQ ID NO: 871227 - protein, 110 aa, Homo sapiens [sequence omitted]

SEQ ID NO: 871228 - protein, 328 aa, Homo sapiens
ARVPLGTARAAASLWGRYLRARTPRSPPRSPSRAPRAPQRWGLLLRGGNVWPAPAARRGPGPRAHDGPARWAMIRLGGWCARRLCSAAVPAGRRGAAGGLGLAGGRALRVLVDMDGVLADFEGGFLRKFRARFPDQPFIALEDRRGFWVSEQYGRLRPGLSVSVPAPPRAGPPSRPEPQTPPLRRGPWTEKAISIWESKNFFFELEPLPGAVEAVKEMASLQNTDVFICTSPIKMFKYCPYEKYAWVEKYFGPDFLEQIVLTRDKTVVSADLLIDDRPDITGAEPTPSWEHVLFTACHNQHLQLQPPRRRLHSWADDWKAILDSKRPC

SEQ ID NO: 871229 - protein, 344 aa, Homo sapiens
ARVPLGTARAAASLWGRYLRARTPRSPPRSPSRAPRAPQRWGLLLRGGNVWPAPAARRGPGPRAHDGPARWAMIRLGGWCARRLCSAAVPAGRRGAAGGLGLAGGRALRVLVDMDGVLADFEGGFLRKFRARFPDQPFIALEDRRGFWVSEQYGRLRPGLSSWPCSTPELNPYHPTPEVFCPGWIEGKDPRRDVYTQILEKAISIWESKNFFFELEPLPGAVEAVKEMASLQNTDVFICTSPIKMFKYCPYEKYAWVEKYFGPDFLEQIVLTRDKTVVSADLLIDDRPDITGKWPATGAEPTPSWEHVLFTACHNQHLQLQPPRRRLHSWADDWKAILDSKRPC

SEQ ID NO: 871230 - protein, 334 aa, Homo sapiens
ARVPLGTARAAASLWGRYLRARTPRSPPRSPSRAPRAPQRWGLLLRGGNVWPAPAARRGPGPRAHDGPARWAMIRLGGWCARRLCSAAVPAGRRGAAGGLGLAGGRALRVLVDMDGVLADFEGGFLRKFRARFPDQPFIALEDRRGFWVSEQYGRLRPGLSVSVPAPPRAGPPSRPEPQTPPLRRGPWTEKAISIWESKNFFFELEPLPGAVEAVKEMASLQNTDVFICTSPIKMFKYCPYEKYAWVEKYFGPDFLEQIVLTRDKTVVSADLLIDDRPDITGKWPATGAEPTPSWEHVLFTACHNQHLQLQPPRRRLHSWADDWKAILDSKRPC

SEQ ID NO: 871231 - protein, 300 aa, Homo sapiens
ARVPLGTARAAASLWGRYLRARTPRSPPRSPSRAPRAPQRWGLLLRGGNVWPAPAARRGPGPRAHDGPARWAMIRLGGWCARRLCSAAVPAGRRGAAGGLGLAGGRALRVLVDMDGVLADFEGGFLRKFRARFPDQPFIALEDRRGFWVSEQYGRLRPGLSEKAISIWESKNFFFELEPLPGAVEAVKEMASLQNTDVFICTSPIKMFKYCPYEKYAWVEKYFGPDFLEQIVLTRDKTVVSADLLIDDRPDITGAEPTPSWEHVLFTACHNQHLQLQPPRRRLHSWADDWKAILDSKRPC

SEQ ID NO: 871232 - protein, 232 aa, Homo sapiens
GLRSQRAPAGVGVHGPDTFAGLCWIPTKSGPFWKGVRSPHTLRTTPRKYVLGCVFGGVRGMKNHSPYSLAILPKMRAEGAEDPGSNLLFSTSQEKAISIWESKNFFFELEPLPGAVEAVKEMASLQNTDVFICTSPIKMFKYCPYEKYAWVEKYFGPDFLEQIVLTRDKTVVSADLLIDDRPDITGAEPTPSWEHVLFTACHNQHLQLQPPRRRLHSWADDWKAILDSKRPC

SEQ ID NO: 871233 - protein, 575 aa, Homo sapiens
MDERLSLLRSPPPPSARHRAHPPQRPASSGGAHTLVNHGYAEPAAGRELPPDMTVVPGDHLLEPEVADGGGAPPQGGCGGGGCDRYEPLPPSLPAAGEQDCCGERVVINISGLRFETQLKTLCQFPETLLGDPKRRMRYFDPLRNEYFFDRNRPSFDAILYYYQSGGRIRRPVNVPIDIFSEEIRFYQLGEEAMEKFREDEGFLREEERPLPRRDFQRQVWLLFEYPESSGPARGIAIVSVLVILISIVIFCLETLPEFRDEKDYPASTSQDSFEAAGNSTSGSRAGASSFSDPFFVVETLCIIWFSFELLVRFFACPSKATFSRNIMNLIDIVAIIPYFITLGTELAERQGNGQQAMSLAILRVIRLVRVFRIFKLSRHSKGLQILGQTLKASMRELGLLIFFLFIGVILFSSAVYFAEADDPTSGFSSIPDAFWWAVVTMTTVGYGDMHPVTIGGKIVGSLCAIAGVLTIALPVPVIVSNFNYFYHRETEGEEQSQYMHVGSCQHLSSSAEELRKARSNSTLSKSEYMVIEEGGMNHSAFPQTPFKTGNSTATCTTNNNPNSCVNIKKIFTDV

SEQ ID NO: 871234 - protein, 130 aa, Homo sapiens
STVCLSQATNAKLCKTVGCFLGPKNKASLTQVFFNVWSCIYLRYMIFQAVVEAKKLILGGLEKAEKKEDTRMYLLALKNALLPEGIPSLLKYAEAGEGPISHLATTALQRYDLPFITDEVKSPRIFATFT

SEQ ID NO: 871235 - protein, 894 aa, Homo sapiens
MILLAVLFLCFISSYSASVKGHTTGLSLNNDRLYKLTYSTEVLLDRGKGKLQDSVGYRISSNVDVALLWRNPDGDDDQLIQITMKDVNVENVNQQRGEKSIFKGKSPSKIMGKENLEALQRPTLLHLIHGKVKEFYSYQNEAVAIENIKRGLASLFQTQLSSGTTNEVDISGNCKVTYQAHQDKVIKIKALDSCKIARSGFTTPNQVLGVSSKATSVTTYKIEDSFVIAVLAEETHNFGLNFLQTIKGKIVSKQKLELKTTEAGPRLMSGKQAAAIIKAVDSKYTAIPIVGQVFQSHCKGCPSLSELWRSTRKYLQPDNLSKAEAVRNFLAFIQHLRTAKKEEILQILKMENKEVLPQLVDAVTSAQTSDSLEAILDFLDFKSDSSIILQERFLYACGFASHPNEELLRALISKFKGSIGSSDIRETVMIITGTLVRKLCQNEGCKLKAVVEAKKLILGGLEKAEKKEDTRMYLLALKNALLPEGIPSLLKYAEAGEGPISHLATTALQRYDLPFITDEVKKTLNRIYHQNRKVHEKTVRTAAAAIILNNNPSYMDVKNILLSIGELPQEMNKYMLAIVQDILRFEMPASKIVRRVLKEMVAHNYDRFSRSGSSSAYTGYIERSPRSASTYSLDILYSGSGILRRSNLNIFQYIGKAGLHGSQVVIEAQGLEALIAATPDEGEENLDSYAGMSAILFDVQLRPVTFFNGYSDLMSKMLSASGDPISVVKGLILLIDHSQELQLQSGLKANIEVQGGLAIDISGAMEFSLWYRESKTRVKNRVTVVITTDITVDSSFVKAGLETSTETEAGLEFISTVQFSQYPFLVCMQMDKDEAPFRQFEKKYERLSTGRGYVSQKRKESVLAGCEFPLHQENSEMCKVVFAPQPDSTSSGWF

SEQ ID NO: 871236 - protein, 217 aa, Homo sapiens
MEAAHFFEGTEKLLEVWFSRQQPDANQGSGDLRTIPRSEWDILLKDVQCSIISVTKTDKQEAYVLSESSMFVSKRRFILKTCGTTLLLKALVPLLKLARDYSGFDSIQSFFYSRKNFMKPSHQGYPHRNFQEEIEFLNAIFPKWEPAYGMGTCLNSDLWVLIISWSSKEVGYQCKSTWNLLVSDRFDPFYLRGVRRGSGRDDESFEQALFQEKGVSH

SEQ ID NO: 871237 - protein, 334 aa, Homo sapiens
MEAAHFFEGTEKLLEVWFSRQQPDANQGSGDLRTIPRSEWDILLKDVQCSIISVTKTDKQEAYVLSESSMFVSKRRFILKTCGTTLLLKALVPLLKLARDYSGFDSIQSFFYSRKNFMKPSHQGYPHRNFQEEIEFLNAIFPNGAAYCMGRMNSDCWYLYTLDFPESRVISQPDQTLEILMSELDPAVMDQFYMKDGVTAKDVTRESGIRDLIPGSVIDATMFNPCGYSMNGMKSDGTYWTIHITPEPEFSYVSFETNLSQTSYDDLIRKVVEVFKPGKFVTTLFVNQSSKCRTVLASPQKIEGFKRLDCQSAMFNDYNFVFTSFAKKQQQQQS

SEQ ID NO: 871238 - protein, 334 aa, Homo sapiens; identical to SEQ ID NO: 871237

SEQ ID NO: 871239 - protein, 359 aa, Homo sapiens
MEAAHFFEGTEKLLEVWFSRQQPDANQGSGDLRTIPRSEWDILLKDVQCSIISVTKTDKQEAYVLSESSMFVSKRRFILKTCGTTLLLKALVPLLKLARDYSGFDSIQMEFRSCFPGWNAIARSQLTAICTSQSFFYSRKNFMKPSHQGYPHRNFQEEIEFLNAIFPNGAAYCMGRMNSDCWYLYTLDFPESRVISQPDQTLEILMSELDPAVMDQFYMKDGVTAKDVTRESGIRDLIPGSVIDATMFNPCGYSMNGMKSDGTYWTIHITPEPEFSYVSFETNLSQTSYDDLIRKVVEVFKPGKFVTTLFVNQSSKCRTVLASPQKIEGFKRLDCQSAMFNDYNFVFTSFAKKQQQQQS

SEQ ID NO: 871240 - protein, 316 aa, Homo sapiens
GGRGPRWGSGAPARVASGRSEWDILLKDVQCSIISVTKTDKQEAYVLSESSMFVSKRRFILKTCGTTLLLKALVPLLKLARDYSGFDSIQSFFYSRKNFMKPSHQGYPHRNFQEEIEFLNAIFPNGAAYCMGRMNSDCWYLYTLDFPESRVISQPDQTLEILMSELDPAVMDQFYMKDGVTAKDVTRESGIRDLIPGSVIDATMFNPCGYSMNGMKSDGTYWTIHITPEPEFSYVSFETNLSQTSYDDLIRKVVEVFKPGKFVTTLFVNQSSKCRTVLASPQKIEGFKRLDCQSAMFNDYNFVFTSFAKKQQQQQS

SEQ ID NO: 871241 - protein, 217 aa, Homo sapiens
MKPSHQGYPHRNFQEEIEFLNAIFPNGAAYCMGRMNSDCWYLYTLDFPESRVISQPDQTLEILMSELDPAVMDQFYMKDGVTAKDVTRESGIRDLIPGSVIDATMFNPCGYSMNGMKSDGTYWTIHITPEPEFSYVSFETNLSQTSYDDLIRKVVEVFKPGKFVTTLFVNQSSKCRTVLASPQKIEGFKRLDCQSAMFNDYNFVFTSFAKKQQQQQS

SEQ ID NO: 871242 - protein, 261 aa, Homo sapiens
MVLPFKVYYLNISMALVLTAFTYPSWEVDTDRKLTQSLLTYTKGAQHTERLYLEEGSAEPACVGRRAPENGAAYCMGRMNSDCWYLYTLDFPESRVISQPDQTLEILMSELDPAVMDQFYMKDGVTAKDVTRESGIRDLIPGSVIDATMFNPCGYSMNGMKSDGTYWTIHITPEPEFSYVSFETNLSQTSYDDLIRKVVEVFKPGKFVTTLFVNQSSKCRTVLASPQKIEGFKRLDCQSAMFNDYNFVFTSFAKKQQQQQS

SEQ ID NO: 871243 - protein, 296 aa, Homo sapiens
MEAAHFFEGTEKLLEVWFSRQQPDANQGSGDLRTIPRSEWDILLKDVQCSIISVTKTDKQEAYVLSESSMFVSKRRFILKTCGTTLLLKALVPLLKLARDYSGFDSIQSFFYSRKNFMKPSHQGYPHRNFQEEIEFLNAIFPNGAAYCMGRMNSDCWYLYTLDFPESRVISQPDQTLEILMSELDPAVMDQFYMKDGVTAKDVTRESGIRDLIPGSVIDATMFNPCGYSMNGMKSDGTYWTIHITPEPEFSYVSFETNLSQTSYDDLIRKVVEVFKPGKFVTTLFVNQMVPGLNIL

SEQ ID NO: 871244 - protein, 442 aa, Homo sapiens
  misc_feature (227)..(227): Xaa can be any naturally occurring amino acid
MEAAHFFEGTEKLLEVWFSRQQPDANQGSGDLRTIPRSEWDILLKDVQCSIISVTKTDKQEAYVLSESSMFVSKRRFILKTCGTTLLLKALVPLLKLARDYSGFDSIQSFFYSRKNFMKPSHQGYPHRNFQEEIEFLNAIFPMEQHMFGAYESDWVLYTLGSRESVSVSRLTGICGGCPRLAFLETVRRGPEGSPTVVCRTRFRAGVVPPFLSPLAVSLDFRRMSNXQGQTTDKDTNTKHTQPRQGAPGRRHKTHKEPKTRADTEQQRTQQREATNTDDEQTERVKEKGRGERHRKEEKKAKQKREDETKMEEREGENRKREEKESKEERAKKRGGEERRIKSRRRQEEQEEGRKDSREEEDRDRRAREDEGRLLRAARGKKNRKEARRRAETQTTKNNETTERADKKEKEREEAEDTTRKTQGEKRTEKESKPDKKTKKDQ

SEQ ID NO: 871245 - protein, 334 aa, Homo sapiens; identical to SEQ ID NO: 871237

SEQ ID NO: 871246 - protein, 334 aa, Homo sapiens; identical to SEQ ID NO: 871237

SEQ ID NO: 871247 - protein, 334 aa, Homo sapiens; identical to SEQ ID NO: 871237

SEQ ID NO: 871248 - protein, 334 aa, Homo sapiens; identical to SEQ ID NO: 871237

SEQ ID NO: 871249 - protein, 265 aa, Homo sapiens
MFVSKRRFILKTCGTTLLLKALVPLLKLARDYSGFDSIQSFFYSRKNFMKPSHQGYPHRNFQEEIEFLNAIFPNGAAYCMGRMNSDCWYLYTLDFPESRVISQPDQTLEILMSELDPAVMDQFYMKDGVTAKDVTRESGIRDLIPGSVIDATMFNPCGYSMNGMKSDGTYWTIHITPEPEFSYVSFETNLSQTSYDDLIRKVVEVFKPGKFVTTLFVNQSSKCRTVLASPQKIEGFKRLDCQSAMFNDYNFVFTSFAKKQQQQQS

SEQ ID NO: 871250 - protein, 305 aa, Homo sapiens
MEAAHFFEGTEKLLEVWFSRQQPDANQGSGDLRTIPSESSMFVSKRRFILKTCGTTLLLKALVPLLKLARDYSGFDSIQSFFYSRKNFMKPSHQGYPHRNFQEEIEFLNAIFPNGAAYCMGRMNSDCWYLYTLDFPESRVISQPDQTLEILMSELDPAVMDQFYMKDGVTAKDVTRESGIRDLIPGSVIDATMFNPCGYSMNGMKSDGTYWTIHITPEPEFSYVSFETNLSQTSYDDLIRKVVEVFKPGKFVTTLFVNQSSKCRTVLASPQKIEGFKRLDCQSAMFNDYNFVFTSFAKKQQQQQS

SEQ ID NO: 871251 - protein, 111 aa, Homo sapiens
SLSILNTVNFFSQGTYWTIHITPEPEFSYVSFETNLSQTSYDDLIRKVVEVFKPGKFVTTLFVNQSSKCRTVLASPQKIEGFKRLDCQSAMFNDYNFVFTSFAKKQQQQQS

SEQ ID NO: 871252 - protein, 122 aa, Homo sapiens
MEAAHFFEGTEKLLEVWFSRQQPDANQGSGDLRTIPRWVPGALADIRAWGLSPPPRHQPRVEPEFPQLSVGGKSAAWGRFGGLGRCAVWGRAAMSTRAGAGFSRRGCRAWHCPGGGEEAGAA

SEQ ID NO: 871253 - protein, 70 aa, Homo sapiens
MTVAPTDVMVWMDLRGRISKVLACLNDSSFPYLSFAAPGLSFQLLPLTCTSQVPDKALVFINPNAYTWVL

SEQ ID NO: 871254 - protein, 87 aa, Homo sapiens
AGVRRPSRPPAPPQIASEVAWPWSAGENRTPARLPESGACRGLALRTPRERPGAAYHPDPPHLESAFTAPLFSPLPIWKGSECHFRH

SEQ ID NO: 871255 - protein, 48 aa, Homo sapiens
GGAMLSCFRLLSRHISPSLASLRPVRCCFALPLRWAPGRPLDPRQIAP

SEQ ID NO: 871256 - protein, 331 aa, Homo sapiens
MLLLINVILTLWVSCANGQEVKPCDFPEIQHGGLYYKSLRRLYFPAAAGQSYSYYCDQNFVTPSGSYWDYIHCTQDGWLPTVPCLRTCSKSDIEIENGFISESSSIYILNKEIQYKCKPGYATADGNSSGSITCLQNGWSAQPICIKFCDMPVFENSRAKSNGMRFKLHDTLDYECYDGYEISYGNTTGSIVCGEDGWSHFPTCYNSSEKCGPPPPISNGDTTSFLLKVYVPQSRVEYQCQSYYELQGSNYVTCSNGEWSEPPRCIHPCIITEENMNKNNIQLKGKSDIKYYAKTGDTIEFMCKLGYNANTSVLSFQAVCREGIVEYPRCE

SEQ ID NO: 871257 - protein, 100 aa, Homo sapiens
LDRPAELRPGEPSFRGTFRRRRAASEARAGHERAERRRRLRAGAAAALPRKGRTRRRARRASRRRRLRHGRATLQRGGFGAGAGRAVRSGRGAADRHRRP

SEQ ID NO: 871258 - protein, 1204 aa, Homo sapiens
MDEPPFSEAALEQALGEPCDLDAALLTDIEGEVGAGRGRANGLDAPRAGADRGAMDCTFEDMLQLINNQDSDFPGLFDPPYAGSGAGGTDPASPDTSSPGSLSPPPATLSSSLEAFLSGPQAAPSPLSPPQPAPTPLKMYPSMPAFSPGPGIKEESVPLSILQTPTPQPLPGALLPQSFPAPAPPQFSSTPVLGYPSPPGGFSTGSPPGNTQQPLPGLPLASPPGVPPVSLHTQVQSVVPQQLLTVTAAPTAAPVTTTVTSQIQQVPVLLQPHFIKADSLLLTAMKTDGATVKAAGLSPLVSGTTVQTGPLPTLVSGGTILATVPLVVDAEKLPINRLAAGSKAPASAQSRGEKRTAHNAIEKRYRSSINDKIIELKDLVVGTEAKLNKSAVLRKAIDYIRFLQHSNQKLKQENLSLRTAVHKSKSLKDLVSACGSGGNTDVLMEGVKTEVEDTLTPPPSDAGSPFQSSPLSLGSRGSGSGGSGSDSEPDSPVFEDSKAKPEQRPSLHSRGMLDRSRLALCTLVFLCLSCNPLASLLGARGLPSPSDTTSVYHSPGRNVLGTESRDGPGWAQWLLPPVVWLLNGLLVLVSLVLLFVYGEPVTRPHSGPAVYFWRHRKQADLDLARGDFAQAAQQLWLALRALGRPLPTSHLDLACSLLWNLIRHLLQRLWVGRWLAGRAGGLQQDCALRVDASASARDAALVYHKLHQLHTMGKHTGGHLTATNLALSALNLAECAGDAVSVATLAEIYVAAALRVKTSLPRALHFLTRFFLSSARQACLAQSGSVPPAMQWLCHPVGHRFFVDGDWSVLSTPWESLYSLAGNPVDPLAQVTQLFREHLLERALNCVTQPNPSPGSADGDKEFSDALGYLQLLNSCSDAAGAPAYSFSISSSMATTTGVDPVAKWWASLTAVVIHWLRRDEEAAERLCPLVEHLPRVLQESERPLPRAALHSFKAARALLGCAKAESGPASLTICEKASGYLQDSLATTPASSSIDKAVQLFLCDLLLVVRTSLWRQQQPPAPAPAAQGTSSRPQASALELRGFQRDLSSLRRLAQSFRPAMRRVFLHEATARLMAGASPTRTHQLLDRSLRRRAGPGGKGGAVAELEPRPTRREHAEALLLASCYLPPGFLSAPGQRVGMLAEAARTLEKLGDRRLLHDCQQMLMRLGGGTTVTSRLDPVSPASAPLSLATLVPCSFCPASKL

SEQ ID NO: 871259 - protein, 905 aa, Homo sapiens
MSAQWCHETRPLPTLVSGGTILATVPLVVDAEKLPINRLAAGSKAPASAQSRGEKRTAHNAIEKRYRSSINDKIIELKDLVVGTEAKLNKSAVLRKAIDYIRFLQHSNQKLKQENLSLRTAVHKSKSLKDLVSACGSGGNTDVLMEGVKTEVEDTLTPPPSDAGSPFQSSPLSLGSRGSGSGGSGSDSEPDSPVFEDSKAKPEQRPSLHSRGMLDRSRLALCTLVFLCLSCNPLASLLGARGLPSPSDTTSVYHSPGRNVLGTESRDGPGWAQWLLPPVVWLLNGLLVLVSLVLLFVYGEPVTRPHSGPAVYFWRHRKQADLDLARGDFAQAAQQLWLALRALGRPLPTSHLDLACSLLWNLIRHLLQRLWVGRWLAGRAGGLQQDCALRVDASASARDAALVYHKLHQLHTMGKHTGGHLTATNLALSALNLAECAGDAVSVATLAEIYVAAALRVKTSLPRALHFLTRFFLSSARQACLAQSGSVPPAMQWLCHPVGHRFFVDGDWSVLSTPWESLYSLAGNPVDPLAQVTQLFREHLLERALNCVTQPNPSPGSADGDKEFSDALGYLQLLNSCSDAAGAPAYSFSISSSMATTTGVDPVAKWWASLTAVVIHWLRRDEEAAERLCPLVEHLPRVLQESERPLPRAALHSFKAARALLGCAKAESGPASLTICEKASGYLQDSLATTPASSSIDKAVQLFLCDLLLVVRTSLWRQQQPPAPAPAAQGTSSRPQASALELRGFQRDLSSLRRLAQSFRPAMRRVFLHEATARLMAGASPTRTHQLLDRSLRRRAGPGGKGGAVAELEPRPTRREHAEALLLASCYLPPGFLSAPGQRVGMLAEAARTLEKLGDRRLLHDCQQMLMRLGGGTTVTSRLDPVSPASAPLSLATLVPCSFCPASKL

SEQ ID NO: 871260 - protein, 761 aa, Homo sapiens
MEGVKTEVEDTLTPPPSDAGSPFQSSPLSLGSRGSGSGGSGSDSEPDSPVFEDSKAKPEQRPSLHSRGMLDRSRLALCTLVFLCLSCNPLASLLGARGLPSPSDTTSVYHSPGRNVLGTESRDGPGWAQWLLPPVVWLLNGLLVLVSLVLLFVYGEPVTRPHSGPAVYFWRHRKQADLDLARGDFAQAAQQLWLALRALGRPLPTSHLDLACSLLWNLIRHLLQRLWVGRWLAGRAGGLQQDCALRVDASASARDAALVYHKLHQLHTMGKHTGGHLTATNLALSALNLAECAGDAVSVATLAEIYVAAALRVKTSLPRALHFLTRFFLSSARQACLAQSGSVPPAMQWLCHPVGHRFFVDGDWSVLSTPWESLYSLAGNPVDPLAQVTQLFREHLLERALNCVTQPNPSPGSADGDKEFSDALGYLQLLNSCSDAAGAPAYSFSISSSMATTTGVDPVAKWWASLTAVVIHWLRRDEEAAERLCPLVEHLPRVLQESERPLPRAALHSFKAARALLGCAKAESGPASLTICEKASGYLQDSLATTPASSSIDKAVQLFLCDLLLVVRTSLWRQQQPPAPAPAAQGTSSRPQASALELRGFQRDLSSLRRLAQSFRPAMRRVFLHEATARLMAGASPTRTHQLLDRSLRRRAGPGGKGGAVAELEPRPTRREHAEALLLASCYLPPGFLSAPGQRVGMLAEAARTLEKLGDRRLLHDCQQMLMRLGGGTTVTSRLDPVSPASAPLSLATLVPCSFCPASKL

SEQ ID NO: 871261 - protein, 493 aa, Homo sapiens
MGKHTGGHLTATNLALSALNLAECAGDAVSVATLAEIYVAAALRVKTSLPRALHFLTRFFLSSARQACLAQSGSVPPAMQWLCHPVGHRFFVDGDWSVLSTPWESLYSLAGNPVDPLAQVTQLFREHLLERALNCVTQPNPSPGSADGDKEFSDALGYLQLLNSCSDAAGAPAYSFSISSSMATTTGVDPVAKWWASLTAVVIHWLRRDEEAAERLCPLVEHLPRVLQESERPLPRAALHSFKAARALLGCAKAESGPASLTICEKASGYLQDSLATTPASSSIDKAVQLFLCDLLLVVRTSLWRQQQPPAPAPAAQGTSSRPQASALELRGFQRDLSSLRRLAQSFRPAMRRVFLHEATARLMAGASPTRTHQLLDRSLRRRAGPGGKGGAVAELEPRPTRREHAEALLLASCYLPPGFLSAPGQRVGMLAEAARTLEKLGDRRLLHDCQQMLMRLGGGTTVTSRLDPVSPASAPLSLATLVPCSFCPASKL

SEQ ID NO: 871262 - protein, 611 aa, Homo sapiens
MRGLVRGGIVRVQGPAVYFWRHRKQADLDLARGDFAQAAQQLWLALRALGRPLPTSHLDLACSLLWNLIRHLLQRLWVGRWLAGRAGGLQQDCALRVDASASARDAALVYHKLHQLHTMGKHTGGHLTATNLALSALNLAECAGDAVSVATLAEIYVAAALRVKTSLPRALHFLTRFFLSSARQACLAQSGSVPPAMQWLCHPVGHRFFVDGDWSVLSTPWESLYSLAGNPVDPLAQVTQLFREHLLERALNCVTQPNPSPGSADGDKEFSDALGYLQLLNSCSDAAGAPAYSFSISSSMATTTGVDPVAKWWASLTAVVIHWLRRDEEAAERLCPLVEHLPRVLQESERPLPRAALHSFKAARALLGCAKAESGPASLTICEKASGYLQDSLATTPASSSIDKAVQLFLCDLLLVVRTSLWRQQQPPAPAPAAQGTSSRPQASALELRGFQRDLSSLRRLAQSFRPAMRRVFLHEATARLMAGASPTRTHQLLDRSLRRRAGPGGKGGAVAELEPRPTRREHAEALLLASCYLPPGFLSAPGQRVGMLAEAARTLEKLGDRRLLHDCQQMLMRLGGGTTVTSRLDPVSPASAPLSLATLVPCSFCPASKL

SEQ ID NO: 871263 - protein, 1204 aa, Homo sapiens; identical to SEQ ID NO: 871258

SEQ ID NO: 871264 - protein, 1204 aa, Homo sapiens; identical to SEQ ID NO: 871258

SEQ ID NO: 871265 - protein, 1204 aa, Homo sapiens; identical to SEQ ID NO: 871258

SEQ ID NO: 871266 - protein, 554 aa, Homo sapiens
MDEPPFSEAALEQALGEPCDLDAALLTDIEGEVGAGRGRANGLDAPRAGADRGAMDCTFEDMLQLINNQDSDFPGLFDPPYAGSGAGGTDPASPDTSSPGSLSPPPATLSSSLEAFLSGPQAAPSPLSPPQPAPTPLKMYPSMPAFSPGPGIKEESVPLSILQTPTPQPLPGALLPQSFPAPAPPQFSSTPVLGYPSPPGGFSTGSPPGNTQQPLPGLPLASPPGVPPVSLHTQVQSVVPQQLLTVTAAPTAAPVTTTVTSQIQQVPVLLQPHFIKADSLLLTAMKTDGATVKAAGLSPLVSGTTVQTGPLPTLVSGGTILATVPLVVDAEKLPINRLAAGSKAPASAQSRGEKRTAHNAIEKRYRSSINDKIIELKDLVVGTEAKLNKSAVLRKAIDYIRFLQHSNQKLKQENLSLRTAVHKSKSLKDLVSACGSGGNTDVLMEGVKTEVEDTLTPPPSDAGSPFQSSPLSLGSRGSGSGGSGSDSEPDSPVFEDSKAKPEQRPSLHSRGMLDRSRLALCTLVFLCLSCNPLASLLGARGLPPHGHTSSSTAV

SEQ ID NO: 871267 - protein, 106 aa, Homo sapiens
MCAGAVAELEPRPTRREHAEALLLASCYLPPGFLSAPGQRVGMLAEAARTLEKLGDRRLLHDCQQMLMRLGGGTTVTSRLDPVSPASAPLSLATLVPCSFCPASKL

SEQ ID NO: 871268 - protein, 263 aa, Homo sapiens
MDEPPFSEAALEQALGEPCDLDAALLTDIEDMLQLINNQDSDFPGLFDPPYAGSGAGGTDPASPDTSSPGSLSPPPATLSSSLEAFLSGPQAAPSPLSPPQPAPTPLKMYPSMPAFSPGPGIKEESVPLSILQTPTPQPLPGALLPQSFPAPAPPQFSSTLCAFAVEGPRGAILTLRPAAMMVLTSGGRSGHCRGRAILGGPPPCSAGTLVAFFLLCTGKRGVHFPVLTEANLAFPDCKQGSAPEASLSVVGERRVHSVGQRA

SEQ ID NO: 871269 - protein, 800 aa, Homo sapiens
MDEPPFSEAALEQALGEPCDLDAALLTDIEGEVGAGRGRANGLDAPRAGADRGAMDCTFEDMLQLINNQDSDFPGLFDPPYAGSGAGGTDPASPDTSSPGSLSPPPATLSSSLEAFLSGPQAAPSPLSPPQPAPTPLKMYPSMPAFSPGPGIKEESVPLSILQTPTPQPLPGALLPQSFPAPAPPQFSSTPVLGYPSPPGGFSTGSPPGNTQQPLPGLPLASPPGVPPVSLHTQVQSVVPQQLLTVTAAPTAAPVTTTVTSQIQQVPVLLQPHFIKADSLLLTAMKTDGATVKAAGLSPLVSGTTVQTGPLPTLVSGGTILATVPLVVDAEKLPINRLAAGSKAPASAQSRGEKRTAHNAIEKRYRSSINDKIIELKDLVVGTEAKLNKSAVLRKAIDYIRFLQHSNQKLKQENLSLRTAVHKSKSLKDLVSACGSGGNTDVLMEGVKTEVEDTLTPPPSDAGSPFQSSPLSLGSRGSGSGGSGSDSEPDSPVFEDSKVGPATVPPSPLPAISSEPHDRAGKTLTDPTSHFIDRITEAWSHVGSHSKVGRILTPPFPAPCSLGSLRFCPHHPAQPHQAKPEQRPSLHSRGMLDRSRLALCTLVFLCLSCNPLASLLGARGLPSPSDTTSVYHSPGRNVLGTESRDGPGWAQWLLPPVVWLLNGLLVLVSLVLLFVYGEPVTRPHSGPAVYFWRHRKQADLDLARGDFAQAAQQLWLALRALGRPLPTSHLDLACSLLWNLIRHLLQRLWVGRWLAGRAGGLQQDCALRVDASASARDAALVYHKLHQLHTMGRTERGAGS

SEQ ID NO: 871270 - protein, 1174 aa, Homo sapiens
MDEPPFSEAALEQALGEPCDLDAALLTDIEDMLQLINNQDSDFPGLFDPPYAGSGAGGTDPASPDTSSPGSLSPPPATLSSSLEAFLSGPQAAPSPLSPPQPAPTPLKMYPSMPAFSPGPGIKEESVPLSILQTPTPQPLPGALLPQSFPAPAPPQFSSTPVLGYPSPPGGFSTGSPPGNTQQPLPGLPLASPPGVPPVSLHTQVQSVVPQQLLTVTAAPTAAPVTTTVTSQIQQVPVLLQPHFIKADSLLLTAMKTDGATVKAAGLSPLVSGTTVQTGPLPTLVSGGTILATVPLVVDAEKLPINRLAAGSKAPASAQSRGEKRTAHNAIEKRYRSSINDKIIELKDLVVGTEAKLNKSAVLRKAIDYIRFLQHSNQKLKQENLSLRTAVHKSKSLKDLVSACGSGGNTDVLMEGVKTEVEDTLTPPPSDAGSPFQSSPLSLGSRGSGSGGSGSDSEPDSPVFEDSKAKPEQRPSLHSRGMLDRSRLALCTLVFLCLSCNPLASLLGARGLPSPSDTTSVYHSPGRNVLGTESRDGPGWAQWLLPPVVWLLNGLLVLVSLVLLFVYGEPVTRPHSGPAVYFWRHRKQADLDLARGDFAQAAQQLWLALRALGRPLPTSHLDLACSLLWNLIRHLLQRLWVGRWLAGRAGGLQQDCALRVDASASARDAALVYHKLHQLHTMGKHTGGHLTATNLALSALNLAECAGDAVSVATLAEIYVAAALRVKTSLPRALHFLTRFFLSSARQACLAQSGSVPPAMQWLCHPVGHRFFVDGDWSVLSTPWESLYSLAGNPVDPLAQVTQLFREHLLERALNCVTQPNPSPGSADGDKEFSDALGYLQLLNSCSDAAGAPAYSFSISSSMATTTGVDPVAKWWASLTAVVIHWLRRDEEAAERLCPLVEHLPRVLQESERPLPRAALHSFKAARALLGCAKAESGPASLTICEKASGYLQDSLATTPASSSIDKAVQLFLCDLLLVVRTSLWRQQQPPAPAPAAQGTSSRPQASALELRGFQRDLSSLRRLAQSFRPAMRRVFLHEATARLMAGASPTRTHQLLDRSLRRRAGPGGKGGAVAELEPRPTRREHAEALLLASCYLPPGFLSAPGQRVGMLAEAARTLEKLGDRRLLHDCQQMLMRLGGGTTVTSRLDPVSPASAPLSLATLVPCSFCPASKL

SEQ ID NO: 871271 - protein, 152 aa, Homo sapiens
LTSGARSGHCRGRAMLGGPPPCSAGTLVAFFRLAHPGPECGPPAATDSHSCPHGSPCNDHCDLADPAGPGPAAAPLHQGRLAASDSHEDRRSHCEGGRSQSPGLWHHCADRAFADPGEWRNHLGNSPTGRRCGEAAYQPARSMVNNVTAIYQ

SEQ ID NO: 871272 - protein, 1143 aa, Homo sapiens
MLQLINNQDSDFPGLFDPPYAGSGAGGTDPASPDTSSPGSLSPPPATLSSSLEAFLSGPQAAPSPLSPPQPAPTPLKMYPSMPAFSPGPGIKEESVPLSILQTPTPQPLPGALLPQSFPAPAPPQFSSTPVLGYPSPPGGFSTGSPPGNTQQPLPGLPLASPPGVPPVSLHTQVQSVVPQQLLTVTAAPTAAPVTTTVTSQIQQVPVLLQPHFIKADSLLLTAMKTDGATVKAAGLSPLVSGTTVQTGPLPTLVSGGTILATVPLVVDAEKLPINRLAAGSKAPASAQSRGEKRTAHNAIEKRYRSSINDKIIELKDLVVGTEAKLNKSAVLRKAIDYIRFLQHSNQKLKQENLSLRTAVHKSKSLKDLVSACGSGGNTDVLMEGVKTEVEDTLTPPPSDAGSPFQSSPLSLGSRGSGSGGSGSDSEPDSPVFEDSKAKPEQRPSLHSRGMLDRSRLALCTLVFLCLSCNPLASLLGARGLPSPSDTTSVYHSPGRNVLGTESRDGPGWAQWLLPPVVWLLNGLLVLVSLVLLFVYGEPVTRPHSGPAVYFWRHRKQADLDLARGDFAQAAQQLWLALRALGRPLPTSHLDLACSLLWNLIRHLLQRLWVGRWLAGRAGGLQQDCALRVDASASARDAALVYHKLHQLHTMGKHTGGHLTATNLALSALNLAECAGDAVSVATLAEIYVAAALRVKTSLPRALHFLTRFFLSSARQACLAQSGSVPPAMQWLCHPVGHRFFVDGDWSVLSTPWESLYSLAGNPVDPLAQVTQLFREHLLERALNCVTQPNPSPGSADGDKEFSDALGYLQLLNSCSDAAGAPAYSFSISSSMATTTGVDPVAKWWASLTAVVIHWLRRDEEAAERLCPLVEHLPRVLQESERPLPRAALHSFKAARALLGCAKAESGPASLTICEKASGYLQDSLATTPASSSIDKAVQLFLCDLLLVVRTSLWRQQQPPAPAPAAQGTSSRPQASALELRGFQRDLSSLRRLAQSFRPAMRRVFLHEATARLMAGASPTRTHQLLDRSLRRRAGPGGKGGAVAELEPRPTRREHAEALLLASCYLPPGFLSAPGQRVGMLAEAARTLEKLGDRRLLHDCQQMLMRLGGGTTVTSRLDPVSPASAPLSLATLVPCSFCPASKL

SEQ ID NO: 871273 - protein, 1283 aa, Homo sapiens
MDEPPFSEAALEQALGEPCDLDAALLTDIEGEVGAGRGRANGLDAPRAGADRGAMDCTFEDMLQLINNQDSDFPGLFDPPYAGSGAGGTDPASPDTSSPGSLSPPPATLSSSLEAFLSGPQAAPSPLSPPQPAPTPLKMYPSMPAFSPGPGIKEESVPLSILQTPTPQPLPGALLPQSFPAPAPPQFSSTPVLGYPSPPGGFSTGSPPGNTQQPLPGLPLASPPGVPPVSLHTQVQSVVPQQLLTVTAAPTAAPVTTTVTSQIQQVPVLLQPHFIKADSLLLTAMKTDGATVKAAGLSPLVSGTTVQTGPLPTLVSGGTILATVPLVVDAEKLPINRLAAGSKAPASAQSRGEKRTAHNAIEKRYRSSINDKIIELKDLVVGTEAKLNKSAVLRKAIDYIRFLQHSNQKLKQENLSLRTAVHKSKSLKDLVSACGSGGNTDVLMEGVKTEVEDTLTPPPSDAGSPFQSSPLSLGSRGSGSGGSGSDSEPDSPVFEDSKVGPATVPPSPLPAISSEPHDRAGKTLTDPTSHFIDRITEAWSHVGSHSKVGRILTPPFPAPCSLGSLRFCPHHPAQPHQAKPEQRPSLHSRGMLDRSRLALCTLVFLCLSCNPLASLLGARGLPSPSDTTSVYHSPGRNVLGTESRDGPGWAQWLLPPVVWLLNGLLVLVSLVLLFVYGEPVTRPHSGPAVYFWRHRKQADLDLARGDFAQAAQQLWLALRALGRPLPTSHLDLACSLLWNLIRHLLQRLWVGRWLAGRAGGLQQDCALRVDASASARDAALVYHKLHQLHTMGKHTGGHLTATNLALSALNLAECAGDAVSVATLAEIYVAAALRVKTSLPRALHFLTRFFLSSARQACLAQSGSVPPAMQWLCHPVGHRFFVDGDWSVLSTPWESLYSLAGNPVDPLAQVTQLFREHLLERALNCVTQPNPSPGSADGDKEFSDALGYLQLLNSCSDAAGAPAYSFSISSSMATTTGVDPVAKWWASLTAVVIHWLRRDEEAAERLCPLVEHLPRVLQESERPLPRAALHSFKAARALLGCAKAESGPASLTICEKASGYLQDSLATTPASSSIDKAVQLFLCDLLLVVRTSLWRQQQPPAPAPAAQGTSSRPQASALELRGFQRDLSSLRRLAQSFRPAMRRVFLHEATARLMAGASPTRTHQLLDRSLRRRAGPGGKGGAVAELEPRPTRREHAEALLLASCYLPPGFLSAPGQRVGMLAEAARTLEKLGDRRLLHDCQQMLMRLGGGTTVTSRLDPVSPASAPLSLATLVPCSFCPASKL

SEQ ID NO: 871274 - protein, 1123 aa, Homo sapiens
MDEPPFSEAALEQALGEPCDLDAALLTDIEGEVGAGRGRANGLDAPRAGADRGAMDCTFEDMLQLINNQDSDFPGLFDPPYAGSGAGGTDPASPDTSSPGSLSPPPATLSSSLEAFLSGPQAAPSPLSPPQPAPTPLKMYPSMPAFSPGPGIKEESVPLSILQTPTPQPLPGALLPQSFPAPAPPQFSSTPVLGYPSPPGGFSTGSPPGNTQQPLPGLPLASPPGVPPVSLHTQVQSVVPQQLLTVTAAPTAAPVTTTVTSQIQQVPVLLQPHFIKADSLLLTAMKTDGATVKAAGLSPLVSGTTVQTGPLPTLVSGGTILATVPLVVDAEKLPINRLAAGSKAPASAQSRGEKRTAHNAIEKRYRSSINDKIIELKDLVVGTEAKLNKSAVLRKAIDYIRFLQHSNQKLKQENLSLRTAVHKSKSLKDLVSACGSGGNTDVLMEGVKTEVEDTLTPPPSDAGSPFQSSPLSLGSRGSGSGGSGSDSEPDSPVFEDSKAKPEQRPSLHSRGMLDRSRLALCTLVFLCLSCNPLASLLGARGLPSPSDTTSVYHSPGRNVLGTESRDGPGWAQWLLPPVVWLLNGLLVLVSLVLLFVYGEPVTRPHSGPAVYFWRHRKQADLDLARGDFAQAAQQLWLALRALGRPLPTSHLDLACSLLWNLIRHLLQRLWVGRWLAGRAGGLQQDCALRVDASASARDAALVYHKLHQLHTMGKHTGGHLTATNLALSALNLAECAGDAVSVATLAEIYVAAALRVKTSLPRALHFLTRFFLSSARQACLAQSGSVPPAMQWLCHPVGHRFFVDGDWSVLSTPWESLYSLAGNPVDPLAQVTQLFREHLLERALNCVTQPNPSPGSADGDKEFSDALGYLQLLNSCSDAAGAPAYSFSISSSMATTTGVDPVAKWWASLTAVVIHWLRRDEEAAERLCPLVEHLPRVLQESERPLPRAALHSFKAARALLGCAKAESGPASLTICEKASGYLQDSLATTPASSSIDKAVQLFLCDLLLVVRTSLWRQQQPPAPAPAAQGTSSRPQASALELRGFQRDLSSLRRLAQSFRPAMRRVFLHEATARLMAGASPTRTHQLLDRSLRRRAGPGGKGGEGAAADQGCAVCSAGKGAHGM

SEQ ID NO: 871275 - protein, 649 aa, Homo sapiens
SVQKFDLGIPRALNAPIHLLKRLQAFGSGYRGVVVLKDANNIQRRGIVRVQGPAVYFWRHRKQADLDLARGDFAQAAQQLWLALRALGRPLPTSHLDLACSLLWNLIRHLLQRLWVGRWLAGRAGGLQQDCALRVDASASARDAALVYHKLHQLHTMGKHTGGHLTATNLALSALNLAECAGDAVSVATLAEIYVAAALRVKTSLPRALHFLTRFFLSSARQACLAQSGSVPPAMQWLCHPVGHRFFVDGDWSVLSTPWESLYSLAGNPVDPLAQVTQLFREHLLERALNCVTQPNPSPGSADGDKEFSDALGYLQLLNSCSDAAGAPAYSFSISSSMATTTGVDPVAKWWASLTAVVIHWLRRDEEAAERLCPLVEHLPRVLQESERPLPRAALHSFKAARALLGCAKAESGPASLTICEKASGYLQDSLATTPASSSIDKAVQLFLCDLLLVVRTSLWRQQQPPAPAPAAQGTSSRPQASALELRGFQRDLSSLRRLAQSFRPAMRRVFLHEATARLMAGASPTRTHQLLDRSLRRRAGPGGKGGAVAELEPRPTRREHAEALLLASCYLPPGFLSAPGQRVGMLAEAARTLEKLGDRRLLHDCQQMLMRLGGGTTVTSRLDPVSPASAPLSLATLVPCSFCPASKL

SEQ ID NO: 871276 - protein, 1204 aa, Homo sapiens; identical to SEQ ID NO: 871258

SEQ ID NO: 871277 - protein, 1204 aa, Homo sapiens; identical to SEQ ID NO: 871258

SEQ ID NO: 871278 - protein, 1143 aa, Homo sapiens
MDEPPFSEAALEQALGEPCDLDAALLTDIEGEVGAGRGRANGLDAPRAGADRGAMDCTFEDMLQLINNQDSDFPGLFDPPYAGSGAGGTDPASPDTSSPGSLSPPPATLSSSLEAFLSGPQAAPSPLSPPQPAPTPLKMYPSMPAFSPGPGIKEESVPLSILQTPTPQPLPGALLPQSFPAPAPPQFSSTPVLGYPSPPGGFSTGSPPGNTQQPLPGLPLASPPGVPPVSLHTQVQSVVPQQLLTVTAAPTAAPVTTTVTSQIQQVPVLLQPHFIKADSLLLTAMKTDGATVKAAGLSPLVSGTTVQTGPLPTLVSGGTILATVPLVVDAEKLPINRLAAGSKAPASAQSRGEKRTAHNAIEKRYRSSINDKIIELKDLVVGTEAKLNKSAVLRKAIDYIRFLQHSNQKLKQENLSLRTAVHKSKSLKDLVSACGSGGNTDVLMEGVKTEVEDTLTPPPSDAGSPFQSSPLSLGSRGSGSGGSGSDSEPDSPVFEDSKAKPEQRPSLHSRGMLDRSRLALCTLVFLCLSCNPLASLLGARGLPSPSDTTSVYHSPGRNVLGTESRDGPGWAQWLLPPVVWLLNGLLVLVSLVLLFVYGEPVTRPHSGPAVYFWRHRKQADLDLARGDFAQAAQQLWLALRALGRPLPTSHLDLACSLLWNLIRHLLQRLWVGRWLAGRAGGLQQDCALRVDASASARDAALVYHKLHQLHTMGKHTGGHLTATNLALSALNLAECAGDAVSVATLAEIYVAAALRVKTSLPRALHFLTRFFLSSARQACLAQSGSVPPAMQWLCHPVGHRFFVDGDWSVLSTPWESLYSLAGNPVDPLAQVTQLFREHLLERALNCVTQPNPSPGSADGDKEFSDALGYLQLLNSCSDAAGAPAYSFSISSSMATTTGVDPVAKWWASLTAVVIHWLRRDEEAAERLCPLVEHLPRVLQESERPLPRAALHSFKAARALLGCAKAESGPASLTICEKASGYLQDSLATTPASSSIDKAVQLFLCDLLLVVRTSLWRQQQPPAPAPAAQGTSSRPQASALELRGFQRDLSSLRRLAQSFRPAMRRVFLHEATARLMAGASPTRTHQLLDRSLRRRAGPGGKGVLCLQLMDVLTSESAWALPQHLGKGFPSPSGHKVPGWHGRMD

SEQ ID NO: 871279 - protein, 615 aa, Homo sapiens
MDEPPFSEAALEQALGEPCDLDAALLTDIEGEVGAGRGRANGLDAPRAGADRGAMDCTFEDMLQLINNQDSDFPGLFDPPYAGSGAGGTDPASPDTSSPGSLSPPPATLSSSLEAFLSGPQAAPSPLSPPQPAPTPLKMYPSMPAFSPGPGIKEESVPLSILQTPTPQPLPGALLPQSFPAPAPPQFSSTPVLGYPSPPGGFSTGSPPGNTQQPLPGLPLASPPGVPPVSLHTQVQSVVPQQLLTVTAAPTAAPVTTTVTSQIQQVPVLLQPHFIKADSLLLTAMKTDGATVKAAGLSPLVSGTTVQTGPLPTLVSGGTILATVPLVVDAEKLPINRLAAGSKAPASAQSRGEKRTAHNAIEKRYRSSINDKIIELKDLVVGTEAKLNKSAVLRKAIDYIRFLQHSNQKLKQENLSLRTAVHKSKSLKDLVSACGSGGNTDVLMEGVKTEVEDTLTPPPSDAGSPFQSSPLSLGSRGSGSGGSGSDSEPDSPVFEDSKAKPEQRPSLHSRGMLDRSRLALCTLVFLCLSCNPLASLLGARGLPSPSDTTSVYHSPGRNVLGTESRDGPGWAQWLLPPVVWLLNGLLVLVSLVLLFVYGEPVTRPHSGPAVLSLLT

SEQ ID NO: 871280 - protein, 430 aa, Homo sapiens
MDEPPFSEAALEQALGEPCDLDAALLTDIEGEVGAGRGRANGLDAPRAGADRGAMDCTFEDMLQLINNQDSDFPGLFDPPYAGSGAGGTDPASPDTSSPGSLSPPPATLSSSLEAFLSGPQAAPSPLSPPQPAPTPLKMYPSMPAFSPGPGIKEESVPLSILQTPTPQPLPGALLPQSFPAPAPPQFSSTPVLGYPSPPGGFSTGSPPGNTQQPLPGLPLASPPGVPPVSLHTQVQSVVPQQLLTVTAAPTAAPVTTTVTSQIQQVPVLLQPHFIKADSLLLTAMKTDGATVKAAGLSPLVSGTTVQTGPLPTLVSGGTILATVPLVVDAEKLPINRLAAGSKAPASAQSRGEKRTAHNAIEKRYRSSINDKIIELKDLVVGTEAKLNKSAVLRKAIDYIRFLQHSNQKLKQENLSLRTAVHKSSESWLY

SEQ ID NO: 871281 - protein, 878 aa, Homo sapiens
TRAHTRDGKSRPEPLEGAGTATLIRAQMAQWEMLQNLDSPFQDQLHQLYSHSLLPVDIRQYLAVWIEDQNWQEAALGSDDSKATMLFFHFLDQLNYECGRCSQDPESLLLQHNLRKFCRDIQPFSQDPTQLAEMIFNLLLEEKRILIQAQRAQLEQGEPVLETPVESQQHEIESRILDLRAMMEKLVKSISQLKDQQDVFCFRYKIQAKGKTPSLDPHQTKEQKILQETLNELDKRRKEVLDASKALLGRLTTLIELLLPKLEEWKAQQQKACIRAPIDHGLEQLETWFTAGAKLLFHLRQLLKELKGLSCLVSYQDDPLTKGVDLRNAQVTELLQRLLHRAFVVETQPCMPQTPHRPLILKTGSKFTVRTRLLVRLQEGNESLTVEVSIDRNPPQLQGFRKFNILTSNQKTLTPEKGQSQGLIWDFGYLTLVEQRSGGSGKGSNKGPLGVTEELHIISFTVKYTYQGLKQELKTDTLPVVIISNMNQLSIAWASVLWFNLLSPNLQNQQFFSNPPKAPWSLLGPALSWQFSSYVGRGLNSDQLSMLRNKLFGQNCRTEDPLLSWADFTKRESPPGKLPFWTWLDKILELVHDHLKDLWNDGRIMGFVSRSQERRLLKKTMSGTFLLRFSESSEGGITCSWVEHQDDDKVLIYSVQPYTKEVLQSLPLTEIIRHYQLLTEENIPENPLRFLYPRIPRDEAFGCYYQEKVNLQERRKYLKHRLIVVSNRQVDELQQPLELKPEPELESLELELGLVPEPELSLDLEPLLKAGLDLGPELESVLESTLEPVIEPTLCMVSQTVPEPDQGPVSQPVPEPDLPCDLRHLNTEPMEIFRNCVKIEEIMPNGDPLLAGQNTVDEVYVSRPSHFYTDGPLMPSDF

SEQ ID NO: 871282 - protein, 878 aa, Homo sapiens; identical to SEQ ID NO: 871281

SEQ ID NO: 871283 - protein, 878 aa, Homo sapiens; identical to SEQ ID NO: 871281

SEQ ID NO: 871284 - protein, 878 aa, Homo sapiens; identical to SEQ ID NO: 871281

SEQ ID NO: 871285 - protein, 1016 aa, Homo sapiens
TRAHTRDGKSRPEPLEGAGTATLIRAQMAQWEMLQNLDSPFQDQLHQLYSHSLLPVDIRQYLAVWIEDQNWQEAALGSDDSKATMLFFHFLDQLNYECGRCSQDPESLLLQHNLRKFCRDIQPFSQDPTQLAEMIFNLLLEEKRILIQAQRAQLEQGEPVLETPVESQQHEIESRILDLRAMMEKLVKSISQLKDQQDVFCFRYKIQAKGRKHIEGLEKDKCLLEKPELEVNRRKLQMSSSHCQTHPTDYSPAAVQSWKCFVEAELEVQLRDSKCGGNAWKTNSVLFEGVSGPSMTIQNLPEGPTGACDFAWFPFLPPQNSSFLTLTETPVRKERKEPWTDSCSHHPGKTPSLDPHQTKEQKILQETLNELDKRRKEVLDASKALLGRLTTLIELLLPKLEEWKAQQQKACIRAPIDHGLEQLETWFTAGAKLLFHLRQLLKELKGLSCLVSYQDDPLTKGVDLRNAQVTELLQRLLHRAFVVETQPCMPQTPHRPLILKTGSKFTVRTRLLVRLQEGNESLTVEVSIDRNPPQLQGFRKFNILTSNQKTLTPEKGQSQGLIWDFGYLTLVEQRSGGSGKGSNKGPLGVTEELHIISFTVKYTYQGLKQELKTDTLPVVIISNMNQLSIAWASVLWFNLLSPNLQNQQFFSNPPKAPWSLLGPALSWQFSSYVGRGLNSDQLSMLRNKLFGQNCRTEDPLLSWADFTKRESPPGKLPFWTWLDKILELVHDHLKDLWNDGRIMGFVSRSQERRLLKKTMSGTFLLRFSESSEGGITCSWVEHQDDDKVLIYSVQPYTKEVLQSLPLTEIIRHYQLLTEENIPENPLRFLYPRIPRDEAFGCYYQEKVNLQERRKYLKHRLIVVSNRQVDELQQPLELKPEPELESLELELGLVPEPELSLDLEPLLKAGLDLGPELESVLESTLEPVIEPTLCMVSQTVPEPDQGPVSQPVPEPDLPCDLRHLNTEPMEIFRNCVKIEEIMPNGDPLLAGQNTVDEVYVSRPSHFYTDGPLMPSDF

SEQ ID NO: 871286 - protein, 393 aa, Homo sapiens
MNQLSIAWASVLWFNLLSPNLQNQQFFSNPPKAPWSLLGPALSWQFSSYVGRGLNSDQLSMLRNKLFGQNCRTEDPLLSWADFTKRESPPGKLPFWTWLDKILELVHDHLKDLWNDGRIMGFVSRSQERRLLKKTMSGTFLLRFSESSEGGITCSWVEHQDDDKVLIYSVQPYTKEVLQSLPLTEIIRHYQLLTEENIPENPLRFLYPRIPRDEAFGCYYQEKVNLQERRKYLKHRLIVVSNRQVDELQQPLELKPEPELESLELELGLVPEPELSLDLEPLLKAGLDLGPELESVLESTLEPVIEPTLCMVSQTVPEPDQGPVSQPVPEPDLPCDLRHLNTEPMEIFRNCVKIEEIMPNGDPLLAGQNTVDEVYVSRPSHFYTDGPLMPSDF

SEQ ID NO: 871287 - protein, 334 aa, Homo sapiens
MSVAICPTGQNCRTEDPLLSWADFTKRESPPGKLPFWTWLDKILELVHDHLKDLWNDGRIMGFVSRSQERRLLKKTMSGTFLLRFSESSEGGITCSWVEHQDDDKVLIYSVQPYTKEVLQSLPLTEIIRHYQLLTEENIPENPLRFLYPRIPRDEAFGCYYQEKVNLQERRKYLKHRLIVVSNRQVDELQQPLELKPEPELESLELELGLVPEPELSLDLEPLLKAGLDLGPELESVLESTLEPVIEPTLCMVSQTVPEPDQGPVSQPVPEPDLPCDLRHLNTEPMEIFRNCVKIEEIMPNGDPLLAGQNTVDEVYVSRPSHFYTDGPLMPSDF

SEQ ID NO: 871288 - protein, 274 aa, Homo sapiens [sequence omitted]

SEQ ID NO: 871289 - protein, 393 aa, Homo sapiens; identical to SEQ ID NO: 871286

SEQ ID NO: 871290 - protein, 744 aa, Homo sapiens
MAQWEMLQNLDSPFQDQLHQLYSHSLLPVDIRQYLAVWIEDQNWQEAALGSDDSKATMLFFHFLDQLNYECGRCSQDPESLLLQHNLRKFCRDIQPFSQDPTQLAEMIFNLLLEEKRILIQAQRAQLEQGEPVLETPVESQQHEIESRILDLRAMMEKLVKSISQLKDQQDVFCFRYKIQAKGKTPSLDPHQTKEQKILQETLNELDKRRKEVLDASKALLGRLTTLIELLLPKLEEWKAQQQKACIRAPIDHGLEQLETWFTAGAKLLFHLRQLLKELKGLSCLVSYQDDPLTKGVDLRNAQVTELLQRLLHRAFVVETQPCMPQTPHRPLILKTGSKFTVRTRLLVRLQEGNESLTVEVSIDRNPPQLQGFRKFNILTSNQKTLTPEKGQSQGLIWDFGYLTLVEQRSGGSGKGSNKGPLGVTEELHIISFTVKYTYQGLKQELKTDTLPVVIISNMNQLSIAWASVLWFNLLSPNLQNQQFFSNPPKAPWSLLGPALSWQFSSYVGRGLNSDQLSMLRNKLFGQNCRTEDPLLSWADFTKRESPPGKLPFWTWLDKILELVHDHLKDLWNDGRIMGFVSRSQERRLLKKTMSGTFLLRFSESSEGGITCSWVEHQDDDKVLIYSVQPYTKEVLQSLPLTEIIRHYQLLTEENIPENPLRFLYPRIPRDEAFGCYYQEKVNLQERRKYLKHRLIVVSNRQVDELQQPLELKPEPELDGIGPWWGAQTQDRTPFLSSIPSCLG

SEQ ID NO: 871291 - protein, 292 aa, Homo sapiens
GAGCWAVSHSCSLCSRRIMGFVSRSQERRLLKKTMSGTFLLRFSESSEGGITCSWVEHQDDDKVLIYSVQPYTKEVLQSLPLTEIIRHYQLLTEENIPENPLRFLYPRIPRDEAFGCYYQEKVNLQERRKYLKHRLIVVSNRQVDELQQPLELKPEPELESLELELGLVPEPELSLDLEPLLKAGLDLGPELESVLESTLEPVIEPTLCMVSQTVPEPDQGPVSQPVPEPDLPCDLRHLNTEPMEIFRNCVKIEEIMPNGDPLLAGQNTVDEVYVSRPSHFYTDGPLMPSDF

SEQ ID NO: 871292 - protein, 191 aa, Homo sapiens
TRAHTRDGKSRPEPLEGAGTATLIRAQMAQWEMLQNLDSPFQDQLHQLYSHSLLPVDIRQYLAVWIEDQNWQEAALGSDDSKATMLFFHFLDQLNYECGRCSQDPESLLLQHNLRKFCRDIQPFSQDPTQLAEMIFNLLLEEKRILIQAQRAQLEQGEPVLETPVESQQHEIESRILDLRAMMEVSRCGRS

SEQ ID NO: 871293 - protein, 191 aa, Homo sapiens; identical to SEQ ID NO: 871292

SEQ ID NO: 871294 - protein, 191 aa, Homo sapiens; identical to SEQ ID NO: 871292

SEQ ID NO: 871295 - protein, 878 aa, Homo sapiens; identical to SEQ ID NO: 871281

SEQ ID NO: 871296 - protein, 878 aa, Homo sapiens; identical to SEQ ID NO: 871281

SEQ ID NO: 871297 - protein, 671 aa, Homo sapiens
MPGKTPSLDPHQTKEQKILQETLNELDKRRKEVLDASKALLGRLTTLIELLLPKLEEWKAQQQKACIRAPIDHGLEQLETWFTAGAKLLFHLRQLLKELKGLSCLVSYQDDPLTKGVDLRNAQVTELLQRLLHRAFVVETQPCMPQTPHRPLILKTGSKFTVRTRLLVRLQEGNESLTVEVSIDRNPPQLQGFRKFNILTSNQKTLTPEKGQSQGLIWDFGYLTLVEQRSGGSGKGSNKGPLGVTEELHIISFTVKYTYQGLKQELKTDTLPVVIISNMNQLSIAWASVLWFNLLSPNLQNQQFFSNPPKAPWSLLGPALSWQFSSYVGRGLNSDQLSMLRNKLFGQNCRTEDPLLSWADFTKRESPPGKLPFWTWLDKILELVHDHLKDLWNDGRIMGFVSRSQERRLLKKTMSGTFLLRFSESSEGGITCSWVEHQDDDKVLIYSVQPYTKEVLQSLPLTEIIRHYQLLTEENIPENPLRFLYPRIPRDEAFGCYYQEKVNLQERRKYLKHRLIVVSNRQVDELQQPLELKPEPELESLELELGLVPEPELSLDLEPLLKAGLDLGPELESVLESTLEPVIEPTLCMVSQTVPEPDQGPVSQPVPEPDLPCDLRHLNTEPMEIFRNCVKIEEIMPNGDPLLAGQNTVDEVYVSRPSHFYTDGPLMPSDF

SEQ ID NO: 871298 - protein, 274 aa, Homo sapiens [sequence omitted]

SEQ ID NO: 871299 - protein, 393 aa, Homo sapiens; identical to SEQ ID NO: 871286

SEQ ID NO: 871300 - protein, 274 aa, Homo sapiens [sequence omitted]

SEQ ID NO: 871301 - protein, 274 aa, Homo sapiens [sequence omitted]

SEQ ID NO: 871302 - protein, 191 aa, Homo sapiens; identical to SEQ ID NO: 871292

SEQ ID NO: 871303 - protein, 191 aa, Homo sapiens; identical to SEQ ID NO: 871292

SEQ ID NO: 871304 - protein, 390 aa, Homo sapiens
MADGNEGPQSPFHHILPKCKLARDLKEAYDSLCTSGVVRLHINSWLEVSFCLPHKIHYAASSLIPPEAIERSLKAIRPYHALLLLSDEKSLLGELPIDCSPALVRVIKTTSAVKNLQQLAQDADLALLQVFQLAAHLVYWGKAIIIYPLCENNVYMLSPNASVCLYSPLAEQFSHQFPSHDLPSVLAKFSLPVSLSEFRNPLAPAVQETQLIQMVVWMLQRRLLIQLHTYVCLMASPSEEEPRPREDDVPFTARVGGRSLSTPNALSFGSPTSSDDMTLTSPSMDNSSAELLPSGDSPLNQRMTENLLASLSEHERAAILSVPAAQNPEDLRMFARLLHYFRGRHHLEEIMYNENTRRSQLLMLFDKFRSVLVVTTHEDPVIAVFQALLP

SEQ ID NO: 871305 - protein, 660 aa, Homo sapiens
PIRTSKRAPVPQTRTVRLQTAPRNSVASRRPRACAFRCLRLRLRLRRSPGRRLSTSSGRCRRSLASPERGTWVSRVADTLPATRATMLMSRTAIPDKVSLCRPRLECSGVISACCNLTSRVQAILLPQPPECWDYRHPPPSEPCPPTDEQLVAGFSDVILATILATKSEMCGQKFELKIDNVRFVGHPTLLQHALGQISKTDPSPKREAPTMILFNVVFALRANADPSVINCLHNLSRRIATVLQHEERRCQYLTREAKLILALQDEVSAMADGNEGPQSPFHHILPKCKLARDLKEAYDSLCTSGVVRLHINSWLEVSFCLPHKIHYAASSLIPPEAIERSLKAIRPYHALLLLSDEKSLLGELPIDCSPALVRVIKTTSAVKNLQQLAQDADLALLQVFQLAAHLVYWGKAIIIYPLCENNVYMLSPNASVCLYSPLAEQFSHQFPSHDLPSVLAKFSLPVSLSEFRNPLAPAVQETQLIQMVVWMLQRRLLIQLHTYVCLMASPSEEEPRPREDDVPFTARVGGRSLSTPNALSFGSPTSSDDMTLTSPSMDNSSAELLPSGDSPLNQRMTENLLASLSEHERAAILSVPAAQNPEDLRMFARLLHYFRGRHHLEEIMYNENTRRSQLLMLFDKFRSVLVVTTHEDPVIAVFQALLP

SEQ ID NO: 871306 - protein, 466 aa, Homo sapiens
MCGQKFELKIDNVRFVGHPTLLQHALGQANADPSVINCLHNLSRRIATVLQHEERRCQYLTREAKLILALQDEVSAMADGNEGPQSPFHHILPKCKLARDLKEAYDSLCTSGVVRLHINSWLEVSFCLPHKIHYAASSLIPPEAIERSLKAIRPYHALLLLSDEKSLLGELPIDCSPALVRVIKTTSAVKNLQQLAQDADLALLQVFQLAAHLVYWGKAIIIYPLCENNVYMLSPNASVCLYSPLAEQFSHQFPSHDLPSVLAKFSLPVSLSEFRNPLAPAVQETQLIQMVVWMLQRRLLIQLHTYVCLMASPSEEEPRPREDDVPFTARVGGRSLSTPNALSFGSPTSSDDMTLTSPSMDNSSAELLPSGDSPLNQRMTENLLASLSEHERAAILSVPAAQNPEDLRMFARLLHYFRGRHHLEEIMYNENTRRSQLLMLFDKFRSVLVVTTHEDPVIAVFQALLP

SEQ ID NO: 871307 - protein, 335 aa, Homo sapiens
LEDLNSAPQPPRGIELEAESIRPYHALLLLSDEKSLLGELPIDCSPALVRVIKTTSAVKNLQQLAQDADLALLQVFQLAAHLVYWGKAIIIYPLCENNVYMLSPNASVCLYSPLAEQFSHQFPSHDLPSVLAKFSLPVSLSEFRNPLAPAVQETQLIQMVVWMLQRRLLIQLHTYVCLMASPSEEEPRPREDDVPFTARVGGRSLSTPNALSFGSPTSSDDMTLTSPSMDNSSAELLPSGDSPLNQRMTENLLASLSEHERAAILSVPAAQNPEDLRMFARLLHYFRGRHHLEEIMYNENTRRSQLLMLFDKFRSVLVVTTHEDPVIAVFQALLP

SEQ ID NO: 871308 - protein, 660 aa, Homo sapiens; identical to SEQ ID NO: 871305

SEQ ID NO: 871309 - protein, 483 aa, Homo sapiens
PIRTSKRAPVPQTRTVRLQTAPRNSVASRRPRACAFRCLRLRLRLRRSPGRRLSTSSGRCRRSLASPERGTWVSRVADTLPATRATMLMSRTAIPDKVSLCRPRLECSGVISACCNLTSRVQAILLPQPPECWDYRHPPPSEPCPPTDEQLVAGFSDVILATILATKSEMCGQKFELKIDNVRFVGHPTLLQHALGQISKTDPSPKREAPTMILFNVVFALRANADPSVINCLHNLSRRIATVLQHEERRCQYLTREAKLILALQDEVSAMADGNEGPQSPFHHILPKCKLARDLKEAYDSLCTSGVVRLHINSWLEVSFCLPHKIHYAASSLIPPEAIERSLKAIRPYHALLLLSDEKSLLGELPIDCSPALVRVIKTTSAVKNLQQLAQDADLALLQVFQLAAHLVYWGKAIIIYPLCENNVYMLSPNASVCLYSPLAEQFSHQFPSHDLPSVLAKFSLPVSLSEFRNPLAPAVQETPMSA

SEQ ID NO: 871310 - protein, 660 aa, Homo sapiens; identical to SEQ ID NO: 871305

SEQ ID NO: 871311 - protein, 660 aa, Homo sapiens; identical to SEQ ID NO: 871305

SEQ ID NO: 871312 - protein, 154 aa, Homo sapiens
MRCPPWLMEMKVLSPHSITSCPSASWPGTSRKLMTASSDDMTLTSPSMDNSSAELLPSGDSPLNQRMTENLLASLSEHERAAILSVPAAQNPEDLRMFARLLHYFRGRHHLEEIMYNENTRRSQLLMLFDKFRSVLVVTTHEDPVIAVFQALLP

SEQ ID NO: 871313 - protein, 115 aa, Homo sapiens
RGGGQPQSMDNSSAELLPSGDSPLNQRMTENLLASLSEHERAAILSVPAAQNPEDLRMFARLLHYFRGRHHLEEIMYNENTRRSQLLMLFDKFRSVLVVTTHEDPVIAVFQALLP

SEQ ID NO: 871314 - protein, 660 aa, Homo sapiens; identical to SEQ ID NO: 871305

SEQ ID NO: 871315 - protein, 390 aa, Homo sapiens; identical to SEQ ID NO: 871304

SEQ ID NO: 871316 - protein, 660 aa, Homo sapiens; identical to SEQ ID NO: 871305

SEQ ID NO: 871317 - protein, 724 aa, Homo sapiens
PIRTSKRAPVPQTRTVRLQTAPRNSVASRRPRACAFRCLRLRLRLRRSPGRRLSTSSGRCRRSLASPERGTWVSRVADTLPATRATMLMSRTAIPDKVSLCRPRLECSGVISACCNLTSRVQAILLPQPPECWDYRHPPPSEPCPPTDEQLVAGFSDVILATILATKSEMCGQKFELKIDNVRFVGHPTLLQHALGQISKTDPSPKREAPTMILFNVVFALRANADPSVINCLHNLSRRIATVLQHEERRCQYLTREAKLILALQDEVSAMADGNEGPQSPFHHILPKCKLARDLKEAYDSLCTSGVVRLHINSWLEVSFCLPHKIHYAASSLIPPEAIERSLKAIRPYHALLLLSDEKSLLGELPIDCSPALVRVIKTTSAVKNLQQLAQDADLALLQVFQLAAHLVYWGKAIIIYPLCENNVYMLSPNASVCLYSPLAEQFSHQFPSHDLPSVLAKFSLPVSLSEFRNPLAPAVQETQLIQMVVWMLQRRLLIQLHTYVCLMASPSEEEPRPREDDVPFTARVGGRSLSTPNALSFGSPTSSDDMTLTSPSMDNSSAELLPSGDSPLNQRMTENLLASLSEHERAAILSVPAAQNPEDLRMFARLLHYFRGRHHLEEIMYNENTRRSQLLMLFDKFRSVLVVTTHEDPVIAVFQALLPLRPGIGWMRAGRGPVKPAEPRCPCPWWFRCGAAALCVPTLPSSPCRTRRHLHAGGGPARTPVSG

SEQ ID NO: 871318 - protein, 660 aa, Homo sapiens; identical to SEQ ID NO: 871305

SEQ ID NO: 871319 - protein, 660 aa, Homo sapiens; identical to SEQ ID NO: 871305

SEQ ID NO: 871320 - protein, 628 aa, Homo sapiens
PIRTSKRAPVPQTRTVRLQTAPRNSVASRRPRACAFRCLRLRLRLRRSPGRRLSTSSGRCRRSLASPERGTWVSRVADTLPATRATMLMSRTAIPDKVSLCRPRLECSGVISACCNLTSRVQAILLPQPPECWDYRHPPPSEPCPPTDEQLVAGFSDVILATILATKSEMCGQKFELKIDNVRFVGHPTLLQHALGQISKTDPSPKREAPTMILFNVVFALRANADPSVINCLHNLSRRIATVLQHEERRCQYLTREAKLILALQDEVSAMADGNEGPQSPFHHILPKCKLARDLKEAYDSLCTSGVVRLHINSWLEVSFCLPHKIHYAASSLIPPEAIERSLKAIRPYHALLLLSDEKSLLGELPIDCSPALVRVIKTTSAVKNLQQLAQDADLALLQVFQLAAHLVYWGKAIIIYPLCENNVYMLSPNASVCLYSPLAEQFSHQFPSHDLPSVLAKFSLPVSLSEFRNPLAPAVQETQLIQMVVWMLQRRLLIQLHTYVCLMASPSEEEPRPREDDVPSMDNSSAELLPSGDSPLNQRMTENLLASLSEHERAAILSVPAAQNPEDLRMFARLLHYFRGRHHLEEIMYNENTRRSQLLMLFDKFRSVLVVTTHEDPVIAVFQALLP

SEQ ID NO: 871321 - protein, 400 aa, Homo sapiens
PIRTSKRAPVPQTRTVRLQTAPRNSVASRRPRACAFRCLRLRLRLRRSPGRRLSTSSGRCRRSLASPERGTWVSRVADTLPATRATMLMSRTAIPDKVSLCRPRLECSGVISACCNLTSRVQAILLPQPPECWDYRHPPPSEPCPPTDEQLVAGFSDVILATILATKSEMCGQKFELKIDNVRFVGHPTLLQHALGQISKTDPSPKREAPTMILFNVVFALRANADPSVINCLHNLSRRIATVLQHEERRCQYLTREAKLILALQDEVSAMADGNEGPQSPFHHILPKCKLARDLKEAYDSLCTSGVVRLHINSWLEVSFCLPHKIHYAASSLIPPEAIERSLKAIRPYHALLLLSDEKSLLGELPIDCSPALVRVIKTTSAVKNLQQLAQDALLPPRLP

SEQ ID NO: 871322 - protein, 68 aa, Homo sapiens
MGSRRPAHPCWGAVVAASLAFTTSSVQACGQLRADSQQWLFSRGLWGLVSGWAHTHPSLPGSFTTSAA

SEQ ID NO: 871323 - protein, 658 aa, Homo sapiens [sequence omitted]

SEQ ID NO: 871324 - protein, 658 aa, Homo sapiens [sequence omitted]

SEQ ID NO: 871325 - protein, 640 aa, Homo sapiens
MVPRLLLRAWPRGPAVGPGAPSRPLSAGSGPGQYLQRSIVPTMHYQDSLPRLPIPKLEDTIRRYLSAQKPLLNDGQFRKTEQFCKSFENGIGKELHEQLVALDKQNKHTSYISGPWFDMYLSARDSVVLNFNPFMAFNPDPKSEYNDQLTRATNMTVSAIRFLKTLRAGLLEPEVFHLNPAKSDTITFKRLIRFVPSSLSWYGAYLVNAYPLDMSQYFRLFNSTRLPKPSRDELFTDDKARHLLVLRKGNFYIFDVLDQDGNIVSPSEIQAHLKYILSDSSPAPEFPLAYLTSENRDIWAELRQKLMSSGNEESLRKVDSAVFCLCLDDFPIKDLVHLSHNMLHGDGTNRWFDKSFNLIIAKDGSTAIHFEHSWGDGVAVLRFFNEVFKDSTQTPAVTPQSQPATTDSTVTVQKLNFELTDALKTGITAAKEKFDATMKTLTIDCVQFQRGGKEFLKKRQYGQTVATYESCSTAAFKHGRTETIRPASVYTKRCSEAFVREPSRHSAGELQQMMVECSKYHGQLTKEAAMGQGFDRHLFALRHLAAAKGIILPELYLDPAYGQINHNVLSTSTLSSPAVNLGGFAPVVSDGFGVGYAVHDNWIGCNVSSYPGRNAREFLQCVEKALEDMFDALEGKSIKS

SEQ ID NO: 871326 - protein, 677 aa, Homo sapiens
  misc_feature (1)..(1): Xaa can be any naturally occurring amino acid
  misc_feature (3)..(3): Xaa can be any naturally occurring amino acid
  misc_feature (7)..(7): Xaa can be any naturally occurring amino acid
  misc_feature (11)..(11): Xaa can be any naturally occurring amino acid
XFXIALXGYRXREFPGRTHASARLLLRAWPRGPAVGPGAPSRPLSAGSGPGQYLQRSIVPTMHYQDSLPRLPIPKLEDTIRRYLSAQKPLLNDGQFRKTEQFCKSFENGIGKELHEQLVALDKQNKHTSYISGPWFDMYLSARDSVVLNFNPFMAFNPDPKSEYNDQLTRATNMTVSAIRFLKTLRAGLLEPEVFHLNPAKSDTITFKRLIRFVPSSLSWYGAYLVNAYPLDMSQYFRLFNSTRLPKPSRDELFTDDKARHLLVLRKGNFYIFDVLDQDGNIVSPSEIQAHLKYILSDSSPAPEFPLAYLTSENRDIWAELRQKLMSSGNEESLRKVDSAVFCLCLDDFPIKDLVHLSHNMLHGDGTNRWFDKSFNLIIAKDGSTAIHFEHSWGDGVAVLRFFNEVFKDSTQTPAVTPQSQPATTDSTVTVQKLNFELTDALKTGITAAKEKFDATMKTLTIDCVQFQRGGKEFLKKQKLSPDAVAQLAFQMAFLRQYGQTVATYESCSTAAFKHGRTETIRPASVYTKRCSEAFVREPSRHSAGELQQMMVECSKYHGQLTKEAAMGQGFDRHLFALRHLAAAKGIILPELYLDPAYGQINHNVLSTSTLSSPAVNLGGFAPVVSDGFGVGYAVHDNWIGCNVSSYPGRNAREFLQCVEKALEDMFDALEGKSIKS

SEQ ID NO: 871327 - protein, 549 aa, Homo sapiens
MASSGPWFDMYLSARDSVVLNFNPFMAFNPDPKSEYNDQLTRATNMTVSAIRFLKTLRAGLLEPEVFHLNPAKSDTITFKRLIRFVPSSLSWYGAYLVNAYPLDMSQYFRLFNSTRLPKPSRDELFTDDKARHLLVLRKGNFYIFDVLDQDGNIVSPSEIQAHLKYILSDSSPAPEFPLAYLTSENRDIWAELRQKLMSSGNEESLRKVDSAVFCLCLDDFPIKDLVHLSHNMLHGDGTNRWFDKSFNLIIAKDGSTAIHFEHSWGDGVAVLRFFNEVFKDSTQTPAVTPQSQPATTDSTVTVQKLNFELTDALKTGITAAKEKFDATMKTLTIDCVQFQRGGKEFLKKQKLSPDAVAQLAFQMAFLRQYGQTVATYESCSTAAFKHGRTETIRPASVYTKRCSEAFVREPSRHSAGELQQMMVECSKYHGQLTKEAAMGQGFDRHLFALRHLAAAKGIILPELYLDPAYGQINHNVLSTSTLSSPAVNLGGFAPVVSDGFGVGYAVHDNWIGCNVSSYPGRNAREFLQCVEKALEDMFDALEGKSIKS

SEQ ID NO: 871328 - protein, 658 aa, Homo sapiens [sequence omitted]

SEQ ID NO: 871329 - protein, 666 aa, Homo sapiens
MVPRLLLRAWPRGPAVGPGAPSRPLSAGSGPGQYLQRSIVPTMHYQDSLPSAAIFSARTCKRHLVEVDSLKLPRGSLSCNDGLVPRKTEQFCKSFENGIGKELHEQLVALDKQNKHTSYISGPWFDMYLSARDSVVLNFNPFMAFNPDPKSEYNDQLTRATNMTVSAIRFLKTLRAGLLEPEVFHLNPAKSDTITFKRLIRFVPSSLSWYGAYLVNAYPLDMSQYFRLFNSTRLPKPSRDELFTDDKARHLLVLRKGNFYIFDVLDQDGNIVSPSEIQAHLKYILSDSSPAPEFPLAYLTSENRDIWAELRQKLMSSGNEESLRKVDSAVFCLCLDDFPIKDLVHLSHNMLHGDGTNRWFDKSFNLIIAKDGSTAIHFEHSWGDGVAVLRFFNEVFKDSTQTPAVTPQSQPATTDSTVTVQKLNFELTDALKTGITAAKEKFDATMKTLTIDCVQFQRGGKEFLKKQKLSPDAVAQLAFQMAFLRQYGQTVATYESCSTAAFKHGRTETIRPASVYTKRCSEAFVREPSRHSAGELQQMMVECSKYHGQLTKEAAMGQGFDRHLFALRHLAAAKGIILPELYLDPAYGQINHNVLSTSTLSSPAVNLGGFAPVVSDGFGVGYAVHDNWIGCNVSSYPGRNAREFLQCVEKALEDMFDALEGKSIKS

SEQ ID NO: 871330 - protein, 159 aa, Homo sapiens
ATLTSSFDLAYMTSGHPATATSSFDLAYMTSGHPATPTSSFDLPYVTSGHPATPTSSFDLPYVTSGHPATATSSFDLAYVTSGHPATPTSSFDLPYVTSGHPATATSSFDLPYVTSGHPATATSSFDLAYVTSGHPATATSSFDLPYVTSGHPATPTSS

SEQ ID NO: 871331 - protein, 585 aa, Homo sapiens
MDLPGDSSPPGQPRLCRQPLTRALWGARSPKRPRLQLPGAPSPLEKASRRVLAVVLEDVMAVHMVPVVPSKQTSIPQHHSYHQDPVHRQPPASPPRQAGWSSQARPPDPLCLCREPLSRIHRTSSTLRRRSRTTPGPEEGPSQKVDRAPQPTLVVMLEDIASPRPPAEGFIDETPNFIIPAQRAEPMRIVRQPTPPPGDLEPPFQPSALPADPLESPPTAPDPALELPSTPPPSSLLRPRLSPWGLAPLFRSVRSKLESFADIFLTPNKNPQPPPPSPPMKLELKIAISEAEQSGAAEGTASVSPRPPIRQWRTQDHNTPALLPKPSLGRSYSCPDLGPPGPGTCTWPPAPPQPSRPRPRRHTVGGGEMARAPPPPRPCLRKEVFPLGGVGASPSLTTSCSSTASTSFSEPAEPRLGSTKGKEPRASKDQVLSEPETKTMGKVSRFRIRRTPARPQLNLTPMGLPRPIRLNKKEFSLEEIYTNKNYQSPTTRRTFETIFEEPRERNGTLIFTSSRKLRRAVEFRDSSLPRSRRPSRGVRAAGGRTVPPNVAPSPDVGPLLQQRLEELDALLLEEETVDREQPHWT

SEQ ID NO: 871332 - protein, 430 aa, Homo sapiens
MLEDIASPRPPAEGFIDETPNFIIPAQRAEPMRIVRQPTPPPGDLEPPFQPSALPADPLESPPTAPDPALELPSTPPPSSLLRPRLSPWGLAPLFRSVRSKLESFADIFLTPNKNPQPPPPSPPMKLELKIAISEAEQSGAAEGTASVSPRPPIRQWRTQDHNTPALLPKPSLGRSYSCPDLGPPGPGTCTWPPAPPQPSRPRPRRHTVGGGEMARAPPPPRPCLRKEVFPLGGVGASPSLTTSCSSTASTSFSEPAEPRLGSTKGKEPRASKDQVLSEPETKTMGKVSRFRIRRTPARPQLNLTPMGLPRPIRLNKKEFSLEEIYTNKNYQSPTTRRTFETIFEEPRERNGTLIFTSSRKLRRAVEFRDSSLPRSRRPSRGVRAAGGRTVPPNVAPSPDVGPLLQQRLEELDALLLEEETVDREQPHWT

SEQ ID NO: 871333 - protein, 585 aa, Homo sapiens; identical to SEQ ID NO: 871331

SEQ ID NO: 871334 - protein, 585 aa, Homo sapiens; identical to SEQ ID NO: 871331

SEQ ID NO: 871335 - protein, 585 aa, Homo sapiens; identical to SEQ ID NO: 871331

SEQ ID NO: 871336 - protein, 430 aa, Homo sapiens; identical to SEQ ID NO: 871332

SEQ ID NO: 871337 - protein, 430 aa, Homo sapiens; identical to SEQ ID NO: 871332

SEQ ID NO: 871338 - protein, 306 aa, Homo sapiens [sequence omitted]

SEQ ID NO: 871339 - protein, 146 aa, Homo sapiens
MGKVSRFRIRRTPARPQLNLTPMGLPRPIRLNKKEFSLEEIYTNKNYQSPTTRRTFETIFEEPRERNGTLIFTSSRKLRRAVEFRDSSLPRSRRPSRGVRAAGGRTVPPNVAPSPDVGPLLQQRLEELDALLLEEETVDREQPHWT

SEQ ID NO: 871340 - protein, 514 aa, Homo sapiens
MDLPGDSSPPGQPRLCRQPLTRALWGARSPKRPRLQLPGAPSPLEKASRRVLAVVLEDVMAVHMVPVVPSKQTSIPQHHSYHQDPVHRQPPASPPRQAGWSSQARPPDPLCLCREPLSRIHRTSSTLRRRSRTTPGPEEGPSQKVDRAPQPTLVVMLEDIASPRPPAEGFIDETPNFIIPAQRAEPMRIVRQPTPPPGDLEPPFQPSALPADPLESPPTAPDPALELPSTPPPSSLLRPRLSPWGLAPLFRSVRSKLESFADIFLTPNKNPQPENTTRQKRHMTADTTHPPTHPRKTTQTASSAKKETQKRTNSDTNHRHTATNHQPTTQQRKKATKENNRRRKHKTSTRNHDTHPNKNNEHNTKANERRTHNRTKNRRNRHSETTKAQGRTRDNQRAKQKQNHRQNTPQRNIHTANHNRQRTTEQRTTDNSQPNQNNTKNQKQENTQRTRKQEERRRRRDNTERNDDTRTDNRTKKSDHQAQHKEQRAKTKRKKTNTAHQKDNKEKSENPPHT

SEQ ID NO: 871341 - protein, 354 aa, Homo sapiens
MGVAGSGGIPGSSPSLYLALHPRAEPMRIVRQPTPPPGDLEPPFQPSALPADPLESPPTAPDPALELPSTPPPSSLLRPRLSPWGLAPLFRSVRSKLESFADIFLTPNKNPQPENTTRQKRQMTADTTHPPTHPRKTTQTASSAKKETQKRTNSDTNHRHTATNHQPTTQQRKKATKENNRRRKHKTSTRNHDTHPNKNNEHNTKANERRTHNRTKNRRNRHSETTKAQGRTRDNQRAKQKQNHRQNTPQRNIHTANHNRQRTTEQRTTDNSQPNQNNTKNQKQENTQRTRKQEERRRRRDNTERNDDTRTDNRTKKSDHQAQHKEQRAKTKRKKTNTAHQKDNKEKSENPPHT

SEQ ID NO: 871342 - protein, 585 aa, Homo sapiens; identical to SEQ ID NO: 871331

SEQ ID NO: 871343 - protein, 384 aa, Homo sapiens
MDLPGDSSPPGQPRLCRQPLTRALWGARSPKRPRLQLPGAPSPLEKASRRVLAVVLEDVMAVHMVPVVPSKQTSIPQHHSYHQDPVHRQPPASPPRQAGWSSQARPPDPLCLCREPLSRIHRTSSTLRRRSRTTPGPEEGPSQKVDRAPQPTLVVMLEDIASPRPPAEGFIDETPNFIIPAQRAEPMRIVRQPTPPPGDLEPPFQPSALPADPLESPPTAPDPALELPSTPPPSSLLRPRLSPWGLAPLFRSVRSKLESFADIFLTPNKNPQPPPPSPPMKLELKIAISEAEQSGAAEGTASVSPRPPIRQWRTQDHNTPALLPKPSLGRSYSCPDLGPPGPGWVQPKGRSQEPQRTRCFQNLRPRPWERFLDSEYAEHQPVLS

SEQ ID NO: 871344 - protein, 399 aa, Homo sapiens
MRIVRQPTPPPGDLEPPFQPSALPADPLESPPTAPDPALELPSTPPPSSLLRPRLSPWGLAPLFRSVRSKLESFADIFLTPNKNPQPPPPSPPMKLELKIAISEAEQSGAAEGTASVSPRPPIRQWRTQDHNTPALLPKPSLGRSYSCPDLGPPGPGTCTWPPAPPQPSRPRPRRHTVGGGEMARAPPPPRPCLRKEVFPLGGVGASPSLTTSCSSTASTSFSEPAEPRLGSTKGKEPRASKDQVLSEPETKTMGKVSRFRIRRTPARPQLNLTPMGLPRPIRLNKKEFSLEEIYTNKNYQSPTTRRTFETIFEEPRERNGTLIFTSSRKLRRAVEFRDSSLPRSRRPSRGVRAAGGRTVPPNVAPSPDVGPLLQQRLEELDALLLEEETVDREQPHWT

SEQ ID NO: 871345 - protein, 430 aa, Homo sapiens; identical to SEQ ID NO: 871332

SEQ ID NO: 871346 - protein, 192 aa, Homo sapiens
KPSLPNAAQPPMAFFSEPAEPRLGSTKGKEPRASKDQVLSEPETKTMGKVSRFRIRRTPARPQLNLTPMGLPRPIRLNKKEFSLEEIYTNKNYQSPTTRRTFETIFEEPRERNGTLIFTSSRKLRRAVEFRDSSLPRSRRPSRGVRAAGGRTVPPNVAPSPDVGPLLQQRLEELDALLLEEETVDREQPHWT

SEQ ID NO: 871347 - protein, 136 aa, Homo sapiens
MKLELKIAISEAEQSGAAEGTASVSPRPPIRQWRTQDHNTPALLPKPSLGRSYSCPDLGPPGPGTCTWPPAPPQPSRPRPRRHTVGGGEMARAPPPPRPCLRKEVFPLGGVGASPSLTTSCSSTASTSFSEPAEPR

SEQ ID NO: 871348 - protein, 190 aa, Homo sapiens
AAAGTHSAKSGGSEAALKEGGSAAALSSSSSSSAAAAAASSSSSSGPGSAMETGLLPNHKLKTVGEAPAAPPHQQHHHHHHAHHHHHHAHHLHHHHALQQQLNQFQQQQQQQQQQQQQQQQQQHPISNNNSLGGAGGGAPQPGPDMEQTQHGGAKDSAAGGQADPPGPPLLSKPGDEDDAPPKMGEPAGG

SEQ ID NO: 871349 - protein, 224 aa, Homo sapiens
ERLGSLYAEAVVTQAQLTVAEAQLTRTGDGGVLVLPLSPPPLSSLAGLAESPPKNPRSHILKTMSGSFYFVIVGHHDNPVFEMEFLPAGKAESKDDHRHLNQFIAHAALDLVDENMWLSNNMYLKTVDKFNEWFVSAFVTAGHMRFIMLHDIRQEDGIKNFFTDVYDLYIKDKNDGHTRTSLPDVYDFILQTFSMNPFYEPNSPIRSSAFDRKVQFLGKKHLLS

SEQ ID NO: 871350 - protein, 140 aa, Homo sapiens [sequence omitted]

SEQ ID NO: 871351 - protein, 174 aa, Homo sapiens
RRSGYRFGARVSSAETDIAFPLSASHCRSHILKTMSGSFYFVIVGHHDNPVFEMEFLPAGKAESKDDHRHLNQFIAHAALDLVDENMWLSNNMYLKTVDKFNEWFVSAFVTAGHMRFIMLHDIRQEDGIKNFFTDVYDLYIKFSMNPFYEPNSPIRSSAFDRKVQFLGKKHLLS

SEQ ID NO: 871352 - protein, 140 aa, Homo sapiens [sequence omitted]

SEQ ID NO: 871353 - protein, 140 aa, Homo sapiens [sequence omitted]

SEQ ID NO: 871354 - protein, 262 aa, Homo sapiens
TARYEAWVAGNIIVATPGRLEDMFRRKAEGLDLASCVRSLDVLVLDEADRLLDMGFEASINTILEFLPKQRRTGLFSATQTQEVENLVRAGLRNPVRVSVKEKGVAASSAQKTPSRLENYYMVCKADEKFNQLVHFLRNHKQEKHLVFFSTCACVEYYGKALEVLVKGVKIMCIHGKMKYKRNKIFMEFRKLQSGILVCTDVMARGIDIPEVNWVLQYDPPSNASAFVHRCGRTARIGHGGSALVFLLPMEESYSYCNTKSL

SEQ ID NO: 871355 - protein, 453 aa, Homo sapiens
MFRRKAEGLDLASCVRSLDVLVLDEADRLLDMGFEASINTILEFLPKQRRTGLFSATQTQEVENLVRAGLRNPVRVSVKEKGVAASSAQKTPSRLENYYMVCKADEKFNQLVHFLRNHKQEKHLVFFSTCACVEYYGKALEVLVKGVKIMCIHGKMKYKRNKIFMEFRKLQSGILVCTDVMARGIDIPEVNWVLQYDPPSNASAFVHRCGRTARIGHGGSALVFLLPMEESYINFLAINQKCPLQEMKPQRNTADLLPKLKSMALADRAVFEKGMKAFVSYVQAYAKHECNLIFRLKDLDFASLARGFALLRMPKMPELRGKQFPDFVPVDVNTDTIPFKDKIREKQRQKLLEQQRREKTENEGRRKFIKNKAWSKQKAKKEKKKKMNEKRKREEGSDIEDEDMEELLNDTRLLKKLKKGKITEEEFEKGLLTTGKRTIKTVDLGISDLEDDC

SEQ ID NO: 871356 - protein, 453 aa, Homo sapiens; identical to SEQ ID NO: 871355

SEQ ID NO: 871357 - protein, 612 aa, Homo sapiens
RAAATDAAKERAMEHVTEGSWESLPVPLHPQVLGALRELGFPYMTPVQSATIPLFMRNKDVAAEAVTGSGKTLAFVIPILEILLRREEKLKKSQVGAIIITPTRELAIQIDEVLSHFTKHFPEFSQILWIGGRNPGEDVERFKQQGGNIIVATPGRLEDMFRRKAEGLDLASCVRSLDVLVLDEADRLLDMGFEASINTILEFLPKQRRTGLFSATQTQEVENLVRAGLRNPVRVSVKEKGVAASSAQKTPSRLENYYMVCKADEKFNQLVHFLRNHKQEKHLVFFSTCACVEYYGKALEVLVKGVKIMCIHGKMKYKRNKIFMEFRKLQSGILVCTDVMARGIDIPEVNWVLQYDPPSNASAFVHRCGRTARIGHGGSALVFLLPMEESYINFLAINQKCPLQEMKPQRNTADLLPKLKSMALADRAVFEKGMKAFVSYVQAYAKHECNLIFRLKDLDFASLARGFALLRMPKMPELRGKQFPDFVPVDVNTDTIPFKDKIREKQRQKLLEQQRREKTENEGRRKFIKNKAWSKQKAKKEKKKKMNEKRKREEGSDIEDEDMEELLNDTRLLKKLKKGKITEEEFEKGLLTTGKRTIKTVDLGISDLEDDC

SEQ ID NO: 871358 - protein, 612 aa, Homo sapiens; identical to SEQ ID NO: 871357

SEQ ID NO: 871359 - protein, 557 aa, Homo sapiens
MRNKDVAAEAVTGSGKTLAFVIPILEILLRREEKLKKSQVGAIIITPTRELAIQIDEVLSHFTKHFPEFSQILWIGGRNPGEDVERFKQQGGNIIVATPGRLEDMFRRKAEGLDLASCVRSLDVLVLDEADRLLDMGFEASINTILEFLPKQRRTGLFSATQTQEVENLVRAGLRNPVRVSVKEKGVAASSAQKTPSRLENYYMVCKADEKFNQLVHFLRNHKQEKHLVFFSTCACVEYYGKALEVLVKGVKIMCIHGKMKYKRNKIFMEFRKLQSGILVCTDVMARGIDIPEVNWVLQYDPPSNASAFVHRCGRTARIGHGGSALVFLLPMEESYINFLAINQKCPLQEMKPQRNTADLLPKLKSMALADRAVFEKGMKAFVSYVQAYAKHECNLIFRLKDLDFASLARGFALLRMPKMPELRGKQFPDFVPVDVNTDTIPFKDKIREKQRQKLLEQQRREKTENEGRRKFIKNKAWSKQKAKKEKKKKMNEKRKREEGSDIEDEDMEELLNDTRLLKKLKKGKITEEEFEKGLLTTGKRTIKTVDLGISDLEDDC

SEQ ID NO: 871360 - protein, 453 aa, Homo sapiens; identical to SEQ ID NO: 871355

SEQ ID NO: 871361 - protein, 636 aa, Homo sapiens
RAAATDAAKERAMEHVTEGSWESLPVPLHPQVLGALRELGFPYMTPVQSATIPLFMRNKDVAAEAVTGSGKTLAFVIPILEILLRREEKLKKSQVGAIIITPTRELAIQIDEVLSHFTKHFPEFSQILWIGGRNPGEDVERFKQQGGNIIVATPGRLEDMFRRKAEGLDLASCVRSLDVLVLDEADRLLDMGFEASINTILEFLPKQRRTGLFSATQTQEVENLVRAGLRNPVRVSVKEKGVAASSAQKTPSRLENYYMVCKADEKFNQLVHFLRNHKQEKHLVFFSTCACVEYYGKALEVLVKGVKIMCIHGKMKYKRNKIFMEFRKLQSGILVCTDVMARGIDIPEVNWVLQYDPPSNASAFVHRCGRTARIGHGGSALVFLLPMEESYINFLAINQKVVMGSPGDMMPAREGENVVCVCVYCPLQEMKPQRNTADLLPKLKSMALADRAVFEKGMKAFVSYVQAYAKHECNLIFRLKDLDFASLARGFALLRMPKMPELRGKQFPDFVPVDVNTDTIPFKDKIREKQRQKLLEQQRREKTENEGRRKFIKNKAWSKQKAKKEKKKKMNEKRKREEGSDIEDEDMEELLNDTRLLKKLKKGKITEEEFEKGLLTTGKRTIKTVDLGISDLEDDC

SEQ ID NO: 871362 - protein, 207 aa, Homo sapiens
MKPQRNTADLLPKLKSMALADRAVFEKGMKAFVSYVQAYAKHECNLIFRLKDLDFASLARGFALLRMPKMPELRGKQFPDFVPVDVNTDTIPFKDKIREKQRQKLLEQQRREKTENEGRRKFIKNKAWSKQKAKKEKKKKMNEKRKREEGSDIEDEDMEELLNDTRLLKKLKKGKITEEEFEKGLLTTGKRTIKTVDLGISDLEDDC

SEQ ID NO: 871363 - protein, 372 aa, Homo sapiens
RAAATDAAKERAMEHVTEGSWESLPVPLHPQVLGALRELGFPYMTPVQSATIPLFMRNKDVAAEAVTGSGKTLAFVIPILEILLRREEKLKKSQVGAIIITPTRELAIQIDEVLSHFTKHFPEFSQILWIGGRNPGEDVERFKQQGGNIIVATPGRLEDMFRRKAEGLDLASCVRSLDVLVLDEADRLLDMGFEASINTILEFLPKQRRTGLFSATQTQEVENLVRAGLRNPVRVSVKEKGVAASSAQKTPSRLENYYMVCKADEKFNQLVHFLRNHKQEKHLVFFSTCACVEYYGKALEVLVKGVKIMCIHGKMKYKRNKIFMEFRKLQSGILVCTDVMARGIDIPEVNWVLQYDPPSNARFSTGDYVPPV

SEQ ID NO: 871364 - protein, 69 aa, Homo sapiens
ICTPLSQKREEGSDIEDEDMEELLNDTRLLKKLKKGKITEEEFEKGLLTTGKRTIKTVDLGISDLEDDC

SEQ ID NO: 871365 - protein, 453 aa, Homo sapiens; identical to SEQ ID NO: 871355

SEQ ID NO: 871366 - protein, 453 aa, Homo sapiens; identical to SEQ ID NO: 871355

SEQ ID NO: 871367 - protein, 475 aa, Homo sapiens
TARYEAWVAGNIIVATPGRLEDMFRRKAEGLDLASCVRSLDVLVLDEADRLLDMGFEASINTILEFLPKQRRTGLFSATQTQEVENLVRAGLRNPVRVSVKEKGVAASSAQKTPSRLENYYMVCKADEKFNQLVHFLRNHKQEKHLVFFSTCACVEYYGKALEVLVKGVKIMCIHGKMKYKRNKIFMEFRKLQSGILVCTDVMARGIDIPEVNWVLQYDPPSNASAFVHRCGRTARIGHGGSALVFLLPMEESYINFLAINQKCPLQEMKPQRNTADLLPKLKSMALADRAVFEKGMKAFVSYVQAYAKHECNLIFRLKDLDFASLARGFALLRMPKMPELRGKQFPDFVPVDVNTDTIPFKDKIREKQRQKLLEQQRREKTENEGRRKFIKNKAWSKQKAKKEKKKKMNEKRKREEGSDIEDEDMEELLNDTRLLKKLKKGKITEEEFEKGLLTTGKRTIKTVDLGISDLEDDC

SEQ ID NO: 871368 - protein, 363 aa, Homo sapiens
RAAATDAAKERAMEHVTEGSWESLPVPLHPQVLGALRELGFPYMTPVQSATIPLFMRNKDVAAEAVTGSGKTLAFVIPILEILLRREEKLKKSQVGAIIITPTRELAIQIDEVLSHFTKHFPEFSQILWIGGRNPGEDVERFKQQGGNIIVATPGRLEDMFRRKAEGLDLASCVRSLDVLVLDEADRLLDMGFEASINTILEFLPKQRRTGLFSATQTQEVENLVRAGLRNPVRVSVKEKGVAASSAQKTPSRLENYYMVCKADEKFNQLVHFLRNHKQEKHLVFFSTCACVEYYGKALEVLVKGVKIMCIHGKMKYKRNKIFMEFRKLQSGILVCTDVMARGIDIPEVNWVLQYDPPSNARS

SEQ ID NO: 871369 - protein, 355 aa, Homo sapiens
RAAATDAAKERAMEHVTEGSWESLPVPLHPQVLGALRELGFPYMTPVQSATIPLFMRNKDVAAEAVTGSGKTLAFVIPILEILLRREEKLKKSQVGAIIITPTRELAIQIDEVLSHFTKHFPEFSQILWIGGRNPGEDVERFKQQGGNIIVATPGRLEDMFRRKAEGLDLASCVRSLDVLVLDEADRLLDMGFEASINTILEFLPKQRRTGLFSATQTQEVENLVRAGLRNPVRVSVKEKGVAASSAQKTPSRLENYYMVCKADEKFNQLVHFLRNHKQEKHLVFFSTCACVEYYGKALEVLVKGVKIMCIHGKMKYKRNKIFMEFRKLQRWVGFIEGSSSPATLLFQVPKCPIL

SEQ ID NO: 871370 - protein, 136 aa, Homo sapiens
SHGDYYCQICFLLVSLFILQVCKADEKFNQLVHFLRNHKQEKHLVFFRYSSGLCGRGIRDSARMCRCMRPLGFGFHLAWFSPECFWLQITENPTFVVRTRLALFFSRKKSSKGRQFLTWVSCVSHVKVNVDVIGLL

SEQ ID NO: 871371 - protein, 486 aa, Homo sapiens
MGPLSPARTLRLWGPRSLGVALGVFMTIGFALQLLGGPFQRRLPGLQLRQPSAPSLRPALPSCPPRQRLVFLKTHKSGSSSVLSLLHRYGDQHGLRFALPARYQFGYPKLFQASRVKGYRPQGGGTQLPFHILCHHMRFNLKEVLQVMPSDSFFFSIVRDPAALARSAFSYYKSTSSAFRKSPSLAAFLANPRGFYRPGARGDHYARNLLWFDFGLPFPPEKRAKRGNIHPPRDPNPPQLQVLPSGAGPRAQTLNPNALIHPVSTVTDHRSQISSPASFDLGSSSFIQWGLAWLDSVFDLVMVAEYFDESLVLLADALCWGLDDVVGFMHNAQAGHKQGLSTVSNSGLTAEDRQLTARARAWNNLDWALYVHFNRSLWARIEKYGQGRLQTAVAELRARREALAKHCLVGGEASDPKYITDRRFRPFQFGSAKVLGYILRSGLSPQDQEECERLATPELQYKDKLDAKQFPPTVSLPLKTSRPLSP

SEQ ID NO: 871372 - protein, 486 aa, Homo sapiens; identical to SEQ ID NO: 871371

SEQ ID NO: 871373 - protein, 486 aa, Homo sapiens; identical to SEQ ID NO: 871371

SEQ ID NO: 871374 - protein, 102 aa, Homo sapiens
KWGPQTNASQPPGFSPLPRGMYGPPVLLKILSQRNYWLQHHQITNVLPMKSRHLGLPGLAFVSIGSSCCNVRSPGSFSWKKDHVKKRVVRCDEEAIADTQPC

SEQ ID NO: 871375 - protein, 102 aa, Homo sapiens; identical to SEQ ID NO: 871374

SEQ ID NO: 871376 - protein, 102 aa, Homo sapiens; identical to SEQ ID NO: 871374

SEQ ID NO: 871377 - protein, 2352 aa, Homo sapiens
MPDHDSTALLSRQTKRRRVDIGVKRTVGTASAFFAKARATFFSAMNPQGSEQDVEYSVVQHADGEKSNVLRKLLKRANSYEDAMMPFPGATIISQLLKNNMNKNGGTEPSFQASGLSSTGSEVHQEDICSNSSRDSPPECLSPFGRPTMSQFDMDRLCDEHLRAKRARVENIIRGMSHSPSVALRGNENEREMAPQSVSPRESYRENKRKQKLPQQQQQSFQQLVSARKEQKREERRQLKQQLEDMQKQLRQVQEKFYQIYDSTDSENDEDGNLSEDSMRSEILDARAQDSVGRSDNEMCELDPGQFIDRARALIREQEMAENKPKREGNNKERDHGPNSLQPEGKHLAETLKQELNTAMSQVVDTVVKVFSAKPSRQVPQVFPPLQIPQARFAVNGENHNFHTANQRLQCFGDVIIPNPLDTFGNVQMASSTDQTEALPLVVRKNSSDQSASGLVGGHHQPLHQSPLSATTGFTTSTFRHPFPLPLMAYPFQSPLGAPSGSFSGKDRASPESLDLTRDTTSLRTKMSSHHLSHHPCSPAHPPSTAEGLSLSLIKSECGDLQDMSEISPYSGSAMQEGLSPNHLKKAKLMFFYTRYPSSNMLKTYFSDVKFNRCITSQLIKWFSNFREFYYIQMEKYARQAINDGVTSTEELSITRDCELYRALNMHYNKANDFEVPERFLEVAQITLREFFNAIIAGKDVDPSWKKAIYKVICKLDSEVPEIFKSPNCLQELLHEVEISTTLFECMKSSSPFGCPSYMCLDFDFIYMCMGGMDMLCNQLVIPPHHVSLIFFCFPLQGDGCFLSAFSLLLPKALNIWTLKIGLIFREKDVGVCKVSISNEGNLLTMHPLDVMTYCKWRLAEENPCHSTTLQTVMCLLFLLLRRSENLMKPLHTFKYFVWFELNQQLFLTCLKIIPMTDEQLTFPKYPKRPNYKKKNNHSQALSEEKRQTLKVVPVSSGGKAILHKTSSLKMRLEIHTWSCSHLSKLENRFFFISELTSFFIKKNPITCYHFCFRYYKALSFQFTLLNFVYMLKRILFDLTIFSPKILFSEYFLPVRNKGKPNLAIKFLPTLEVCGQPLADLIVISYEEHIYFHKQFHTILMGMQSGDSLTQCFFILGKHFKAIDNASSNSEASIDQNVRRVYSIGKFGVNPKDTIPAHIRKLAAILCFLPWFSSFFPFIFPCFSMMYSVPYLHGKNSYGIHTFFLRWVFVSRCSKNSLFILKLFPDPSFPLGNLIYTSKNDTVTNLVFRTYRTEMPFFNSTLIRITFDFGEYQVLTHVTDYADPDRCNLTSFINSADWTGMYELNYCQHKALKPADFKLNGAVPMMPCTIQGTNRASQCRQRVQPHGRGHQPPHSAPAASHISQLTLYYMHRVIRSNLLFFSLALKKSSLDNHDIGIKWEGKIPSAQNREVIPTCSHSFLTGFVLKEDGSPCSCQCATGFLLFRVIHINFVLPFARKRQSCSVFTYVDRLLDIFLIWGEFNIDFQTYLDFFSIIFPSLSNLNRQIKQKCVFINQMLMPLSTDNILSMFTEAEKLFQSRNCSMRINSPLFLKIELYHYAFRWFSLLQSKSCASQVHWKMTKACLSKFLFNSLIFVFLITIFQILAQLSPSENWLLGRKLTFYGGMVKDEGQFTYGKEKKKSKVHVEKPHYHLFSANPKLFLRIRLRLSLCLDLKCTSGGDFKKSFKIPVFSQQVQIVLVPSVAFDFIFLTLFPITTAAINTRFFFWLFDITLIAMHILCLFKTKRENTFLKKRIFRTVRYRKLFFPQLFEQHSSFENSCRSQFFVTVVQILCFLSLMKSSIEAIFHTMCYICVRRCVNIKSHTHIYTHVKIYIYIYACEDGKLTFSYLDLRTYFRHLLCFVKRMFYFNKTFNSYCISGCLMRTFHIKWKNTWKMLECSNYLSKQFTHIFLKFALCLRVLFNERSVLCLQNLCHCTRDVGEYHLKKFKTTKKKQNRNTKDKRGTFIKQCKYLTSWLHYVRHEILINNYILTTSVEFTRNTTVTVRQLKAFLKILLSPFKSKQSLLSDVKGKGNAVSVNFEISFSMYMKTFSKSHPPFPCAHVRIHTHTHTHTHTNTHTVIKANDLGTLKNRMSSRNNHKFMKEREFTDSPERSSVYVKTVQKSLCHVYYSVFIGVNSTNVSFWYKLCVCKFTRSIVFKKLPLKNVTGLYEYSSYRIALKCYVEGNAVLFSVDLLVVNIYKTKAKMLIIQSWDQNWYLTFASSYNYPSKNITECGSVWTLSLFKLSLLSNLTPPQNAQTSAEKANKLTFFCENVFILYFFKYSIPLKMGRKYFKIVYYDFKFRTKKKMYLGLVSALPRRIKGHGFPQYCPSHFSYVYSINRDKTLPLYYLAICCK

SEQ ID NO: 871378 - protein, 1407 aa, Homo sapiens
MRQTLKVVPVSSGGKAILHKTSSLKMRLEIHTWSCSHLSKLENRFFFISELTSFFIKKNPITCYHFCFRYYKALSFQFTLLNFVYMLKRILFDLTIFSPKILFSEYFLPVRNKGKPNLAIKFLPTLEVCGQPLADLIVISYEEHIYFHKQFHTILMGMQSGDSLTQCFFILGKHFKAIDNASSNSEASIDQNVRRVYSIGKFGVNPKDTIPAHIRKLAAILCFLPWFSSFFPFIFPCFSMMYSVPYLHGKNSYGIHTFFLRWVFVSRCSKNSLFILKLFPDPSFPLGNLIYTSKNDTVTNLVFRTYRTEMPFFNSTLIRITFDFGEYQVLTHVTDYADPDRCNLTSFINSADWTGMYELNYCQHKALKPADFKLNGAVPMMPCTIQGTNRASQCRQRVQPHGRGHQPPHSAPAASHISQLTLYYMHRVIRSNLLFFSLALKKSSLDNHDIGIKWEGKIPSAQNREVIPTCSHSFLTGFVLKEDGSPCSCQCATGFLLFRVIHINFVLPFARKRQSCSVFTYVDRLLDIFLIWGEFNIDFQTYLDFFSIIFPSLSNLNRQIKQKCVFINQMLMPLSTDNILSMFTEAEKLFQSRNCSMRINSPLFLKIELYHYAFRWFSLLQSKSCASQVHWKMTKACLSKFLFNSLIFVFLITIFQILAQLSPSENWLLGRKLTFYGGMVKDEGQFTYGKEKKKSKVHVEKPHYHLFSANPKLFLRIRLRLSLCLDLKCTSGGDFKKSFKIPVFSQQVQIVLVPSVAFDFIFLTLFPITTAAINTRFFFWLFDITLIAMHILCLFKTKRENTFLKKRIFRTVRYRKLFFPQLFEQHSSFENSCRSQFFVTVVQILCFLSLMKSSIEAIFHTMCYICVRRCVNIKSHTHIYTHVKIYIYIYACEDGKLTFSYLDLRTYFRHLLCFVKRMFYFNKTFNSYCISGCLMRTFHIKWKNTWKMLECSNYLSKQFTHIFLKFALCLRVLFNERSVLCLQNLCHCTRDVGEYHLKKFKTTKKKQNRNTKDKRGTFIKQCKYLTSWLHYVRHEILINNYILTTSVEFTRNTTVTVRQLKAFLKILLSPFKSKQSLLSDVKGKGNAVSVNFEISFSMYMKTFSKSHPPFPCAHVRIHTHTHTHTHTNTHTVIKANDLGTLKNRMSSRNNHKFMKEREFTDSPERSSVYVKTVQKSLCHVYYSVFIGVNSTNVSFWYKLCVCKFTRSIVFKKLPLKNVTGLYEYSSYRIALKCYVEGNAVLFSVDLLVVNIYKTKAKMLIIQSWDQNWYLTFASSYNYPSKNITECGSVWTLSLFKLSLLSNLTPPQNAQTSAEKANKLTFFCENVFILYFFKYSIPLKMGRKYFKIVYYDFKFRTKKKMYLGLVSALPRRIKGHGFPQYCPSHFSYVYSINRDKTLPLYYLAICCK

SEQ ID NO: 871379 - protein, 1435 aa, Homo sapiens
MSSSLFQSTPKGQIKKEKYITLKPCLRKEANSESRTSFFWRQSNFAQNQLSQDETRNSYLVFSHLSKLENRFFFISELTSFFIKKNPITCYHFCFRYYKALSFQFTLLNFVYMLKRILFDLTIFSPKILFSEYFLPVRNKEKAQLGHKILAYTRSLLTAISCLDRHLLRGTHIFSQAIPHYPDGYAKWCQSNSVFLHFRYNILKAIDNASSNSEASIDQNVRRVYSIGKFGVNPKDTIPAHIRKLAAILCFLPWFSSFFPFIFPCFSMMYSVPYLHWKNSYGIHTFFLRWVFVSRCSKNSLFILKLFSRPFLPLREFDIHLLKYTVTNLVFRTYRTYMPFFNSTLIRITFDFGEYQVLTHVTDYADPDRCNLTSFINSADWTGMYELNYCQHKALKPADFKLNGAVPMMPCTIQGTNRASQCRQRVQPHGRGHQPPHSAPAASHISQLTLYYMHRVIRSNLLFFSLALKKSSLDNHDIGIKWEGKIPSAQNREVIPTCSHSFLTGFVLKEDGSPCSCQCATGFLLFRVIHINFVLPFEGKRQSCSVFTYVDRLLDIFLIWGEFNIDFQTYLDFFSIIFPSLSNLNRQIKQKCVFINQMLMPLSTDNILSMFTEAEKLFQSRNCSMRINSPLCSENRTLSLCFPVVFPFTIEILCLPSALENDKSLSLQIPIKQFDFFFLITIFQILAQLSPSENWLLGRKLTFYGGMVKDEGQFTYGKEKKKSKVHVEKPHYHLFSANPKLFLRIRLRLSLCLDLKCTSGGDFKKSFKIPVFSQQVQIVLVPSVAFDFIFLTLFPITTAAINTRFFFWLFDITLIAMHILCLFKTKRENTFLKKRIFRTVRYRKLFFPQLFEQHSSFENSCRSQFFVTVVQILCFLSLMKSSIEAIFHTMCYICVRRCVNIKSHTHIYTHVKIYIYIYACEDGKLTFSYLDLRTYFRHLLCFVKRMFYFNKTFNSYCISGCLMRTFHIKWYNTWKMLECSNYLSKQFTHIFLKFALCLRVLFNLRSVLCLQNLCHCTRDVGEYHLKKFKTTKKKQNRNTKDKRGTFIKQCKYLTSWLHYVRHEILINNYILTTSVEFTRNTTVTVRQLKAFLKILLSPFKSKQSLLSDVKGKGNAVSEIYEISFSMYMKTFSEVTPPLPMRTCAHTHTHTHTHTHKHTHCHKANDLGTLKNRMSSRNNHKFMKEREFTDSPERSSVYVKTVQKSLCHVYYSVFIGVNSTNVSFWYKLCVCKFTRSIVFKKLPLKNVTGLYEYSSYRIALKCYVEGNAVLFSVDLLVVNIYKTKAKMLIIQSWDQNWYLTFASSYNYPSKNITECGSVWTLSLFKLSLLSNLTPPQNAQTSAEKANKLTFFCENVFILYFFKYSIPLKMGRKYFKIVYYDFKFRTKKKMYLGLVSALPRRIKGHGFPQYCPSHFSYVYSINRDKTLPLYYLAICCK

SEQ ID NO: 871380 - protein, 384 aa, Homo sapiens
MAALTLRGVRELLKRVDLATVPRRHRYKKKWAATEPKFPAVRLALQNFDMTYSVQFGDLWPSIRVSLLSEQKYGALVNNFAAWDHVSAKLEQLSAKDFVNEAISHWELQSEGGQSAAPSPASWACSPNLRCFTFDRGDISRFPPARPGSLGVMEYYLMDAASLLPVLALGLQPGDIVLDLCAAPGGKTLALLQTGCCRNLAANDLSPSRIARLQKILHSYVPEEIRDGNQVRVTSWDGRKWGELEGDTYDRVLVDVPCTTDRHSLHEEENNIFKRSRKKERQILPVLQVQLLAAGLLATKPGGHVVYSTCSLSHLQNEYVVQGAIELLANQYSIQVQVEDLTHFRRVFMDTFCFFSSCQVGELVIPNLMANFGPMYFCKMRRLT

SEQ ID NO: 871381 - protein, 384 aa, Homo sapiens; identical to SEQ ID NO: 871380

SEQ ID NO: 871382 - protein, 344 aa, Homo sapiens
MAALTLRGVRELLKRVDLATVPRRHRYKKKWAATEPKFPAVRLALQNFDMTYSVQFGDLWPSIRVSLLSEQKYGALVNNFAAWDHVSAKLEQLSAKDFVNEAISHWELQSEGGQSAAPSPASWACSPNLRCFTFDRGDISRFPPARPGSLGVMEYYLMDAASLLPVLALGLQPGDIVLDYVPEEIRDGNQVRVTSWDGRKWGELEGDTYDRVLVDVPCTTDRHSLHEEENNIFKRSRKKERQILPVLQVQLLAAGLLATKPGGHVVYSTCSLSHLQNEYVVQGAIELLANQYSIQVQVEDLTHFRRVFMDTFCFFSSCQVGELVIPNLMANFGPMYFCKMRRLT

SEQ ID NO: 871383 - protein, 146 aa, Homo sapiens
MAALTLRGVRELLKRVDLATVPRRHRYKKKWAATEPKFPAVRLALQNFDMTYSVQFGDLWPSIRVSLLSEQKYGALVNNFAAWDHVSAKLEQLSAKDFVNEAISHWELQSEGGQSAAPSPASWACSPNLRCFTFDRGDISRFPPAR

SEQ ID NO: 871384 - protein, 119 aa, Homo sapiens
MAALTLRGVRELLKRVDLATVPRRHRYKKKWPGRPHPSENTIATLPALLGLRRLAGKDSAPSSTSSCLWRPGKVTATTLSILPAQTLAKGATNPLILWTLLASPETLFLASLEALEFLL

SEQ ID NO: 871385 - protein, 344 aa, Homo sapiens; identical to SEQ ID NO: 871382

SEQ ID NO: 871386 - protein, 384 aa, Homo sapiens; identical to SEQ ID NO: 871380

SEQ ID NO: 871387 - protein, 442 aa, Homo sapiens
MAALTLRGVRELLKRVDLATVPRRHRYKKKWPGRPHPSENTIATLLHSWVSAALQERIQPLPQPRAASGDRARLQRPPCPYCRPKPWQKAATEPKFPAVRLALQNFDMTYSVQFGDLWPSIRVSLLSEQKYGALVNNFAAWDHVSAKLEQLSAKDFVNEAISHWELQSEGGQSAAPSPASWACSPNLRCFTFDRGDISRFPPARPGSLGVMEYYLMDAASLLPVLALGLQPGDIVLDLCAAPGGKTLALLQTGCCRNLAANDLSPSRIARLQKILHSYVPEEIRDGNQVRVTSWDGRKWGELEGDTYDRVLVDVPCTTDRHSLHEEENNIFKRSRKKERQILPVLQVQLLAAGLLATKPGGHVVYSTCSLSHLQNEYVVQGAIELLANQYSIQVQVEDLTHFRRVFMDTFCFFSSCQVGELVIPNLMANFGPMYFCKMRRLT

SEQ ID NO: 871388 - protein, 121 aa, Homo sapiens
MCLKRSGMEIKFELPHGMAGNGENWRGTPMTGCWWMCPVPQTATPFMRRRTTSLSGQGRRSDRYCLCCKCSFLRLDSLPPNQEAMLSILPAHSHTYRTSMWCKVPLSSWPINTASRYRWKI

SEQ ID NO: 871389 - protein, 76 aa, Homo sapiens
VPSRYAAPLPLTCQDAQVHCHNPFQKTLVAAAPATETAEMLSLLSFANSILQNFPEYLPFQFYQICTWEQPAGSRT

SEQ ID NO: 871390 - protein, 852 aa, Homo sapiens
MVARRVWGASRVPPASARPPPAACSGDAAVRGPRSPGRCLRAAAAADEPGHAGSAPAVAEAAAEETRGGDMPGGARDPRGLAAATPAASAGARGSARYSRGDSRPRRRGPALPAEHLEDRLFHQFKRFGEISLRLSHTPELGRVAYVNFRHPQDAREARQHALARQLLLYDRPLKVEPVYLRGGGGSSRRSSSSSAAASTPPPGPPAPADPLGYLPLHGGYQYKQRSLSPVAAPPLREPRARHAAAAFALDAAAAAAVGLSRERALDYYGLYDDRGRPYGYPAVCEEDLMPEDDQRATRNLFIGNLDHSVSEVELRRAFEKYGIIEEVVIKRPARGQGGAYAFLKFQNLDMAHRAKVAMSGRVIGRNPIKIGYGKANPTTRLWVGGLGPNTSLAALAREFDRFGSIRTIDHVKGDSFAYIQYESLDAAQAACAKMRGFPLGGPDRRLRVDFAKAEETRYPQQYQPSPLPVHYELLTDGYTRHRNLDADLVRDRTPPHLLYSDRDRTFLEGDWTSPSKSSDRRNSLEGYSRSVRSRSGERWGADGDRGLPKPWEERRKRRSLSSDRGRTTHSPYEERSRTKGSGQQSERGSDRTPERSRKENHSSEGTKESSSNSLSNSRHGAEERGHHHHHHEAADSSHGKKARDSERNHRTTEAEPKPLEEPKHETKKLKNLSEYAQTLQLGWNGLLVLKNSCFPTSMHILEGDQGVISSLLKDHTSGSKLTQLKIAQRLRLDQPKLDEVTRRIKQGSPNGYAVLLATQATPSGLGTEGMPTVEPGLQRRLLRNLVSYLKQKQAAGVISLPVGGSKGRDGTGMLYAFPPCDFSQQYLQSALRTLGKLEEEHMVIVIVRDTA

SEQ ID NO: 871391 - protein, 852 aa, Homo sapiens; identical to SEQ ID NO: 871390

SEQ ID NO: 871392 - protein, 852 aa, Homo sapiens; identical to SEQ ID NO: 871390

SEQ ID NO: 871393 - protein, 779 aa, Homo sapiens
MVEAGCESAEAGAEPACPGSSAAAPEYKTLLISSLSPALPAEHLEDRLFHQFKRFGEISLRLSHTPELGRVAYVNFRHPQDAREARQHALARQLLLYDRPLKVEPVYLRGGGGSSRRSSSSSAAASTPPPGPPAPADPLGYLPLHGGYQYKQRSLSPVAAPPLREPRARHAAAAFALDAAAAAAVGLSRERALDYYGLYDDRGRPYGYPAVCEEDLMPEDDQRATRNLFIGNLDHSVSEVELRRAFEKYGIIEEVVIKRPARGQGGAYAFLKFQNLDMAHRAKVAMSGRVIGRNPIKIGYGKANPTTRLWVGGLGPNTSLAALAREFDRFGSIRTIDHVKGDSFAYIQYESLDAAQAACAKMRGFPLGGPDRRLRVDFAKAEETRYPQQYQPSPLPVHYELLTDGYTRHRNLDADLVRDRTPPHLLYSDRDRTFLEGDWTSPSKSSDRRNSLEGYSRSVRSRSGERWGADGDRGLPKPWEERRKRRSLSSDRGRTTHSPYEERSRTKGSGQQSERGSDRTPERSRKENHSSEGTKESSSNSLSNSRHGAEERGHHHHHHEAADSSHGKKARDSERNHRTTEAEPKPLEEPKHETKKLKNLSEYAQTLQLGWNGLLVLKNSCFPTSMHILEGDQGVISSLLKDHTSGSKLTQLKIAQRLRLDQPKLDEVTRRIKQGSPNGYAVLLATQATPSGLGTEGMPTVEPGLQRRLLRNLVSYLKQKQAAGVISLPVGGSKGRDGTGMLYAFPPCDFSQQYLQSALRTLGKLEEEHMVIVIVRDTA

SEQ ID NO: 871394 - protein, 673 aa, Homo sapiens
GRSTKARYEAWVLSSSAAASTPPPGPPAPADPLGYLPLHGGYQYKQRSLSPVAAPPLREPRARHAAAAFALDAAAAAAVGLSRERALDYYGLYDDRGRPYGYPAVCEEDLMPEDDQRATRNLFIGNLDHSVSEVELRRAFEKYGIIEEVVIKRPARGQGGAYAFLKFQNLDMAHRAKVAMSGRVIGRNPIKIGYGKANPTTRLWVGGLGPNTSLAALAREFDRFGSIRTIDHVKGDSFAYIQYESLDAAQAACAKMRGFPLGGPDRRLRVDFAKAEETRYPQQYQPSPLPVHYELLTDGYTRHRNLDADLVRDRTPPHLLYSDRDRTFLEGDWTSPSKSSDRRNSLEGYSRSVRSRSGERWGADGDRGLPKPWEERRKRRSLSSDRGRTTHSPYEERSRTKGSGQQSERGSDRTPERSRKENHSSEGTKESSSNSLSNSRHGAEERGHHHHHHEAADSSHGKKARDSERNHRTTEAEPKPLEEPKHETKKLKNLSEYAQTLQLGWNGLLVLKNSCFPTSMHILEGDQGVISSLLKDHTSGSKLTQLKIAQRLRLDQPKLDEVTRRIKQGSPNGYAVLLATQATPSGLGTEGMPTVEPGLQRRLLRNLVSYLKQKQAAGVISLPVGGSKGRDGTGMLYAFPPCDFSQQYLQSALRTLGKLEEEHMVIVIVRDTA

SEQ ID NO: 871395 - protein, 470 aa, Homo sapiens
GAFGPERSNSRARAASEFDRFGSIRTIDHVKGDSFAYIQYESLDAAQAACAKMRGFPLGGPDRRLRVDFAKAEETRYPQQYQPSPLPVHYELLTDGYTRHRNLDADLVRDRTPPHLLYSDRDRTFLEGDWTSPSKSSDRRNSLEGYSRSVRSRSGERWGADGDRGLPKPWEERRKRRSLSSDRGRTTHSPYEERSRTKGSGQQSERGSDRTPERSRKENHSSEGTKESSSNSLSNSRHGAEERGHHHHHHEAADSSHGKKARDSERNHRTTEAEPKPLEEPKHETKKLKNLSEYAQTLQLGWNGLLVLKNSCFPTSMHILEGDQGVISSLLKDHTSGSKLTQLKIAQRLRLDQPKLDEVTRRIKQGSPNGYAVLLATQATPSGLGTEGMPTVEPGLQRRLLRNLVSYLKQKQAAGVISLPVGGSKGRDGTGMLYAFPPCDFSQQYLQSALRTLGKLEEEHMVIVIVRDTA

SEQ ID NO: 871396 - protein, 154 aa, Homo sapiens [sequence omitted]

SEQ ID NO: 871397 - protein, 629 aa, Homo sapiens
MKRQSERDSSPSGRGSSSSAKRPREREREAEAGGRRAAHKASGGAKHPVPARARDKPRGSGSGGGGHRDGRGTGDANHRASSGRSSGSGAGGGGRGGKASGDPGASGMSPRASPLPPPPPPPGAEPACPGSSAAAPEYKTLLISSLSPALPAEHLEDRLFHQFKRFGEISLRLSHTPELGRVAYVNFRHPQDAREARQHALARQLLLYDRPLKVEPVYLRGGGGSSRRSSSSSAAASTPPPGPPAPADPLGYLPLHGGYQYKQRSLSPVAAPPLREPRARHAAAAFALDAAAAAAVGLSRERALDYYGLYDDRGRPYGYPAVCEEDLMPEDDQRATRNLFIGNLDHSVSEVELRRAFEKYGIIEEVVIKRPARGQGGAYAFLKFQNLDMAHRAKVAMSGRVIGRNPIKIGYGKANPTTRLWVGGLGPNTSLAALAREFDRFGSIRTIDHVKGDSFAYIQYESLDAAQAACAKMRGFPLGGPDRRLRVDFAKAEETRYPQQYQPSPLPVHYELLTDGYTRHRNLDADLVRDRTPPHLLYSDRDRTFLEGDWTSPSKSSDRRNSLEGYSRSVRSRSGERWGADGDRGLPKPWEERRKRRSQQEGHTEACGSLTSMHLVQQCPGDPDSAQSV

SEQ ID NO: 871398 - protein, 852 aa, Homo sapiens; identical to SEQ ID NO: 871390

SEQ ID NO: 871399 - protein, 890 aa, Homo sapiens
MKRQSERDSSPSGRGSSSSAKRPREREREAEAGGRRAAHKASGGAKHPVPARARDKPRGSGSGGGGHRDGRGTGDANHRASSGRSSGSGAGGGGRGGKASGDPGASGMSPRASPLPPPPPPPGAEPACPGSSAAAPEYKTLLISSLSPALPAEHLEDRLFHQFKRFGEISLRLSHTPELGRVAYVNFRHPQDAREARQHALARQLLLYDRPLKVEPVYLRGGGGSSRRSSSSSAAASTPPPGPPAPADPLGYLPLHGGYQYKQRSLSPVAAPPLREPRARHAAAAFALDAAAAAAVGLSRERALDYYGLYDDRGRPYGYPAVCEEDLMPEDDQRATRNLFIGNLDHSVSEVELRRAFEKYGIIEEVVIKRPARGQGGAYAFLKFQNLDMAHRAKVAMSGRVIGRNPIKIGYGKANPTTRLWVGGLGPNTSLAALAREFDRFGSIRTIDHVKGDSFAYIQYESLDAAQAACAKMRGFPLGGPDRRLRVDFAKAEETRYPQQYQPSPLPVHYELLTDGYTRHRNLDADLVRDRTPPHLLYSDRDRTFLEGDWTSPSKSSDRRNSLEGYSRSVRSRSGERWGADGDRGLPKPWEERRKRRSLSSDRGRTTHSPYEERSRTKGSGQQSERGSDRTPERSRKENHSSEGTKESSSNSLSNSRHGAEERGHHHHHHEAADSSHGKKARDSERNHRTTEAEPKPLEEPKHETKKLKNLSEYAQTLQLGWNGLLVLKNSCFPTSMHILEGDQGVISSLLKDHTSGSKLTQLKIAQRLRLDQPKLDEVTRRIKQGSPNGYAVLLATQATPSGLGTEGMPTVEPGLQRRLLRNLVSYLKQKQAAGVISLPVGGSKGRDGTGMLYAFPPCDFSQQYLQSALRTLGKLEEEHMVIVIVRDTA

SEQ ID NO: 871400 - protein, 890 aa, Homo sapiens; identical to SEQ ID NO: 871399

SEQ ID NO: 871401 - protein, 673 aa, Homo sapiens
GRKKIGRTGAGCYSSSAAASTPPPGPPAPADPLGYLPLHGGYQYKQRSLSPVAAPPLREPRARHAAAAFALDAAAAAAVGLSRERALDYYGLYDDRGRPYGYPAVCEEDLMPEDDQRATRNLFIGNLDHSVSEVELRRAFEKYGIIEEVVIKRPARGQGGAYAFLKFQNLDMAHRAKVAMSGRVIGRNPIKIGYGKANPTTRLWVGGLGPNTSLAALAREFDRFGSIRTIDHVKGDSFAYIQYESLDAAQAACAKMRGFPLGGPDRRLRVDFAKAEETRYPQQYQPSPLPVHYELLTDGYTRHRNLDADLVRDRTPPHLLYSDRDRTFLEGDWTSPSKSSDRRNSLEGYSRSVRSRSGERWGADGDRGLPKPWEERRKRRSLSSDRGRTTHSPYEERSRTKGSGQQSERGSDRTPERSRKENHSSEGTKESSSNSLSNSRHGAEERGHHHHHHEAADSSHGKKARDSERNHRTTEAEPKPLEEPKHETKKLKNLSEYAQTLQLGWNGLLVLKNSCFPTSMHILEGDQGVISSLLKDHTSGSKLTQLKIAQRLRLDQPKLDEVTRRIKQGSPNGYAVLLATQATPSGLGTEGMPTVEPGLQRRLLRNLVSYLKQKQAAGVISLPVGGSKGRDGTGMLYAFPPCDFSQQYLQSALRTLGKLEEEHMVIVIVRDTA

SEQ ID NO: 871402 - protein, 523 aa, Homo sapiens
MLKAGLGQGGAYAFLKFQNLDMAHRAKVAMSGRVIGRNPIKIGYGKANPTTRLWVGGLGPNTSLAALAREFDRFGSIRTIDHVKGDSFAYIQYESLDAAQAACAKMRGFPLGGPDRRLRVDFAKAEETRYPQQYQPSPLPVHYELLTDGYTRHRNLDADLVRDRTPPHLLYSDRDRTFLEGDWTSPSKSSDRRNSLEGYSRSVRSRSGERWGADGDRGLPKPWEERRKRRSLSSDRGRTTHSPYEERSRTKGSGQQSERGSDRTPERSRKENHSSEGTKESSSNSLSNSRHGAEERGHHHHHHEAADSSHGKKARDSERNHRTTEAEPKPLEEPKHETKKLKNLSEYAQTLQLGWNGLLVLKNSCFPTSMHILEGDQGVISSLLKDHTSGSKLTQLKIAQRLRLDQPKLDEVTRRIKQGSPNGYAVLLATQATPSGLGTEGMPTVEPGLQRRLLRNLVSYLKQKQAAGVISLPVGGSKGRDGTGMLYAFPPCDFSQQYLQSALRTLGKLEEEHMVIVIVRDTA

SEQ ID NO: 871403 - protein, 1686 aa, Homo sapiens
YIRGFLLPPTMGLLGILCFLIFLGKTWGQEQTYVISAPKIFRVGASENIVIQVYGYTEAFDATISIKSYPDKKFSYSSGHVHLSSENKFQNSAILTIQPKQLPGGQNPVSYVYLEVVSKHFSKSKRMPITYDNGFLFIHTDKPVYTPDQSVKVRVYSLNDDLKPAKRETVLTFIDPEGSEVDMVEEIDHIGIISFPDFKIPSNPRYGMWTIKAKYKEDFSTTGTAYFEVKEYVLPHFSVSIEPEYNFIGYKNFKNFEITIKARYFYNKVVTEADVYITFGIREDLKDDQKEMMQTAMQNTMLINGIAQVTFDSETAVKELSYYSLEDLNNKYLYIAVTVIESTGGFSEEAEIPGIKYVLSPYKLNLVATPLFLKPGIPYPIKVQVKDSLDQLVGGVPVTLNAQTIDVNQETSDLDPSKSVTRVDDGVASFVLNLPSGVTVLEFNVKTDAPDLPEENQAREGYRAIAYSSLSQSYLYIDWTDNHKALLVGEHLNIIVTPKSPYIDKITHYNYLILSKGKIIHFGTREKFSDASYQSINIPVTQNMVPSSRLLVYYIVTGEQTAELVSDSVWLNIEEKCGNQLQVHLSPDADAYSPGQTVSLNMATGMDSWVALAAVDSAVYGVQRGAKKPLERVFQFLEKSDLGCGAGGGLNNANVFHLAGLTFLTNANADDSQENDEPCKEILRPRRTLQKKIEEIAAKYKHSVVKKCCYDGACVNNDETCEQRAARISLGPRCIKAFTECCVVASQLRANISHKDMQLGRLHMKTLLPVSKPEIRSYFPESWLWEVHLVPRRKQLQFALPDSLTTWEIQGVGISNTGICVADTVKAKVFKDVFLEMNIPYSVVRGEQIQLKGTVYNYRTSGMQFCVKMSAVEGICTSESPVIDHQGTKSSKCVRQKVEGSSSHLVTFTVLPLEIGLHNINFSLETWFGKEILVKTLRVVPEGVKRESYSGVTLDPRGIYGTISRRKEFPYRIPLDLVPKTEIKRILSVKGLLVGEILSAVLSQEGINILTHLPKGSAEAELMSVVPVFYVFHYLETGNHWNIFHSDPLIEKQKLKKKLKEGMLSIMSYRNADYSYSVWKGGSASTWLTAFALRVLGQVNKYVEQNQNSICNSLLWLVENYQLDNGSFKENSQYQPIKLQGTLPVEARENSLYLTAFTVIGIRKAFDICPLVKIDTALIKADNFLLENTLPAQSTFTLAISAYALSLGDKTHPQFRSIVSALKREALVKGNPPIYRFWKDNLQHKDSSVPNTGTARMVETTAYALLTSLNLKDINYVNPVIKWLSEEQRYGGGFYSTQDTINAIEGLTEYSLLVKQLRLSMDIDVSYKHKGALHNYKMTDKNFLGRPVEVLLNDDLIVSTGFGSGLATVHVTTVVHKTSTSEEVCSFYLKIDTQDIEASHYRGYGNSDYKRIVACASYKPSREESSSGSSHAVMDISLPTGISANEEDLKALVEGVDQLFTDYQIKDGHVILQLNSIPSSDFLCVRFRIFELFEVGFLSPATFTVYEYHRPDKQCTMFYSTSNIKIQKVCEGAACKCVEADCGQMQEELDLTISAETRKQTACKPEIAYAYKVSITSITVENVFVKYKATLLDIYKTGEAVAEKDSEITFIKKVTCTNAELVKGRQYLIMGKEALQIKYNFSFRYIYPLDSLTWIEYWPRDTTCSSCQAFLANLDEFAEDIFLNGC

SEQ ID NO: 871404 - protein, 1636 aa, Homo sapiens
YIRGFLLPPTMGLLGILCFLIFLGKTWGQEQTYVISAPKIFRVGASENIVIQVYGYTEAFDATISIKSYPDKKFSYSSGHVHLSSENKFQNSAILTIQPKQLPGGQNPVSYVYLEVVSKHFSKSKRMPITYDNGFLFIHTDKPVYTPDQSVKVRVYSLNDDLKPAKRETVLTFIDPEGSEVDMVEEIDHIGIISFPDFKIPSNPRYGMWTIKAKYKEDFSTTGTAYFEVKEYVLPHFSVSIEPEYNFIGYKNFKNFEITIKARYFYNKVVTEADVYITFGIREDLKDDQKEMMQTAMQNTMLINGIAQVTFDSETAVKELSYYSLEDLNNKYLYIAVTVIESTGGFSEEAEIPGIKYVLSPYKLNLVATPLFLKPGIPYPIKVQVKDSLDQLVGGVPVTLNAQTIDVNQETSDLDPSKSVTRVDDGVASFVLNLPSGVTVLEFNVKTDAPDLPEENQAREGYRAIAYSSLSQSYLYIDWTDNHKALLVGEHLNIIVTPKSPYIDKITHYNYLILSKGKIIHFGTREKFSDASYQSINIPVTQNMVPSSRLLVYYIVTGEQTAELVSDSVWLNIEEKCGNQLQVHLSPDADAYSPGQTVSLNMATGMDSWVALAAVDSAVYGVQRGAKKPWKRAGGGLNNANVFHLAGLTFLTNANADDSQENDEPCKEILRPRRTLQKKIEEIAAKYKHSVVKKCCYDGACVNNDETCEQRAARISLGPRCIKAFTECCVVASQLRANISHKDMQLGRLHMKTLLPVSKPEIRSYFPESWLWEVHLVPRRFILLSCICVADTVKAKVFKDVFLEMNIPYSVVRGEQIQLKGTVYNYRTSGMQFCVKMSAVEGICTSESPVIDHQGTKSSKCVRQKVEGSSSHLVTFTVLPLEIGLHNINFSLETWFGKEILVKTLRVVPEGVKRESYSGVTLDPRGIYGTISRRKEFPYRIPLDLVPKTEIKRILSVKGLLVGEILSAVLSQEGINILTHLPKGSAEAELMSVVPVFYVFHYLETGNHWNIFHSDPLIEKQKLKKKLKEGMLSIMSYRNADYSYSVWKGGSASTWLTAFALRVLGQVNKYVEQNLDLLRKIHSFNQYYYRGTLPVEARENSLYLTAFTVIGIRKAFDICPLVKIDTALIKADNFLLENTLPAQSTFTLAISAYALSLGDKTHPQFRSIVSALKREALVKGNPPIYRFWKDNLQHKDSSVPNTGTARMVETTAYALLTSLNLKDINYVNPVIKWLSEEQRYGGGFYSTQDTINAIEGLTEYSLLVKQLRLSMDIDVSYKHKGALHNYKMTDKNFLGRPVEVLLNDDLIVSTGFGSGLATVHVTTVVHKTSTSEEVCSFYLKIDTQDIEASHYRGYGNSDYKRIVACASYKPSREESSSGSSHAVMDISLPTGISANEEDLKALVEGVDQLFTDYQIKDGHVILQLNSIPSSDFLCVRFRIFELFEVGFLSPATFTVYEYHRPDKQCTMFYSTSNIKIQKVCEGAACKCVEADCGQMQEELDLTISAETRKQTACKPEIAYAYKVSITSITVENVFVKYKATLLDIYKTGEAVAEKDSEITFIKKVTCTNAELVKGRQYLIMGKEALQIKYNFSFRYIYPLDSLTWIEYWPRDTTCSSCQAFLANLDEFAEDIFLNGC

SEQ ID NO: 871405 - protein, 1618 aa, Homo sapiens
YIRGFLLPPTMGLLGILCFLIFLGKTWGQEQTYVISAPKIFRVGASENIVIQVYGYTEAFDATISIKSYPDKKFSYSSGHVHLSSENKFQNSAILTIQPKQLPGGQNPVSYVYLEVVSKHFSKSKRMPITYDNGFLFIHTDKPVYTPDQSVKVRVYSLNDDLKPAKRETVLTFIDPEGSEVDMVEEIDHIGIISFPDFKIPSNPRYGMWTIKAKYKEDFSTTGTAYFEVKEYVLPHFSVSIEPEYNFIGYKNFKNFEITIKARYFYNKVVTEADVYITFGIREDLKDDQKEMMQTAMQNTMLINGIAQVTFDSETAVKELSYYSLEDLNNKYLYIAVTVIESTGGFSEEAEIPGIKYVLSPYKLNLVATPLFLKPGIPYPIKVQVKDSLDQLVGGVPVTLNAQTIDVNQETSDLDPSKSVTRVDDGVASFVLNLPSGVTVLEFNVKTDAPDLPEENQAREGYRAIAYSSLSQSYLYIDWTDNHKALLVGEHLNIIVTPKSPYIDKITHYNYLILSKGKIIHFGTREKFSDASYQSINIPVTQNMVPSSRLLVYYIVTGEQTAELVSDSVWLNIEEKCGNQLQVHLSPDADAYSPGQTVSLNMATGMDSWVALAAVDSAVYGVQRGAKKPWKRAGGGLNNANVFHLAGLTFLTNANADDSQENDEPCKEILRPRRTLQKKIEEIAAKYKHSVVKKCCYDGACVNNDETCEQRAARISLGPRCIKAFTECCVVASQLRANISHKDMQLGRLHMKTLLPVSKPEIRSYFPESWLWEVHLVPRRFILLSCICVADTVKAKVFKDVFLEMNIPYSVVRGEQIQLKGTVYNYRTSGMQFCVKMSAVEGICTSESPVIDHQGTKSSKCVRQKVEGSSSHLVTFTVLPLEIGLHNINFSLETWFGKEILVKTLRVVPEGVKRESYSGVTLDPRGIYGTISRRKEFPYRIPLDLVPKTEIKRILSVKGLLVGEILSAVLSQEGINILTHLPKGSAEAELMSVVPVFYVFHYLETGNHWNIFHSDPLIEKQKLKKKLKEGMLSIMSYRNADYSYSVWKGGSASTWLTAFALRVLGQVNKYVEQNLDLLRKIHSFNQYYYRGTLPVEARENSLYLTAFTVIGIRKAFDICPLVKIDTALIKADNFLLENTLPAQSTFTLAISAYALSLGDKTHPQFRSIVSALKREALVKGNPPIYRFWKDNLQHKDSSVPNTGTARMVETTAYALLTSLNLKDINYVNPVIKWLSEEQRYGGGFYSTQDTINAIEGLTEYSLLVKQLRLSMDIDVSYKHKGALHNYNIIVSTGFGSGLATVHVTTVVHKTSTSEEVCSFYLKIDTQDIEASHYRGYGNSDYKRIVACASYKPSREESSSGSSHAVMDISLPTGISANEEDLKALVEGVDQLFTDYQIKDGHVILQLNSIPSSDFLCVRFRIFELFEVGFLSPATFTVYEYHRPDKQCTMFYSTSNIKIQKVCEGAACKCVEADCGQMQEELDLTISAETRKQTACKPEIAYAYKVSITSITVENVFVKYKATLLDIYKTGEAVAEKDSEITFIKKVTCTNAELVKGRQYLIMGKEALQIKYNFSFRYIYPLDSLTWIEYWPRDTTCSSCQAFLANLDEFAEDIFLNGC

SEQ ID NO: 871406 - protein, 1635 aa, Homo sapiens
YIRGFLLPPTMGLLGILCFLIFLGKTWGQEQTYVISAPKIFRVGASENIVIQVYGYTEAFDATISIKSYPDKKFSYSSGHVHLSSENKFQNSAILTIQPKQLPGGQNPVSYVYLEVVSKHFSKSKRMPITYDNGFLFIHTDKPVYTPDQSVKVRVYSLNDDLKPAKRETVLTFIDPEGSEVDMVEEIDHIGIISFPDFKIPSNPRYGMWTIKAKYKEDFSTTGTAYFEVKEYVLPHFSVSIEPEYNFIGYKNFKNFEITIKARYFYNKVVTEADVYITFGIREDLKDDQKEMMQTAMQNTMLINGIAQVTFDSETAVKELSYYSLEDLNNKYLYIAVTVIESTGGFSEEAEIPGIKYVLSPYKLNLVATPLFLKPGIPYPIKVQVKDSLDQLVGGVPVTLNAQTIDVNQETSDLDPSKSVTRVDDGVASFVLNLPSGVTVLEFNVKTDAPDLPEENQAREGYRAIAYSSLSQSYLYIDWTDNHKALLVGEHLNIIVTPKSPYIDKITHYNYLILSKGKIIHFGTREKFSDASYQSINIPVTQNMVPSSRLLVYYIVTGEQTAELVSDSVWLNIEEKCGNQLQVHLSPDADAYSPGQTVSLNMATGMDSWVALAAVDSAVYGVQRGAKKPWKRAGGGLNNANVFHLAGLTFLTNANADDSQENDEPCKEILRPRRTLQKKIEEIAAKYKHSVVKKCCYDGACVNNDETCEQRAARISLGPRCIKAFTECCVVASQLRANISHKDMQLGRLHMKTLLPVSKPEIRSYFPESWLWEVHLVPRRFILLSCICVADTVKAKVFKDVFLEMNIPYSVVRGEQIQLKGTVYNYRTSGMQFCVKMSAVEGICTSESPVIDHQGTKSSKCVRQKVEGSSSHLVTFTVLPLEIGLHNINFSLETWFGKEILVKTLRVVPEGVKRESYSGVTLDPRGIYGTISRRKEFPYRIPLDLVPKTEIKRILSVKGLLVGEILSAVLSQEGINILTHLPKGSAEAELMSVVPVFYVFHYLETGNHWNIFHSDPLIEKQKLKKKLKEGMLSIMSYRNADYSYSVWKGGSASTWLTAFALRVLGQVNKYVEQNQNSICNSLLWLVENYQLDNGSFKENSQYQPIKLQGTLPVEARENSLYLTAFTVIGIRKAFDICPLVKIDTALIKADNFLLENTLPAQSTFTLAISAYALSLGDKSNPPIYRFWKDNLQHKDSSVPNTGTARMVETTAYALLTSLNLKDINYVNPVIKWLSEEQRYGGGFYSTQDTINAIEGLTEYSLLVKQLRLSMDIDVSYKHKGALHNYKMTDKNFLGRPVEVLLNDDLIVSTGFGSGLATVHVTTVVHKTSTSEEVCSFYLKIDTQDIEASHYRGYGNSDYKRIVACASYKPSREESSSGSSHAVMDISLPTGISANEEDLKALVEGVDQLFTDYQIKDGHVILQLNSIPSSDFLCVRFRIFELFEVGFLSPATFTVYEYHRPDKQCTMFYSTSNIKIQKVCEGAACKCVEADCGQMQEELDLTISAETRKQTACKPEIAYAYKVSITSITVENVFVKYKATLLDIYKTGEAVAEKDSEITFIKKVTCTNAELVKGRQYLIMGKEALQIKYNFSFRYIYPLDSLTWIEYWPRDTTCSSCQAFLANLDEFAEDIFLNGC

SEQ ID NO: 871407 - protein, 1408 aa, Homo sapiens
YIRGFLLPPTMGLLGILCFLIFLGKTWGQEQTYVISAPKIFRVGASENIVIQVYGYTEAFDATISIKSYPDKKFSYSSGHVHLSSENKFQNSAILTIQPKQLPGGQNPVSYVYLEVVSKHFSKSKRMPITYDNGFLFIHTDKPVYTPDQSVKVRVYSLNDDLKPAKRETVLTFIDPEGSEVDMVEEIDHIGIISFPDFKIPSNPRYGMWTIKAKYKEDFSTTGTAYFEVKEYVLPHFSVSIEPEYNFIGYKNFKNFEITIKARYFYNKVVTEADVYITFGIREDLKDDQKEMMQTAMQNTMLINGIAQVTFDSETAVKELSYYSLEDLNNKYLYIAVTVIESTGGFSEEAEIPGIKYVLSPYKLNLVATPLFLKPGIPYPIKVQVKDSLDQLVGGVPVTLNAQTIDVNQETSDLDPSKSVTRVDDGVASFVLNLPSGVTVLEFNVKTDAPDLPEENQAREGYRAIAYSSLSQSYLYIDWTDNHKALLVGEHLNIIVTPKSPYIDKITHYNYLILSKGKIIHFGTREKFSDASYQSINIPVTQNMVPSSRLLVYYIVTGEQTAELVSDSVWLNIEEKCGNQLQVHLSPDADAYSPGQTVSLNMATGMDSWVALAAVDSAVYGVQRGAKKPWKRAGGGLNNANVFHLAGLTFLTNANADDSQENDEPCKEILRPRRTLQKKIEEIAAKYKHSVVKKCCYDGACVNNDETCEQRAARISLGPRCIKAFTECCVVASQLRANISHKDMQLGRLHMKTLLPVSKPEIRSYFPESWLWEVHLVPRRFILLSCICVADTVKAKVFKDVFLEMNIPYSVVRGEQIQLKGTVYNYRTSGMQFCVKMSAVEGICTSESPVIDHQGTKSSKCVRQKVEGSSSHLVTFTVLPLEIGLHNINFSLETWFGKEILVKTLRVVPEGVKRESYSGVTLDPRGIYGTISRRKEFPYRIPLDLVPKTEIKRILSVKGLLVGEILSAVLSQEGINILTHLPKGSAEAELMSVVPVFYVFHYLETGNHWNIFHSDPLIEKQKLKKKLKEGMLSIMSYRNADYSYSVWKGGSASTWLTAFALRVLGQVNKYVEQNLDLLRKIHSFNQYYYRGTLPVEARENSLYLTAFTVIGIRKAFDICPLVKIDTALIKADNFLLENTLPAQSTFTLAISAYALSLGDKTHPQFRSIVSALKREALVKGNPPIYRFWKDNLQHKDSSVPNTGTARMVETTAYALLTSLNLKDINYVNPVIKWLSEEQRYGGGFYSTQDTINAIEGLTEYSLLVKQLRLSMDIDVSYKHKGALHNYKMTDKNFLGRPVEVLLNDDLIVSTGFGSGLATVHVTTVVHKTSTSEEVCSFYLKIDTQDIEASHYRGYGNSDYKRIVACASYKPSREESSSGSSHAVMDISLPTGISANEEDLKAMDMLFCN

SEQ ID NO: 871408 - protein, 430 aa, Homo sapiens
MVETTAYALLTSLNLKDINYVNPVIKWLSEEQRYGGGFYSTQDTINAIEGLTEYSLLVKQLRLSMDIDVSYKHKGALHNYKMTDKNFLGRPVEVLLNDDLIVSTGFGSGLATVHVTTVVHKTSTSEEVCSFYLKIDTQDIEASHYRGYGNSDYKRIVACASYKPSREESSSGSSHAVMDISLPTGISANEEDLKALVEGVDQLFTDYQIKDGHVILQLNSIPSSDFLCVRFRIFELFEVGFLSPATFTVYEYHRPDKQCTMFYSTSNIKIQKVCEGAACKCVEADCGQMQEELDLTISAETRKQTACKPEIAYAYKVSITSITVENVFVKYKATLLDIYKTGEAVAEKDSEITFIKKVTCTNAELVKGRQYLIMGKEALQIKYNFSFRYIYPLDSLTWIEYWPRDTTCSSCQAFLANLDEFAEDIFLNGC

SEQ ID NO: 871409 - protein, 1562 aa, Homo sapiens
YIRGFLLPPTMGLLGILCFLIFLGKTWGQEQTYVISAPKIFRVGASENIVIQVYGYTEAFDATISIKSYPDKKFSYSSGHVHLSSENKFQNSAILTIQPKQLPGGQNPVSYVYLEVVSKHFSKSKRMPITYDNGFLFIHTDKPVYTPDQSVKVRVYSLNDDLKPAKRETVLTFIDPEGSEVDMVEEIDHIGIISFPDFKIPSNPRYGMWTIKAKYKEDFSTTGTAYFEVKEYVLPHFSVSIEPEYNFIGYKNFKNFEITIKARYFYNKVVTEADVYITFGIREDLKDDQKEMMQTAMQNTMLINGIAQVTFDSETAVKELSYYSLEDLNNKYLYIAVTVIESTGGFSEEAEIPGIKYVLSPYKLNLVATPLFLKPGIPYPIKVQVKDSLDQLVGGVPVTLNAQTIDVNQETSDLDPSKSVTRVDDGVASFVLNLPSGVTVLEFNVKTDAPDLPEENQAREGYRAIAYSSLSQSYLYIDWTDNHKALLVGEHLNIIVTPKSPYIDKITHYNYLILSKGKIIHFGTREKFSDASYQSINIPVTQNMVPSSRLLVYYIVTGEQTAELVSDSVWLNIEEKCGNQLQVHLSPDADAYSPGQTVSLNMATGMDSWVALAAVDSAVYGVQRGAKKPWKRAGGGLNNANVFHLAGLTFLTNANADDSQENDEPCKEILRPRRTLQKKIEEIAAKYKHSVVKKCCYDGACVNNDETCEQRAARISLGPRCIKAFTECCVVASQLRANISHKDMQLGRLHMKTLLPVSKPEIRSYFPESWLWEVHLVPRRFILLSCICVADTVKAKVFKDVFLEMNIPYSVVRGEQIQLKGTVYNYRTSGMQFCVKMSAVEGICTSESPVIDHQGTKSSKCVRQKVEGSSSHLVTFTVLPLEIGLHNINFSLETWFGKEILVKTLRVVPEGVKRESYSGVTLDPRGIYGTISRRKEFPYRIPLDLVPKTEIKRILSVKGLLVGEILSAVLSQEGINILTHLPKGSAEAELMSVVPVFYVFHYLETGNHWNIFHSDPLIEKQKLKKKLKEGMLSIMSYRNADYSYSVWKGGSASTWLTAFALRVLGQVNKYVEQNLDLLRKIHSFNQYYYRGTLPVEARENSLYLTAFTVIGIRKAFDICPLVKIDTALIKADNFLLENTLPAQSTFTLAISAYALSLGDKTHPQFRSIVSALKREALVKGNPPIYRFWKDNLQHKDSSVPNTGTARMVETTAYALLTSLNLKDINYVNPVIKWLSEEQRYGGGFYSTQDTINAIEGLTEYSLLVKQLRLSMDIDVSYKHKGALHNYKMTDKNFLGRPVEVLLNDDLIVSTGFGSGLATVHVTTVVHKTSTSEEVCSFYLKIDTQDIEASHYRGYGNSDYKRIVACASYKPSREESSSGSSHAVMDISLPTGISANEEDLKALVEGVDQLFTDYQIKDGHVILQLNSIPSSDFLCVRFRIFELFEVGFLSPATFTVYEYHRPDKQCTMFYSTSNIKIQKVCEGAACKCVEADCGQMQEELDLTISAETRKQTACKPEIAYAYKVSITSITVENVFVKYKATLLDIYKTGENSFVHSFLHSATI

SEQ ID NO: 871410 - protein, 645 aa, Homo sapiens
YIRGFLLPPTMGLLGILCFLIFLGKTWGQEQTYVISAPKIFRVGASENIVIQVYGYTEAFDATISIKSYPDKKFSYSSGHVHLSSENKFQNSAILTIQPKQLPGGQNPVSYVYLEVVSKHFSKSKRMPITYDNGFLFIHTDKPVYTPDQSVKVRVYSLNDDLKPAKRETVLTFIDPEGSEVDMVEEIDHIGIISFPDFKIPSNPRYGMWTIKAKYKEDFSTTGTAYFEVKEYVLPHFSVSIEPEYNFIGYKNFKNFEITIKARYFYNKVVTEADVYITFGIREDLKDDQKEMMQTAMQNTMLINGIAQVTFDSETAVKELSYYSLEDLNNKYLYIAVTVIESTGGFSEEAEIPGIKYVLSPYKLNLVATPLFLKPGIPYPIKVQVKDSLDQLVGGVPVTLNAQTIDVNQETSDLDPSKSVTRVDDGVASFVLNLPSGVTVLEFNVKTDAPDLPEENQAREGYRAIAYSSLSQSYLYIDWTDNHKALLVGEHLNIIVTPKSPYIDKITHYNYLILSKGKIIHFGTREKFSDASYQSINIPVTQNMVPSSRLLVYYIVTGEQTAELVSDSVWLNIEEKCGNQLQVHLSPDADAYSPGQTVSLNMATGMDSWVALAAVDSAVYGVQRGAKKPLERGQVVASTMPMCST

SEQ ID NO: 871411 - protein, 121 aa, Homo sapiens
LSLSCTPFFFSLSCTILSLNVPLTLLFNPRPSHPSAGWFSLPGPKASPLAHSSPPGLPIASRVRMNVAASALIFSIYCSEACSYRKLPNYQQIKASVLPPSNIPQTYYQYIFIFNNFFIKL

SEQ ID NO: 871412 - protein, 645 aa, Homo sapiens; identical to SEQ ID NO: 871410

SEQ ID NO: 871413 - protein, 1619 aa, Homo sapiens
YIRGFLLPPTMGLLGILCFLIFLGKTWGQEQTYVISAPKIFRVGASENIVIQVYGYTEAFDATISIKSYPDKKFSYSSGHVHLSSENKFQNSAILTIQPKQLPGGQNPVSYVYLEVVSKHFSKSKRMPITYDNGFLFIHTDKPVYTPDQSVKVRVYSLNDDLKPAKRETVLTFIDPEGSEVDMVEEIDHIGIISFPDFKIPSNPRYGMWTIKAKYKEDFSTTGTAYFEVKEYVLPHFSVSIEPEYNFIGYKNFKNFEITIKARYFYNKVVTEADVYITFGIREDLKDDQKEMMQTAMQNTMLINGIAQVTFDSETAVKELSYYSLEDLNNKYLYIAVTVIESTGGFSEEAEIPGIKYVLSPYKLNLVATPLFLKPGIPYPIKVQVKDSLDQLVGGVPVTLNAQTIDVNQETSDLDPSKSVTRVDDGVASFVLNLPSGVTVLEFNVKTDAPDLPEENQAREGYRAIAYSSLSQSYLYIDWTDNHKALLVGEHLNIIVTPKSPYIDKITHYNYLILSKGKIIHFGTREKFSDASYQSINIPVTQNMVPSSRLLVYYIVTGEQTAELVSDSVWLNIEEKCGNQLQVHLSPDADAYSPGQTVSLNMATGMDSWVALAAVDSAVYGVQRGAKKPWKRAGGGLNNANVFHLAGLTFLTNANADDSQENDEPCKEILRPRRTLQKKIEEIAAKYKHSVVKKCCYDGACVNNDETCEQRAARISLGPRCIKAFTECCVVASQLRANISHKDMQLGRLHMKTLLPVSKPEIRSYFPESWLWEVHLVPRRFILLSCICVADTVKAKVFKDVFLEMNIPYSVVRGEQIQLKGTVYNYRTSGMQFCVKMSAVEGICTSESPVIDHQGTKSSKCVRQKVEGSSSHLVTFTVLPLEIGLHNINFSLETWFGKEILVKTLRVVPEGVKRESYSGVTLDPRGIYGTISRRKEFPYRIPLDLVPKTEIKRILSVKINILTHLPKGSAEAELMSVVPVFYVFHYLETGNHWNIFHSDPLIEKQKLKKKLKEGMLSIMSYRNADYSYSVWKGGSASTWLTAFALRVLGQVNKYVEQNQNSICNSLLWLVENYQLDNGSFKENSQYQPIKLQGTLPVEARENSLYLTAFTVIGIRKAFDICPLVKIDTALIKADNFLLENTLPAQSTFTLAISAYALSLGDKSNPPIYRFWKDNLQHKDSSVPNTGTARMVETTAYALLTSLNLKDINYVNPVIKWLSEEQRYGGGFYSTQDTINAIEGLTEYSLLVKQLRLSMDIDVSYKHKGALHNYKMTDKNFLGRPVEVLLNDDLIVSTGFGSGLATVHVTTVVHKTSTSEEVCSFYLKIDTQDIEASHYRGYGNSDYKRIVACASYKPSREESSSGSSHAVMDISLPTGISANEEDLKALVEGVDQLFTDYQIKDGHVILQLNSIPSSDFLCVRFRIFELFEVGFLSPATFTVYEYHRPDKQCTMFYSTSNIKIQKVCEGAACKCVEADCGQMQEELDLTISAETRKQTACKPEIAYAYKVSITSITVENVFVKYKATLLDIYKTGEAVAEKDSEITFIKKVTCTNAELVKGRQYLIMGKEALQIKYNFSFRYIYPLDSLTWIEYWPRDTTCSSCQAFLANLDEFAEDIFLNGC

SEQ ID NO: 871414 - protein, 253 aa, Homo sapiens
MDISLPTGISANEEDLKALVEGVDQLFTDYQIKDGHVILQLNSIPSSDFLCVRFRIFELFEVGFLSPATFTVYEYHRPDKQCTMFYSTSNIKIQKVCEGAACKCVEADCGQMQEELDLTISAETRKQTACKPEIAYAYKVSITSITVENVFVKYKATLLDIYKTGEAVAEKDSEITFIKKVTCTNAELVKGRQYLIMGKEALQIKYNFSFRYIYPLDSLTWIEYWPRDTTCSSCQAFLANLDEFAEDIFLNGC

SEQ ID NO: 871415 - protein, 899 aa, Homo sapiens
YIRGFLLPPTMGLLGILCFLIFLGKTWGQEQTYVISAPKIFRVGASENIVIQVYGYTEAFDATISIKSYPDKKFSYSSGHVHLSSENKFQNSAILTIQPKQLPGGQNPVSYVYLEVVSKHFSKSKRMPITYDNGFLFIHTDKPVYTPDQSVKVRVYSLNDDLKPAKRETVLTFIDPEGSEVDMVEEIDHIGIISFPDFKIPSNPRYGMWTIKAKYKEDFSTTGTAYFEVKEYVLPHFSVSIEPEYNFIGYKNFKNFEITIKARYFYNKVVTEADVYITFGIREDLKDDQKEMMQTAMQNTMLINGIAQVTFDSETAVKELSYYSLEDLNNKYLYIAVTVIESTGGFSEEAEIPGIKYVLSPYKLNLVATPLFLKPGIPYPIKVQVKDSLDQLVGGVPVTLNAQTIDVNQETSDLDPSKSVTRVDDGVASFVLNLPSGVTVLEFNVKTDAPDLPEENQAREGYRAIAYSSLSQSYLYIDWTDNHKALLVGEHLNIIVTPKSPYIDKITHYNYLILSKGKIIHFGTREKFSDASYQSINIPVTQNMVPSSRLLVYYIVTGEQTAELVSDSVWLNIEEKCGNQLQVHLSPDADAYSPGQTVSLNMATGMDSWVALAAVDSAVYGVQRGAKKPLERAGGGLNNANVFHLAGLTFLTNANADDSQENDEPCKEILRPRRTLQKKIEEIAAKYKHSVVKKCCYDGACVNNDETCEQRAARISLGPRCIKAFTECCVVASQLRANISHKDMQLGRLHMKTLLPVSKPEIRSYFPESWLWEVHLVPRRKQLQFALPDSLTTWEIQGVGISNTGICVADTVKAKVFKDVFLEMNIPYSVVRGEQIQLKGTVYNYRTSGMQSLALSPRLECNGKISGQLQVRLPGSSDSPASASQVAGITGTHHHAQPT

SEQ ID NO: 871416 - protein, 120 aa, Homo sapiens
VAFWLNLPKCLNERQGTCIPNYRTLPSFSNEIRMFYLIIPNSSNSYTSFEKFNAGHRAYACCPTPKEAYHSQGLIKCSLSRNGGLLSTVFFFLCFLGMLSIMSYRNADYSYSVWKGGSAS

SEQ ID NO: 871417 - protein, 782 aa, Homo sapiens
MGKRDRADRDKKKSRKRHYEDEEDDEEDAPGNDPQEAVPSAAGKQVDESGTKVDEYGAKDYRLQMPLKDDHTSRPLWVAPDGHIFLEAFSPVYKYAQDFLVAIAEPVCRPTHVHEYKLTAYSLYAAVSVGLQTSDITEYLRKLSKTGVPDGIMQFIKLCTVSYGKVKLVLKHNRYFVESCHPDVIQHLLQDPVIRECRLRNSEGEATELITETFTSKSAISKTAESSGGPSTSRVTDPQGKSDIPMDLFDFYEQMDKDEEEEEETQTVSFEVKQEMIEELQKRCIHLEYPLLAEYDFRNDSVNPDINIDLKPTAVLRPYQEKSLRKMFGNGRARSGVIVLPCGAGKSLVGVTAACTVRKRCLVLGNSAVSVEQWKAQFKMWSTIDDSQICRFTSDAKDKPIGCSVAISTYSMLGHTTKRSWEAERVMEWLKTQEWGLMILDEVHTIPAKMFRRVLTIVQAHCKLGLTATLVREDDKIVDLNFLIGPKLYEANWMELQNNGYIAKVQCAEVWCPMSPEFYREYVAIKTKKRILLYTMNPNKFRACQFLIKFHERRNDKIIVFADNVFALKEYAIRLNKPYIYGPTSQGERMQILQNFKHNPKINTIFISKVGDTSFDLPEANVLIQISSHGGSRRQEAQRLGRVLRAKKGMVAEEYNAFFYSLVSQDTQEMAYSTKRQRFLVDQGYSFKVITKLAGMEEEDLAFSTKEEQQQLLQKVLAATDLDAEEEVVAGEFGSRSSQASRRFGTMSSMSGADDTVYMEYHSSRSKAPSKHVHPLFKRFRK

SEQ ID NO: 871418 - protein, 917 aa, Homo sapiens
MGKRDRADRDKKKSRKRHYEDEEDDEEDAPGNDPQEAVPSAAGKQVDESGTKVDEYGAKDYRLQMPLKDDHTSRPLWVAPDGHIFLEAFSPVYKYAQDFLVAIAEPVCRPTHVHEYKLTAYSLYAAVSVGLQTSDITEYLRKLSKTGVPDGIMQFIKLCTVSYGKVKLVLKHNSVRDSMTGLSQGHCHFLRTSRNKGIWEGPDVYAVFSVKHREEKRNQEMWPRLETHPLATVFPLAVELGSGPLPTLTSKSQPSYVKSWPAAHGTDLAKGCGESHEACISRPSNGMSSGISRRYLLVSETPSSSPACRYFVESCHPDVIQHLLQDPVIRECRLRNSEGEATELITETFTSKSAISKTAESSGGPSTSRVTDPQGKSDIPMDLFDFYEQMDKDEEEEEETQTVSFEVKQEMIEELQKRCIHLEYPLLAEYDFRNDSVNPDINIDLKPTAVLRPYQEKSLRKMFGNGRARSGVIVLPCGAGKSLVGVTAACTVRKRCLVLGNSAVSVEQWKAQFKMWSTIDDSQICRFTSDAKDKPIGCSVAISTYSMLGHTTKRSWEAERVMEWLKTQEWGLMILDEVHTIPAKMFRRVLTIVQAHCKLGLTATLVREDDKIVDLNFLIGPKLYEANWMELQNNGYIAKVQCAEVWCPMSPEFYREYVAIKTKKRILLYTMNPNKFRACQFLIKFHERRNDKIIVFADNVFALKEYAIRLNKPYIYGPTSQGERMQILQNFKHNPKINTIFISKVGDTSFDLPEANVLIQISSHGGSRRQEAQRLGRVLRAKKGMVAEEYNAFFYSLVSQDTQEMAYSTKRQRFLVDQGYSFKVITKLAGMEEEDLAFSTKEEQQQLLQKVLAATDLDAEEEVVAGEFGSRSSQASRRFGTMSSMSGADDTVYMEYHSSRSKAPSKHVHPLFKRFRK

SEQ ID NO: 871419 - protein, 537 aa, Homo sapiens [sequence omitted]

SEQ ID NO: 871420 - protein, 537 aa, Homo sapiens [sequence omitted]

SEQ ID NO: 871421 - protein, 782 aa, Homo sapiens; identical to SEQ ID NO: 871417

SEQ ID NO: 871422 - protein, 668 aa, Homo sapiens
MGKRDRADRDKKKSRKRHYEDEEDDEEDAPGNDPQEAVPSAAGKQVDESGTKVDEYGAKDYRLQMPLKDDHTSRPLWVAPDGHIFLEAFSPVYKYAQDFLVAIAEPVCRPTHVHEYKLTAYSLYAAVSVGLQTSDITEYLRKLSKTGVPDGIMQFIKLCTVSYGKVKLVLKHNRYFVESCHPDVIQHLLQDPVIRECRLRNSEGEATELITETFTSKSAISKTAESSGGPSTSRVTDPQGKSDIPMDLFDFYEQMDKDEEEEEETQTVSFEVKQEMIEELQKRCIHLEYPLLAEYDFRNDSVNPDINIDLKPTAVLRPYQEKSLRKMFGNGRARSGVIVLPCGAGKSLVGVTAACTVRKRCLVLGNSAVSVEQWKAQFKMWSTIDDSQICRFTSDAKDKPIGCSVAISTYSMLGHTTKRSWEAERVMEWLKTQEWGLMILDEVHTIPAKMFRRVLTIVQAHCKLGLTATLVREDDKIVDLNFLIGPKLYEANWMELQNNGYIAKVQCAEVWCPMSPEFYREYVAIKTKKRILLYTMNPNKFRACQFLIKFHERRNDKIIVFADNVFALKEYAIRLNKPYIYGPTSQGERMQILQNFKHNPKINTIFISKVGDTSFDLPEANVLIQISSHGGSRRQEAQRLGRVLRAKKGHTGNGLLNQAAEILGRSRL

SEQ ID NO: 871423 - protein, 581 aa, Homo sapiens
MGKRDRADRDKKKSRKRHYEDEEDDEEDAPGNDPQEAVPSAAGKQVDESGTKVDEYGAKDYRLQMPLKDDHTSRPLWVAPDGHIFLEAFSPVYKYAQDFLVAIAEPVCRPTHVHEYKLTAYSLYAAVSVGLQTSDITEYLRKLSKTGVPDGIMQFIKLCTVSYGKVKLVLKHNRYFVESCHPDVIQHLLQDPVIRECRLRNSEGEATELITETFTSKSAISKTAESSGGPSTSRVTDPQGKSDIPMDLFDFYEQMDKDEEEEEETQTVSFEVKQEMIEELQKRCIHLEYPLLAEYDFRNDSVNPDINIDLKPTAVLRPYQEKSLRKMFGNGRARSGVIVLPCGAGKSLVGVTAACTVRKRCLVLGNSAVSVEQWKAQFKMWSTIDDSQICRFTSDAKDKPIGCSVAISTYSMLGHTTKRSWEAERVMEWLKTQEWGLMILDEVHTIPAKMFRRVLTIVQAHCKLGLTATLVREDDKIVDLNFLIGPKLYEANWMELQNNGYIAKVQCAEVWCPMSPEFYREYVAIKTKKRILLYTMNPNKFRACQFLIKFHERRNDKIIVFADNVFALCMPSTDPYITGSL

SEQ ID NO: 871424 - protein, 358 aa, Homo sapiens
MGKRDRADRDKKKSRKRHYEDEEDDEEDAPGNDPQEAVPSAAGKQVDESGTKVDEYGAKDYRLQMPLKDDHTSRPLWVAPDGHIFLEAFSPVYKYAQDFLVAIAEPVCRPTHVHEYKLTAYSLYAAVSVGLQTSDITEYLRKLSKTGVPDGIMQFIKLCTVSYGKVKLVLKHNRYFVESCHPDVIQHLLQDPVIRECRLRNSEGEATELITETFTSKSAISKTAESSGGPSTSRVTDPQGKSDIPMDLFDFYEQMDKDEEEEEETQTVSFEVKQEMMLRQGTSFKTGAWHPCWKGIFSITFSFHLFDLPSSVGQIVLRKMHQGLGCAFIGHLGFYKGGGDNIFSNFLGSGVISVYKKC

SEQ ID NO: 871425 - protein, 174 aa, Homo sapiens [sequence omitted]

SEQ ID NO: 871426 - protein, 44 aa, Homo sapiens
MEEEDLAFSTKEEQQQLLQKVLAATDLDAEEEVVAGEFGSRSSQ

SEQ ID NO: 871427 - protein, 845 aa, Homo sapiens
MGKRDRADRDKKKSRKRHYEDEEDDEEDAPGNDPQEAVPSAAGKQVDESGTKVDEYGAKDYRLQMPLKDDHTSRPLWVAPDGHIFLEAFSPVYKYAQDFLVAIAEPVCRPTHVHEYKLTAYSLYAAVSVGLQTSDITEYLRKLSKTGVPDGIMQFIKLCTVSYGKVKLVLKHNRYFVESCHPDVIQHLLQDPVIRECRLRNSEGEATELITETFTSKSAVMWTPGPPLGGGRHLGFQFSQVSLTQHLQPSSPAGSTLYNFTHCLITAELNVAVHVQHLPLSQISKTAESSGGPSTSRVTDPQGKSDIPMDLFDFYEQMDKDEEEEEETQTVSFEVKQEMIEELQKRCIHLEYPLLAEYDFRNDSVNPDINIDLKPTAVLRPYQEKSLRKMFGNGRARSGVIVLPCGAGKSLVGVTAACTVRKRCLVLGNSAVSVEQWKAQFKMWSTIDDSQICRFTSDAKDKPIGCSVAISTYSMLGHTTKRSWEAERVMEWLKTQEWGLMILDEVHTIPAKMFRRVLTIVQAHCKLGLTATLVREDDKIVDLNFLIGPKLYEANWMELQNNGYIAKVQCAEVWCPMSPEFYREYVAIKTKKRILLYTMNPNKFRACQFLIKFHERRNDKIIVFADNVFALKEYAIRLNKPYIYGPTSQGERMQILQNFKHNPKINTIFISKVGDTSFDLPEANVLIQISSHGGSRRQEAQRLGRVLRAKKGMVAEEYNAFFYSLVSQDTQEMAYSTKRQRFLVDQGYSFKVITKLAGMEEEDLAFSTKEEQQQLLQKVLAATDLDAEEEVVAGEFGSRSSQASRRFGTMSSMSGADDTVYMEYHSSRSKAPSKHVHPLFKRFRK

SEQ ID NO: 871428 - protein, 630 aa, Homo sapiens
MQFIKLCTVSYGKVKLVLKHNRYFVESCHPDVIQHLLQDPVIRECRLRNSEGEATELITETFTSKSAISKTAESSGGPSTSRVTDPQGKSDIPMDLFDFYEQMDKDEEEEEETQTVSFEVKQEMIEELQKRCIHLEYPLLAEYDFRNDSVNPDINIDLKPTAVLRPYQEKSLRKMFGNGRARSGVIVLPCGAGKSLVGVTAACTVRKRCLVLGNSAVSVEQWKAQFKMWSTIDDSQICRFTSDAKDKPIGCSVAISTYSMLGHTTKRSWEAERVMEWLKTQEWGLMILDEVHTIPAKMFRRVLTIVQAHCKLGLTATLVREDDKIVDLNFLIGPKLYEANWMELQNNGYIAKVQCAEVWCPMSPEFYREYVAIKTKKRILLYTMNPNKFRACQFLIKFHERRNDKIIVFADNVFALKEYAIRLNKPYIYGPTSQGERMQILQNFKHNPKINTIFISKVGDTSFDLPEANVLIQISSHGGSRRQEAQRLGRVLRAKKGMVAEEYNAFFYSLVSQDTQEMAYSTKRQRFLVDQGYSFKVITKLAGMEEEDLAFSTKEEQQQLLQKVLAATDLDAEEEVVAGEFGSRSSQASRRFGTMSSMSGADDTVYMEYHSSRSKAPSKHVHPLFKRFRK

SEQ ID NO: 871429 - protein, 782 aa, Homo sapiens; identical to SEQ ID NO: 871417

SEQ ID NO: 871430 - protein, 776 aa, Homo sapiens
MGKRDRADRDKKKSRKRHYEDEEDDEEDAPGNDPQEAVPSAAGKQVDESGTKVDEYGAKDYRLQMPLKDDHTSRPLWVAPDGHIFLEAFSPVYKYAQDFLVAIAEPVCRPTHVHEYKLTAYSLYAAVSVGLQTSDITEYLRKLSKTGVPDGIMQFIKLCTVSYGKVKLVLKHNRYFVESCHPDVIQHLLQDPVIRECRLRNSEGEATELITETFTSKSAISKTAESSGGPSTSRVTDPQGKSDIPMDLFDFYEQMDKDEEEEEETQTVSFEVKQEMIEELQKRCIHLEYPLLAEYDFRNDSVNPDINIDLKPTAVLRPYQEKSLRKMFGNGRARSGVIVLPCGAGKSLVGVTAACTVRKRCLVLGNSAVSVEQWKAQFKMWSTIDDSQICRFTSDAKDKPIGCSVAISTYSMLGHTTKRSWEAERVMEWLKTQEWGLMILDEVHTIPAKMFRRVLTIVQAHCKLGLTATLVREDDKIVDLNFLIGPKLYEANWMELQNNGYIAKVQCAEVWCPMSPEFYREYVAIKTKKRILLYTMNPNKFRACQFLIKFHERRNDKIIVFADNVFALKEYAIRLNKPYIYGPTSQGERMQILQNFKHNPKINTIFISKVGDTSFDLPEANVLIQISSHGGSRRQEAQRLGRVLRAKKGMVAEEYNAFFYSLVSQDTQEMAYSTKRQRFLVDQGYSFKVITKLAGMEEEDLAFSTKEEQQQLLQKVLAATDLDAEEEVVAGEFGSRSSQAFGAFGTHEFLMFWGPDRTLGFHWRLPPHIAGAKGAS

SEQ ID NO: 871431 - protein, 780 aa, Homo sapiens
  misc_feature (724)..(724): Xaa can be any naturally occurring amino acid
MGKRDRADRDKKKSRKRHYEDEEDDEEDAPGNDPQEAVPSAAGKQVDESGTKVDEYGAKDYRLQMPLKDDHTSRPLWVAPDGHIFLEAFSPVYKYAQDFLVAIAEPVCRPTHVHEYKLTAYSLYAAVSVGLQTSDITEYLRKLSKTGVPDGIMQFIKLCTVSYGKVKLVLKHNRYFVESCHPDVIQHLLQDPVIRECRLRNSEGEATELITETFTSKSAISKTAESSGGPSTSRVTDPQGKSDIPMDLFDFYEQMDKDEEEEEETQTVSFEVKQEMIEELQKRCIHLEYPLLAEYDFRNDSVNPDINIDLKPTAVLRPYQEKSLRKMFGNGRARSGVIVLPCGAGKSLVGVTAACTVRKRCLVLGNSAVSVEQWKAQFKMWSTIDDSQICRFTSDAKDKPIGCSVAISTYSMLGHTTKRSWEAERVMEWLKTQEWGLMILDEVHTIPAKMFRRVLTIVQAHCKLGLTATLVREDDKIVDLNFLIGPKLYEANWMELQNNGYIAKVQCAEVWCPMSPEFYREYVAIKTKKRILLYTMNPNKFRACQFLIKFHERRNDKIIVFADNVFALKEYAIRLNKGDTSFDLPEANVLIQISSHGGSRRQEAQRLGRVLRAKKGMVAEEYNAFFYSLVSQDTQEMAYSTKRQRFLVDQGYSFKPVLVHVIRTRGWRGNGVSTRGPASSRRMTVPERGGTGQHDWLPNMSAVDHWGSNRLGTIRYSSEDNVHXGNDIRQEPLYTRPQRYTYARSHKANAFTQPADHTSAHDADAGATAAEDHPYDDHRH

SEQ ID NO: 871432 - protein, 277 aa, Homo sapiens
PHLRLVEARVNGTGPKQFLVAIAEPVCRPTHVHEYKLTAYSLYAAVSVGLQTSDITEYLRKLSKTGVPDGIMQFIKLCTVSYGKVKLVLKHNRYFVESCHPDVIQHLLQDPVIRECRLRNSEGEATELITETFTSKSAISKTAESSGGPSTSRVTDPQGKSDIPMDLFDFYEQMDKDEEEEEETQTVSFEVKQEMMLRQGTSFKTGAWHPCWKGIFSITFSFHLFDLPSSVGQIVLRKMHQGLGCAFIGHLGFYKGGGDNIFSNFLGSGVISVYKKC

SEQ ID NO: 871433 - protein, 131 aa, Homo sapiens
MGKRDRADRDKKKSRKRHYEDEEDDEEDAPGNDPQEAVPSAAGNQGLQAANAAEGRPHLQAPLGAVSVGLQTSDITEYLRKLSKTGVPDGIMQFIKLEKTCCCLPLSPFMTLGKSRNVFVLNNSLFKNMIV

SEQ ID NO: 871434 - protein, 77 aa, Homo sapiens
YEDEEDDEEDAPGNDPQEAVPSAAGKQVDESGTKVDEYGAKDYRLQMPLKDDHTSRPLWVVSMPLAWAGPRSVRSGS

SEQ ID NO: 871435 - protein, 83 aa, Homo sapiens
MILKHHFNPVFPLLTKTNSGIKGTLHLGLKCLSLLPVLSPPFRSDRTTQSPTLVRLILLLPFFSRNPSLDLRNSTSHLKVTVH

SEQ ID NO: 871436 - protein, 278 aa, Homo sapiens [sequence omitted]

SEQ ID NO: 871437 - protein, 157 aa, Homo sapiens
ICSPLLYSVIISNKACFSLILGVYIIGLVCASVHTGCMFRVQFCKFDLINHYFCDLLPLLKLSCSSIYVNKLLILCVGAFNILVPSLTILCSYIFIIASILHIRSTEGRSKAFSTCSSHMLAVVIFFGSAAFMYLQPSSISSMDQGKVSSVFYTIIV

SEQ ID NO: 871438 - protein, 110 aa, Homo sapiens
AQSIISSWVSEEAYYGRFVQQRYLSYRRVPHTNPPEYEFSWGPRSNLEISKMEVLGFVAKLHKKEPQHWPVQYREALADEADRARAKARAEASMRARPVLGPASTSGEGW

SEQ ID NO: 871439 - protein, 69 aa, Homo sapiens
ARGQGCSLQGMTAKLKLWLQGRQPEEGPEAGHGQGASKPSCVDENWVCFCSTQCSGGRPDHRLHACSWV

SEQ ID NO: 871440 - protein, 171 aa, Homo sapiens
RESWLRRAPCALHMGRLTEAAAAGSGSRAAGWAGSPPTLLPLSPTSPRCAATMASSDEDGTNGGASEAGEDREAPGKRRRLGFLATAWLTFYDIAMTAGRRLILSPRLECIGAISAHCQPQPPEFKRFSCLGLRSSWDYKRGPPRPINFCIFGRDRVSPCWPGWSRTPDLK

SEQ ID NO: 871441 - protein, 301 aa, Homo sapiens
RESWLRRAPCALHMGRLTEAAAAGSGSRAAGWAGSPPTLLPLSPTSPRCAATMASSDEDGTNGGASEAGEDREAPGKRRRLGFLATAWLTFYDIAMTAGWLVLAIAMVRFYMEKGTHRGLYKSIQKTLKFFQTFALLEIVHCLIGIVPTSVIVTGVQVSSRIFMVWLITHSIKPIQNEESVVLFLVAWTVTEITRYSFYTFSLLDHLPYFIKWARYNFFIILYPVGVAGELLTIYAALPHVKKTGMFSIRLPNKYNVSFDYYYFLLITMASYIPLFPQLYFHMLRQRRKVLHGEVIVEKDD

SEQ ID NO: 871442 - protein, 138 aa, Homo sapiens
MVWLITHSIKPIQNEESVVLFLVAWTVTEITRYSFYTFSLLDHLPYFIKWARYNFFIILYPVGVAGELLTIYAALPHVKKTGMFSIRLPNKYNVSFDYYYFLLITMASYIPLFPQLYFHMLRQRRKVLHGEVIVEKDD

SEQ ID NO: 871443 - protein, 178 aa, Homo sapiens
YTQPSQHPGPSILLLHMGRLTEAAAAGSGSRAAGWAGSPPTLLPLSPTSPRCAATMASSDEDGTNGGASEAGEDREAPGKRRRLGFLATAWLTFYDIAMTAGWLVLAIAMVRFYMEKGTHRGLYKSIQKTLKFFQTFALLEIVHCLIGIVPTSVIVTGVQVSSRIFMVWLITHSIKPI

SEQ ID NO: 871444 - protein, 304 aa, Homo sapiens
YTQPSQHPGPSILLLHMGRLTEAAAAGSGSRAAGWAGSPPTLLPLSPTSPRCAATMASSDEDGTNGGASEAGEDREAPGKRRRLGFLATAWLTFYDIAMTAGWLVLAIAMVRFYMEKGTHRGLYKSIQKTLKFFQTFALLEIVHCLIGIVPTSVIVTGVQVSSRIFMVWLITHSIKPIQNEESVVLFLVAWTVTEITRYSFYTFSLLDHLPYFIKWARYNFFIILYPVGVAGELLTIYAALPHVKKTGMFSIRLPNKYNVSFDYYYFLLITMASYIPLFPQLYFHMLRQRRKVLHGEVIVEKDD

SEQ ID NO: 871445 - protein, 301 aa, Homo sapiens; identical to SEQ ID NO: 871441

SEQ ID NO: 871446 - protein, 301 aa, Homo sapiens; identical to SEQ ID NO: 871441

SEQ ID NO: 871447 - protein, 224 aa, Homo sapiens
YTQPSQHPGPSILLLHMGRLTEAAAAGSGSRAAGWAGSPPTLLPLSPTSPRCAATMASSDEDGTNGGASEAGEDREAPGKRRRLGFLATAWLTFYDIAMTAGWLVLAIAMVRFYMEKGTHRGLYKSIQKTLKFFQTFALLEIVHCLIGIVPTSVIVTGVQVSSRIFMVWLITHSIKPIQNEESVVLFLVAWTVTEITRYSFYTFSLLDHLPYFIKWARWRYLAV

SEQ ID NO: 871448 - protein, 152 aa, Homo sapiens
EPLSRPGILRSLHFQGQPQRVRSEEFLSTKSAHFSDNTEFPFLCLREKGKETLPGSFPVFPWSNARIYFCHNAKLKKKKIQRSDTLGGCYVTDFSKFCCGEREGGELKTAHNRNEMYISAVDLKSTAWLVGRKIISLENSNSALTFFFYNFR

SEQ ID NO: 871449 - protein, 80 aa, Homo sapiens
  misc_feature (80)..(80): Xaa can be any naturally occurring amino acid
SDLHEVVSLKERMARYQAAVSRGDCRSFSANMMEESEMCAVPGGLAKVKKQFEDEITSSRNTFAQYQYQHQNRSEQEAIX

SEQ ID NO: 871450 - protein, 958 aa, Homo sapiens
MHTCCPPVTLEQDLHRKMHSWMLQTLAFAVTSLVLSCAETIDYYGEICDNACPCEEKDGILTVSCENRGIISLSEISPPRFPIYHLLLSGNLLNRLYPNEFVNYTGASILHLGSNVIQDIETGAFHGLRGLRRLHLNNNKLELLRDDTFLGLENLEYLQVDYNYISVIEPNAFGKLHLLQVLILNDNLLSSLPNNLFRFVPLTHLDLRGNRLKLLPYVGLLQHMDKVVELQLEENPWNCSCELISLKDWLDSISYSALVGDVVCETPFRLHGRDLDEVSKQELCPRRLISDYEMRPQTPLSTTGYLHTTPASVNSVATSSSAVYKPPLKPPKGTRQPNKPRVRPTSRQPSKDLGYSNYGPSIAYQTKSPVPLECPTACSCNLQISDLGLNVNCQERKIESIAELQPKPYNPKKMYLTENYIAVVRRTDFLEATGLDLLHLGNNRISMIQDRAFGDLTNLRRLYLNGNRIERLSPELFYGLQSLQYLFLQYNLIREIQSGTFDPVPNLQLLFLNNNLLQAMPSGVFSGLTLLRLNLRSNHFTSLPVSGVLDQLKSLIQIDLHDNPWDCTCDIVGMKLWVEQLKVGVLVDEVICKAPKKFAETDMRSIKSELLCPDYSDVVVSTPTPSSIQVPARTSAVTPAVRLNSTGAPASLGAGGGASSVPLSVLILSLLLVFIMSVFVAAGLFVLVMKRRKKNQSDHTSTNNSDVSSFNMQYSVYGGGGGTGGHPHAHVHHRGPALPKVKTPAGHVYEYIPHPLGHMCKNPIYRSREGNSVEDYKDLHELKVTYSSNHHLQQQQQPPPPPQQPQQQPPPQLQLQPGEEERRESHHLRSPAYSVSTIEPREDLLSPVQDADRFYRGILEPDKHCSTTPAGNSLPEYPKFPCSPAAYTFSPNYDLRRPHQYLHPGAGDSRLREPVLYSPPSAVFVEPNRNEYLELKAKLNVEPDYLEVLEKQTTFSQF

SEQ ID NO: 871451 - protein, 639 aa, Homo sapiens
ARLSKGSDRKWSWGDKNVDNNKRISTGKKMSQTSLKQKKNEPGMRSSKESLEAEKRKESDKTGVRLSNQMRRAVNPNHSLRCCPFQGHSSCRRCLCAAEGTALGPCHTIRIYIHMCLLWEQGQQITMMRGSQESSLRKTDSRGYLVRSQWSRISRSPSTKAPSIDEPRSRNTSAKLPSSSTSSRTPSTSPSLHDSSPPPLSGQPSLQPPASPQLPRSLDSRPPTPPEPDPGSRRSTKMQENPEAWAQGIVREIRQTRDSQPLEYSRTSPTEWKSSSQRRGIYPASTQLDRNSLSEQQQQQREDEDDYEAAYWASMRSFYEKNPSCSRPWPPKPKNAITIALSSCALFNMVDGRKIYEQEGLEKYMEYQLTNENVILTPGPAFRFVKALQYVNARLRDLYPDEQDLFDIVLMTNNHAQVGVRLINSVNHYGLLIDRFCLTGGKDPIGYLKAYLTNLYIAADSEKVQEAIQEGIASATMFDGAKDMAYCDTQLRVAFDGDAVLFSDESEHFTKEHGLDKFFQYDTLCESKPLAQGPLKGFLEDLGRLQKKFYAKNERLLCPIRTYLVTARSAASSGARVLKTLRRWGLEIDEALFLAGAPKSPILVKIRPHIFFDDHMFHIEGAQRLGSIAAYGFNKKFSS

SEQ ID NO: 871452 - protein, 579 aa, Homo sapiens
ARLSKGSDRKWSWGDKNVDNNKRISTGKKMSQTSLKQKKNEPGMRSSKESLEAEKRKESDKTGVRLSNQGSQESSLRKTDSRGYLVRSQWSRISRSPSTKAPSIDEPRSRNTSAKLPSSSTSSRTPSTSPSLHDSSPPPLSGQPSLQPPASPQLPRSLDSRPPTPPEPDPGSRRSTKMQENPEAWAQGIVREIRQTRDSQPLEYSRTSPTEWKSSSQRRGIYPASTQLDRNSLSEQQQQQREDEDDYEAAYWASMRSFYEKNPSCSRPWPPKPKNAITIALSSCALFNMVDGRKIYEQEGLEKYMEYQLTNENVILTPGPAFRFVKALQYVNARLRDLYPDEQDLFDIVLMTNNHAQVGVRLINSVNHYGLLIDRFCLTGGKDPIGYLKAYLTNLYIAADSEKVQEAIQEGIASATMFDGAKDMAYCDTQLRVAFDGDAVLFSDESEHFTKEHGLDKFFQYDTLCESKPLAQGPLKGFLEDLGRLQKKFYAKNERLLCPIRTYLVTARSAASSGARVLKTLRRWGLEIDEALFLAGAPKSPILVKIRPHIFFDDHMFHIEGAQRLGSIAAYGFNKKFSS

SEQ ID NO: 871453 - protein, 579 aa, Homo sapiens; identical to SEQ ID NO: 871452

SEQ ID NO: 871454 - protein, 135 aa, Homo sapiens
RASRRHKKSLNFKKRKEGTTPGCRSDRPPGSLAMRECSLQVTVSPPAAPVGELGRSLAAPNGFVTGLFVADAPAGRRRSQVIRQSSVQAEHPEPPARGSLHHLPLLWCSVSAQNRFGVEFKLKSLLGQRKFAPDG

SEQ ID NO: 871455 - protein, 105 aa, Homo sapiens
MAPAGMSGAQDNSCLYQEIAPSFQRLPCPRTSSRHFSEAMTCPCGWRPFKGGPGGLKGPVWPAKEENSCSHGRIQRVQRRRVPSASPLIQKINRRSVLFHPYCWS

SEQ ID NO: 871456 - protein, 33 aa, Homo sapiens
MVPAQTLGQAPALSSRRSQAGTRELLEDRESGR

SEQ ID NO: 871457 - protein, 277 aa, Homo sapiens
MCVGARRLGRGPCAALLLLGLGLSTVTGLHCVGDTYPSNDRCCHECRPGNGMVSRCSRSQNTVCRPCGPGFYNDVVSSKPCKPCTWCNLRSGSERKQLCTATQDTVCRCRAGTQPLDSYKPGVDCAPCPPGHFSPGDNQACKPWTNCTLAGKHTLQPASNSSDAICEDRDPPATQPQETQGPPARPITVQPTEAWPRTSQGPSTRPVEVPGGRAVAAILGLGLVLGLLGPLAILLALYLLRRDQRLPPDAHKPPGGGSFRTPIQEEQADAHSTLAKI

SEQ ID NO: 871458 - protein, 222 aa, Homo sapiens
PGAPPLPPGAQTRPRPRGVGETTLAMWPGLAGLSRSGSERKQLCTATQDTVCRCRAGTQPLDSYKPGVDCAPCPPGHFSPGDNQACKPWTNCTLAGKHTLQPASNSSDAICEDRDPPATQPQETQGPPARPITVQPTEAWPRTSQGPSTRPVEVPGGRAVAAILGLGLVLGLLGPLAILLALYLLRRDQRLPPDAHKPPGGGSFRTPIQEEQADAHSTLAKI

SEQ ID NO: 871459 - protein, 277 aa, Homo sapiens; identical to SEQ ID NO: 871457

SEQ ID NO: 871460 - protein, 237 aa, Homo sapiens
QAGTRRNGLMMRGSGLTLPSLPSARFSAGPPTQRSRPTMSNMEKHLFNLKFAAKELSRSAKKCDKEEKAEKAKIKKAIQKGNMEVARIHAENAIRQKNQAVNFLRMSARVDAVAARVQTAVTMGKVTKSMAGVVKSMDATLKTMNLEKISALMDKFEHQFETLDVQTQQMEDTMSSTTTLTTPQNQVDMLLQEMADEAGLDLNMELPQGQTGSVGTSVASAEQDELSQRLARLRDQV

SEQ ID NO: 871461 - protein, 199 aa, Homo sapiens
MSNMEKHLFNLKFAAKELSRSAKKCDKEEKAEKAKIKKAIQKGNMEVARIHAENAIRQKNQAVNFLRMSARVDAVAARVQTAVTMGKVTKSMAGVVKSMDATLKTMNLEKISALMDKFEHQFETLDVQTQQMEDTMSSTTTLTTPQNQVDMLLQEMADEAGLDLNMELPQGQTGSVGTSVASAEQDELSQRLARLRDQV

SEQ ID NO: 871462 - protein, 203 aa, Homo sapiens
GRVGRPTRRKHLFNLKFAAKELSRSAKKCDKEEKAEKAKIKKAIQKGNMEVARIHAENAIRQKNQAVNFLRMSARVDAVAARVQTAVTMGKVTKSMAGVVKSMDATLKTMNLEKISALMDKFEHQFETLDVQTQQMEDTMSSTTTLTTPQNQVDMLLQEMADEAGLDLNMELPQGQTGSVGTSVASAEQDELSQRLARLRDQV

SEQ ID NO: 871463 - protein, 199 aa, Homo sapiens; identical to SEQ ID NO: 871461

SEQ ID NO: 871464 - protein, 218 aa, Homo sapiens
MSNMEKHLFNLKFAAKELSRSAKKCDKEEKAEKAKIKKAIQKGNMEVARIHAENAIRQKNQAVNFLRMSARVDAVAARVQTAVTMGKVTKSMAGVVKSMDATLKTMNLEKISALMDKFEHQFETLDVQTQQMEDTMSSTTTLTTPQNQVDMLLQEMADEAGLDLNMELPQGQTGSVGTSVASAEQDELSQRLAPAFSGNQVVYPGRKPPLPGGVFSLG

SEQ ID NO: 871465 - protein, 199 aa, Homo sapiens; identical to SEQ ID NO: 871461

SEQ ID NO: 871466 - protein, 199 aa, Homo sapiens; identical to SEQ ID NO: 871461

SEQ ID NO: 871467 - protein, 199 aa, Homo sapiens; identical to SEQ ID NO: 871461

SEQ ID NO: 871468 - protein, 219 aa, Homo sapiens
QAGTRRNGLMMRGSGLTLPSLPSARFSAGPPTQRSRPTMSNMEKHLFNLKFAAKELSRSAKKCDKEEKAEKAKIKKAIQKGNMEVARIHAGVDAVAARVQTAVTMGKVTKSMAGVVKSMDATLKTMNLEKISALMDKFEHQFETLDVQTQQMEDTMSSTTTLTTPQNQVDMLLQEMADEAGLDLNMELPQGQTGSVGTSVASAEQDELSQRLARLRDQV

SEQ ID NO: 871469 - protein, 363 aa, Homo sapiens
MAAAAMAAAAGGGAGAARSLSRFRGCLAGALLGDCVGSFYEAHDTVDLTSVLRHVQSLEPDPGTPGSERTEALYYTDDTAMARALVQSLLAKEAFDEVDMAHRFAQEYKKDPDRGYGAGVVTVFKKLLNPKCRDVFEPARAQFNGKGSYGNGGAMRVAGISLAYSSVQDVQKFARLSAQLTHASSLGYNGAILQALAVHLALQGESSSEHFLKQLLGHMEDLEGDAQSVLDARELGMEERPYSSRLKKIGELLDQASVTREEVVSELGNGIAAFESVPTAIYCFLRCMEPDPEIPSAFNSLQRTLIYSISLGGDTDTIATMAGAIAGAYYGMDQVPESWQQSCEGYEETDILAQSLHRVFQKS

SEQ ID NO: 871470 - protein, 283 aa, Homo sapiens
MARALVQSLLAKEAFDEVDMAHRFAQEYKKDPDRGYGAGVVTVFKKLLNPKCRDVFEPARAQFNGKGSYGNGGAMRVAGISLAYSSVQDVQKFARLSAQLTHASSLGYNGAILQALAVHLALQGESSSEHFLKQLLGHMEDLEGDAQSVLDARELGMEERPYSSRLKKIGELLDQASVTREEVVSELGNGIAAFESVPTAIYCFLRCMEPDPEIPSAFNSLQRTLIYSISLGGDTDTIATMAGAIAGAYYGMDQVPESWQQSCEGYEETDILAQSLHRVFQKS

SEQ ID NO: 871471 - protein, 209 aa, Homo sapiens
MRVAGISLAYSSVQDVQKFARLSAQLTHASSLGYNGAILQALAVHLALQGESSSEHFLKQLLGHMEDLEGDAQSVLDARELGMEERPYSSRLKKIGELLDQASVTREEVVSELGNGIAAFESVPTAIYCFLRCMEPDPEIPSAFNSLQRTLIYSISLGGDTDTIATMAGAIAGAYYGMDQVPESWQQSCEGYEETDILAQSLHRVFQKS

SEQ ID NO: 871472 - protein, 363 aa, Homo sapiens; identical to SEQ ID NO: 871469

SEQ ID NO: 871473 - protein, 113 aa, Homo sapiens [sequence omitted]

SEQ ID NO: 871474 - protein, 218 aa, Homo sapiens
GRTGAMAPAQAPLLPLLLLLLPLPPPPFAPPEDRRRANSDRYAVYWNRSNPRFHAGAGDDGGGYTVEVSINDYLDIYCPHYGAPLPPAERMEHYVLYMVNGEGHASCDHRQRGFKRWECNRPAAPGGPLKFSEKFQLFTPFSLGFEFRPGHEYYYISATPPNAVDRPCLRLKVYVRPTNETLYEAPEPIFTSNNSCSSPGGCRLFLSTIPVLWTLLGS

SEQ ID NO: 871475 - protein, 107 aa, Homo sapiens [sequence omitted]

SEQ ID NO: 871476 - protein, 126 aa, Homo sapiens
MGLQSSSGDLLFSAPPQPHLAVGQLLLNQHPQDSATQPCHTCFLRASSEAGAHPHARRLFCFFDALTCPFQRIAYVLCWLKKKIAGNQPQPFLSISSLELQRLQLTIPLRQEFLLWHCDILGLVVL

SEQ ID NO: 871477 - protein, 115 aa, Homo sapiens
RLKHAFLPLGQHEASNSTGRHGVPWVDEAAWQPGLETWPPGQLWRAPQQSWSPAPQHGWPCGLRTLLITQCLVLGQPQRSVYKYSLTRWRAGRPSPLPRRSPLPVSFPSLPLTPF

SEQ ID NO: 871478 - protein, 530 aa, Homo sapiens
FLESSLRILYRLFESVLPPLPAALQSRMNVIDHVRDMAAAGLHSNVRLLSSLLLTMSNNNPELFSPPQKYQLLVYHADSLFHDKEYRNAVSKYTMALQQKKALSKTSKVRPSTGNSASTPQSQCLPSEIEVKYKMAECYTMLKQDKDAIAILDGIPSRQRTPKINMMLANLYKKAGQERPSVTSYKEVLRQCPLALDAILGLLSLSVKGAEVASMTMNVIQTVPNLDWLSVWIKAYAFVHTGDNSRAISTICSLEKKSLLRDNVDLLGSLADLYFRAGDNKNSVLKFEQAQMLDPYLIKGMDVYGYLLAREGRLEDVENLGCRLFNISDQHAEPWVVSGCHSFYSKRYSRALYLGAKAIQLNSNSVQALLLKGAALRNMGRVQEAIIHFREAIRLAPCRLDCYEGLIECYLASNSIREAMVMANNVYKTLGANAQTLTLLATVCLEDPVTQEKAKTLFDKALTQRPDYIKAVVKKAELLSREQKYEDGIALLRNALANQSDCVLHRILGDFLVAVNEYQEAMDQYSIALR

SEQ ID NO: 871479 - protein, 131 aa, Homo sapiens
PLQEFGTQQSTQASRTRARKKPPEGTISLCVNMTSKLAVALLAAFLISAALCEGAVLPRSAKELRCQCIKTYSKPFHPKFIKELRVIESGPHCANTEIIVKLSDGRELCLDPKENWVQRVVEKFLKRAENS

SEQ ID NO: 871480 - protein, 119 aa, Homo sapiens
AGTSSCRIRHAEGTISLCVNMTSKLAVALLAAFLISAALCEGAVLPRSAKELRCQCIKTYSKPFHPKFIKELRVIESGPHCANTEIIVKLSDGRELCLDPKENWVQRVVEKFLKRAENS

SEQ ID NO: 871481 - protein, 185 aa, Homo sapiens
  misc_feature (3)..(3): Xaa can be any naturally occurring amino acid
  misc_feature (7)..(7): Xaa can be any naturally occurring amino acid
IDXLRMXPWIGEPSGGPGIRPMAGTNFQRQQSTQASRTRARKKPPEGTISLCVNMTSKLAVALLAAFLISAALCEGAVLPRSAKELRCQCIKTYSKPFHPKFIKELRVIESGPHCANTEIIVKLSDGRELCLDPKENWVQRVVEKFLKSETSSKSTSTLHVLCGSVVGLPDAIQDSWLNLNFSKQ

SEQ ID NO: 871482 - protein, 112 aa, Homo sapiens
  misc_feature (3)..(3): Xaa can be any naturally occurring amino acid
  misc_feature (7)..(7): Xaa can be any naturally occurring amino acid
IDXLRMXPWIGEPSGGPGIRPMAGTNFQRQQSTQASRTRARKKPPEGTISLCVNMTSKLAVALLAAFLISAALCEGAVLPRSAKELRCQCIKTYSKPFHPRKTGCRGLWRSF

SEQ ID NO: 871483 - protein, 156 aa, Homo sapiens
  misc_feature (3)..(3): Xaa can be any naturally occurring amino acid
  misc_feature (7)..(7): Xaa can be any naturally occurring amino acid
IDXLRMXPWIGEPSGGPGIRPMAGTNFQRQQSTQASRTRARKKPPEGTISLCVNMTSKLAVALLAAFLISAALCEGAVLPRSAKELRCQCIKTYSKPFHPKFIKELRVIESGPHCANTEIINPSLLARIHKSLFHCALVSPLFLSGKSISHHLTSQ

SEQ ID NO: 871484 - protein, 112 aa, Homo sapiens
  misc_feature (3)..(3): Xaa can be any naturally occurring amino acid
  misc_feature (7)..(7): Xaa can be any naturally occurring amino acid
IDXLRMXPWIGEPSGGPGIRPMAGTNFQRQQSTQASRTRARKKPPEGTISLCVNMTSKLAVALLAAFLISAALCEGAVLPRSAKELRCQCIKTYSKPFQSPCSTVPWFLLYF

SEQ ID NO: 871485 - protein, 176 aa, Homo sapiens
  misc_feature (3)..(3): Xaa can be any naturally occurring amino acid
  misc_feature (7)..(7): Xaa can be any naturally occurring amino acid
IDXLRMXPWIGEPSGGPGIRPMAGTNFQRQQSTQASRTRARKKPPEGTISLCVNMTSKLAVALLAAFLISAALCEGAVLPRSAKELRCQCIKTYSKPFHPKFIKELRVIESGPHCANTEIIVKLSDGRELCLDPKENWVQRVVEKFLKRQRSLKTGGWIHKLSSNPREAQQTSDHG

SEQ ID NO: 871486 - protein, 158 aa, Homo sapiens
  misc_feature (3)..(3): Xaa can be any naturally occurring amino acid
  misc_feature (7)..(7): Xaa can be any naturally occurring amino acid
IDXLRMXPWIGEPSGGPGIRPMAGTNFQRQQSTQASRTRARKKPPEGTISLCVNMTSKLAVALLAAFLISAALCEGAVLPRSAKELRCQCIKTYSKPFHPKFIKELRVIESGPHCANTEIIFLYRFLDGRELCLEPQGQIGGCRRVVEESTRTQGLTG

SEQ ID NO: 871487 - protein, 94 aa, Homo sapiens
  misc_feature (3)..(3): Xaa can be any naturally occurring amino acid
  misc_feature (7)..(7): Xaa can be any naturally occurring amino acid
IDXLRMXPWIGEPSGGPGIRPMAGTNFQRQQSTQASRTRARKKPPEGTISLCVNMTSKLAVALLAAFLISAALCEGKHIFLTYSVFLCLNVILR

SEQ ID NO: 871488 - protein, 153 aa, Homo sapiens
  misc_feature (3)..(3): Xaa can be any naturally occurring amino acid
  misc_feature (7)..(7): Xaa can be any naturally occurring amino acid
IDXLRMXPWIGEPSGGPGIRPMAGTNFQRQQSTQASRTRARKKPPEGTISLCVNMTSKLAVALLAAFLISAALCEGAVLPRSAKELRCQCIKTYSKPFHPKFIKELRVIESGPHCANTEIIVKLSDGRELCLDPKENWVQRVVEKFLKRAENS

SEQ ID NO: 871489 - protein, 134 aa, Homo sapiens
  misc_feature (3)..(3): Xaa can be any naturally occurring amino acid
  misc_feature (7)..(7): Xaa can be any naturally occurring amino acid
IDXLRMXPWIGEPSGGPGIRPMAGTNFQRQQSTQASRTRARKKPPEGTISLCVNMTSKLAVALLAAFLISAALCEGAVLPRSAKELRCQCIKTYSKPFHNPSLLARIHKSLFHCALVSPLFLSGKSISHHLTSQ

SEQ ID NO: 871490 - protein, 76 aa, Homo sapiens
  misc_feature (3)..(3): Xaa can be any naturally occurring amino acid
  misc_feature (7)..(7): Xaa can be any naturally occurring amino acid
IDXLRMXPWIGEPSGGPGIRPMAGTNFQRQQSTQASRTRARKKPPEGTISLCVNMTSKLAVALLAAFLISAALCEV

SEQ ID NO: 871491 - protein, 99 aa, Homo sapiens
MTSKLAVALLAAFLISAALCEGAVLPRSAKELRCQCIKTYSKPFHPKFIKELRVIESGPHCANTEIIVKLSDGRELCLDPKENWVQRVVEKFLKRAENS

SEQ ID NO: 871492 - protein, 254 aa, Homo sapiens
MAAGRGQSDEEIGAEMALRTFGHLLRYGEPTLRRAVPLALALISVSNPRLNILDTLSKFSHDADPEVSYNSIFAMGMVGSGTNNARLAAMLRQLAQYHAKDPNNLFMVRLAQGLTHLGKGTLTLCPYHSDRQLMSQVAVAGLLTVLVSFLDVRNIILGKSHYVLYGLVAAMQPRMLVTFDEELRPLPVSVRVGQAVDVVGQAGKPKTITGFQTHTTPVLLAHGERAELATEEFLPVTPILEGFVILRKNPNYDL

SEQ ID NO: 871493 - protein, 197 aa, Homo sapiens
LAASLGMCWGPPFHGFCRLGLAYAGSNREDVLTLLLPVMGDSKSSMEVAGVTALACGMIAVGSCNGDVTSTILQTIMEKSETELKDTYARWLPLGLGLNHLGKGEAIEAILAALEVVSEPFRSFANTLVDVCAYAGSGNVLKVQQLLHICSEHFDSKEKEEDKDKNGEEREAAKTTISGEEREAAKNEKLVKKREAG

SEQ ID NO: 871494 - protein, 941 aa, Homo sapiens
GGGGAPRPTRASWSGKKGGASGCARSGPAVAAEMEEGGRDKAPVQPQQSPAAAPGGTDEKPSGKERRDAGDKDKEQELSEEDKQLQDELEMLVERLGEKDTSLYRPALEELRRQIRSSTTSMTSVPKPLKFLRPHYGKLKEIYENMAPGENKRFAADIISVLAMTMSGERECLKYRLVGSQEELASWGHEYVRHLAGEVAKEWQELDDAEKVQREPLLTLVKEIVPYNMAHNAEHEACDLLMEIEQVDMLEKDIDENAYAKVCLYLTSCVNYVPEPENSALLRCALGVFRKFSRFPEALRLALMLNDMELVEDIFTSCKDVVVQKQMAFMLGRHGVFLELSEDVEEYEDLTEIMSNVQLNSNFLALARELDIMEPKVPDDIYKTHLENNRFGGSGSQVDSARMNLASSFVNGFVNAAFGQDKLLTDDGNKWLYKNKDHGMLSAAASLGMILLWDVDGGLTQIDKYLYSSEDYIKSGALLACGIVNSGVRNECDPALALLSDYVLHNSNTMRLGSIFGLGLAYAGSNREDVLTLLLPVMGDSKSSMEVAGVTALACGMIAVGSCNGDVTSTILQTIMEKSETELKDTYARWLPLGLGLNHLGKGEAIEAILAALEVVSEPFRSFANTLVDVCAYAGSGNVLKVQQLLHICSEHFDSKEKEEDKDKKEKKDKDKKEAPADMGAHQGVAVLGIALIAMGEEIGAEMALRTFGHLLRYGEPTLRRAVPLALALISVSNPRLNILDTLSKFSHDADPEVSYNSIFAMGMVGSGTNNARLAAMLRQLAQYHAKDPNNLFMVRLAQGLTHLGKGTLTLCPYHSDRQLMSQVAVAGLLTVLVSFLDVRNIILGKSHYVLYGLVAAMQPRMLVTFDEELRPLPVSVRVGQAVDVVGQAGKPKTITGFQTHTTPVLLAHGERAELATEEFLPVTPILEGFVILRKNPNYDL

SEQ ID NO: 871495 - protein, 246 aa, Homo sapiens
MVRGLGVTEMEEGGRDKAPVQPQQSPAAAPGGTDEKPSGKERRDAGDKDKEQELSEEDKQLQDELEMLVERLGEKDTSLYRPALEELRRQIRSSTTSMTSVPKPLKFLRPHYGKLKEIYENMAPGENKRFAADIISVLAMTMSGERECLKYRLVGSQEELASWGHEYVRHLAGEVAKEWQELDDAEKVQREPLLTLVKEIVPYNMAHNAEHEACDLLMEIEQVDMLEKDIDENAYAKVLSPRSLCV

SEQ ID NO: 871496 - protein, 169 aa, Homo sapiens
SLKTISIQFRKPRGKPVCGNVAVEYLKDSNLLFFGGLLVAIAVEHWNLHKRIALRVLLTVLVSFLDVRNIILGKSHYVLYGLVAAMQPRMLVTFDEELRPLPVSVRVGQAVDVVGQAGKPKTITGFQTHTTPVLLAHGERAELATEEFLPVTPILEGFVILRKNPNYDL

SEQ ID NO: 871497 - protein, 927 aa, Homo sapiens
GGDPNMQVEAGFGPAVAAEMEEGGRDKAPVQPQQSPAAAPGGTDEKPSGKERRDAGDKDKEQELSEEDKQLQDELEMLVERLGEKDTSLYRPALEELRRQIRSSTTSMTSVPKPLKFLRPHYGKLKEIYENMAPGENKRFAADIISVLAMTMSGERECLKYRLVGSQEELASWGHEYVRHLAGEVAKEWQELDDAEKVQREPLLTLVKEIVPYNMAHNAEHEACDLLMEIEQVDMLEKDIDENAYAKVCLYLTSCVNYVPEPENSALLRCALGVFRKFSRFPEALRLALMLNDMELVEDIFTSCKDVVVQKQMAFMLGRHGVFLELSEDVEEYEDLTEIMSNVQLNSNFLALARELDIMEPKVPDDIYKTHLENNRFGGSGSQVDSARMNLASSFVNGFVNAAFGQDKLLTDDGNKWLYKNKDHGMLSAAASLGMILLWDVDGGLTQIDKYLYSSEDYIKSGALLACGIVNSGVRNECDPALALLSDYVLHNSNTMRLGSIFGLGLAYAGSNREDVLTLLLPVMGDSKSSMEVAGVTALACGMIAVGSCNGDVTSTILQTIMEKSETELKDTYARWLPLGLGLNHLGKGEAIEAILAALEVVSEPFRSFANTLVDVCAYAGSGNVLKVQQLLHICSEHFDSKEKEEDKDKKEKKDKDKKEAPADMGAHQGVAVLGIALIAMGEEIGAEMALRTFGHLLRYGEPTLRRAVPLALALISVSNPRLNILDTLSKFSHDADPEVSYNSIFAMGMVGSGTNNARLAAMLRQLAQYHAKDPNNLFMVRLAQGLTHLGKGTLTLCPYHSDRQLMSQVAVAGLLTVLVSFLDVRNIILGKSHYVLYGLVAAMQPRMLVTFDEELRPLPVSVRVGQAVDVVGQAGKPKTITGFQTHTTPVLLAHGERAELATEEFLPVTPILEGFVILRKNPNYDL

SEQ ID NO: 871498 - protein, 927 aa, Homo sapiens; identical to SEQ ID NO: 871497

SEQ ID NO: 871499 - protein, 927 aa, Homo sapiens; identical to SEQ ID NO: 871497

SEQ ID NO: 871500 - protein, 927 aa, Homo sapiens; identical to SEQ ID NO: 871497

SEQ ID NO: 871501 - protein, 927 aa, Homo sapiens; identical to SEQ ID NO: 871497

SEQ ID NO: 871502 - protein, 987 aa, Homo sapiens
GGDPNMQVEAGFGPAVAAEMEEGGRDKAPVQPQQSPAAAPGGTDEKPSGKERRDAGDKDKEQELSEEDKQLQDELEMLVERLGEKDTSLYRPALEELRRQIRSSTTSMTSVPKPLKFLRPHYGKLKEIYENMAPGENKRFAADIISVLAMTMSGERECLKYRLVGSQEELASWGHEYVRHLAGEVAKEWQELDDAEKVQREPLLTLVKEIVPYNMAHNAEHEACDLLMEIEQVDMLEKDIDENAYAKVCLYLTSCVNYVPEPENSALLRCALGVFRKFSRFPEALRLALMLNDMELVEDIFTSCKDVVVQKQMAFMLGRHGVFLELSEDVEEYEDLTEIMSNVQLNSNFLALARELDIMEPKVPDDIYKTHLENNRFGGSGSQVDSARMNLASSFVNGFVNAAFGQDKLLTDDGNKWLYKNKDHGMLSAAASLGMILLWDVDGGLTQIDKYLYSSEDYIKSGALLACGIVNSGVRNECDPALALLSDYVLHNSNTMRLGSIFGLGLAYAGSNREDVLTLLLPVMGDSKSSMEVAGVTALACGMIAVGSCNGDVTSTILQTIMEKSETELKDTYARWLPLGLGLNHLGKGEAIEAILAALEVVSEPFRSFANTLVDVCAYAGSGNVLKVQQLLHICSEHFDSKEKEEDKDKKEKKDKDKKEAPADMGAHQGVAVLGIALIAMGEEIGAEMALRTFGHLLRYGEPTLRRAVPLALALISVSNPRLNILDTLSKFSHDADPEVSYNSIFAMGMVGSGTNNARLAAMLRQLAQYHAKDPNNLFMVRLAQVKNRTPPQSVPGKYLWCWKEEHGVLAQEERCDQVGDFCLAGLGDVSSVVLLTSTSLCFFQGLTHLGKGTLTLCPYHSDRQLMSQVAVAGLLTVLVSFLDVRNIILGKSHYVLYGLVAAMQPRMLVTFDEELRPLPVSVRVGQAVDVVGQAGKPKTITGFQTHTTPVLLAHGERAELATEEFLPVTPILEGFVILRKNPNYDL

SEQ ID NO: 871503 - protein, 992 aa, Homo sapiens
GGDPNMQVEAGFGPAVAAEMEEGGRDKAPVQPQQSPAAAPGGTDEKPSGKERRDAGDKDKEQELSEEDKQLQDELEMLVERLGEKDTSLYRPALEELRRQIRSSTTSMTSVPKPLKFLRPHYGKLKEIYENMAPGENKRFAADIISVLAMTMSGERECLKYRLVGSQEELASWGHEYVRHLAGEVAKEWQELDDAEKVQREPLLTLVKEIVPYNMAHNAEHEACDLLMEIEQVDMLEKDIDENAYAKVCLYLTSCVNYVPEPENSALLRCALGVFRKFSRFPEALRLALMLNDMELVEDIFTSCKDVVVQKQMAFMLGRHGVFLELSEDVEEYEDLTEIMSNVQLNSNFLALARELDIMEPKVPDDIYKTHLENNRFGGSGSQVDSARMNLASSFVNGFVNAAFGQDKLLTDDGNKWLYKNKDHGMLSAAASLGMILLWDVDGGLTQIDKYLYSSEDYIKSGALLACGIVNSGVRNECDPALALLSDYVLHNSNTMRLGSIFGLGLAYAGSNREDVLTLLLPVMGDSKSSMEVAGVTALACGMIAVGSCNGDVTSTILQTIMEKSETELKDTYARWLPLGLGLNHLGKGEAIEAILAALEVVSEPFRSFANTLVDVCAYAGLCLYESVLCFPSDSSLLSWSLFSGCFSFLLHSDLLLDSLDFSCFPKLFLGNFSFLSILPHHPDAGSGNVLKVQQLLHICSEHFDSKEKEEDKDKKEKKDKDKKEAPADMGAHQGVAVLGIALIAMGEEIGAEMALRTFGHLLRYGEPTLRRAVPLALALISVSNPRLNILDTLSKFSHDADPEVSYNSIFAMGMVGSGTNNARLAAMLRQLAQYHAKDPNNLFMVRLAQGLTHLGKGTLTLCPYHSDRQLMSQVAVAGLLTVLVSFLDVRNIILGKSHYVLYGLVAAMQPRMLVTFDEELRPLPVSVRVGQAVDVVGQAGKPKTITGFQTHTTPVLLAHGERAELATEEFLPVTPILEGFVILRKNPNYDL

SEQ ID NO: 871504 - protein, 1005 aa, Homo sapiens
GGDPNMQVEAGFGPAVAAEMEEGGRDKAPVQPQQSPAAAPGGTDEKPSGKERRDAGDKDKEQELVRRDPESRQKEAAGLSHGGSAGLRPDTQLPHRARERAVGATLGTPGTLPLCSSFSVPRCHLRRPHQPSPPPREVDSEQSEEDKQLQDELEMLVERLGEKDTSLYRPALEELRRQIRSSTTSMTSVPKPLKFLRPHYGKLKEIYENMAPGENKRFAADIISVLAMTMSGERECLKYRLVGSQEELASWGHEYVRHLAGEVAKEWQELDDAEKVQREPLLTLVKEIVPYNMAHNAEHEACDLLMEIEQVDMLEKDIDENAYAKVCLYLTSCVNYVPEPENSALLRCALGVFRKFSRFPEALRLALMLNDMELVEDIFTSCKDVVVQKQMAFMLGRHGVFLELSEDVEEYEDLTEIMSNVQLNSNFLALARELDIMEPKVPDDIYKTHLENNRFGGSGSQVDSARMNLASSFVNGFVNAAFGQDKLLTDDGNKWLYKNKDHGMLSAAASLGMILLWDVDGGLTQIDKYLYSSEDYIKSGALLACGIVNSGVRNECDPALALLSDYVLHNSNTMRLGSIFGLGLAYAGSNREDVLTLLLPVMGDSKSSMEVAGVTALACGMIAVGSCNGDVTSTILQTIMEKSETELKDTYARWLPLGLGLNHLGKGEAIEAILAALEVVSEPFRSFANTLVDVCAYAGSGNVLKVQQLLHICSEHFDSKEKEEDKDKKEKKDKDKKEAPADMGAHQGVAVLGIALIAMGEEIGAEMALRTFGHLLRYGEPTLRRAVPLALALISVSNPRLNILDTLSKFSHDADPEVSYNSIFAMGMVGSGTNNARLAAMLRQLAQYHAKDPNNLFMVRLAQGLTHLGKGTLTLCPYHSDRQLMSQVAVAGLLTVLVSFLDVRNIILGKSHYVLYGLVAAMQPRMLVTFDEELRPLPVSVRVGQAVDVVGQAGKPKTITGFQTHTTPVLLAHGERAELATEEFLPVTPILEGFVILRKNPNYDL

SEQ ID NO: 871505 - protein, 1076 aa, Homo sapiens
GGDPNMQVEAGFGPAVAAEMEEGGRDKAPVQPQQSPAAAPGGTDEKPSGKERRDAGDKDKEQELSEEDKQLQDELEMLVERLGEKDTSLYRPALEELRRQIRSSTTSMTSVPKPLKFLRPHYGKLKEIYENMAPGENKRFAADIISVLAMTMSGERECLKYRLVGSQEELASWGHEYVRHLAGEVAKEWQELDDAEKVQREPLLTLVKEIVPYNMAHNAEHEACDLLMEIEQVDMLEKDIDENAYAKVCLYLTSCVNYVPEPENSALLRCALGVFRKFSRFPEALRLALMLNDMELVEDIFTSCKDVVVQKQMAFMLGRHGVFLELSEDVEEYEDLTEIMSNVQLNSNFLALARELDIMEPKVPDDIYKTHLENNRFGGSGSQVDSARMNLASSFVNGFVNAAFGQDKLLTDDGNKWLYKNKDHGMLSAAASLGMILLWDVDGGLTQIDKYLYSSEDYIKSGALLACGIVNSGVRNECDPALALLSDYVLHNSNTMRLGSIFGLGLAYAGSNREDVLTLLLPVMGDSKSSMEVAGVTALACGMIAVGSCNGDVTSTILQTIMEKSETELKDTYARWLPLGLGLNHLGKGEAIEAILAALEVVSEPFRSFANTLVDVCAYAGLCLYESVLCFPSDSSLLSWSLFSGCFSFLLHSDLLLDSLDFSCFPKLFLGNFSFLSILPHHPDAGSGNVLKVQQLLHICSEHFDSKEKEEDKDKKEKKDKDKKEAPADMGAHQVYGQLGTCREAVRRDKHIGEAGFGFCFRASLGIAMFEIACDWVLYVRGKGVPHRMAFYFQMGLESRVTVFYSLSLMGSALSSIQGVAVLGIALIAMGEEIGAEMALRTFGHLLRYGEPTLRRAVPLALALISVSNPRLNILDTLSKFSHDADPEVSYNSIFAMGMVGSGTNNARLAAMLRQLAQYHAKDPNNLFMVRLAQGLTHLGKGTLTLCPYHSDRQLMSQVAVAGLLTVLVSFLDVRNIILGKSHYVLYGLVAAMQPRMLVTFDEELRPLPVSVRVGQAVDVVGQAGKPKTITGFQTHTTPVLLAHGERAELATEEFLPVTPILEGFVILRKNPNYDL

SEQ ID NO: 871506 - protein, 1031 aa, Homo sapiens
GGDPNMQVEAGFGPAVAAEMEEGGRDKAPVQPQQSPAAAPGGTDEKPSGKERRDAGDKDKEQELVRRDPESRQKEAAGLSHGGSAGLRPDTQLPHRARERAVGATLGTPGTLPLCSSFSVPRCHLRRPHQPSPPPREVDSEQSEEDKQLQDELEMLVERLGEKDTSLYRPALEELRRQIRSSTTSMTSVPKPLKFLRPHYGKLKEIYENMAPGENKRFAADIISVLAMTMSGERECLKYRLVGSQEELASWGHEYVSTLDSLTHREVLPLKLCSLNLSGTICRHLAGEVAKEWQELDDAEKVQREPLLTLVKEIVPYNMAHNAEHEACDLLMEIEQVDMLEKDIDENAYAKVCLYLTSCVNYVPEPENSALLRCALGVFRKFSRFPEALRLALMLNDMELVEDIFTSCKDVVVQKQMAFMLGRHGVFLELSEDVEEYEDLTEIMSNVQLNSNFLALARELDIMEPKVPDDIYKTHLENNRFGGSGSQVDSARMNLASSFVNGFVNAAFGQDKLLTDDGNKWLYKNKDHGMLSAAASLGMILLWDVDGGLTQIDKYLYSSEDYIKSGALLACGIVNSGVRNECDPALALLSDYVLHNSNTMRLGSIFGLGLAYAGSNREDVLTLLLPVMGDSKSSMEVAGVTALACGMIAVGSCNGDVTSTILQTIMEKSETELKDTYARWLPLGLGLNHLGKGEAIEAILAALEVVSEPFRSFANTLVDVCAYAGSGNVLKVQQLLHICSEHFDSKEKEEDKDKKEKKDKDKKEAPADMGAHQGVAVLGIALIAMGEEIGAEMALRTFGHLLRYGEPTLRRAVPLALALISVSNPRLNILDTLSKFSHDADPEVSYNSIFAMGMVGSGTNNARLAAMLRQLAQYHAKDPNNLFMVRLAQGLTHLGKGTLTLCPYHSDRQLMSQVAVAGLLTVLVSFLDVRNIILGKSHYVLYGLVAAMQPRMLVTFDEELRPLPVSVRVGQAVDVVGQAGKPKTITGFQTHTTPVLLAHGERAELATEEFLPVTPILEGFVILRKNPNYDL

SEQ ID NO: 871507 - protein, 701 aa, Homo sapiens
GGDPNMQVEAGFGPAVAAEMEEGGRDKAPVQPQQSPAAAPGGTDEKPSGKERRDAGDKDKEQELSEEDKQLQDELEMLVERLGEKDTSLYRPALEELRRQIRSSTTSMTSVPKPLKFLRPHYGKLKEIYENMAPGENKRFAADIISVLAMTMSGERECLKYRLVGSQEELASWGHEYVRHLAGEVAKEWQELDDAEKVQREPLLTLVKEIVPYNMAHNAEHEACDLLMEIEQVDMLEKDIDENAYAKVCLYLTSCVNYVPEPENSALLRCALGVFRKFSRFPEALRLALMLNDMELVEDIFTSCKDVVVQKQMAFMLGRHGVFLELSEDVEEYEDLTEIMSNVQLNSNFLALARELDIMEPKVPDDIYKTHLENNRFGGSGSQVDSARMNLASSFVNGFVNAAFGQDKLLTDDGNKWLYKNKDHGMLSAAASLGMILLWDVDGGLTQIDKYLYSSEDYIKSGALLACGIVNSGVRNECDPALALLSDYVLHNSNTMRLGSIFGLGLAYAGSNREDVLTLLLPVMGDSKSSMEVAGVTALACGMIAVGSCNGDVTSTILQTIMEKSETELKDTYARWLPLGLGLNHLGKGEAIEAILAALEVVSEPFRSFANTLVDVCAYAGSGNVLKVQQLLHICSEHFDSKEKEEDKDKKEKKDKDKKEAPADMGAHQGVAVLGIALIAMGEEIGAEMALRTFGHLVSIA

SEQ ID NO: 871508 - protein, 684 aa, Homo sapiens
GGDPNMQVEAGFGPAVAAEMEEGGRDKAPVQPQQSPAAAPGGTDEKPSGKERRDAGDKDKEQELSEEDKQLQDELEMLVERLGEKDTSLYRPALEELRRQIRSSTTSMTSVPKPLKFLRPHYGKLKEIYENMAPGENKRFAADIISVLAMTMSGERECLKYRLVGSQEELASWGHEYVRHLAGEVAKEWQELDDAEKVQREPLLTLVKEIVPYNMAHNAEHEACDLLMEIEQVDMLEKDIDENAYAKVCLYLTSCVNYVPEPENSALLRCALGVFRKFSRFPEALRLALMLNDMELVEDIFTSCKDVVVQKQMAFMLGRHGVFLELSEDVEEYEDLTEIMSNVQLNSNFLALARELDIMEPKVPDDIYKTHLENNRFGGSGSQVDSARMNLASSFVNGFVNAAFGQDKLLTDDGNKWLYKNKDHGMLSAAASLGMILLWDVDGGLTQIDKYLYSSEDYIKSGALLACGIVNSGVRNECDPALALLSDYVLHNSNTMRLGSIFGLGLAYAGSNREDVLTLLLPVMGDSKSSMEVAGVTALACGMIAVGSCNGDVTSTILQTIMEKSETELKDTYARWLPLGLGLNHLGKGEAIEAILAALEVVSEPFRSFANTLVDVCAYAGSGNVLKVQQLLHICSEHFDSKEKEEDKDKKEKKDKDKKEAPADMGAHQVIWAAGHLQRGCEKR

SEQ ID NO: 871509 - protein, 537 aa, Homo sapiens
GGDPNMQVEAGFGPAVAAEMEEGGRDKAPVQPQQSPAAAPGGTDEKPSGKERRDAGDKDKEQELSEEDKQLQDELEMLVERLGEKDTSLYRPALEELRRQIRSSTTSMTSVPKPLKFLRPHYGKLKEIYENMAPGENKRFAADIISVLAMTMSGERECLKYRLVGSQEELASWGHEYVRHLAGEVAKEWQELDDAEKVQREPLLTLVKEIVPYNMAHNAEHEACDLLMEIEQVDMLEKDIDENAYAKVCLYLTSCVNYVPEPENSALLRCALGVFRKFSRFPEALRLALMLNDMELVEDIFTSCKDVVVQKQMAFMLGRHGVFLELSEDVEEYEDLTEIMSNVQLNSNFLALARELDIMEPKVPDDIYKTHLENNRFGGSGSQVDSARMNLASSFVNGFVNAAFGQDKLLTDDGNKWLYKNKDHGMLSAAASLGMILLWDVDGGLTQIDKYLYSSEDYIKSGALLACGIVNSGVRNECDPALALLSDYVLHNSNTMRLGSIFGLGLAYAGSNREDVLTLLLPVMGDSKSSMEVSRGY

SEQ ID NO: 871510 - protein, 256 aa, Homo sapiens
GGDPNMQVEAGFGPAVAAEMEEGGRDKAPVQPQQSPAAAPGGTDEKPSGKERRDAGDKDKEQELSEEDKQLQDELEMLVERLGEKDTSLYRPALEELRRQIRSSTTSMTSVPKPLKFLRPHYGKLKEIYENMAPGENKRFAADIISVLAMTMSGERECLKYRLVGSQEELASWGHEYVRHLAGEVAKEWQELDDAEKVQREPLLTLVKEIVPYNMAHNAEHEACDLLMEIEQVDMLEKDIDENAYAKVLSPRSLCV

SEQ ID NO: 871511 - protein, 102 aa, Homo sapiens
MLVERLGEKDTSLYRPALEELRRQIRSSTTSMTSVPKPLKFLRPHYGKLKEIYENMAPGENKGNMCEMLKEVDSAGLLFGFSLIFGCGWEEGGGIEEFGVTS

SEQ ID NO: 871512 - protein, 161 aa, Homo sapiens
DAWVDPRVANNLFMVRLAQGLTHLGKGTLTLCPYHSDRQLMSQVAVAGLLTVLVSFLDVRNIILGKSHYVLYGLVAAMQPRMLVTFDEELRPLPVSVRVGQAVDVVGQAGKPKTITGFQTHTTPVLLAHGERAELATEEFLPVTPILEGFVILRKNPNYDL

SEQ ID NO: 871513 - protein, 309 aa, Homo sapiens
  misc_feature (299)..(299): Xaa can be any naturally occurring amino acid
  misc_feature (306)..(306): Xaa can be any naturally occurring amino acid
GGGGAPRPTRASWSGKKGGASGCARSGPAVAAEMEEGGRDKAPVQPQQSPAAAPGGTDEKPSGKERRDAGDKDKEQELSEEDKQLQDELEMLVERLGEKDTSLYRPALEELRRQIRSSTTSMTSVPKPLKFLRPHYGKLKEIYENMAPGENKRFAADIISVLAMTMSGERECLKYRLVGSQEELASWGHEYVRHLAGEVAKEWQELDDAEKVQREPLLTLVKEIVPYNMAHNAEHEACDLLMEIEQVDMLEKDIDENAYAKVCLYLTSYVPELRIKLWVCLGVSKLPFLTWMLVYADCXNLLLKLXDVI

SEQ ID NO: 871514 - protein, 88 aa, Homo sapiens
LAERLGEKDTSLYRPALEELRRQIRSSTTSMTSVPKPLKFLRPHYGKLKEIYENMAPGENKRFAADIISVLAMTMSGEHHQYSEHHQY

SEQ ID NO: 871515 - protein, 108 aa, Homo sapiens
RARYPENMAPGENKRFAADIISVLAMTMSGERECLKYRLVGSQEELASWGHEYVRHLAGEVAKEWQELDDAEDLRGLGTEVMEVVEERICLRNSSSAGRYRDVSSWGR

SEQ ID NO: 871516 - protein, 929 aa, Homo sapiens
GRVGRPTRRKKPLHGALGTGPDTFREGHPYPLPLQQSPAAAPGGTDEKPSGKERRDAGDKDKEQELSEEDKQLQDELEMLVERLGEKDTSLYRPALEELRRQIRSSTTSMTSVPKPLKFLRPHYGKLKEIYENMAPGENKRFAADIISVLAMTMSGERECLKYRLVGSQEELASWGHEYVRHLAGEVAKEWQELDDAEKVQREPLLTLVKEIVPYNMAHNAEHEACDLLMEIEQVDMLEKDIDENAYAKVCLYLTSCVNYVPEPENSALLRCALGVFRKFSRFPEALRLALMLNDMELVEDIFTSCKDVVVQKQMAFMLGRHGVFLELSEDVEEYEDLTEIMSNVQLNSNFLALARELDIMEPKVPDDIYKTHLENNRFGGSGSQVDSARMNLASSFVNGFVNAAFGQDKLLTDDGNKWLYKNKDHGMLSAAASLGMILLWDVDGGLTQIDKYLYSSEDYIKSGALLACGIVNSGVRNECDPALALLSDYVLHNSNTMRLGSIFGLGLAYAGSNREDVLTLLLPVMGDSKSSMEVAGVTALACGMIAVGSCNGDVTSTILQTIMEKSETELKDTYARWLPLGLGLNHLGKGEAIEAILAALEVVSEPFRSFANTLVDVCAYAGSGNVLKVQQLLHICSEHFDSKEKEEDKDKKEKKDKDKKEAPADMGAHQGVAVLGIALIAMGEEIGAEMALRTFGHLLRYGEPTLRRAVPLALALISVSNPRLNILDTLSKFSHDADPEVSYNSIFAMGMVGSGTNNARLAAMLRQLAQYHAKDPNNLFMVRLAQGLTHLGKGTLTLCPYHSDRQLMSQVAVAGLLTVLVSFLDVRNIILGKSHYVLYGLVAAMQPRMLVTFDEELRPLPVSVRVGQAVDVVGQAGKPKTITGFQTHTTPVLLAHGERAELATEEFLPVTPILEGFVILRKNPNYDL

SEQ ID NO: 871517 - protein, 927 aa, Homo sapiens; identical to SEQ ID NO: 871497

SEQ ID NO: 871518 - protein, 927 aa, Homo sapiens; identical to SEQ ID NO: 871497

SEQ ID NO: 871519 - protein, 927 aa, Homo sapiens; identical to SEQ ID NO: 871497

SEQ ID NO: 871520 - protein, 927 aa, Homo sapiens; identical to SEQ ID NO: 871497

SEQ ID NO: 871521 - protein, 956 aa, Homo sapiens
GGDPNMQVEAGFGPAVAAEMEEGGRDKAPVQPQQSPAAAPGGTDEKPSGKERRDAGDKDKEQELSEEDKQLQDELEMLVERLGEKDTSLYRPALEELRRQIRSSTTSMTSVPKPLKFLRPHYGKLKEIYENMAPGENKRFAADIISVLAMTMSGERECLKYRLVGSQEELASWGHEYVRHLAGEVAKEWQELDDAEKVQREPLLTLVKEIVPYNMAHNAEHEACDLLMEIEQVDMLEKDIDENAYAKVCLYLTSCVNYVPEPENSALLRCALGVFRKFSRFPEALRLALMLNDMELVEDIFTSCKDVVVQKQMAFMLGRHGVFLELSEDVEEYEDLTEIMSNVQLNSNFLALARELDIMEPKVPDDIYKTHLENNRFGGSGSQVDSARMNLASSFVNGFVNAAFGQDKLLTDDGNKWLYKNKDHGMLSAAASLGMILLWDVDGGLTQIDKYLYSSEDYIKSGALLACGIVNSGVRNECDPALALLSDYVLHNSNTMRLGSIFGLGLAYAGSNREDVLTLLLPVMGDSKSSMEVAGVTALACGMIAVGSCNGDVTSTILQTIMEKSETELKDTYARWLPLGLGLNHLGKGEAIEAILAALEVVSEPFRSFANTLVDVCAYAGSGNVLKVQQLLHICSEHFDSKEKEEDKDKKEKKDKDKKEAPADMGAHQGVAVLGIALIAMGEEIGAEMALRTFGHLLRYGEPTLRRAVPLALALISVSNPRLNILDTLSKFSHDADPEVSYNSIFAMGMVGSGEYPAEEGHKQIGGRFEAPFFTSVMLNIPGTNNARLAAMLRQLAQYHAKDPNNLFMVRLAQGLTHLGKGTLTLCPYHSDRQLMSQVAVAGLLTVLVSFLDVRNIILGKSHYVLYGLVAAMQPRMLVTFDEELRPLPVSVRVGQAVDVVGQAGKPKTITGFQTHTTPVLLAHGERAELATEEFLPVTPILEGFVILRKNPNYDL

SEQ ID NO: 871522 - protein, 986 aa, Homo sapiens
GGDPNMQVEAGFGPAVAAEMEEGGRDKAPVQPQQSPAAAPGGTDEKPSGKERRDAGDKDKEQELSEEDKQLQDELEMLVERLGEKDTSLYRPALEELRRQIRSSTTSMTSVPKPLKFLRPHYGKLKEIYENMAPGENKRFAADIISVLAMTMSGERECLKYRLVGSQEELASWGHEYVRHLAGEVAKEWQELDDAEKVQREPLLTLVKEIVPYNMAHNAEHEACDLLMEIEQVDMLEKDIDENAYAKVCLYLTSCVNYVPEPENSALLRCALGVFRKFSRFPEALRLALMLNDMELVEDIFTSCKDVVVQKQMAFMLGRHGVFLELSEDVEEYEDLTEIMSNVQLNSNFLALARELDIMEPKVPDDIYKTHLENNRFGGSGSQVDSARMNLASSFVNGFVNAAFGQDKLLTDDGNKWLYKNKDHGIILFLLCLLFCFDHFFCPLGVIKLSDKGSTMQFFGELFIITGSSGEGHFKTNRFFPGIGMLSAAASLGMILLWDVDGGLTQIDKYLYSSEDYIKSGALLACGIVNSGVRNECDPALALLSDYVLHNSNTMRLGSIFGLGLAYAGSNREDVLTLLLPVMGDSKSSMEVAGVTALACGMIAVGSCNGDVTSTILQTIMEKSETELKDTYARWLPLGLGLNHLGKGEAIEAILAALEVVSEPFRSFANTLVDVCAYAGSGNVLKVQQLLHICSEHFDSKEKEEDKDKKEKKDKDKKEAPADMGAHQGVAVLGIALIAMGEEIGAEMALRTFGHLLRYGEPTLRRAVPLALALISVSNPRLNILDTLSKFSHDADPEVSYNSIFAMGMVGSGTNNARLAAMLRQLAQYHAKDPNNLFMVRLAQGLTHLGKGTLTLCPYHSDRQLMSQVAVAGLLTVLVSFLDVRNIILGKSHYVLYGLVAAMQPRMLVTFDEELRPLPVSVRVGQAVDVVGQAGKPKTITGFQTHTTPVLLAHGERAELATEEFLPVTPILEGFVILRKNPNYDL

SEQ ID NO: 871523 - protein, 870 aa, Homo sapiens
GGDPNMQVEAGFGPAVAAEMEEGGRDKAPVQPQQSPAAAPGGTDEKPSGKERRDAGDKDKEQELSEEDKQLQDELEMLVERLGEKDTSLYRPALEELRRQIRSSTTSMTSVPKPLKFLRPHYGKLKEIYENMAPGENKRFAADIISVLAMTMSGERECLKYRLVGSQEELASWGHEYVRHLAGEVAKEWQELDDAEKVQREPLLTLVKEIVPYNMAHNAEHEACDLLMEIEQVDMLEKDIDENAYAKVCLYLTSCVNYVPEPENSALLRCALGVFRKFSRFPEALRLALMLNDMELVEDIFTSCKDVVVQKQMAFMLGRHGVFLELSEDVEEYEDLTEIMSNVQLNSNFLALARELDIMEPKVPDDIYKTHLENNRFGGSGSQVDSARMNLASSFVNGFVNAAFGQDKLLTDDGNKWLYKNKDHGMLSAAASLGMILLWDVDGGLTQIDKYLYSSEDYIKSGALLACGIVNSGVRNECDPALALLSDYVLHNSNTMRLGSIFGLGLAYAGSNREDVLTLLLPVMGDSKSSMEVAGVTALACGMIAVGSCNGDVTSTILQTIMEKSETELKDTYARWLPLGLGLNHLGKGEAIEAILAALEVVSEPFRSFANTLVDVCAYAGSGNVLKVQQLLHICSEHFDSKEKEEDKDKKEKKDKDKKEAPADMGAHQGVAVLGIALIAMGEEIGAEMALRTFGHLLRYGEPTLRRAVPLALALISVSNPRLNILDTLSKFSHDADPEVSYNSIFAMGMVGSGTNNARLAAMLRQLAQYHAKDPNNLFMVRLAQGLTHLGKGTLTLCPYHSDRQLMSQVAVAGLLTVLVSFLDVRNIILGKSHYVLYGLVAAMQPRMLVTFDEELRPLPVSVRVGQVRG

SEQ ID NO: 871524 - protein, 808 aa, Homo sapiens
GGDPNMQVEAGFGPAVAAEMEEGGRDKAPVQPQQSPAAAPGGTDEKPSGKERRDAGDKDKEQELSEEDKQLQDELEMLVERLGEKDTSLYRPALEELRRQIRSSTTSMTSVPKPLKFLRPHYGKLKEIYENMAPGENKRFAADIISVLAMTMSGERECLKYRLVGSQEELASWGHEYVRHLAGEVAKEWQELDDAEKVQREPLLTLVKEIVPYNMAHNAEHEACDLLMEIEQVDMLEKDIDENAYAKVCLYLTSCVNYVPEPENSALLRCALGVFRKFSRFPEALRLALMLNDMELVEDIFTSCKDVVVQKQMAFMLGRHGVFLELSEDVEEYEDLTEIMSNVQLNSNFLALARELDIMEPKVPDDIYKTHLENNRFGGSGSQVDSARMNLASSFVNGFVNAAFGQDKLLTDDGNKWLYKNKDHGMLSAAASLGMILLWDVDGGLTQIDKYLYSSEDYIKSGALLACGIVNSGVRNECDPALALLSDYVLHNSNTMRLGSIFGLGLAYAGSNREDVLTLLLPVMGDSKSSMEVAGVTALACGMIAVGSCNGDVTSTILQTIMEKSETELKDTYARWLPLGLGLNHLGKGEAIEAILAALEVVSEPFRSFANTLVDVCAYAGSGNVLKVQQLLHICSEHFDSKEKEEDKDKKEKKDKDNLFMVRLAQGLTHLGKGTLTLCPYHSDRQLMSQVAVAGLLTVLVSFLDVRNIILGKSHYVLYGLVAAMQPRMLVTFDEELRPLPVSVRVGQAVDVVGQAGKPKTITGFQTHTTPVLLAHGERAELATEEFLPVTPILEGFVILRKNPNYDL

SEQ ID NO: 871525 - protein, 801 aa, Homo sapiens
GGDPNMQVEAGFGPAVAAEMEEGGRDKAPVQPQQSPAAAPGGTDEKPSGKERRDAGDKDKEQELSEEDKQLQDELEMLVERLGEKDTSLYRPALEELRRQIRSSTTSMTSVPKPLKFLRPHYGKLKEIYENMAPGENKRFAADIISVLAMTMSGERECLKYRLVGSQEELASWGHEYVRHLAGEVAKEWQELDDAEKVQREPLLTLVKEIVPYNMAHNAEHEACDLLMEIEQVDMLEKDIDENAYAKVCLYLTSCVNYVPEPENSALLRCALGVFRKFSRFPEALRLALMLNDMELVEDIFTSCKDVVVQKQMAFMLGRHGVFLELSEDVEEYEDLTEIMSNVQLNSNFLALARELDIMEPKVPDDIYKTHLENNRFGGSGSQVDSARMNLASSFVNGFVNAAFGQDKLLTDDGNKWLYKNKDHGMLSAAASLGMILLWDVDGGLTQIDKYLYSSEDYIKSGALLACGIVNSGVRNECDPALALLSDYVLHNSNTMRLGSIFGLGLAYAGSNREDVLTLLLPVMGDSKSSMEVAGVTALACGMIAVGSCNGDVTSTILQTIMEKSETELKDTYARWLPLGLGLNHLGKGEAIEAILAALEVVSEPFRSFANTLVDVCAYAGSGNVLKVQQLLHICSEHFDSKEKEEDKDKKEKKDKDKKEAPADMGAHQGVAVLGIALIAMGEEIGAEMALRTFGHLLRYGEPTLRRAVPLALALISVSNPRLNILDTLSKFSHDADPEVSYNSIFAMGMVGSGTNNARLAAMLRQLAQYHAKDPNNLFMVRLAQVKNRTPPQSVPGKYLW

SEQ ID NO: 871526 - protein, 738 aa, Homo sapiens
GGDPNMQVEAGFGPAVAAEMEEGGRDKAPVQPQQSPAAAPGGTDEKPSGKERRDAGDKDKEQELSEEDKQLQDELEMLVERLGEKDTSLYRPALEELRRQIRSSTTSMTSVPKPLKFLRPHYGKLKEIYENMAPGENKRFAADIISVLAMTMSGERECLKYRLVGSQEELASWGHEYVRHLAGEVAKEWQELDDAEKVQREPLLTLVKEIVPYNMAHNAEHEACDLLMEIEQVDMLEKDIDENAYAKVCLYLTSCVNYVPEPENSALLRCALGVFRKFSRFPEALRLALMLNDMELVEDIFTSCKDVVVQKQMAFMLGRHGVFLELSEDVEEYEDLTEIMSNVQLNSNFLALARELDIMEPKVPDDIYKTHLENNRFGGSGSQVDSARMNLASSFVNGFVNAAFGQDKLLTDDGNKWLYKNKDHGMLSAAASLGMILLWDVDGGLTQIDKYLYSSEDYIKSGALLACGIVNSGVRNECDPALALLSDYVLHNSNTMRLGSIFGLGLAYAGSNREDVLTLLLPVMGDSKSSMEVAGVTALACGMIAVGSCNGDVTSTILQTIMEKSETELKDTYARWLPLGLGLNHLGKGEAIEAILAALEVVSEPFRSFANTLVDVCAYAGSGNVLKVQQLLHICSEHFDSKEKEEDKDKKEKKDKDKKEAPADMGAHQEWCSGGCLMLWGADNWCRWLTNFWHLLRLGAYTPGVVFNGSFCLIPSSWYLAFSVCPNPPPFPGGGGAN

SEQ ID NO: 871527 - protein, 665 aa, Homo sapiens
GGDPNMQVEAGFGPAVAAEMEEGGRDKAPVQPQQSPAAAPGGTDEKPSGKERRDAGDKDKEQELSEEDKQLQDELEMLVERLGEKDTSLYRPALEELRRQIRSSTTSMTSVPKPLKFLRPHYGKLKEIYENMAPGENKRFAADIISVLAMTMSGERECLKYRLVGSQEELASWGHEYVRHLAGEVAKEWQELDDAEKVQREPLLTLVKEIVPYNMAHNAEHEACDLLMEIEQVDMLEKDIDENAYAKVCLYLTSCVNYVPEPENSALLRCALGVFRKFSRFPEALRLALMLNDMELVEDIFTSCKDVVVQKQMAFMLGRHGVFLELSEDVEEYEDLTEIMSNVQLNSNFLALARELDIMEPKVPDDIYKTHLENNRFGGSGSQVDSARMNLASSFVNGFVNAAFGQDKLLTDDGNKWLYKNKDHGMLSAAASLGMILLWDVDGGLTQIDKYLYSSEDYIKSGALLACGIVNSGVRNECDPALALLSDYVLHNSNTMRLGSIFGLGLAYAGSNREDVLTLLLPVMGDSKSSMEVAGVTALACGMIAVGSCNGDVTSTILQTIMEKSETELKDTYARWLPLGLGLNHLGKGEAIEAILAALEVVSEPFRSFANTLVDVCAYAGSGNVLKVQQLLHICSEHFDSKEKEEDKDKNSRGMTEVQNAGPGI

SEQ ID NO: 871528 - protein, 553 aa, Homo sapiens
GGDPNMQVEAGFGPAVAAEMEEGGRDKAPVQPQQSPAAAPGGTDEKPSGKERRDAGDKDKEQELSEEDKQLQDELEMLVERLGEKDTSLYRPALEELRRQIRSSTTSMTSVPKPLKFLRPHYGKLKEIYENMAPGENKRFAADIISVLAMTMSGERECLKYRLVGSQEELASWGHEYVRHLAGEVAKEWQELDDAEKVQREPLLTLVKEIVPYNMAHNAEHEACDLLMEIEQVDMLEKDIDENAYAKVCLYLTSCVNYVPEPENSALLRCALGVFRKFSRFPEALRLALMLNDMELVEDIFTSCKDVVVQKQMAFMLGRHGVFLELSEDVEEYEDLTEIMSNVQLNSNFLALARELDIMEPKVPDDIYKTHLENNRFGGSGSQVDSARMNLASSFVNGFVNAAFGQDKLLTDDGNKWLYKNKDHGMLSAAASLGMILLWDVDGGLTQIDKYLYSSEDYIKSGALLACGIVNSGVRNECDPALALLSDYVLHNSNTMRLGSIFGLGLAYAGSNREDVLTLLLPVMGDSKSSMEVAVSSFSLWNDTAPRFAEDPD

SEQ ID NO: 871529 - protein, 476 aa, Homo sapiens
GGDPNMQVEAGFGPAVAAEMEEGGRDKAPVQPQQSPAAAPGGTDEKPSGKERRDAGDKDKEQELSEEDKQLQDELEMLVERLGEKDTSLYRPALEELRRQIRSSTTSMTSVPKPLKFLRPHYGKLKEIYENMAPGENKRFAADIISVLAMTMSGERECLKYRLVGSQEELASWGHEYVRHLAGEVAKEWQELDDAEKVQREPLLTLVKEIVPYNMAHNAEHEACDLLMEIEQVDMLEKDIDENAYAKVCLYLTSCVNYVPEPENSALLRCALGVFRKFSRFPEALRLALMLNDMELVEDIFTSCKDVVVQKQMAFMLGRHGVFLELSEDVEEYEDLTEIMSNVQLNSNFLALARELDIMEPKVPDDIYKTHLENNRFGGSGSQVDSARMNLASSFVNGFVNAAFGQDKLLTDDGNKWLYKNKDHGMLSAAASLGMILLWDVDGGLTQIDKYLYSSEDYIKVGLHTACSWGLPRSIF

SEQ ID NO: 871530 - protein, 295 aa, Homo sapiens
  misc_feature (285)..(285): Xaa can be any naturally occurring amino acid
  misc_feature (292)..(292): Xaa can be any naturally occurring amino acid
GGDPNMQVEAGFGPAVAAEMEEGGRDKAPVQPQQSPAAAPGGTDEKPSGKERRDAGDKDKEQELSEEDKQLQDELEMLVERLGEKDTSLYRPALEELRRQIRSSTTSMTSVPKPLKFLRPHYGKLKEIYENMAPGENKRFAADIISVLAMTMSGERECLKYRLVGSQEELASWGHEYVRHLAGEVAKEWQELDDAEKVQREPLLTLVKEIVPYNMAHNAEHEACDLLMEIEQVDMLEKDIDENAYAKVCLYLTSYVPELRIKLWVCLGVSKLPFLTWMLVYADCXNLLLKLXDVI

SEQ ID NO: 871531 - protein, 478 aa, Homo sapiens
GGDPNMQVEAGFGPAVAAEMEEGGRDKAPVQPQQSPAAAPGGTDEKPSGKERRDAGDKDKEQELSEEDKQLQDELEMLVERLGEKDTSLYRPALEELRRQIRSSTTSMTSVPKPLKFLRPHYGKLKEIYENMAPGENKRFAADIISVLAMTMSGERECLKYRLVGSQEELASWGHEYVSCVNYVPEPENSALLRCALGVFRKFSRFPEALRLALMLNDMELVEDIFTSCKDVVVQKQMAFMLGRHGVFLELSEDVEEYEDLTEIMSNVQLNSNFLALARELDIMEPKVPDDIYKTHLENNRFGGSGSQVDSARMNLASSFVNGFVNAAFGQDKLLTDDGNKWLYKNKDHGMLSAAASLGMILLWDVDGGLTQIDKYLYSSEDYIKSGALLACGIVNSGVRNECDPALALLSDYVLHNSNTMRLGSIFGLGLAYAGSNREDVLTLLLPVMGDSKSSMEVAVSSFSLWNDTAPRFAEDPD

SEQ ID NO: 871532 - protein, 859 aa, Homo sapiens
AECPPAPPGSQAPRRPAGRIPPSVMAAPILKDVVAYVEVWSSNGTENYSKTFTTQLVDMGAKVSKTFNKQVTHVIFKDGYQSTWDKAQKRGVKLVSVLWVEKCRTAGAHIDESLFPAANMNEHLSSLIKKKRKCMQPKDFNFKTPENDKRFQKKFEKMAKELQRQKTNLDDDVPILLFESNGSLIYTPTIEINSSHHSAMEKRLQEMKEKRENLSPTSSQMIQQSHDNPSNSLCEAPLNISRDTLCSDEYFAGGLHSSFDDLCGNSGCGNQERKLEGSINDIKSDVCISSLVLKANNIHSSPSFTHLDKSSPQKFLSNLSKEEINLQRNIAGKVVTPHQKQAAGMSQETFEEKYRLSPTLSSTKGHLLIHSRPRSSSVKRKRVSHGSHSPPKEKCKRKRSTRRSIMPRLQLCRSEGRLQHVAGPALEALSCGESSYDDYFSPDNLKERYSENLPPESQLPSSPAQLSCRSLSKKERTSIFEMSDFSCVGKKTRTVDITNFTAKTISSPRKTGNGEGRATSSCVTSAPEEALRCCRQAGKEDACPEGNGFSYTIEDPALPKGHDDDLTPLEGSLEEMKEAVGLKSTQNKGTTSKISNSSEGEAQSEHEPCFIVDCNMETSTEEKENLPGGYSGSVKNRPTRHDVLDDSCDGFKDLIKPHEELKKSGRGKKPTRTLVMTSMPSEKQNVVIQVVDKLKGFSIAPDVCETTTHVLSGKPLRTLNVLLGIARGCWVLSYDWVLWSLELGHWISEEPFELSHHFPAAPLCRSECHLSAGPYRGTLFADQPAMFVSPASSPPVAKLCELVHLCGGRVSQVPRQASIVIGPYSGKKKATVKYLSEKWVLDSITQHKVCAPENYLLSQ

SEQ ID NO: 871533 - protein, 799 aa, Homo sapiens
AECPPAPPGSQAPRRPAGRIPPSVMAAPILKDVVAYVEVWSSNGTENYSKTFTTQLVDMGAKVSKTFNKQVTHVIFKDGYQSTWDKAQKRGVKLVSVLWVEKCRTAGAHIDESLFPAANMNEHLSSLIKKKRKCMQPKDFNFKTPENDKRFQKKFEKMAKELQRQKTNLDDDVPILLFESNGSLIYTPTIEINSSHHSAMEKRLQEMKEKRENLSPTSSQMIQQSHDNPSNSLCEAPLNISRDTLCSDEYFAGGLHSSFDDLCGNSGCGNQERKLEGSINDIKSDVCISSLVLKANNIHSSPSFTHLDKSSPQKFLSNLSKEEINLQRNIAGKVVTPHQKQAAGMSQETFEEKYRLSPTLSSTKGHLLIHSRPRSSSVKRKRVSHGSHSPPKEKCKRKRSTRRSIMPRLQLCRSEGRLQHVAGPALEALSCGESSYDDYFSPDNLKERYSENLPPESQLPSSPAQLSCRSLSKKERTSIFEMSDFSCVGKKTRTVDITNFTAKTISSPRKTGNGEGRATSSCVTSAPEEALRCCRQAGKEDACPEGNGFSYTIEDPALPKGHDDDLTPLEGSLEEMKEAVGLKSTQNKGTTSKISNSSEGEAQSEHEPCFIVDCNMETSTEEKENLPGGYSGSVKNRPTRHDVLDDSCDGFKDLIKPHEELKKSGRGKKPTRTLVMTSMPSEKQNVVIQVVDKLKGFSIAPDVCETTTHVLSGKPLRTLNVLLGIARGCWVLSYDWVLWSLELGHWISEEPFELSHHFPAAPVSQMLFYDGKCSLLFSRNYYKHKGGLKFLSSQAQLCP

SEQ ID NO: 871534 - protein, 850 aa, Homo sapiens
AECPPAPPGSQAPRRPAGRIPPSVMAAPILKDVVAYVEVWSSNGTENYSKTFTTQLVDMGAKVSKTFNKQVTHVIFKDGYQSTWDKAQKRGVKLVSVLWVEKCRTAGAHIDESLFPAANMNEHLSSLIKKKRKCMQPKDFNFKTPENDKRFQKKFEKMAKELQRQKTNLDDDVPILLFESNGSLIYTPTIEINSSHHSAMEKRLQEMKEKRENLSPTSSQMIQQSHDNPSNSLCEAPLNISRDTLCSDEYFAGGLHSSFDDLCGNSGCGNQERKLEGSINDIKSDVCISSLVLKANNIHSSPSFTHLDKSSPQKFLSNLSKEEINLQRNIAGKVVTPHQKQAAGMSQETFEEKYRLSPTLSSTKGHLLIHSRPRSSSVKRKRVSHGSHSPPKEKCKRKRSTRRSIMPRLQLCRSEGRLQHVAGPALEALSCGESSYDDYFSPDNLKERYSENLPPESQLPSSPAQLSCRSLSKKERTSIFEMSDFSCVGKKTRTVDITNFTAKTISSPRKTGNGEGRATSSCVTSAPEEALRCCRQAGKEDACPEGNGFSYTIEDPALPKGHDDDLTPLEGSLEEMKEAVGLKSTQNKGTTSKISNSSEGEAQSEHEPCFIVDCNMETSTEEKENLPGGYSGSVKNRPTRHDVLDDSCDGFKDLIKPHEELKKSGRGKKPTRTLVMTSMPSEKQNVVIQVVDKLKGFSIAPDVCETTTHVLSGKPLRTLNVLLGIARGCWVLSYDWVLWSLELGHWISEEPFELSHHFPAAPLCRSECHLSAGPYRGTLFADQPAMFVSPASSPPVAKLCELVHLCGGRVSQVPRQASIVIGPYSGKKKATVKYLSEKWVLDWQASHPAH

SEQ ID NO: 871535 - protein, 815 aa, Homo sapiens
AECPPAPPGSQAPRRPAGRIPPSVMAAPILKDVVAYVEVWSSNGTENYSKTFTTQLVDMGAKVSKTFNKQVTHVIFKDGYQSTWDKAQKRGVKLVSVLWVEKCRTAGAHIDESLFPAANMNEHLSSLIKKKRKCMQPKDFNFKTPENDKRFQKKFEKMAKELQRQKTNLDDDVPILLFESNGSLIYTPTIEINSSHHSAMEKRLQEMKEKRENLSPTSSQMIQQSHDNPSNSLCEAPLNISRDTLCSDEYFAGGLHSSFDDLCGNSGCGNQERKLEGSINDIKSDVCISSLVLKANNIHSSPSFTHLDKSSPQKFLSNLSKEEINLQRNIAGKVVTPHQKQAAGMSQETFEEKYRLSPTLSSTKGHLLIHSRPRSSSVKRKRVSHGSHSPPKEKCKRKRSTRRSIMPRLQLCRSEGRLQHVAGPALEALSCGESSYDDYFSPDNLKERYSENLPPESQLPSSPAQLSCRSLSKKERTSIFEMSDFSCVGKKTRTVDITNFTAKTISSPRKTGNGEGRATSSCVTSAPEEALRCCRQAGKEDACPEGNGFSYTIEDPALPKGHDDDLTPLEGSLEEMKEAVGLKSTQNKGTTSKISNSSEGEAQSEHEPCFIVDCNMETSTEEKENLPGGYSGSVKNRPTRHDVLDDSCDGFKDLIKPHEELKKSGRGKKPTRTLVMTSMPSEKQNVVIQVVDKLKGFSIAPDVCETTTHVLSGKPLRTLNVLLGIARGCWVLSYDWVLWSLELGHWISEEPFELSHHFPAAPLCRSECHLSAGPYRGTLFADQPAMFVSPASSPPVAKLCELVHLCGGCSEPRLQ

SEQ ID NO: 871536 - protein, 634 aa, Homo sapiens
AECPPAPPGSQAPRRPAGRIPPSVMAAPILKDVVAYVEVWSSNGTENYSKTFTTQLVDMGAKVSKTFNKQVTHVIFKDGYQSTWDKAQKRGVKLVSVLWVEKCRTAGAHIDESLFPAANMNEHLSSLIKKKRKCMQPKDFNFKTPENDKRFQKKFEKMAKELQRQKTNLDDDVPILLFESNGSLIYTPTIEINSSHHSAMEKRLQEMKEKRENLSPTSSQMIQQSHDNPSNSLCEAPLNISRDTLCSDEYFAGGLHSSFDDLCGNSGCGNQERKLEGSINDIKSDVCISSLVLKANNIHSSPSFTHLDKSSPQKFLSNLSKEEINLQRNIAGKVVTPHQKQAAGMSQETFEEKYRLSPTLSSTKGHLLIHSRPRSSSVKRKRVSHGSHSPPKEKCKRKRSTRRSIMPRLQLCRSEGRLQHVAGPALEALSCGESSYDDYFSPDNLKERYSENLPPESQLPSSPAQLSCRSLSKKERTSIFEMSDFSCVGKKTRTVDITNFTAKTISSPRKTGNGEGRATSSCVTSAPEEALRCCRQAGKEDACPEGNGFSYTIEDPALPKGHDDDLTPLEGSLEEMKEAVGLKSTQNKGTTSKISNSSEGEAQSEHEPCFIVDCNMETSTEEKENLPGGYSGSM

SEQ ID NO: 871537 - protein, 859 aa, Homo sapiens; identical to SEQ ID NO: 871532

SEQ ID NO: 871538 - protein, 672 aa, Homo sapiens
AECPPAPPGSQAPRRPAGRIPPSVMAAPILKDVVAYVEVWSSNGTENYSKTFTTQLVDMGAKVSKTFNKQVTHVIFKDGYQSTWDKAQKRGVKLVSVLWVEKCRTAGAHIDESLFPAANMNEHLSSLIKKKRKCMQPKDFNFKTPENDKRFQKKFEKMAKELQRQKTNLDDDVPILLFESNGSLIYTPTIEINSSHHSAMEKRLQEMKEKRENLSPTSSQMIQQSHDNPSNSLCEAPLNISRDTLCSDEYFAGGLHSSFDDLCGNSGCGNQERKLEGSINDIKSDVCISSLVLKANNIHSSPSFTHLDKSSPQKFLSNLSKEEINLQRNIAGKVVTPHQKQAAGMSQETFEEKYRLSPTLSSTKGHLLIHSRPRSSSVKRKRVSHGSHSPPKEKCKRKRSTRRSIMPRLQLCRSEGRLQHVAGPALEALSCGESSYDDYFSPDNLKERYSENLPPESQLPSSPAQLSCRSLSKKERTSIFEMSDFSCVGKKTRTVDITNFTAKTISSPRKTGNGEGRATSSCVTSAPEEALRCCRQAGKEDACPEGNGFSYTIEDPALPKGHDDDLTPLEGSLEEMKEAVGLKSTQNKGTTSKISNSSEGEAQSEHEPCFIVDCNMETSTEEKENLPGGYSGSVKNRPTRHDVLDDSCDGFKDLIKPHEELKKSGRGKKVSV

SEQ ID NO: 871539 - protein, 58 aa, Homo sapiens
ACRNLSHGGESEAELVMSSEKAKQEEKQRRLLTSGKQLRVRVRTGGHGGPGTKLVPGA

SEQ ID NO: 871540 - protein, 181 aa, Homo sapiens
GPHPQGLEPLCARSHSTAGPFLPWLCTTAQAVPPATCPSFPPPRVLRFPGSFLCQCPNLERMCHIAPLCSHVLGGRSASCPRSGARTKQHSWEMAFPLGAQNCRDHSLGSGDCWLTHSHTRCPQTLLAGGIVELCALNARSGPSTQAAGSHRVFRRLGSVSVPLAPPTPLCEGAPSHPWLL

SEQ ID NO: 871541 - protein, 121 aa, Homo sapiens
MPMFIVNTNVPRASVPDGFLSELTQQLAQATWQAPPSTSRCTWSRTSSMAFGRAPASRARCLQPAQHRQDRRRAEPLLTASLLMLACWPDARLRISSPDRVYINYYDMNAANVGWNNSTFA

SEQ ID NO: 871542 - protein, 121 aa, Homo sapiens
MPMFIVNTNVPRASVPDGFLSELTQQLAQATWQAPPSTSRCTWSRTSSMAFGRAPASRARCLQPAQHRQDRRRAEPLLTASLLMLACWPEARLRISSPDRVYINYYDMNAANVGWNNSTFA

SEQ ID NO: 871543 - protein, 155 aa, Homo sapiens
GRQLRLGRGWVLAQRRPRRVRHVPLRGSPGPSAIMPMFIVNTNVPRASVPDGFLSELTQQLAQATWQAPPSTSRCTWSRTSSMAFGRAPASRARCLQPAQHRQDRRRAEPLLTASLLMLACWPDARLRISSPDRVYINYYDMNAANVGWNNSTFA

SEQ ID NO: 871544 - protein, 161 aa, Homo sapiens
QFRLGAGWVLNRPRVRHVAQRRPRRVRHVPLRGSPGPSAIMPMFIVNTNVPRASVPDGFLSELTQQLAQATWQAPPSTSRCTWSRTSSMAFGRAPASRARCLQPAQHRQDRRRAEPLLTASLLMLACWPDARLRISSPDRVYINYYDMNAANVGWNNSTFA

SEQ ID NO: 871545 - protein, 161 aa, Homo sapiens; identical to SEQ ID NO: 871544

SEQ ID NO: 871546 - protein, 120 aa, Homo sapiens
ASRGWVVIGRGSGGAARASCASARVSWSFCHHADVHRKHQRAPRLRAGRVPLRAHPAAGAGHLASPPQYIAVHVVPDQLNGLRASSSEPCALLAACTASARSAARRTAPYSKLADAGLLA

SEQ ID NO: 871547 - protein, 293 aa, Homo sapiens
RTRPRLKLCGHGRRLRRSSAAAAARASCASARVSWSFCHHADVHRKHQRAPRLRAGRVPLRAHPAAGAGHLASPPQQYIAVHVVPDQLMAFGRAPASRARCLQPAQHRQDRRRAEPLLTASLLMLACWPDARLRISSPDQGLHQLLRHERGQCGLEQLHLRLRAAPSPKSRRDPRCLRWLHPGNPAARCVLGRPTQLRAWREDNYAGLGDLQTQPQPTTTPTLVAAARGPGKKVLYPPPVWAPAPHVSADTRPYGAHRKPGPARGGPPNKNARAPRGFGPPGGGAPGSTEPRR

SEQ ID NO: 871548 - protein, 117 aa, Homo sapiens
LRARYEAWVLHVAQRRPRRVRHVPLRGSPGPSAIMPMFIVNTNVPRASVPDGFLSELTQQLAQATWQAPPSSTSRCTWSRTSSWPSGELQRAVRAACSLHSIGKIGGAQNRSLQQAC

SEQ ID NO: 871549 - protein, 117 aa, Homo sapiens; identical to SEQ ID NO: 871548

SEQ ID NO: 871550 - protein, 88 aa, Homo sapiens
MEDELEPSLRPRTQIQGRILLLTICAAGIGGTFQFGYNLSIINAPTLVCILSGWRLSLSEWVLANSCPLRGFSQASTRWHFLPQVCLH

SEQ ID NO: 871551 - protein, 121 aa, Homo sapiens; identical to SEQ ID NO: 871541

SEQ ID NO: 871552 - protein, 121 aa, Homo sapiens; identical to SEQ ID NO: 871541

SEQ ID NO: 871553 - protein, 121 aa, Homo sapiens; identical to SEQ ID NO: 871541

SEQ ID NO: 871554 - protein, 121 aa, Homo sapiens; identical to SEQ ID NO: 871541

SEQ ID NO: 871555 - protein, 121 aa, Homo sapiens; identical to SEQ ID NO: 871541

SEQ ID NO: 871556 - protein, 237 aa, Homo sapiens
MEDELEPSLRPRTQIQGRILLLTICAAGIGGTFQFGYNLSIINAPTLHIQEFTNETWQARTGEPLPDHLVLLMWSLIVSLYPLGGLFGALLAGPLAITLGRKKSLLVNNIFVVSAAILFGFSRKAGSFEMIMLGRLLVGVNAGVSMNIQPMYLGESAPKELRGAVAMSSAIFTALGIVMGQVVGLSTSRCTWSRTSSWLRASSSEPCALLAACTASARSAARRTAPYSKLADAGLLA

SEQ ID NO: 871557 - protein, 151 aa, Homo sapiens
MPMFIVNTNVPRASVPDGFLSELTQQLAQATWQAPPRFAGRGQEEGGAHRTRGSALGAGEATPERSWGAGRGEDGGSGPKWTFGARRGRWGGLTAPFPRSTSRCTWSRTSSWLRARSSEPCALLAACTASARSAARRTAPYSKLADAGLLA

SEQ ID NO: 871558 - protein, 496 aa, Homo sapiens
MRALRRLIQGRILLLTICAAGIGGTFQFGYNLSIINAPTLHIQEFTNETWQARTGEPLPDHLVLLMWSLIVSLYPLGGLFGALLAGPLAITLGRKKSLLVNNIFVVSAAILFGFSRKAGSFEMIMLGRLLVGVNAGVSMNIQPMYLGESAPKELRGAVAMSSAIFTALGIVMGQVVGLRELLGGPQAWPLLLASCLVPGALQLASLPLLPESPRYLLIDCGDTEACLAALRRLRGSGDLAGELEELEEERAACQGCRARRPWELFQHRALRRQVTSLVVLGSAMELCGNDSVYAYASSVFRKAGVPEAKIQYAIIGTGSCELLTAVVSCVVIERVGRRVLLIGGYSLMTCWGSIFTVALCLQSSFPWTLYLAMACIFAFILSFGIGPAGVTGILATELFDQMARPAACMVCGALMWIMLILVGLGFPFIMEALSHFLYVPFLGVCVCGAIYTGLFLPETKGKTFQEISKELHRLNFPRRAQGPTWRSLEVIQSTEL

SEQ ID NO: 871559 - protein, 115 aa, Homo sapiens
RNAARGRHECRWKALKGVLHVPLRGSPGPSAIMPMFIVNTNVPRASVPDGFLSELTQQLAQATWQAPPSSTSRCTWSRTSSWPSGELQRAVRAACSLHSIGKIGGAQNRSLQQAC

SEQ ID NO: 871560 - protein, 119 aa, Homo sapiens
MPMFIVNTNVPRASVPDGFLSELTQQLAQATWQAPPSTSRCTWSRTSSMAFGRAPASRARCLQPAQHRQDRRRAEPLLTASLLMLACWPDARLRISSPDRYAESRRGGGGAAARGQARD

SEQ ID NO: 871561 - protein, 548 aa, Homo sapiens
APLSPLGAARCPSLRAQAAGSPLANGSRGLPGTARPPLRPLFRMLHALLRSRMIQGRILLLTICAAGIGGTFQFGYNLSIINAPTLHIQEFTNETWQARTGEPLPDHLVLLMWSLIVSLYPLGGLFGALLAGPLAITLGRKKSLLVNNIFVVSAAILFGFSRKAGSFEMIMLGRLLVGVNAGVSMNIQPMYLGESAPKELRGAVAMSSAIFTALGIVMGQVVGLRELLGGPQAWPLLLASCLVPGALQLASLPLLPESPRYLLIDCGDTEACLAALRRLRGSGDLAGELEELEEERAACQGCRARRPWELFQHRALRRQVTSLVVLGSAMELCGNDSVYAYASSVFRKAGVPEAKIQYAIIGTGSCELLTAVVSCVVIERVGRRVLLIGGYSLMTCWGSIFTVALCLAFRSSLPLGHSNLAHGLASFALHRSGFGHLLPAGVTGILATELFDQMARPAACMVCGALMWIMLILVGLGFPFIMEALSHFLYVPFLGVCVCGAIYTGLFLPETKGKTFQEISKELHRLNFPRRAQGPTWRSLEVIQSTEL

SEQ ID NO: 871562 - protein, 436 aa, Homo sapiens
APLSPLGAARCPSLRAQAAGSPLANGSRGLPGTARPPLRPLFRMLHALLRSRMIQGRILLLTICAAGIGGTFQFGYNLSIINAPTLHIQEFTNETWQARTGEPLPDHLVLLMWSLIVSLYPLGGLFGALLAGPLAITLGRKKSLLVNNIFVVSAAILFGFSRKAGSFEMIMLGRLLVGVNAGVSMNIQPMYLGESAPKELRGAVAMSSAIFTALGIVMGQVVGLRVYAYASSVFRKAGVPEAKIQYAIIGTGSCELLTAVVSCVVIERVGRRVLLIGGYSLMTCWGSIFTVALCLAFRSSLPLGHSNLAHGLASFALHRSGFGHLLPAGVTGILATELFDQMARPAACMVCGALMWIMLILVGLGFPFIMEALSHFLYVPFLGVCVCGAIYTGLFLPETKGKTFQEISKELHRLNFPRRAQGPTWRSLEVIQSTEL

SEQ ID NO: 871563 - protein, 218 aa, Homo sapiens
MPMFIVNTNVPRASVPDGFLSELTQQLAQATWQAPPSTSRCTWSRTSSMAFGRAPASRARCLQPAQHRQDRRRAEPLLTASLLMLACWPDARLRISSPDQGLHQLLRHERGQCGLEQLHLRLRAAGTHAVCAGSTRGDPARYALVVPKGPQTQPPKAFLGGGKKIKRGERRTKKTNETTPKGTGRKDKQHRRERYNTQAADEKTGTHKPRRDTKQAAG

SEQ ID NO: 871564 - protein, 179 aa, Homo sapiens
MPMFIVNTNVPRASVPDGFLSELTQQLAQATWQAPPSTSRCTWSRTSSMAFGRAPASRARCLQPAQHRQDRRRAEPLLTASLLMLACWPDARLRISSPDQGLHQLLRHERGQCGLEQLHLRLRAAGTHAVCAGSTREPAARCVLGPPTPTFWWGEINGLETTACAGFPARPPQPSGGDE

SEQ ID NO: 871565 - protein, 151 aa, Homo sapiens; identical to SEQ ID NO: 871557

SEQ ID NO: 871566 - protein, 117 aa, Homo sapiens
MPMFIVNTNVPRASVPDGFLSELTQQLAQATWQAPPSTSRCTWSRTSSMAFGGSSEPCALCSLHSIGKIGGAQNRSYSKLLCGLLAERLRISPDSRVYINYYDMNAANVGWNNSTFA

SEQ ID NO: 871567 - protein, 146 aa, Homo sapiens
MPMFIVNTNVPRASVPDGFLSELTQQLAQATWQAPPRFAGRGQEEGGAHRTRGSALGAGEATPERSWGAGRGEDGGSGPKWTFGARRGRWGGLTAPFPRSSTSRCTWSRTSSWPSGELQRAVRAACSLHSIGKIGGAQNRSLQQAC

SEQ ID NO: 871568 - protein, 146 aa, Homo sapiens; identical to SEQ ID NO: 871567

SEQ ID NO: 871569 - protein, 103 aa, Homo sapiens
MPMFIVNTNVFGRAPASRARCLQPAQHRQDRRRAEPLLTASLLMLACWPDARLRISSPDQGLHQLLRHERGQCGLEQLHLRLRAAGPTLSALAPPGNPPHAVF

SEQ ID NO: 871570 - protein, 109 aa, Homo sapiens
TLAKRHLAWPLLCLLRELLGGPQAWPLLLASCLVPGALQLASLPLLPESPRYLLIDCGDTEACLAGESLSLGSQTALDQGMHLPRVYGSPFHRFHLSRKSYPSLCASIS

SEQ ID NO: 871571 - protein, 97 aa, Homo sapiens
GGQMPPHDLSWAFCLGVDGDTPGLGVFFNPQEALSHFLYVPFLGVCVCGAIYTGLFLPETKGKTFQEISKELHRLNFPRRAQGPTWRSLEVIQSTEL

SEQ ID NO: 871572 - protein, 121 aa, Homo sapiens; identical to SEQ ID NO: 871542

SEQ ID NO: 871573 - protein, 155 aa, Homo sapiens; identical to SEQ ID NO: 871543

SEQ ID NO: 871574 - protein, 121 aa, Homo sapiens; identical to SEQ ID NO: 871542

SEQ ID NO: 871575 - protein, 121 aa, Homo sapiens; identical to SEQ ID NO: 871542

SEQ ID NO: 871576 - protein, 81 aa, Homo sapiens
ARSSAAAAARASVPLRGSPGPSAIMPMFIVNTNVPRASVPDGFLSELTPSGELQRAVRAACSLHSIGKIGGAQNRSLQQAC

SEQ ID NO: 871577 - protein, 255 aa, Homo sapiens
  misc_feature (219)..(219): Xaa can be any naturally occurring amino acid
  misc_feature (222)..(222): Xaa can be any naturally occurring amino acid
AVVSTQSAHYGRGRRVRHVPLRGSPGPSAIMPMFIVNTNVPRASVPDGFLSELTQQLAQATWQAPPSTSRCTWSRTSSMAFGRAPASRARCLQPAQHRQDRRRAEPLLTASLLMLACWPEARLRISSPDQGLHQLLRHERGQCGLEQLHLRLRAAGTHAVCAGSTREPAARCVLGPPTPTFWWGEINGLETSAEIRHELAVAYLGCRVEAKADLPHGPXRQXGPSDESLTQASTNRSGTSRGTPICRWLLWCCAP

SEQ ID NO: 871578 - protein, 196 aa, Homo sapiens
RKDNDRRILVYAVEAVLTSDLLLRAIMPMFIVNTNVPRASVPDGFLSELTQQLAQATGSPPSTSRCTWSRTSSMAFGRAPASRARCLQPAQHRQDRRRAEPLLTASLLMLACWPEARLRISSPDQGLHQLLRHERGQCGLEQLHLRLRAAGTHAVCAGSTREPAARCVLGPPTPTFWWGEINGLETKKTKKKNWGV

SEQ ID NO: 871579 - protein, 78 aa, Homo sapiens
ARSSAAAAARASVPLRGSPGPSACTASARSAARRTAPTASCCAACWPSACASARTGRVYINYYDMNAANVGWNNSTFA

SEQ ID NO: 871580 - protein, 121 aa, Homo sapiens; identical to SEQ ID NO: 871541

SEQ ID NO: 871581 - protein, 121 aa, Homo sapiens; identical to SEQ ID NO: 871541

SEQ ID NO: 871582 - protein, 121 aa, Homo sapiens; identical to SEQ ID NO: 871541

SEQ ID NO: 871583 - protein, 276 aa, Homo sapiens
APLSPLGAARCPSLRAQAAGSPLANGSRGLPGTARPPLRPLFRMLHALLRSRMIQGRILLLTICAAGIGGTFQFGYNLSIINAPTLHIQEFTNETWQARTGEPLPDHLVLLMWSLIVSLYPLGGLFGALLAGPLAITLGRKKSLLVNNIFVVSAAILFGFSRKAGSFEMIMLGRLLVGVNAGVSMNIQPMYLGESAPKELRGAVAMSSAIFTALGIVMGQVVGLSTSRCTWSRTSSWLRASSSEPCALLAACTASARSAARRTAPYSKLADAGLLA

SEQ ID NO: 871584 - protein, 237 aa, Homo sapiens; identical to SEQ ID NO: 871556

SEQ ID NO: 871585 - protein, 286 aa, Homo sapiens
APLSPLGAARCPSLRAQAAGSPLANGSRGLPGTARPPLRPLFRMLHALLRSRMIQGRILLLTICAAGIGGTFQFGYNLSIINAPTLHIQEFTNETWQARTGEPLPDHLVLLMWSLIVSLYPLGGLFGALLAGPLAITLGASLSVFSLPPRKKSLLVNNIFVVSAAILFGFSRKAGSFEMIMLGRLLVGVNAGVSMNIQPMYLGESAPKELRGAVAMSSAIFTALGIVMGQVVGLSTSRCTWSRTSSWLRARSSEPCALLAACTASARSAARRTAPYSKLADAGLLA

SEQ ID NO: 871586 - protein, 542 aa, Homo sapiens
APLSPLGAARCPSLRAQAAGSPLANGSRGLPGTARPPLRPLFRMLHALLRSRMIQGRILLLTICAAGIGGTFQFGYNLSIINAPTLHIQEFTNETWQARTGEPLPDHLVLLMWSLIVSLYPLGGLFGALLAGPLAITLGRKKSLLVNNIFVVSAAILFGFSRKAGSFEMIMLGRLLVGVNAGVSMNIQPMYLGESAPKELRGAVAMSSAIFTALGIVMGQVVGLRELLGGPQAWPLLLASCLVPGALQLASLPLLPESPRYLLIDCGDTEACLAALRRLRGSGDLAGELEELEEERAACQGCRARRPWELFQHRALRRQVTSLVVLGSAMELCGNDSVYAYASSVFRKAGVPEAKIQYAIIGTGSCELLTAVVSCVVIERVGRRVLLIGGYSLMTCWGSIFTVALCLQSSFPWTLYLAMACIFAFILSFGIGPAGVTGILATELFDQMARPAACMVCGALMWIMLILVGLGFPFIMEALSHFLYVPFLGVCVCGAIYTGLFLPETKGKTFQEISKELHRLNFPRRAQGPTWRSLEVIQSTEL

SEQ ID NO: 871587 - protein, 503 aa, Homo sapiens
MEDELEPSLRPRTQIQGRILLLTICAAGIGGTFQFGYNLSIINAPTLHIQEFTNETWQARTGEPLPDHLVLLMWSLIVSLYPLGGLFGALLAGPLAITLGRKKSLLVNNIFVVSAAILFGFSRKAGSFEMIMLGRLLVGVNAGVSMNIQPMYLGESAPKELRGAVAMSSAIFTALGIVMGQVVGLRELLGGPQAWPLLLASCLVPGALQLASLPLLPESPRYLLIDCGDTEACLAALRRLRGSGDLAGELEELEEERAACQGCRARRPWELFQHRALRRQVTSLVVLGSAMELCGNDSVYAYASSVFRKAGVPEAKIQYAIIGTGSCELLTAVVSCVVIERVGRRVLLIGGYSLMTCWGSIFTVALCLQSSFPWTLYLAMACIFAFILSFGIGPAGVTGILATELFDQMARPAACMVCGALMWIMLILVGLGFPFIMEALSHFLYVPFLGVCVCGAIYTGLFLPETKGKTFQEISKELHRLNFPRRAQGPTWRSLEVIQSTEL

SEQ ID NO: 871588 - protein, 492 aa, Homo sapiens
APLSPLGAARCPSLRAQAAGSPLANGSRGLPGTARPPLRPLFRMLHALLRSRMIQGRILLLTICAAGIGGTFQFGYNLSIINAPTLHIQEFTNETWQARTGEPLPDHLVLLMWSLIVSLYPLGGLFGALLAGPLAITLGRKKSLLVNNIFVVSAAILFGFSRKAGSFEMIMLGRLLVGVNAGVSMNIQPMYLGESAPKELRGAVAMSSAIFTALGIVMGQVVGLSTTGLRGSGDLAGELEELEEERAACQGCRARRPWELFQHRALRRQVTSLVVLGSAMELCGNDSVYAYASSVFRKAGVPEAKIQYAIIGTGSCELLTAVVSCVVIERVGRRVLLIGGYSLMTCWGSIFTVALCLQSSFPWTLYLAMACIFAFILSFGIGPAGVTGILATELFDQMARPAACMVCGALMWIMLILVGLGFPFIMEALSHFLYVPFLGVCVCGAIYTGLFLPETKGKTFQEISKELHRLNFPRRAQGPTWRSLEVIQSTEL

SEQ ID NO: 871589 - protein, 496 aa, Homo sapiens; identical to SEQ ID NO: 871558

SEQ ID NO: 871590 - protein, 151 aa, Homo sapiens; identical to SEQ ID NO: 871557

SEQ ID NO: 871591 - protein, 276 aa, Homo sapiens; identical to SEQ ID NO: 871583

SEQ ID NO: 871592 - protein, 203 aa, Homo sapiens
MPMFIVNTNVPRASVPDGFLSELTQQLAQATWQAPPSTSRCTWSRTSSMAFGGSSEPCALCSLHSIGKIGGAQNRSYSKLLCGLLAERLRISPDRQGLHQLLRHERGQCGLEQLHLRLRAAGTHAVCAGSTREPAARCVLGPPTPTFWWGEINGLETTDTSGGARYQFAYSESFTIPGRVYTSCWRTWVTTYRWSPLAGGMRG

SEQ ID NO: 871593 - protein, 285 aa, Homo sapiens
APLSPLGAARCPSLRAQAAGSPLANGSRGLPGTARPPLRPLFRMLHALLRSRMIQGRILLLTICAAGIGGTFQFGYNLSIINAPTLHIQEFTNETWQARTGEPLPDHLVLLMWSLIVSLYPLGGLFGALLAGPLAITLGRKKSLLVNNIFVVSAAILFGFSRKAGSFEMIMLGRLLVGVNAGVSMNIQPMYLGESAPKELRGAVAMSSAIFTALGIVMGQVVGLSTTAAPGLRGLGRGAGGAGGGARCLPGLPCPAPMGAVPASGPEETGDKPRGSGQCHGALRE

SEQ ID NO: 871594 - protein, 115 aa, Homo sapiens; identical to SEQ ID NO: 871559

SEQ ID NO: 871595 - protein, 106 aa, Homo sapiens
AAMASWGMATEAAALWGNAEHCNAPRLPSKEDRPLGLASGAAWPGVSSMLEPQTCFPACLRVPCKGLADQGGSGMGLQPPPSTSFIHLANINEAMCQGPCSQQEKS

SEQ ID NO: 871596 - protein, 773 aa, Homo sapiens
TYVVHTWSGVVQAGVFGRAWEHKSLFHHVSRTSHSGPGLVAKMVKPKYKGRSTINPSKASTNPDRVQGAGGQNMRDRATIRRLNMYRQKERRNSRGKIIKPLQYQSTVASGTVARVEPNIKWFGNTRVIKQSSLQKFQEEMDTVMKDPYKVVMKQSKLPMSLLHDRIRPHNLKVHILDTESFETTFGPKSQRKRPNLFASDMQSLIENAEMSTESYDQGKDRDLVTEDTGVRNEAQEEIYKKGQSKRIWGELYKVIDSSDVVVQVLDARDPMGTRSPHIETYLKKEKPWKHLIFVLNKCDLVPTWATKRWVAVLSQDYPTLAFHASLTNPFGKGAFIQLLRQFGKLHTDKKQISVGFIGYPNVGKSSVINTLRSKKVCNVAPIAGETKVWQYITLMRRIFLIDCPGVVYPSEDSETDIVLKGVVQVEKIKSPEDHIGAVLERAKPEYISKTYKIDSWENAEDFLEKLAFRTGKLLKGGEPDLQTVGKMVLNDWQRGRIPFFVKPPNAEPLVAPQLLPSSSLEVVPEAAQNNPGEEVTETAGEGSESIIKEETEENSHCDANTEMQQILTRVRQNFGKINVVPQFSGDDLVPVEVSDLEEELESFSDEEEEEQEQQRDDAEESSSEPEEENVGNDTKAVIKALDEKIAKYQKFLDKAKAKKFSAVRISKGLSEKIFAKPEEQRKTLEEDVDDRAPSKKGKKRKAQREEEQEHSNKAPRALTSKERRRAVRQQRPKKVGVRYYETHNVKNRNRNKKKTNDSEGQKHKRKKFRQKQ

SEQ ID NO: 871597 - protein, 731 aa, Homo sapiens
MVKPKYKGRSTINPSKASTNPDRVQGAGGQNMRDRATIRRLNMYRQKERRNSRGKIIKPLQYQSTVASGTVARVEPNIKWFGNTRVIKQSSLQKFQEEMDTVMKDPYKVVMKQSKLPMSLLHDRIRPHNLKVHILDTESFETTFGPKSQRKRPNLFASDMQSLIENAEMSTESYDQGKDRDLVTEDTGVRNEAQEEIYKKGQSKRIWGELYKVIDSSDVVVQVLDARDPMGTRSPHIETYLKKEKPWKHLIFVLNKCDLVPTWATKRWVAVLSQDYPTLAFHASLTNPFGKGAFIQLLRQFGKLHTDKKQISVGFIGYPNVGKSSVINTLRSKKVCNVAPIAGETKVWQYITLMRRIFLIDCPGVVYPSEDSETDIVLKGVVQVEKIKSPEDHIGAVLERAKPEYISKTYKIDSWENAEDFLEKLAFRTGKLLKGGEPDLQTVGKMVLNDWQRGRIPFFVKPPNAEPLVAPQLLPSSSLEVVPEAAQNNPGEEVTETAGEGSESIIKEETEENSHCDANTEMQQILTRVRQNFGKINVVPQFSGDDLVPVEVSDLEEELESFSDEEEEEQEQQRDDAEESSSEPEEENVGNDTKAVIKALDEKIAKYQKFLDKAKAKKFSAVRISKGLSEKIFAKPEEQRKTLEEDVDDRAPSKKGKKRKAQREEEQEHSNKAPRALTSKERRRAVRQQRPKKVGVRYYETHNVKNRNRNKKKTNDSEGQKHKRKKFRQKQ

SEQ ID NO: 871598 - protein, 773 aa, Homo sapiens; identical to SEQ ID NO: 871596

SEQ ID NO: 871599 - protein, 841 aa, Homo sapiens
TYVVHTWSGVVQAGVFGRAWEHKSLFHHVSRTSHSGPGLVAKMVKPKYKGRSTINPSKASTNPDRVQGAGGQNMRDRATIRRLNMYRQKERRNSRGKIIKPLQYQSTVASGTVARVEPNIKWFGNTRVIKQSSLQKFQEEMDTVMKDPYKVVMKQSKLPMSLLHDRIRPHNLKVHILDTESFETTFGPKSQRKRPNLFASDMQSLIENAEMSTESYDQGKDRDLVTEDTGVRNEAQEEIYKKGQSKRIWGELYKVIDSSDVVVQVLDARDPMGTRSPHIETYLKKEKPWKHLIFVLNKCDLVPTWATKRWVAVLSQDYPTLAFHASLTNPFGKGAFIQLLRQFGKPWHLTFHALLGFPGLLCILCPWSPCSFYVLWLERALPKFKLQIPGQTSAPEGSRGTRLPYQILKASCSLHTDKKQISVGFIGYPNVGKSSVINTLRSKKVCNVAPIAGETKVWQYITLMRRIFLIDCPGVVYPSEDSETDIVLKGVVQVEKIKSPEDHIGAVLERAKPEYISKTYKIDSWENAEDFLEKLAFRTGKLLKGGEPDLQTVGKMVLNDWQRGRIPFFVKPPNAEPLVAPQLLPSSSLEVVPEAAQNNPGEEVTETAGEGSESIIKEETEENSHCDANTEMQQILTRVRQNFGKINVVPQFSGDDLVPVEVSDLEEELESFSDEEEEEQEQQRDDAEESSSEPEEENVGNDTKAVIKALDEKIAKYQKFLDKAKAKKFSAVRISKGLSEKIFAKPEEQRKTLEEDVDDRAPSKKGKKRKAQREEEQEHSNKAPRALTSKERRRAVRQQRPKKVGVRYYETHNVKNRNRNKKKTNDSEGQKHKRKKFRQKQ

SEQ ID NO: 871600 - protein, 686 aa, Homo sapiens
IFGSLTSTMAVGKNKRLTKGGKKGAKKKVVDPFSKKDWYDVKAPAMFNIRNIGKTLVTRTQGTKIASDGLKGRVFEVSLADLQNDEVAFRKFESFETTFGPKSQRKRPNLFASDMQSLIENAEMSTESYDQGKDRDLVTEDTGVRNEAQEEIYKKGQSKRIWGELYKVIDSSDVVVQVLDARDPMGTRSPHIETYLKKEKPWKHLIFVLNKCDLVPTWATKRWVAVLSQDYPTLAFHASLTNPFGKGAFIQLLRQFGKLHTDKKQISVGFIGYPNVGKSSVINTLRSKKVCNVAPIAGETKVWQYITLMRRIFLIDCPGVVYPSEDSETDIVLKGVVQVEKIKSPEDHIGAVLERAKPEYISKTYKIDSWENAEDFLEKLAFRTGKLLKGGEPDLQTVGKMVLNDWQRGRIPFFVKPPNAEPLVAPQLLPSSSLEVVPEAAQNNPGEEVTETAGEGSESIIKEETEENSHCDANTEMQQILTRVRQNFGKINVVPQFSGDDLVPVEVSDLEEELESFSDEEEEEQEQQRDDAEESSSEPEEENVGNDTKAVIKALDEKIAKYQKFLDKAKAKKFSAVRISKGLSEKIFAKPEEQRKTLEEDVDDRAPSKKGKKRKAQREEEQEHSNKAPRALTSKERRRAVRQQRPKKVGVRYYETHNVKNRNRNKKKTNDSEGQKHKRKKFRQKQ

SEQ ID NO: 871601 - protein, 502 aa, Homo sapiens [sequence omitted]

SEQ ID NO: 871602 - protein, 378 aa, Homo sapiens
MRRIFLIDCPGVVYPSEDSETDIVLKGVVQVEKIKSPEDHIGAVLERAKPEYISKTYKIDSWENAEDFLEKLAFRTGKLLKGGEPDLQTVGKMVLNDWQRGRIPFFVKPPNAEPLVAPQLLPSSSLEVVPEAAQNNPGEEVTETAGEGSESIIKEETEENSHCDANTEMQQILTRVRQNFGKINVVPQFSGDDLVPVEVSDLEEELESFSDEEEEEQEQQRDDAEESSSEPEEENVGNDTKAVIKALDEKIAKYQKFLDKAKAKKFSAVRISKGLSEKIFAKPEEQRKTLEEDVDDRAPSKKGKKRKAQREEEQEHSNKAPRALTSKERRRAVRQQRPKKVGVRYYETHNVKNRNRNKKKTNDSEGQKHKRKKFRQKQ

SEQ ID NO: 871603 - protein, 334 aa, Homo sapiens
FEFELGSRIQKTYKIDSWENAEDFLEKLAFRTGKLLKGGEPDLQTVGKMVLNDWQRGRIPFFVKPPNAEPLVAPQLLPSSSLEVVPEAAQNNPGEEVTETAGEGSESIIKEETEENSHCDANTEMQQILTRVRQNFGKINVVPQFSGDDLVPVEVSDLEEELESFSDEEEEEQEQQRDDAEESSSEPEEENVGNDTKAVIKALDEKIAKYQKFLDKAKAKKFSAVRISKGLSEKIFAKPEEQRKTLEEDVDDRAPSKKGKKRKAQREEEQEHSNKAPRALTSKERRRAVRQQRPKKVGVRYYETHNVKNRNRNKKKTNDSEGQKHKRKKFRQKQ

SEQ ID NO: 871604 - protein, 103 aa, Homo sapiens
MYTMEDYSAIQRNTLEEDVDDRAPSKKGKKRKAQREEEQEHSNKAPRALTSKERRRAVRQQRPKKVGVRYYETHNVKNRNRNKKKTNDSEGQKHKRKKFRQKQ

SEQ ID NO: 871605 - protein, 773 aa, Homo sapiens; identical to SEQ ID NO: 871596

SEQ ID NO: 871606 - protein, 687 aa, Homo sapiens
MKCHMRPITGCQCMRVGSMHGDLQVAVARVEPNIKWFGNTRVIKQSSLQKFQEEMDTVMKDPYKVVMKQSKLPMSLLHDRIRPHNLKVHILDTESFETTFGPKSQRKRPNLFASDMQSLIENAEMSTESYDQGKDRDLVTEDTGVRNEAQEEIYKKGQSKRIWGELYKVIDSSDVVVQVLDARDPMGTRSPHIETYLKKEKPWKHLIFVLNKCDLVPTWATKRWVAVLSQDYPTLAFHASLTNPFGKGAFIQLLRQFGKLHTDKKQISVGFIGYPNVGKSSVINTLRSKKVCNVAPIAGETKVWQYITLMRRIFLIDCPGVVYPSEDSETDIVLKGVVQVEKIKSPEDHIGAVLERAKPEYISKTYKIDSWENAEDFLEKLAFRTGKLLKGGEPDLQTVGKMVLNDWQRGRIPFFVKPPNAEPLVAPQLLPSSSLEVVPEAAQNNPGEEVTETAGEGSESIIKEETEENSHCDANTEMQQILTRVRQNFGKINVVPQFSGDDLVPVEVSDLEEELESFSDEEEEEQEQQRDDAEESSSEPEEENVGNDTKAVIKALDEKIAKYQKFLDKAKAKKFSAVRISKGLSEKIFAKPEEQRKTLEEDVDDRAPSKKGKKRKAQREEEQEHSNKAPRALTSKERRRAVRQQRPKKVGVRYYETHNVKNRNRNKKKTNDSEGQKHKRKKFRQKQ

SEQ ID NO: 871607 - protein, 560 aa, Homo sapiens
RLGRGRGVIGLVLTELVLRNEAQEEIYKKGQSKRIWGELYKVIDSSDVVVQVLDARDPMGTRSPHIETYLKKEKPWKHLIFVLNKCDLVPTWATKRWVAVLSQDYPTLAFHASLTNPFGKGAFIQLLRQFGKLHTDKKQISVGFIGYPNVGKSSVINTLRSKKVCNVAPIAGETKVWQYITLMRRIFLIDCPGVVYPSEDSETDIVLKGVVQVEKIKSPEDHIGAVLERAKPEYISKTYKIDSWENAEDFLEKLAFRTGKLLKGGEPDLQTVGKMVLNDWQRGRIPFFVKPPNAEPLVAPQLLPSSSLEVVPEAAQNNPGEEVTETAGEGSESIIKEETEENSHCDANTEMQQILTRVRQNFGKINVVPQFSGDDLVPVEVSDLEEELESFSDEEEEEQEQQRDDAEESSSEPEEENVGNDTKAVIKALDEKIAKYQKFLDKAKAKKFSAVRISKGLSEKIFAKPEEQRKTLEEDVDDRAPSKKGKKRKAQREEEQEHSNKAPRALTSKERRRAVRQQRPKKVGVRYYETHNVKNRNRNKKKTNDSEGQKHKRKKFRQKQ

SEQ ID NO: 871608 - protein, 438 aa, Homo sapiens
WLVSRGNRTRLHTDKKQISVGFIGYPNVGKSSVINTLRSKKVCNVAPIAGETKVWQYITLMRRIFLIDCPGVVYPSEDSETDIVLKGVVQVEKIKSPEDHIGAVLERAKPEYISKTYKIDSWENAEDFLEKLAFRTGKLLKGGEPDLQTVGKMVLNDWQRGRIPFFVKPPNAEPLVAPQLLPSSSLEVVPEAAQNNPGEEVTETAGEGSESIIKEETEENSHCDANTEMQQILTRVRQNFGKINVVPQFSGDDLVPVEVSDLEEELESFSDEEEEEQEQQRDDAEESSSEPEEENVGNDTKAVIKALDEKIAKYQKFLDKAKAKKFSAVRISKGLSEKIFAKPEEQRKTLEEDVDDRAPSKKGKKRKAQREEEQEHSNKAPRALTSKERRRAVRQQRPKKVGVRYYETHNVKNRNRNKKKTNDSEGQKHKRKKFRQKQ

SEQ ID NO: 871609 - protein, 455 aa, Homo sapiens
TYVVHTWSGVVQAGVFGRAWEHKSLFHHVSRTSHSGPGLVAKMVKPKYKGRSTINPSKASTNPDRVQGAGGQNMRDRATIRRLNMYRQKERRNSRGKIIKPLQYQSTVASGTVARVEPNIKWFGNTRVIKQSSLQKFQEEMDTVMKDPYKVVMKQSKLPMSLLHDRIRPHNLKVHILDTESFETTFGPKSQRKRPNLFASDMQSLIENAEMSTESYDQGKDRDLVTEDTGVRNEAQEEIYKKGQSKRIWGELYKVIDSSDVVVQVLDARDPMGTRSPHIETYLKKEKPWKHLIFVLNKCDLVPTWATKRWVAVLSQDYPTLAFHASLTNPFGKGAFIQLLRQFGKLHTDKKQISVGFIGYPNVGKSSVINTLRSKKVCNVAPIAGETKVWQYITLMRRIFLIDCPGVVYPSEDSETDIVLKGVVQVEKIKSPEDHIGAVLERAKPEYISNIQGTE

SEQ ID NO: 871610 - protein, 263 aa, Homo sapiens
FDGDSHCVLGGSAYPADVTSTPSQMQSPLQQAAGRLSQGTEDKLFHPRPHLSCKPPLCHLLEVLQLCNLHVCLRFIFIYISVEVSDLEEELESFSDEEEEEQEQQRDDAEESSSEPEEENVGNDTKAVIKALDEKIAKYQKFLDKAKAKKFSAVRISKGLSEKIFAKPEEQRKTLEEDVDDRAPSKKGKKRKAQREEEQEHSNKAPRALTSKERRRAVRQQRPKKVGVRYYETHNVKNRNRNKKKTNDSEGQKHKRKKFRQKQ

SEQ ID NO: 871611 - protein, 101 aa, Homo sapiens
AIRSARTLRPSERPYEHRTKHSVNDSFPVVFPALGKTYSEHQNLMLLQKYIAALSLFSRKGKNKWALELNPDLLVVSRPGKGSTQEPGLNENSDQGIEAFL

SEQ ID NO: 871612 - protein, 105 aa, Homo sapiens
TIMWIEGGYKSLEPAEAKRSGLFPPQLLRGPRSLEGIPGNNNNSNKTSSGNGFLCNSYCGFCMYLRLPPWVIAPLFEIQMVLSMTQIQSQLHLHSHTMTKLPDCH

SEQ ID NO: 871613 - protein, 117 aa, Homo sapiens
PRRTSAPGALLSGATSSGGPLASYQKANMDNAHPGALLWNGVQFSGTEKVLRCVLLVESTIVTGDWMSSGQADGLFRRGFIGARGLSWALQGCSLGRGERENSRKGTVKSCQKCAWV

SEQ ID NO: 871614 - protein, 316 aa, Homo sapiens
LRDEINEKQKTIDELKDLNQKLQLELEKLQADYEKLKSEEHEKSTKLQELTFLYERHEQSKQDLKGLEETVARELQTLHNLRKLFVQDVTTRVKKSAEMEPEDSGGIHSQKQKISFLENNLEQLTKVHKQLVRDNADLRCELPKLEKRLRATAERVKALEGALKEAKEGAMKDKRRYQQEVDRIKEAVRYKSSGKRGHSAQIAKPVRPGHYPASSPTNPYGTRSPECISYTNSLFQNYQNLYLQATPSSTSDMYFANSCTSSGATSSGGPLASYQKANMDNGNATDINDNRSDLPCGYEAEDQAKLFPLHQETAAS

SEQ ID NO: 871615 - protein, 316 aa, Homo sapiens; identical to SEQ ID NO: 871614

SEQ ID NO: 871616 - protein, 316 aa, Homo sapiens; identical to SEQ ID NO: 871614

SEQ ID NO: 871617 - protein, 316 aa, Homo sapiens; identical to SEQ ID NO: 871614

SEQ ID NO: 871618 - protein, 301 aa, Homo sapiens
MKSGPGIQAAIDLTAGAAGGTACVLTGQPFDTIKVKMQTFPDLYKGLTDCFLKTYAQVGLRGFYKGTGPALMAYVAENSVLFMCYGFCQQFVRKVAGMDKQAKLSDLQTAAAGSFASAFAALALCPTELVKCRLQTMYEMEMSGKIAKSHNTIWSVVKGILKKDGPLGFYHGLSSTLLQEVPGYFFFFGGYELSRSFFASGRSKDELGPVHLMLSGGVAGICLWLVVFPVDCIKSRIQVLSMYGKQAGFIGTLLSVVRNEGIVALYSGLKATMIRAIPANGALFVAYEYSRKMMMKQLEAY

SEQ ID NO: 871619 - protein, 94 aa, Homo sapiens
MLKNRELLKIFEQASHMMKLIEEHCICDCIWMEWEDLEAKTLDRRPPEQTRRERCSCGNGKRWAKPKITTEKKNHPDFMIDWMYFETPLSIQMK

SEQ ID NO: 871620 - protein, 175 aa, Homo sapiens
RHSADLLSQSGRAESPTKTAGWNKEQQGSWADRSPLHEAASQGRLLALRTLLSQGYNVNAVTLDHVTPLHEACLGDHVACARTLLEAGANVNAITIDGVTPLFNACSQGSPSCAELLLEYGAKAQLESCLPSPTHEAASKGHHECLDILISWGIDVDQEIPHLGDSSLCSLYVTA

SEQ ID NO: 871621 - protein, 213 aa, Homo sapiens
MSVLEENRPFAQQLSNVYFTILSLFCFKLFVKISLAILSHFYIVKGNRKEAARIAAEFYGVTQGQGSWADRSPLHEAASQGRLLALRTLLSQGYNVNAVTLDHVTPLHEACLGDHVACARTLLEAGANVNAITIDGVTPLFNACSQGSPSCAELLLEYGAKAQLESCLPSPTHEAASKGHHECLDILISWGIDVDQEIPHLGDSSLCSLYVTA

SEQ ID NO: 871622 - protein, 110 aa, Homo sapiens [sequence omitted]

SEQ ID NO: 871623 - protein, 364 aa, Homo sapiens
IISRQAAEGGRVEGPPLRPPATSRRWAGPTLWRMEVTGDAGVPESGEIRTLKPCLLRRNYSREQHGVAASCLEDLRSKACDILAIDKSLTPVTLVLAEDGTIVDDDDYFLCLPSNTKFVALASNEKWAYNNSDGGTAWISQESFDVDETDSGAGLKWKNVARQLKEDLSSIILLSEEDLQMLVDAPCSDLAQELRQSCATVQRLQHTLQQVLDQREEVRQSKQLLQLYLQALEKEGSLLSKQEESKAAFGEEVDAVDTGISRETSSDVALASHILTALREKQAPELSLSSQDLELVTKEDPKALAVALNWDIKKTETVQEACERELALRLQQTQSLHSLRSISASKASPPGDLQNPKRARQDPT

SEQ ID NO: 871624 - protein, 301 aa, Homo sapiens
IISRQAAEGGRVEGPPLRPPATSRRWAGPTLWRMEVTGDAGVPESGEIRTLKPCLLRRNYSREQHGVAASCLEDLRSKACDILAIDKSLTPVTLVLAEDGTIVDDDDYFLCLPSNTKFVALASNEKWAYNNSDGGTAWISQESFDVDETDSGAGLKWKNVARQLKEDLSSIILLSEEDLQMLVDAPCSDLAQELRQSCATVQRLQHTLQQVLDQREEVRQSKQLLQLYLQALEKEGSLLSKQEESKAAFGEEVDAVDTGISRETSSDVALASHILTALREKQAPELSLSSQDLEVGGNQGH

SEQ ID NO: 871625 - protein, 184 aa, Homo sapiens [sequence omitted]

SEQ ID NO: 871626 - protein, 486 aa, Homo sapiens
RASPWRCVPRGTWCLPPLPAARFPAPSWRRLPAFVRPSEVSLQLAPPVAPFFRVDHTRVIVCVHRYNSLQGPEPGHLTTLNPGLKRILQRFVFSRTFLFAGHDFPPPLSSYVSLQNNYFRIRHVTLHRVRPPRSTDRGNDRRLPPPWSRRPTLWRMEVTGDAGVPESGEIRTLKPCLLRRNYSREQHGVAASCLEDLRSKACDILAIDKSLTPVTLVLAEDGTIVDDDDYFLCLPSNTKFVALASNEKWAYNNSDGGTAWISQESFDVDETDSGAGLKWKNVARQLKEDLSSIILLSEEDLQMLVDAPCSDLAQELRQSCATVQRLQHTLQQVLDQREEVRQSKQLLQLYLQALEKEGSLLSKQEESKAAFGEEVDAVDTGISRETSSDVALASHILTALREKQAPELSLSSQDLELVTKEDPKALAVALNWDIKKTETVQEACERELALRLQQTQSLHSLRSISASKASPPGDLQNPKRARQDPT

SEQ ID NO: 871627 - protein, 301 aa, Homo sapiens; identical to SEQ ID NO: 871624

SEQ ID NO: 871628 - protein, 263 aa, Homo sapiens
YGMVRPGGESAEANTKFVALASNEKWAYNNSDGGTAWISQESFDVDETDSGAGLKWKNVARQLKEDLSSIILLSEEDLQMLVDAPCSDLAQELRQSCATVQRLQHTLQQVLDQREEVRQSKQLLQLYLQALEKEGSLLSKQEESKAAFGEEVDAVDTGISRETSSDVALASHILTALREKQAPELSLSSQDLELVTKEDPKALAVALNWDIKKTETVQEACERELALRLQQTQSLHSLRSISASKASPPGDLQNPKRARQDPT

SEQ ID NO: 871629 - protein, 69 aa, Homo sapiens
MLVDAPCSDLAQELRQSCATVQRLQHTLQQVLDQREEVRQSKQLLQLYLQALEKEGSLLSKQEGRTLCR

SEQ ID NO: 871630 - protein, 217 aa, Homo sapiens
MCPLWRLLIFLGLLALPLAPHKQPWPGLAQAHRDNKSTLARIIAQGLIKHNAESRIQNIHFGDRLNASAQVAPGLVGWLISGRKHQQQQESRSFDNNIVKMCAHMSIVVEFWLEKDEFGRRDLVIGKCDAEPSSVHVAILTEAIPPKMNQFLYNLKENLQKVLPHMVESQVCPLIGEILGQLDVKLLKSLIEQEAAHEPTHHETSQPSACQAGESPS

SEQ ID NO: 871631 - protein, 253 aa, Homo sapiens
MCPLWRLLIFLGLLALPLAPHKQPWPGLAQAHRDNKSTLARIIAQGLIKHNAESRIQNIHFGDRLNASAQVAPGLVGWLISGRKHQQQQESSINITNIQLDCGGIQISFHKEWFSANISLEFDLELRPSFDNNIVKMCAHMSIVVEFWLEKDEFGRRDLVIGKCDAEPSSVHVAILTEAIPPKMNQFLYNLKENLQKVLPHMVESQVCPLIGEILGQLDVKLLKSLIEQEAAHEPTHHETSQPSACQAGESPS

SEQ ID NO: 871632 - protein, 209 aa, Homo sapiens
MCPLWRLLIFLGLLALPLAPHKQPWPGLAQAHRDNKSTLARIIAQGLIKHNAESRIQNIHFGDRLNASAQVAPGLVGWLISGRKHQQQQESSINITNIQLDCGGIQISFHKEWFSANISLEFDLELRPSFDNNIVKMCAHMSIVVEFWLEKDEFGRRDLVIGKCDAEPSSVHVAILTEAIPPKMNQFLYNLKENLQKVLPHMVESQPLA

SEQ ID NO: 871633 - protein, 182 aa, Homo sapiens
MPHFEQLLPATPSAVIAQGLIKHNAESRIQNIHFGDRLNASAQVAPGLVGWLISGRKHQQQQESSINITNIQLDCGGIQISFHKEWFSANISLEFDLELRPSFDNNIVKMCAHMSIVVEFWLEKDEFGRRDLVIGKCDAEPSSVHVAILTEAIPPKMNQFLYNLKENLQKVLPHMVESQPLA

SEQ ID NO: 871634 - protein, 112 aa, Homo sapiens
KVAPGQQGQIFLMHLDLLQTFFVRCTTHFKTALQGSPMYSGGPRHTQAGDPSSLRSRWPQPDTSYPAESHNPSQKSPNTSADQRWGSQARSFTHNDRLLGDIAGPLFLSSPC

SEQ ID NO: 871635 - protein, 112 aa, Homo sapiens; identical to SEQ ID NO: 871634

SEQ ID NO: 871636 - protein, 112 aa, Homo sapiens; identical to SEQ ID NO: 871634

SEQ ID NO: 871637 - protein, 292 aa, Homo sapiens
GGSGRGQISFWGKPLTLAPCHRPGSVPPSFHFPPSLPPVPQPLAERRVLPAGIAGNTKRWFLFFKTSVSWEGVWRGRMSNSVPLLCFWSLCYCFAAGSPVPFGPEGRLEDKLHKPKATQTEVKPSVRFNLRTSKDPEHEGCYLSVGHSQPLEDCSFNMTAKTFFIIHGWTMSGIFENWLHKLVSALHTREKDANVVVVDWLPLAHQLYTDAVNNTRVVGHSIARMLDWLQEKDDFSLGNVHLIGYSLGAHVAGYAGNFVKGTVGRITGLDPAGPMFEGADIHKRLSPDDADF

SEQ ID NO: 871638 - protein, 135 aa, Homo sapiens
MTAKTFFIIHGWTMSGIFENWLHKLVSALHTREKDANVVVVDWLPLAHQLYTDAVNNTRVVGHSIARMLDWLQEKDDFSLGNVHLIGYSLGAHVAGYAGNFVKGTVGRITGLDPAGPMFEGADIHKRLSPDDADF

SEQ ID NO: 871639 - protein, 128 aa, Homo sapiens
AWHRVSAQQMLATGGFLSQRDVHKCFCVGVWASNYVALNQRTYQCINSLWMSDLVGGSVQRQGQEWRFVCERPLVSIRACVCLCSHVNLHIVCAKGVSMSFIHVRISSLTFAVSVPSASPGIHTDAIL

SEQ ID NO: 871640 - protein, 190 aa, Homo sapiens
GEEAPRRRRRRAEERRSGRPGHRAAAERAAARRSFPTAARRTPAAAMSGSSGTPYLGSKISLISKAQIRYEGILYTIDTDNSTVALAKVRSFGTEDRPTDRPAPPREEIYEYIIFRGSDIKDITVCEPPKAQHTLPQDPAIVQSSLGSASASPFQPHVPYSPFRGMAPYGPLAASSLLSQQYAASLGLGE

SEQ ID NO: 871641 - protein, 230 aa, Homo sapiens
MVEQAVQTGSADNLNAKKLLPGKGTTGTQLNGRQAQPSSKTASDVVQPAAVQAQGQVNDENRRPQRRRSGNRRTRNRSRGQNRPTNVKENTIKFEGDFDFESANAQFNREELDKEFKKKLNFKDDKAEKGEEKDLAVVTQSAEAPAEEDLLGPNCYYDKSKSFFDNISSELKTSSRRTTWAEERKLNTETFGVSGRFLRGRSSRGGFRGGRGNGTTRRNPTSHRAGTGRV

SEQ ID NO: 871642 - protein, 405 aa, Homo sapiens
GEEAPRRRRRRAEERRSGRPGHRAAAERAAARRSFPTAARRTPAAAMSGSSGTPYLGSKISLISKAQIRYEGILYTIDTDNSTVALAKVRSFGTEDRPTDRPAPPREEIYEYIIFRGSDIKDITVCEPPKAQHTLPQDPAIVQSSLGSASASPFQPHVPYSPFRGMAPYGPLAASSLLSQQYAASLGLGAGFPSIPVGKSPMVEQAVQTGSADNLNAKKLLPGKGTTGTQLNGRQAQPSSKTASGNRRTRNRSRGQNRPTNVKENTIKFEGDFDFESANAQFNREELDKEFKKKLNFKDDKAEKGEEKDLAVVTQSAEAPAEEDLLGPNCYYDKSKSFFDNISSELKTSSRRTTWAEERKLNTETFGVSGRFLRGRSSRGGFRGGRGNGTTRRNPTSHRAGTGRV

SEQ ID NO: 871643 - protein, 305 aa, Homo sapiens
MAPYGPLAASSLLSQQYAASLGLEKLVSPPASAAASSPSSSPSPQPVSELDLSSEPQQLTAKGAGFPSIPVGKSPMVEQAVQTGSADNLNAKKLLPGKGTTGTQLNGRQAQPSSKTASDVVQPAAVQAQGQVNDENRRPQRRRSGNRRTRNRSRGQNRPTNVKENTIKFEGDFDFESANAQFNREELDKEFKKKLNFKDDKAEKGEEKDLAVVTQSAEAPAEEDLLGPNCYYDKSKSFFDNISSELKTSSRRTTWAEERKLNTETFGVSGRFLRGRSSRGGFRGGRGNGTTRRNPTSHRAGTGRV

SEQ ID NO: 871644 - protein, 163 aa, Homo sapiens
MAPYGPLAASSLLSQQYAASLGLEKLVSPPASAAASSPSSSPSPQPVSELDLSSEPQQLTAKGAGFPSIPVGKSPMVEQAVQTGSADNLNAKKLLPGKGTTGTQLNGRQAQPSSKTASDVVQPAAVQAQGQVNDENRRPQRRRSGGDKDPRTERMTVGTRRQG

SEQ ID NO: 871645 - protein, 133 aa, Homo sapiens
AIIFQKTKNKTKQKKELHGQVKLELKCCGKGSSHHTGNLHPKGSSSISRVQADGTVLVSQLNKRPDEGVRGDGMAFAVLTRCLVVQSSLGSASASPFQPHVPYSPFRGMAPYGPLAASSLLSQQYAASLGLGE

SEQ ID NO: 871646 - protein, 305 aa, Homo sapiens; identical to SEQ ID NO: 871643

SEQ ID NO: 871647 - protein, 266 aa, Homo sapiens
MAPYGPLAASSLLSQQYAASLGLGAGFPSIPVGKSPMVEQAVQTGSADNLNAKKLLPGKGTTGTQLNGRQAQPSSKTASDVVQPAAVQAQGQVNDENRRPQRRRSGNRRTRNRSRGQNRPTNVKENTIKFEGDFDFESANAQFNREELDKEFKKKLNFKDDKAEKGEEKDLAVVTQSAEAPAEEDLLGPNCYYDKSKSFFDNISSELKTSSRRTTWAEERKLNTETFGVSGRFLRGRSSRGGFRGGRGNGTTRRNPTSHRAGTGRV

SEQ ID NO: 871648 - protein, 431 aa, Homo sapiens
GEEAPRRRRRRAEERRSGRPGHRAAAERAAARRSFPTAARRTPAAAMSGSSGTPYLGSKISLISKAQIRYEGILYTIDTDNSTVALAKVRSFGTEDRPTDRPAPPREEIYEYIIFRGSDIKDITVCEPPKAQHTLPQDPAIVQSSLGSASASPFQPHVPYSPFRGMAPYGPLAASSLLSQQYAASLGLGAGFPSIPVGKSPMVEQAVQTGSADNLNAKKLLPGKGTTGTQLNGRQAQPSSKTASDVVQPAAVQAQGQVNDENRRPQRRRSGNRRTRNRSRGQNRPTNVKENTIKFEGDFDFESANAQFNREELDKEFKKKLNFKDDKAEKGEEKDLAVVTQSAEAPAEEDLLGPNCYYDKSKSFFDNISSELKTSSRRTTWAEERKLNTETFGVSGRFLRGRSSRGGFRGGRGNGTTRRNPTSHRAGTGRV

SEQ ID NO: 871649 - protein, 374 aa, Homo sapiens
AIIFQKTKNKTKQKKELHGQVKLELKCCGKGSSHHTGNLHPKGSSSISRVQADGTVLVSQLNKRPDEGVRGDGMAFAVLTRCLVVQSSLGSASASPFQPHVPYSPFRGMAPYGPLAASSLLSQQYAASLGLGAGFPSIPVGKSPMVEQAVQTGSADNLNAKKLLPGKGTTGTQLNGRQAQPSSKTASDVVQPAAVQAQGQVNDENRRPQRRRSGNRRTRNRSRGQNRPTNVKENTIKFEGDFDFESANAQFNREELDKEFKKKLNFKDDKAEKGEEKDLAVVTQSAEAPAEEDLLGPNCYYDKSKSFFDNISSELKTSSRRTTWAEERKLNTETFGVSGRFLRGRSSRGGFRGGRGNGTTRRNPTSHRAGTGRV

SEQ ID NO: 871650 - protein, 575 aa, Homo sapiens
GEKAAEPQLSEHRVGSRDPSRAGSWDRNLGGPGPTQLTCAGHQHPRNPEARALKVTPLGRKAMAPARTMARARLAPAGIPAVALWLLCTLGLQGTQAGPPPAPPGLPAGADCLNSFTAGVPGFVLDTNASVSNGATFLESPTVRRGWDCVRACCTTQNCNLALVELQPDRGEDAIAACFLINCLYEQNFVCKFAPREGFINYLTREVYRSYRQLRTQGFGGSGIPKAWAGIDLKVQPQEPLVLKDVENTDWRLLRGDTDVRVERKDPNQVELWGLKEGTYLFQLTVTSSDHPEDTANVTVTVLSTKQTEDYCLASNKVGRCRGSFPRWYYDPTEQICKSFVYGGCLGNKNNYLREEECILACRGVQGPSMERRHPVCSGTCQPTQFRCSNGCCIDSFLECDDTPNCPDASDEAACEKYTSGFDELQRIHFPSDKGHCVDLPDTGLCKESIPRWYYNPFSEHCARFTYGGCYGNKNNFEEEQQCLESCRGISKKDVFGLRREIPIPSTGSVEMAVAVFLVICIVVVVAILGYCFFKNQRKDFHGHHHHPPPTPASSTVSTTEDTEHLVYNHTTRPL

SEQ ID NO: 871651 - protein, 556 aa, Homo sapiens
RRRRSGLEHVRPFVLRSCVCPGHQHPRNPEARALKVTPLGRKAMAPARTMARARLAPAGIPAVALWLLCTLGLQGTQAGPPPAPPGLPAGADCLNSFTAGVPGFVLDTNASVSNGATFLESPTVRRGWDCVRACCTTQNCNLALVELQPDRGEDAIAACFLINCLYEQNFVCKFAPREGFINYLTREVYRSYRQLRTQGFGGSGIPKAWAGIDLKVQPQEPLVLKDVENTDWRLLRGDTDVRVERKDPNQVELWGLKEGTYLFQLTVTSSDHPEDTANVTVTVLSTKQTEDYCLASNKVGRCRGSFPRWYYDPTEQICKSFVYGGCLGNKNNYLREEECILACRGVQGPSMERRHPVCSGTCQPTQFRCSNGCCIDSFLECDDTPNCPDASDEAACEKYTSGFDELQRIHFPSDKGHCVDLPDTGLCKESIPRWYYNPFSEHCARFTYGGCYGNKNNFEEEQQCLESCRGISKKDVFGLRREIPIPSTGSVEMAVAVFLVICIVVVVAILGYCFFKNQRKDFHGHHHHPPPTPASSTVSTTEDTEHLVYNHTTRPL

SEQ ID NO: 871652 - protein, 629 aa, Homo sapiens
GEKAAEPQLSEHRVGSRDPSRAGSWDRNLGGPGPTQLTCAGHQHPRNPEARALKVTPLGRKAMAPARTMARARLAPAGIPAVALWLLCTLGLQGTQAGPPPAPPGLPAGADCLNSFTAGVPGFVLDTNASVSNGATFLESPTVRRGWDCVRACCTTQNCNLALVELQPDRGEDAIAACFLINCLYEQNFVCKFAPREGFINYLTREVYRSYRQLRTQGFGGSGIPKAWAGIDLKVQPQEPLVLKDVENTDWRLLRGDTDVRVERKDPNQVELWGLKEGTYLFQLTVTSSDHPEDTANVTVTVLSTKQTEDYCLASNKVGRCRGSFPRWYYDPTEQICKSFVYGGCLGNKNNYLREEECILACRGVQGGPLRGSSGAQATFPQGPSMERRHPVCSGTCQPTQFRCSNGCCIDSFLECDDTPNCPDASDEAACEKCEAWGIEGVGQQTGGPDSLALNPWETLVGSETLTFLSADTSGFDELQRIHFPSDKGHCVDLPDTGLCKESIPRWYYNPFSEHCARFTYGGCYGNKNNFEEEQQCLESCRGISKKDVFGLRREIPIPSTGSVEMAVAVFLVICIVVVVAILGYCFFKNQRKDFHGHHHHPPPTPASSTVSTTEDTEHLVYNHTTRPL

SEQ ID NO: 871653 - protein, 549 aa, Homo sapiens
GEKAAEPQLSEHRVGSRDPSRAGSWDRNLGGPGPTQLTCAGHQHPRNPEARALKVTPLGRKAMAPARTMARARLAPAGIPAVALWLLCTLGLQGTQAGPPPAPPGLPAGADCLNSFTAGVPGFVLDTNASVSNGATFLESPTVRRGWDCVRACCTTQNCNLALVELQPDRGEDAIAACFLINCLYEQNFVCKFAPREGFINYLTREVYRSYRQLRTQGFGGSGIPKAWAGIDLKVQPQEPLVLKDVENTDWRLLRGDTDVRVERKDPNQVELWGLKEGTYLFQLTVTSSDHPEDTANVTVTVLSTKQTEDYCLASNKVGRCRGSFPRWYYDPTEQICKSFVYGGCLGNKNNYLREEECILACRGVQGGPLRGSSGAQATFPQGPSMERRHPDTSGFDELQRIHFPSDKGHCVDLPDTGLCKESIPRWYYNPFSEHCARFTYGGCYGNKNNFEEEQQCLESCRGISKKDVFGLRREIPIPSTGSVEMAVAVFLVICIVVVVAILGYCFFKNQRKDFHGHHHHPPPTPASSTVSTTEDTEHLVYNHTTRPL

SEQ ID NO: 871654 - protein, 533 aa, Homo sapiens
GEKAAEPQLSEHRVGSRDPSRAGSWDRNLGGPGPTQLTCAGHQHPRNPEARALKVTPLGRKAMAPARTMARARLAPAGIPAVALWLLCTLGLQGTQAGPPPAPPGLPAGADCLNSFTAGVPGFVLDTNASVSNGATFLESPTVRRGWDCVRACCTTQNCNLALVELQPDRGEDAIAACFLINCLYEQNFVCKFAPREGFINYLTREVYRSYRQLRTQGFGGSGIPKAWAGIDLKVQPQEPLVLKDVENTDWRLLRGDTDVRVERKDPNQVELWGLKEGTYLFQLTVTSSDHPEDTANVTVTVLSTKQTEDYCLASNKVGRCRGSFPRWYYDPTEQICKSFVYGGCLGNKNNYLREEECILACRGVQGPSMERRHPDTSGFDELQRIHFPSDKGHCVDLPDTGLCKESIPRWYYNPFSEHCARFTYGGCYGNKNNFEEEQQCLESCRGISKKDVFGLRREIPIPSTGSVEMAVAVFLVICIVVVVAILGYCFFKNQRKDFHGHHHHPPPTPASSTVSTTEDTEHLVYNHTTRPL

SEQ ID NO: 871655 - protein, 318 aa, Homo sapiens
MHACVQRKDPNQVELWGLKEGTYLFQLTVTSSDHPEDTANVTVTVLSTKQTEDYCLASNKVGRCRGSFPRWYYDPTEQICKSFVYGGCLGNKNNYLREEECILACRGVQGPSMERRHPVCSGTCQPTQFRCSNGCCIDSFLECDDTPNCPDASDEAACEKYTSGFDELQRIHFPSDKGHCVDLPDTGLCKESIPRWYYNPFSEHCARFTYGGCYGNKNNFEEEQQCLESCRGISKKDVFGLRREIPIPSTGSVEMAVAVFLVICIVVVVAILGYCFFKNQRKDFHGHHHHPPPTPASSTVSTTEDTEHLVYNHTTRPL

SEQ ID NO: 871656 - protein, 344 aa, Homo sapiens
TLSLWGDALCGVTLSLWGDALSVGGDTDVRVERKDPNQVELWGLKEGTYLFQLTVTSSDHPEDTANVTVTVLSTKQTEDYCLASNKVGRCRGSFPRWYYDPTEQICKSFVYGGCLGNKNNYLREEECILACRGVQGPSMERRHPVCSGTCQPTQFRCSNGCCIDSFLECDDTPNCPDASDEAACEKYTSGFDELQRIHFPSDKGHCVDLPDTGLCKESIPRWYYNPFSEHCARFTYGGCYGNKNNFEEEQQCLESCRGISKKDVFGLRREIPIPSTGSVEMAVAVFLVICIVVVVAILGYCFFKNQRKDFHGHHHHPPPTPASSTVSTTEDTEHLVYNHTTRPL

SEQ ID NO: 871657 - protein, 207 aa, Homo sapiens
VDGGYTGIGYLGVLVNGDPRPSAAGVTYFSPSKSKNDSKAGGAFMLPPPLRPDPKCPPPPPPRRVERHCVDLPDTGLCKESIPRWYYNPFSEHCARFTYGGCYGNKNNFEEEQQCLESCRGISKKDVFGLRREIPIPSTGSVEMAVAVFLVICIVVVVAILGYCFFKNQRKDFHGHHHHPPPTPASSTVSTTEDTEHLVYNHTTRPL

SEQ ID NO: 871658 - protein, 354 aa, Homo sapiens
GEKAAEPQLSEHRVGSRDPSRAGSWDRNLGGPGPTQLTCAGHQHPRNPEARALKVTPLGRKAMAPARTMARARLAPAGIPAVALWLLCTLGLQGTQAGPPPAPPGLPAGADCLNSFTAGVPGFVLDTNASVSNGATFLESPTVRRGWDCVRACCTTQNCNLALVELQPDRGEDAIAACFLINCLYEQNFVCKFAPREGFINYLTREVYRSYRQLRTQGFGGSGIPKAWAGIDLKVQPQEPLVLKDVENTDWRLLRGDTDVRVERKDPNQVELWGLKEGTYLFQLTVTSSDHPEDTANVTVTVLSTKQTEDYCLASNKVGRCRGSFPRWYYDPTRASPTERASPHRESVTPQRER

SEQ ID NO: 871659 - protein, 336 aa, Homo sapiens
GEKAAEPQLSEHRVGSRDPSRAGSWDRNLGGPGPTQLTCAGHQHPRNPEARALKVTPLGRKAMAPARTMARARLAPAGIPAVALWLLCTLGLQGTQAGPPPAPPGLPAGADCLNSFTAGVPGFVLDTNASVSNGATFLESPTVRRGWDCVRACCTTQNCNLALVELQPDRGEDAIAACFLINCLYEQNFVCKFAPREGFINYLTREVYRSYRQLRTQGFGGSGIPKAWAGIDLKVQPQEPLVLKDVENTDWRLLRGDTDVRVERKDPNQVELWGLKEGTYLFQLTVTSSDHPEDTANVTVTVLSTKQTEGEGGVRSSTWSPRCADWPHGPLISSPP

SEQ ID NO: 871660 - protein, 47 aa, Homo sapiens
LPSTRLCSGTCQPTQFRCSNGCCIDSFLECDDTPNCPDASDEAACEK

SEQ ID NO: 871661 - protein, 550 aa, Homo sapiens
ADQVCLLLCPLPSSQGHQHPRNPEARALKVTPLGRKAMAPARTMARARLAPAGIPAVALWLLCTLGLQGTQAGPPPAPPGLPAGADCLNSFTAGVPGFVLDTNASVSNGATFLESPTVRRGWDCVRACCTTQNCNLALVELQPDRGEDAIAACFLINCLYEQNFVCKFAPREGFINYLTREVYRSYRQLRTQGFGGSGIPKAWAGIDLKVQPQEPLVLKDVENTDWRLLRGDTDVRVERKDPNQVELWGLKEGTYLFQLTVTSSDHPEDTANVTVTVLSTKQTEDYCLASNKVGRCRGSFPRWYYDPTEQICKSFVYGGCLGNKNNYLREEECILACRGVQGPSMERRHPVCSGTCQPTQFRCSNGCCIDSFLECDDTPNCPDASDEAACEKYTSGFDELQRIHFPSDKGHCVDLPDTGLCKESIPRWYYNPFSEHCARFTYGGCYGNKNNFEEEQQCLESCRGISKKDVFGLRREIPIPSTGSVEMAVAVFLVICIVVVVAILGYCFFKNQRKDFHGHHHHPPPTPASSTVSTTEDTEHLVYNHTTRPL

SEQ ID NO: 871662 - protein, 591 aa, Homo sapiens
GEKAAEPQLSEHRVGSRDPSRAGSWDRNLGGPGPTQLTCAGHQHPRNPEARALKVTPLGRKAMAPARTMARARLAPAGIPAVALWLLCTLGLQGTQAGPPPAPPGLPAGADCLNSFTAGVPGFVLDTNASVSNGATFLESPTVRRGWDCVRACCTTQNCNLALVELQPDRGEDAIAACFLINCLYEQNFVCKFAPREGFINYLTREVYRSYRQLRTQGFGGSGIPKAWAGIDLKVQPQEPLVLKDVENTDWRLLRGDTDVRVERKDPNQVELWGLKEGTYLFQLTVTSSDHPEDTANVTVTVLSTKQTEDYCLASNKVGRCRGSFPRWYYDPTEQICKSFVYGGCLGNKNNYLREEECILACRGVQGGPLRGSSGAQATFPQGPSMERRHPVCSGTCQPTQFRCSNGCCIDSFLECDDTPNCPDASDEAACEKYTSGFDELQRIHFPSDKGHCVDLPDTGLCKESIPRWYYNPFSEHCARFTYGGCYGNKNNFEEEQQCLESCRGISKKDVFGLRREIPIPSTGSVEMAVAVFLVICIVVVVAILGYCFFKNQRKDFHGHHHHPPPTPASSTVSTTEDTEHLVYNHTTRPL

SEQ ID NO: 871663 - protein, 566 aa, Homo sapiens
GEKAAEPQLSEHRVGSRDPSRAGSWDRNLGGPGPTQLTCAGHQHPRNPEARALKVTPLGRKAMAPARTMARARLAPAGIPAVALWLLCTLGLQGTQAGPPPAPPGLPAGADCLNSFTAGVPGFVLDTNASVSNGATFLESPTVRRGWDCVRACCTTQNCNLALVELQPDRGEDAIAACFLINCLYEQNFVCKFAPREGFINYLTREVYRSYRQLRTQGFGGSGIPKAWAGIDLKVQPQEPLVLKDVENTDWRLLRGDTDVRVERKDPNQVELWGLKEGTYLFQLTVTSSDHPEDTANVTVTVLSTKQTEDYCLASNKVGRCRGSFPRWYYDPTEQICKSFVYGGCLGNKNNYLREEECILACRGVQVCSGTCQPTQFRCSNGCCIDSFLECDDTPNCPDASDEAACEKYTSGFDELQRIHFPSDKGHCVDLPDTGLCKESIPRWYYNPFSEHCARFTYGGCYGNKNNFEEEQQCLESCRGISKKDVFGLRREIPIPSTGSVEMAVAVFLVICIVVVVAILGYCFFKNQRKDFHGHHHHPPPTPASSTVSTTEDTEHLVYNHTTRPL

SEQ ID NO: 871664 - protein, 397 aa, Homo sapiens
GEKAAEPQLSEHRVGSRDPSRAGSWDRNLGGPGPTQLTCAGHQHPRNPEARALKVTPLGRKAMAPARTMARARLAPAGIPAVALWLLCTLGLQGTQAGPPPAPPGLPAGADCLNSFTAGVPGFVLDTNASVSNGATFLESPTVRRGWDCVRACCTTQNCNLALVELQPDRGEDAIAACFLINCLYEQNFVCKFAPREGFINYLTREVYRSYRQLRTQGFGGSGIPKAWAGIDLKVQPQEPLVLKDVENTDWRLLRGDTDVRVERKDPNQVELWGLKEGTYLFQLTVTSSDHPEDTANVTVTVLSTKQTEDYCLASNKVGRCRGSFPRWYYDPTEQICKSFVYGGCLGNKNNYLREEECILACRGVQGGPLRGSVLWHLSAHPVPLQQWLLHRQFPGV

SEQ ID NO: 871665 - protein, 575 aa, Homo sapiens; identical to SEQ ID NO: 871650

SEQ ID NO: 871666 - protein, 209 aa, Homo sapiens
MAQNLKDLAGRLPAGPRGMGTALKLLLGAGAVAYGVRESVFTVEGGHRAIFFNRIGGVQQDTILAEGLWHCVDLPDTGLCKESIPRWYYNPFSEHCARFTYGGCYGNKNNFEEEQQCLESCRGISKKDVFGLRREIPIPSTGSVEMAVAVFLVICIVVVVAILGYCFFKNQRKDFHGHHHHPPPTPASSTVSTTEDTEHLVYNHTTRPL

SEQ ID NO: 871667 - protein, 243 aa, Homo sapiens
WVLAERGFLAEEQEFNQKGQIPCHHLTLQTPPSSHLSSPLLQQGQNQQQGLQSLGQQSGYSPTSRYTGKLANTLGNDVFNVFSIQLTDNLVEPVVVCKEPSLGHCVDLPDTGLCKESIPRWYYNPFSEHCARFTYGGCYGNKNNFEEEQQCLESCRGISKKDVFGLRREIPIPSTGSVEMAVAVFLVICIVVVVAILGYCFFKNQRKDFHGHHHHPPPTPASSTVSTTEDTEHLVYNHTTRPL

SEQ ID NO: 871668 - protein, 350 aa, Homo sapiens
GEKAAEPQLSEHRVGSRDPSRAGSWDRNLGGPGPTQLTCAGHQHPRNPEARALKVTPLGRKAMAPARTMARARLAPAGIPAVALWLLCTLGLQGTQAGPPPAPPGLPAGADCLNSFTAGVPGFVLDTNASVSNGATFLESPTVRRGWDCVRACCTTQNCNLALVELQPDRGEDAIAACFLINCLYEQNFVCKFAPREGFINYLTREVYRSYRQLRTQGFGGSGIPKAWAGIDLKVQPQEPLVLKDVENTDWRLLRGDTDVRVERKDPNQVELWGLKEGTYLFQLTVTSSDHPEDTANVTVTVLSTKQTEDYCLAACSRDRKITTTICLPPRSSEAAGSGASAVLWRVSSG

SEQ ID NO: 871669 - protein, 68 aa, Homo sapiens
YLPYQHTGVHHTPQPTPTAIEDGALAGTEPKIPHPHQHLTLDLMLQRGKGTLLYPEGPLLLGEHREGT

SEQ ID NO: 871670 - protein, 130 aa, Homo sapiens
GLRLWGAQSPPGGQGRWRPLKLLGVFGVRAAPVPAGRLGASHTQTPLRASPAGRLPGLAVAGRGRVGGGCGRPAGSARGSPRQTANGGGARGARGDAALVGGAARPEPRASGHVIRYSQVDCRGEEPSYT

SEQ ID NO: 871671 - protein, 130 aa, Homo sapiens
MAAVLGALGATRRLLAALRGQSLGLAAMSSGTHRLTAEERNQAILDLKAAGWSELSERDAIYKEFSFHNFNQAFGFMSRVALQAEKMNHHPEWFNVYNKVQITLTSHDCGELTKKDVKLAKFIEKAAASV

SEQ ID NO: 871672 - protein, 103 aa, Homo sapiens
MSSGTHRLTAEERNQAILDLKAAGWSELSERDAIYKEFSFHNFNQAFGFMSRVALQAEKMNHHPEWFNVYNKVQITLTSHDCGELTKKDVKLAKFIEKAAASV

SEQ ID NO: 871673 - protein, 130 aa, Homo sapiens; identical to SEQ ID NO: 871671

SEQ ID NO: 871674 - protein, 130 aa, Homo sapiens; identical to SEQ ID NO: 871670

SEQ ID NO: 871675 - protein, 965 aa, Homo sapiens
MGSLLSCRLECSGVITAHCNLQRLDSSDPPALASLVAGTTGACHHTHLIFFIFIFCRDSLTILLGLVLNSWAQVILLPQPPMGNLYFLFFFFLEMEFRSCRPGWSAMARSWLTAVSTSWVQVILHPRPTEVAEITGNCHHARLICVFFFSKRWGFAMLAGLVLTPDLKRPACLGLPKCWDYRHEPLCLVADFYFLFFFYRWGSHYAAQADLKLLASSDPPTLASQVAGIISVSHYPYLTITFFASLVFFCSKQTHHNLFLSFQVFSSAVPWMCSLSLRAQRTCFSPLYMTLNFFYHIIKGLVSISWGHFLKGGPLCGLFLVTSSFNPEPHDCWVPIAFLLNGGTQSPWEERIHDRPTWELPTSGAYTLVMQQNAQEGPHKARIPFVAPSLLPLRIQTLRKIPKQRFSVGCKKQGIKVENLENVINTVTSATRESFLVHQLTLHRWDFAQHSRNLSKYYLSPLPVKKCASRSVRAGCQCSLSLFPQILSAYQNKLHVLDNLVSMIGGGWHAITFMCPVDLNDQFDQFDCYDNQKAFLFFYNRPHLKSDNENYISLYIRKVYTFWLGTVAHACNPCTLRGWGGSLEVRSLRPPGQRGETPSLLKIHRLARSDGVHLLSQLLRMLRQENPFNLGGEGCSEPGLHHCTPAWVTERDSVSEKKKKEEEKEKYIFYIFLTYENVFISFVTYNGKQYTYSEKNCKAQINGNKQEKESPITSPSKTDTVKILAYFLLIFSTADFCTGEIILNREFCIFGFCVLLHTKTKDIKMDINIFLNPEKCIDIFECLYFTRWTYHNLLTQSFLLDVEVVFKLLSAGKNTEIDMFSGSYFISGYIILGQRMNGSQAFQKSWSVFMPLAVFESAQSYYTVASIRSYHIEVIANFINKNNGFTLHLPDWYCCRTYLEKFVCLWCLFHEYDCVPIFSWGIQFFITDVSMCMGDYLMIISLLSRLAIFSLAVTVFPVPTRLLDM

SEQ ID NO: 871676 - protein, 80 aa, Homo sapiens
GDLEDPQALRGQSLGLAAMSSGTHRLTAEERNQAILDLKAAGWSELSERDAIYKEFSFHNFNQHLALCPELPNKRLPGAC

SEQ ID NO: 871677 - protein, 130 aa, Homo sapiens; identical to SEQ ID NO: 871671

SEQ ID NO: 871678 - protein, 130 aa, Homo sapiens; identical to SEQ ID NO: 871671

SEQ ID NO: 871679 - protein, 172 aa, Homo sapiens
RTGSSQCRLRQLESKPLKMADDLDFETGDAGASATFPMQCSALRKNGFVVLKGWPCKIVEMSASKTGKHGHAKVHLVGIDIFTGKKYEDICPSTHNMDVPNIKRNDFQLIGIQDGYLSLLQDSGEVPEDLRLPEGDLGKEIEQKYDCGEEILITVLSAMTEEAAVAIKAMAK

SEQ ID NO: 871680 - protein, 493 aa, Homo sapiens
MRGFGPGLTARRLLPLRLPPRPPGPRLASGQAAGALERAMDELLRRAVPPTPAYELREKTPAPAEGQCADFVSFYGGLAETAQRAELLGRLARGFGVDHGQVAEQSAGVLHLRQQQREAAVLLQAEDRLRYALVPRYRGLFHHISKLDGGVRFLVQLRADLLEAQALKLVEGPDVREMNGVLKGMLSEWFSSGFLNLERVTWHSPCEVLQKISEAEAVHPVKNWMDMKRRVGPYRRCYFFSHCSTPGEPLVVLHVALTGDISSNIQAIVKEHPPSETEEKNKITAAIFYSISLTQQGLQGVELGTFLIKRVVKELQREFPHLGVFSSLSPIPGFTKWLLGLLNSQTKEHGRNELFTDSECKEISEITGGPINETLKLLLSSSEWVQSEKLVRALQTPLMRLCAWYLYGEKHRGYALNPVANFHLQNGAVLWRINWMADVSLRGITGSCGLMANYRYFLEETGPNSTSYLGSKIIKASEQVLSLVAQFQKNSKL

SEQ ID NO: 871681 - protein, 144 aa, Homo sapiens
MASTRPGGVECKEISEITGGPINETLKLLLSSSEWVQSEKLVRALQTPLMRLCAWYLYGEKHRGYALNPVANFHLQNGAVLWRINWMADVSLRGITGSCGLMANYRYFLEETGPNSTSYLGSKIIKASEQVLSLVAQFQKNSKL

SEQ ID NO: 871682 - protein, 493 aa, Homo sapiens; identical to SEQ ID NO: 871680

SEQ ID NO: 871683 - protein, 475 aa, Homo sapiens
MRGFGPGLTARRLLPLRLPPRPPGPRLASGQAAGALERAMDELLRRAVPPTPAYELREKTPAPAEGQCADFVSFYGGLAETAQRAELLGRLARGFGVDHGQVAEQSAGVLHLRQQQREAAVLLQAEDRLRYALVPRYRGLFHHISKLDGGVRFLVQLRADLLEAQALKLVEGPDVREMNGVLKGMLSEWFSSGFLNLERVTWHSPCEVLQKISEAEAVHPVKNWMDMKRRVGPYRRCYFFSHCSTPGEPLVVLHVALTGDISSNIQAIVKEHPPSETEEKNRVELGTFLIKRVVKELQREFPHLGVFSSLSPIPGFTKWLLGLLNSQTKEHGRNELFTDSECKEISEITGGPINETLKLLLSSSEWVQSEKLVRALQTPLMRLCAWYLYGEKHRGYALNPVANFHLQNGAVLWRINWMADVSLRGITGSCGLMANYRYFLEETGPNSTSYLGSKIIKASEQVLSLVAQFQKNSKL

SEQ ID NO: 871684 - protein, 106 aa, Homo sapiens
ARLRARLDGQASPPAAVAPAAARAPAGERAGGRRPGAGHGRAVWRINWMADVSLRGITGSCGLMANYRYFLEETGPNSTSYLGSKIIKASEQVLSLVAQFQKNSKL

SEQ ID NO: 871685 - protein, 197 aa, Homo sapiens
MAENNLKMLKIQQCVVANKLPRNRPYVCNICFKHFETPSKLARHYLIHTGQKPFECDVCHKTFRQLVHLERHQLTHSLPFKCSICQRHFKNLKTFVKHQQLHNETYQNNVKQVRRLLEAKQEKSMYGVYNTFTTEERWALHPCSKSDPMYSMKRRKNIHACTICGKMFPSQSKLDRHVLIHTGQRPFKCVLCTKSFR

SEQ ID NO: 871686 - protein, 158 aa, Homo sapiens
GIVACPHCPLRMRSHPGAQLFPRSGPTHPASLHQRSPAACPPTLGAFWLAVLLADMRQRLLPSVTSLLLVALLFPGSSQARHVNHSATEALGELRERAPGQGTNGFQLLRHAVKRDLLPPRTPPYQVHISHQEARGPSFKICVGFLGPRWARGCSTGN

SEQ ID NO: 871687 - protein, 188 aa, Homo sapiens
GIVACPHCPLRMRSHPGAQLFPRSGPTHPASLHQRSPAACPPTLGAFWLAVLLADMRQRLLPSVTSLLLVALLFPGSSQARHVNHSATEALGELRERAPGQGTNGFQLLRHAVKRDLLPPRTPPYQGDVPPGIRNTICRMQQGICRLFFCHSGEKKRDICSDPWNRCCVSNTDEEGKEKPEMDGRSGI

SEQ ID NO: 871688 - protein, 82 aa, Homo sapiens
MRQRLLPSVTSLLLVALLFPGSSQARHVNHSATEALGELRERAPGQGTNGFQLLRHAVKRDLLPPRTPPYQGTGQQHRQRCG

SEQ ID NO: 871689 - protein, 100 aa, Homo sapiens
CQAEASEHPQTCVSTCTGSSQARHVNHSATEALGELRERAPGQGTNGFQLLRHAVKRDLLPPRTPPYQVHISHQEARGPSFKICVGFLGPRWARGCSTGN

SEQ ID NO: 871690 - protein, 157 aa, Homo sapiens
MRQRLLPSVTSLLLVALLFPGSSQARHVNHSATEALGELRERAPGQGTNGFQLLRHAVKRDLLPPRTPPYQGDVPPGIRNTICRMQQGICRLFFCHSGDRPAAQTTLWIRRVETSSSCLLSSGVVTAGWPRWIGFRGQEAALCSRRAGASPRVCGSD

SEQ ID NO: 871691 - protein, 158 aa, Homo sapiens; identical to SEQ ID NO: 871686

SEQ ID NO: 871692 - protein, 103 aa, Homo sapiens
MRQRLLPSVTSLLLVALLFPGSSQARHVNHSATEALGELRERAPGQGTNGFQLLRHAVKRDLLPPRTPPYQVHISHQEARGPSFKICVGFLGPRWARGCSTGN

SEQ ID NO: 871693 - protein, 103 aa, Homo sapiens; identical to SEQ ID NO: 871692

SEQ ID NO: 871694 - protein, 102 aa, Homo sapiens
MLTARGGSRSAERKGDLQRTFRQVCVCSLSCLAPQRWGARGSEAVPVSARESGKGSRAPPETRVRAEPESSPGTSAVAPPLPSPLSLPPPPPGVVKATICPE

SEQ ID NO: 871695 - protein, 151 aa, Homo sapiens
RALGPWRRRTGLGATAHDAVLEPPGRSVTAPKRERAESPPPTAGPPQNRKPCADRGSPPPCSEKSADPRDRSKGRGKTGMGGKQGGPAEGKLRLRKRSEAASPDSRNVHVDCPRRKSIGRAEGGPAEDLPTGWSDHAHGSSSRLHYECRIC

SEQ ID NO: 871696 - protein, 284 aa, Homo sapiens
MSLVDLGKRLLEAARKGQDDEVRTLMANGAPFTTDWLGTSPLHLAAQYGHYSTAEVLLRAGVSRDARTKVDRTPLHMAAADGHAHIVELLVRNGADVNAKDMLKMTALHWATERHHRDVVELLIKYGADVHAFSKFDKSAFDIALEKNNAEILVILQEAMQNQVNVNPERANPVTDPVSMAAPFIFTSGEVVNLASLISSTNTKTTSANTEEIIEGNSVDSSIQQVMGSGGQRVITIVTDGVPLGNIQTSIPTGGIGQPFIVTVQDGQQVLTVPAGKVAEETVI

SEQ ID NO: 871697 - protein, 266 aa, Homo sapiens
MSLVDLGKRLLEAARKGQDDEVRTLMANGAPFTTDWLGTSPLHLAAQYGHYSTAEVLLRAGVSRDARTKVDRTPLHMAAADGHAHIVELLVRNGADVNAKDMLKMTALHWATERHHRDVVELLIKYGADVHAFSKFDKSAFDIALVNVNPERANPVTDPVSMAAPFIFTSGEVVNLASLISSTNTKTTSANTEEIIEGNSVDSSIQQVMGSGGQRVITIVTDGVPLGNIQTSIPTGGIGQPFIVTVQDGQQVLTVPAGKVAEETVI

SEQ ID NO: 871698 - protein, 739 aa, Homo sapiens
AKNCVSATSAPWPRWPLGVLNLLCVLEGQALHPPNSLDLFAGPYSSWLSDPTTRLCGHSLLLGCPWCPSQRPPGASLHRPSLPSSLMAVWVTVFVFSSPGDQALMHPQEGHALRRPPPRWLLLIMVSGPLALRWCAWAGRGDMGPDMELPSHSKQLLLQLNQQRTKGFLCDVIIMVENSIFRAHKNVLAASSIYFKSLVLHDNLINLDTDMVSSTVFQQILDFIYTGKLLPSDQPAEPNFSTLLTAASYLQLPELAALCRRKLKRAGKPFGSGRAGSTGMGRPPRSQRLSTASVIQARYQGLVDGRKGAHAPQELPQAKGSDDELFLGGSNQDSVQGLGRAVCPAGGEAGLGGCSSSTNGSSGGCEQELGLDLSKKSPPLPPATPGPHLTPDDAAQLSDSQHGSPPAASAPPVANSASYSELGGTPDEPMDLEGAEDNHLSLLEAPGGQPRKSLRHSTRKKEWGKKEPVAGSPFERREAGPKGPCPGEEGEGVGDRVPNGILASGAGPSGPYGEPPYPCKEEEENGKDASEDSAQSGSEGGSGHASAHYMYRQEGYETVSYGDNLYVCIPCAKGFPSSEQLNAHVETHTEEELFIKEEGAYETGSGGAEEEAEDLSAPSAAYTAEPRPFKCSVCEKTYKDPATLRQHEKTHWLTRPFPCNICGKMFTQRGTMTRHMRSHLGLKPFACDECGMRFTRQYRLTEHMRVHSGEKPYECQLCGGKFTQQRNLISHLRMHTSPS

SEQ ID NO: 871699 - protein, 296 aa, Homo sapiens
REAARLEINVLKKIKEKDKENKFLCVLMSDWFNFHGHMCIAFELLGKNTFEFLKENNFQPYPLPHVRHMAYQLCHALRFLHENQLTHTDLKPENILFVNSEFETLYNEHKSCEEKSVKNTSIRVADFGSATFDHEHHTTIVATRHYRPPEVILELGWAQPCDVWSIGCILFEYYRGFTLFQTHENREHLVMMEKILGPIPSHMIHRTRKQKYFYKGGLVWDENSSDGRYVKENCKPLKSYMLQDSLEHVQLFDLMRRMLEFDPAQRITLAEALLHPFFAGLTPEERSFHTSRNPSR

SEQ ID NO: 871700 - protein, 104 aa, Homo sapiens
MSLIFQQTHDMIHRTRKQKYFYKGGLVWDENSSDGRYVKENCKPLKSYMLQDSLEHVQLFDLMRRMLEFDPAQRITLAEALLHPFFAGLTPEERSFHTSRNPSR

SEQ ID NO: 871701 - protein, 56 aa, Homo sapiens
MLQDSLEHVQLFDLMRRMLEFDPAQRITLAEALLHPFFAGLTPEERSFHTSRNPSR

SEQ ID NO: 871702 - protein, 296 aa, Homo sapiens; identical to SEQ ID NO: 871699

SEQ ID NO: 871703 - protein, 296 aa, Homo sapiens; identical to SEQ ID NO: 871699

SEQ ID NO: 871704 - protein, 56 aa, Homo sapiens; identical to SEQ ID NO: 871701

SEQ ID NO: 871705 - protein, 318 aa, Homo sapiens
MSTHVAGLGLDKMKLGNPQSFLDQEEADDQQLLEPEAWKTYTERRNALREFLTSDLSPHLLKRHHARMQLLRKCSYYIEVLPKHLALGDQNPLVLPSALFQLIDPWKFQRMKKVGTAQTKIQLLLLGDLLEQLDHGRAELDALLRSPDPRPFLADWALVERRLADVSAVMDSFLTMMVPGRLHVKHRLVSDVSATKIPHIWLMLSTKMPVVFDRKASAAHQDWARLRWFVTIQPATSEQYELRFRLLDPRTQQECAQCGVIPVAACTFDVRNLLPNRSYKFTIKRAETSTLVYEPWRDSLTLHTKPEPLEGPALSHSV

SEQ ID NO: 871706 - protein, 365 aa, Homo sapiens
TRGVRREAGLWEVRARLRFRGRASGRGPGAAAGAGRGGLGVSRSSRIMSTHVAGLGLDKMKLGNPQSFLDQEEADDQQLLEPEAWKTYTERRNALREFLTSDLSPHLLKRHHARMQLLRKCSYYIEVLPKHLALGDQNPLVLPSALFQLIDPWKFQRMKKVGTAQTKIQLLLLGDLLEQLDHGRAELDALLRSPDPRPFLADWALVERRLADVSAVMDSFLTMMVPGRLHVKHRLVSDVSATKIPHIWLMLSTKMPVVFDRKASAAHQDWARLRWFVTIQPATSEQYELRFRLLDPRTQQECAQCGVIPVAACTFDVRNLLPNRSYKFTIKRAETSTLVYEPWRDSLTLHTKPEPLEGPALSHSV

SEQ ID NO: 871707 - protein, 343 aa, Homo sapiens
PAECGGRLGSGKSARGSASEAGSRIMSTHVAGLGLDKMKLGNPQSFLDQEEADDQQLLEPEAWKTYTERRNALREFLTSDLSPHLLKRHHARMQLLRKCSYYIEVLPKHLALGDQNPLVLPSALFQLIDPWKFQRMKKVGTAQTKIQLLLLGDLLEQLDHGRAELDALLRSPDPRPFLADWALVERRLADVSAVMDSFLTMMVPGRLHVKHRLVSDVSATKIPHIWLMLSTKMPVVFDRKASAAHQDWARLRWFVTIQPATSEQYELRFRLLDPRTQQECAQCGVIPVAACTFDVRNLLPNRSYKFTIKRAETSTLVYEPWRDSLTLHTKPEPLEGPALSHSV

SEQ ID NO: 871708 - protein, 151 aa, Homo sapiens
MPQPRGGQPAWQLTPSPPPSSRIMSTHVAGLGLDKMKLGNPQSFLDQEEADDQQLLEPEAWKTYTERRNALREFLTSDLSPHLLKRHHARMQLLRKCSYYIEVLPKHLALGDQNPLVLPSALFQLIDPWKFQRMKKVGTAQTKIQLLLLGD

SEQ ID NO: 871709 - protein, 343 aa, Homo sapiens; identical to SEQ ID NO: 871707

SEQ ID NO: 871710 - protein, 343 aa, Homo sapiens; identical to SEQ ID NO: 871707

SEQ ID NO: 871711 - protein, 187 aa, Homo sapiens
MSTHVAGLGLDKMKLGNPQSFLDQEEADDQQLLEPEAWKTYTERRNALREFLTSDLSPHLLKRHHARMQLLRKCSYYIEVLPKHLALGDQNPLVLPSALFQLIDPWKFQRMKKVGTAQTRSAPSVASSPWLPAPSTSETCCPTDPISSPSRGPRPPRWCTSPGGTASPCTPSRSPWRGPPSATLSER

SEQ ID NO: 871712 - protein, 121 aa, Homo sapiens
PCNPSSRKINRSMQNWHQLENLSNFIKAMVSYGMNPVDLFEANDLFESGNMTQVQVSLLALAGKAKTKGLQSGVDIGVKYSEKQERNFDDATMKAGQCVIGLQTNKCASQSALCFVNRRGS

SEQ ID NO: 871713 - protein, 332 aa, Homo sapiens
MAGYAPGVTGCPVRPRPAARPPAMSSTQFNKGPSYGLSAEVKNRLLSKYDPQKEAELRTWIEGLTGLSIGPDFQKGLKDGTILCTLMNKLQPGSVPKINRSMQNWHQLENLSNFIKAMVSYGMNPVDLFEANDLFESGNMTQVQVSLLALAGKAKTKGLQSGVDIGVKYSEKQERNFDDATMKAGQCVIGLQMGTNKCASQSGMTAYGTRRHLYDPKNHILPPMDHSTISLQMGTNKCASQVGMTAPGTRRHIYDTKLGTDKCDNSSMSLQMGYTQGANQSGQVFGLGRQIYDPKYCPQGTVADGAPSGTGDCPDPGEVPEYPPYYQEEAGY

SEQ ID NO: 871714 - protein, 334 aa, Homo sapiens
  misc_feature (10)..(10): Xaa can be any naturally occurring amino acid
QCQAGTVLRXLDCPVRPRPAARPPAMSSTQFNKGPSYGLSAEVKNRLLSKYDPQKEAELRTWIEGLTGLSIGPDFQKGLKDGTILCTLMNKLQPGSVPKINRSMQNWHQLENLSNFIKAMVSYGMNPVDLFEANDLFESGNMTQVQVSLLALAGKAKTKGLQSGVDIGVKYSEKQERNFDDATMKAGQCVIGLQMGTNKCASQSGMTAYGTRRHLYDPKNHILPPMDHSTISLQMGTNKCASQVGMTAPGTRRHIYDTKLGTDKCDNSSMSLQMGYTQGANQSGQVFGLGRQIYDPKYCPQGTVADGAPSGTGDCPDPGEVPEYPPYYQEEAGY

SEQ ID NO: 871715 - protein, 309 aa, Homo sapiens
MSSTQFNKGPSYGLSAEVKNRLLSKYDPQKEAELRTWIEGLTGLSIGPDFQKGLKDGTILCTLMNKLQPGSVPKINRSMQNWHQLENLSNFIKAMVSYGMNPVDLFEANDLFESGNMTQVQVSLLALAGKAKTKGLQSGVDIGVKYSEKQERNFDDATMKAGQCVIGLQMGTNKCASQSGMTAYGTRRHLYDPKNHILPPMDHSTISLQMGTNKCASQVGMTAPGTRRHIYDTKLGTDKCDNSSMSLQMGYTQGANQSGQVFGLGRQIYDPKYCPQGTVADGAPSGTGDCPDPGEVPEYPPYYQEEAGY

SEQ ID NO: 871716 - protein, 309 aa, Homo sapiens; identical to SEQ ID NO: 871715

SEQ ID NO: 871717 - protein, 309 aa, Homo sapiens; identical to SEQ ID NO: 871715

SEQ ID NO: 871718 - protein, 309 aa, Homo sapiens; identical to SEQ ID NO: 871715

SEQ ID NO: 871719 - protein, 350 aa, Homo sapiens
MSSTQFNKGPSYGLSAEVKNRLLSKYDPQKEAELRTWIEGLTGLSIGPDFQKGLKDGTILCTLMNKLQPGSVPKINRSMQNWHQLENLSNFIKAMVSYGMNPVDLFEANDLFESGNMTQVQVSLLALAGKAKTKGLQSGVDIGVKYSEKQERNFDDATMKAGQCVIGLQMGTNKCASQSGMTAYGTRRHLYDPKNHILPPMDHSTISLQMGTNKCASQDLTLLPRLECSGTISAHCNLCLPGSRDSPSCLSLPSSWDYKVGMTAPGTRRHIYDTKLGTDKCDNSSMSLQMGYTQGANQSGQVFGLGRQIYDPKYCPQGTVADGAPSGTGDCPDPGEVPEYPPYYQEEAGY

SEQ ID NO: 871720 - protein, 300 aa, Homo sapiens
MSSTQFNKGPSYGLSAEVKNRLLSKYDPQKEAELRTWIEGLTGLSIGPDFQKGLKDGTILCTLMNKLQPGSVPKINRSMQNWHQLENLSNFIKAMVSYGMNPVDLFEANDLFESGNMTQVQAKTKGLQSGVDIGVKYSEKQERNFDDATMKAGQCVIGLQMGTNKCASQSGMTAYGTRRHLYDPKNHILPPMDHSTISLQMGTNKCASQVGMTAPGTRRHIYDTKLGTDKCDNSSMSLQMGYTQGANQSGQVFGLGRQIYDPKYCPQGTVADGAPSGTGDCPDPGEVPEYPPYYQEEAGY

SEQ ID NO: 871721 - protein, 270 aa, Homo sapiens
MSSTQFNKGPSYGLSAEVKNRLLSKYDPQKEAELRTWIEGLTGLSIGPDFQKGLKDGTILCTLMNKLQPGSVPKINRSMQNWHQLENLSNFIKAMVSYGMNPVDLFEANDLFESGNMTQVQVSLLALAGKMGTNKCASQSGMTAYGTRRHLYDPKNHILPPMDHSTISLQMGTNKCASQVGMTAPGTRRHIYDTKLGTDKCDNSSMSLQMGYTQGANQSGQVFGLGRQIYDPKYCPQGTVADGAPSGTGDCPDPGEVPEYPPYYQEEAGY

SEQ ID NO: 871722 - protein, 317 aa, Homo sapiens
MSSTQFNKGPSYGLSAEVKNRLLSKYDPQKEAELRTWIEGLTGLSIGPDFQKGLKDGTILCTLMNKLQPGSVPKINRSMQNWHQLENLSNFIKAMVSYGMNPVDLFEANDLFESGNMTQVQVSLLALAGKAKTKGLQSGVDIGVKYSEKQERNFDDATMKAGQCVIGLQMGTNKCASQSGMTAYGTRRHLYDPKNHILPPMDHSTISLQMGTNKCASQVGMTAPGTRRHIYDTKLGTDKCDNSSMSLQMGYTQGANQSGQVFGLGRQIYDPKYCPQGTVADGAPSGTGDCPDPGEVPEYPPYYQENRFNLEAEVVVS

SEQ ID NO: 871723 - protein, 309 aa, Homo sapiens; identical to SEQ ID NO: 871715

SEQ ID NO: 871724 - protein, 309 aa, Homo sapiens; identical to SEQ ID NO: 871715

SEQ ID NO: 871725 - protein, 309 aa, Homo sapiens; identical to SEQ ID NO: 871715

SEQ ID NO: 871726 - protein, 309 aa, Homo sapiens; identical to SEQ ID NO: 871715

SEQ ID NO: 871727 - protein, 309 aa, Homo sapiens; identical to SEQ ID NO: 871715

SEQ ID NO: 871728 - protein, 289 aa, Homo sapiens
NRRFRALMKRTAELRTWIEGLTGLSIGPDFQKGLKDGTILCTLMNKLQPGSVPKINRSMQNWHQLENLSNFIKAMVSYGMNPVDLFEANDLFESGNMTQVQVSLLALAGKAKTKGLQSGVDIGVKYSEKQERNFDDATMKAGQCVIGLQMGTNKCASQSGMTAYGTRRHLYDPKNHILPPMDHSTISLQMGTNKCASQVGMTAPGTRRHIYDTKLGTDKCDNSSMSLQMGYTQGANQSGQVFGLGRQIYDPKYCPQGTVADGAPSGTGDCPDPGEVPEYPPYYQEEAGY

SEQ ID NO: 871729 - protein, 309 aa, Homo sapiens; identical to SEQ ID NO: 871715

SEQ ID NO: 871730 - protein, 211 aa, Homo sapiens
GAEAVSARMDPKQTTLLCLWCSVWARGFRHRKAKTKGLQSGVDIGVKYSEKQERNFDDATMKAGQCVIGLQMGTNKCASQSGMTAYGTRRHLYDPKNHILPPMDHSTISLQMGTNKCASQVGMTAPGTRRHIYDTKLGTDKCDNSSMSLQMGYTQGANQSGQVFGLGRQIYDPKYCPQGTVADGAPSGTGDCPDPGEVPEYPPYYQEEAGY

SEQ ID NO: 871731 - protein, 71 aa, Homo sapiens
AAILPLVPREVRGLALEPACAPQWTRERVPRARRAQEPRTPGAGDFGGGSGKRKAVSGEDPILGLLRLPKT

SEQ ID NO: 871732 - protein, 98 aa, Homo sapiens
GPRRRHSGRRAHLDGAARPPLPEIKGRASGPRNPPRRLKASPSQTRFKGPSGGEECRRGLFSATPPSRVLRDSRHGLGEHTISYQIRFSTLPTQVISV

SEQ ID NO: 871733 - protein, 441 aa, Homo sapiens
MKAAVDLKPTLTIIKTEKVDLELFPSPDMECADVPLLTPSSKEMMSQALKATFSGFTKEQQRLGIPKDPRQWTETHVRDWVMWAVNEFSLKGVDFQKFCMNGAALCALGKDCFLELAPDFVGDILWEHLEILQKEDVKPYQVNGVNPAYPESRYTSDYFISYGIEHAQCVPPSEFSEPSFITESYQTLHPISSEELLSLKYENDYPSVILRDPLQTDTLQNDYFAIKQEVVTPDNMCMGRTSRGKLGGQDSFESIESYDSCDRLTQSWSSQSSFNSLQRVPSYDSFDSEDYPAALPNHKPKGTFKDYVRDRADLNKDKPVIPAAALAGYTGSGPIQLWQFLLELLTDKSCQSFISWTGDGWEFKLSDPDEVARRWGKRKNKPKMNYEKLSRGLRYYYDKNIIHKTAGKRYVYRFVCDLQSLLGYTPEELHAMLDVKPDADE

SEQ ID NO: 871734 - protein, 441 aa, Homo sapiens; identical to SEQ ID NO: 871733

SEQ ID NO: 871735 - protein, 457 aa, Homo sapiens
SEDYPAALPNHKPKGTFKDYVRDRADLNKDKPVIPAAALAGHTDMECADVPLLTPSSKEMMSQALKATFSGFTKEQQRLGIPKDPRQWTETHVRDWVMWAVNEFSLKGVDFQKFCMNGAALCALGKDCFLELAPDFVGDILWEHLEILQKEDVKPYQVNGVNPAYPESRYTSDYFISYGIEHAQCVPPSEFSEPSFITESYQTLHPISSEELLSLKYENDYPSVILRDPLQTDTLQNDYFAIKQEVVTPDNMCMGRTSRGKLGGQDSFESIESYDSCDRLTQSWSSQSSFNSLQRVPSYDSFDSEDYPAALPNHKPKGTFKDYVRDRADLNKDKPVIPAAALAGYTGSGPIQLWQFLLELLTDKSCQSFISWTGDGWEFKLSDPDEVARRWGKRKNKPKMNYEKLSRGLRYYYDKNIIHKTAGKRYVYRFVCDLQSLLGYTPEELHAMLDVKPDADE

SEQ ID NO: 871736 - protein, 354 aa, Homo sapiens
MKAAVDLKPTLTIIKTEKVDLELFPSPDMECADVPLLTPSSKEMMSQALKATFSGFTKEQQRLGIPKDPRQWTETHVRDWVMWAVNEFSLKGVDFQKFCMNGAALCALGKDCFLELAPDFVGDILWEHLEILQKEDVKPYQVNGVNPAYPESRYTSDYFISYGIEHAQCVPPSEFSEPSFITESYQTLHPISSEELLSLKYENDYPSVILRDPLQTDTLQNDYFAIKQEVVTPDNMCMGRTSRGSGPIQLWQFLLELLTDKSCQSFISWTGDGWEFKLSDPDEVARRWGKRKNKPKMNYEKLSRGLRYYYDKNIIHKTAGKRYVYRFVCDLQSLLGYTPEELHAMLDVKPDADE

SEQ ID NO: 871737 - protein, 441 aa, Homo sapiens; identical to SEQ ID NO: 871733

SEQ ID NO: 871738 - protein, 441 aa, Homo sapiens; identical to SEQ ID NO: 871733

SEQ ID NO: 871739 - protein, 441 aa, Homo sapiens; identical to SEQ ID NO: 871733

SEQ ID NO: 871740 - protein, 246 aa, Homo sapiens
RRGSRWRASSPSVILRDPLQTDTLQNDYFAIKQEVVTPDNMCMGRTSRGKLGGQDSFESIESYDSCDRLTQSWSSQSSFNSLQRVPSYDSFDSEDYPAALPNHKPKGTFKDYVRDRADLNKDKPVIPAAALAGYTGSGPIQLWQFLLELLTDKSCQSFISWTGDGWEFKLSDPDEVARRWGKRKNKPKMNYEKLSRGLRYYYDKNIIHKTAGKRYVYRFVCDLQSLLGYTPEELHAMLDVKPDADE

SEQ ID NO: 871741 - protein, 441 aa, Homo sapiens; identical to SEQ ID NO: 871733

SEQ ID NO: 871742 - protein, 105 aa, Homo sapiens
MVKTAYFRYKSLLSLLANPLFPGYGIEHAQCVPPSEFSEPSFITESYQTLHPISSEELLSLKYENDYPSVILRDPLQTDTLQNDYFAIKQEVVTPDNMCMGRTSR

SEQ ID NO: 871743 - protein, 294 aa, Homo sapiens
MNSELDYYEKFEEVHGILMYKDFVKYWDNVEAFQARPDDLVIATYPKSGTTWVSEIVYMIYKEGDVEKCKEDVIFNRIPFLECRKENLMNGVKQLDEMNSPRIVKTHLPPELLPASFWEKDCKIIYLCRNAKDVAVSFYYFFLMVAGHPNPGSFPEFVEKFMQGQVPYGSWYKHVKSWWEKGKSPRVLFLFYEDLKEDIRKEVIKLIHFLERKPSEELVDRIIHHTSFQEMKNNPSTNYTTLPDEIMNQKLSPFMRKGITGDWKNHFTVALNEKFDKHYEQQMKESTLKFRTEI

SEQ ID NO: 871744 - protein, 294 aa, Homo sapiens; identical to SEQ ID NO: 871743

SEQ ID NO: 871745 - protein, 208 aa, Homo sapiens
MNSELDYYEKFEEVHGILMYKDFVKYWDNVEAFQARPDDLVIATYPKSGTTWVSEIVYMIYKEGDVEKCKEDVIFNRIPFLECRKENLMNGVKQLDEMNSPRIVKTHLPPELLPASFWEKDCKIIYLCRNAKDVAVSFYYFFLMVAGHPNPGSFPEFVEKFMQGQVPYGSWYKHVKSWWEKGKSPRVLFLFYEDLKEELQETGKITLQ

SEQ ID NO: 871746 - protein, 294 aa, Homo sapiens; identical to SEQ ID NO: 871743

SEQ ID NO: 871747 - protein, 236 aa, Homo sapiens; identical to SEQ ID NO: 751861

SEQ ID NO: 871748 - protein, 236 aa, Homo sapiens; identical to SEQ ID NO: 751861

SEQ ID NO: 871749 - protein, 236 aa, Homo sapiens; identical to SEQ ID NO: 751861

SEQ ID NO: 871750 - protein, 236 aa, Homo sapiens; identical to SEQ ID NO: 751861

SEQ ID NO: 871751 - protein, 236 aa, Homo sapiens; identical to SEQ ID NO: 751861

SEQ ID NO: 871752 - protein, 236 aa, Homo sapiens; identical to SEQ ID NO: 751861

SEQ ID NO: 871753 - protein, 236 aa, Homo sapiens; identical to SEQ ID NO: 751861

SEQ ID NO: 871754 - protein, 236 aa, Homo sapiens; identical to SEQ ID NO: 751861

SEQ ID NO: 871755 - protein, 236 aa, Homo sapiens; identical to SEQ ID NO: 751861

SEQ ID NO: 871756 - protein, 236 aa, Homo sapiens; identical to SEQ ID NO: 751861

SEQ ID NO: 871757 - protein, 236 aa, Homo sapiens; identical to SEQ ID NO: 751861

SEQ ID NO: 871758 - protein, 241 aa, Homo sapiens
MAEPSAATQSHSISSSSFGAEPSAPGGGGSPGACPALGTKSCSSSCAVHDLIFWRDVKKTGFVFGTTLIMLLSLAAFSVISVVSYLILALLSVTISFRIYKSVIQAVQKSEEGHPFKAYLDVDITLSSEAFHNYMNAAMVHINRALKLIIRLFLVEDLVDSLKLAVFMWLMTYVGAVFNGITLLILAELLIFSVPIVYEKYKDPSKTPWNRQKKGRISTWKPEMQQLLKHHLIVITSLLVL

SEQ ID NO: 871759 - protein, 255 aa, Homo sapiens; identical to SEQ ID NO: 751859

SEQ ID NO: 871760 - protein, 123 aa, Homo sapiens
MAEPSAATQSHSISSSSFGAEPSAPGGGGSPGACPALGTKSCSSSCAVHDLIFWRDVKKTGFVFGTTLIMLLSLAAFSVISVVSYLILALLSVTISFRIYKSVIQAVQKSEEGHPFNWLSSCG

SEQ ID NO: 871761 - protein, 177 aa, Homo sapiens
MAEPSAATQSHSISSSSFGAEPSAPGGGGSPGACPALGTKSCSSSCAVHDLIFWRDVKKTGFVFGTTLIMLLSLAAFSVISVVSYLILALLSVTISFRIYKSVIQAVQKSEEGHPFKAYLDVDITLSSEAFHNYMNAAMVHINRALKLIIRLFLVEDLVDSLKHKKQVDTSRDHVRE

SEQ ID NO: 871762 - protein, 205 aa, Homo sapiens
MGNGMNKILPGLYIGNFKDARDAEQLSKNKVTHILSVHDSARPMLEGVKYLCIPAADSPSQNLTRHFKESIKFIHECRLRGESCLVHCLAGVSRSVTLVIAYIMTVTDFGWEDALHTVRAGRSCANPNVGFQRQLQEFEKHEVHQYRQWLKEEYGESPLQDAEEAKNILGKYKEQGRTEPQPGARRWSSFPALAPLTYDNYTTET

SEQ ID NO: 871763 - protein, 256 aa, Homo sapiens
MGNGMNKILPGLYIGNFKDARDAEQLSKNKVTHILSVHDSARPMLEGVKYLCIPAADSPSQNLTRHFKESIKFIHECRLRGESCLVHCLAGVSRSVTLVIAYIMTVTDFGWEDALHTVRAGRSCANPNVGFQRQLQEFEKHEVHQLCMYRGTSEMQAGAPERCPQSFRTQPASWRLELKGPQRTSAPRAPSCTPSEVVTIPRAPVEATGAYPLSFSLCLVLPTSLFLSLWVTYHFLGLAYFHVLGQHLEGAVPSLA

SEQ ID NO: 871764 - protein, 124 aa, Homo sapiens
MKRTRHFKESIKFIHECRLRGESCLVHCLAGVSRSVTLVIAYIMTVTDFGWEDALHTVRAGRSCANPNVGFQRQLQEFEKHEVHQYRQWLKEEYGESPLQDAEEAKNILAAPGILKFWAFLRRL

SEQ ID NO: 871765 - protein, 184 aa, Homo sapiens
MGNGMNKILPGLYIGNFKDARDAEQLSKNKVTHILSVHDSARPMLEGVKYLCIPAADSPSQNLTRHFKESIKFIHECRLRGESCLVHCLAGVSRSVTLVIAYIMTVTDFGWEDALHTVRAGRSCANPNVGFQRQLQEFEKHEVHQYRQWLKEEYGESPLQDAEEAKNILAAPGILKFWAFLRRL

SEQ ID NO: 871766 - protein, 83 aa, Homo sapiens
VSIPLRVSIPLRVSIPLRVSIPLRVSIPLRVSIPLRVSIPLLWRFLYLAWMPVRIPGALPHCLVGGLALVIASCERLPRTSPV

SEQ ID NO: 871767 - protein, 184 aa, Homo sapiens; identical to SEQ ID NO: 871765

SEQ ID NO: 871768 - protein, 67 aa, Homo sapiens
MTVTDFGWEDALHTVRAGRSCANPNVGFQRQLQEFEKHEVHQYRQLAEGRLCPNWVFGRLQENASTS

SEQ ID NO: 871769 - protein, 310 aa, Homo sapiens
MWSSRRCRRPSRPQGRPPQGAEGGGSPSRRGRRRRQRRWPRRQQCGQSGGAGHRRELLHVCLLSARACGPLACLTVVDGGGDRDCSTTRVAFLALPTQLLHARRRRRHLEPANTTTCLTAGGWQRQRLQCARAILPGMYIGNFKDARDAEQLSKNKVTHILSVHDSARPMLEGVKYLCIPAADSPSQNLTRHFKESIKFIHECRLRGESCLVHCLAGVSRSVTLVIAYIMTVTDFGWEDALHTVRAGRSCANPNVGFQRQLQEFEKHEVHQYRQWLKEEYGESPLQDAEEAKNILAAPGILKFWAFLRRL

SEQ ID NO: 871770 - protein, 184 aa, Homo sapiens; identical to SEQ ID NO: 871765

SEQ ID NO: 871771 - protein, 107 aa, Homo sapiens
SLDPNSLNCTFNGLYVKSYLCLDTDIPGKQGEIHHLYSPPLCSKLRNAPIRTASGHRQCPPCTPSHLLPCMHSSSAQQLNALCAEAQTTFLRVGKKKSRRGREFSSS

SEQ ID NO: 871772 - protein, 104 aa, Homo sapiens
QICIVRKMRRIPSGRRKMIPDGYVDPHKGTKSTGNSNYTVLLCHPGWSVVVRSWLTARLVGSRGLGNEAWTPVERKNFNCTRRKYAEIDYRIFRSWPLSENMLE

SEQ ID NO: 871773 - protein, 32 aa, Homo sapiens
MPRVAVFPPQVRPLERGDPPRPAPPMPRPFCC

SEQ ID NO: 871774 - protein, 249 aa, Homo sapiens
MANSASPEQNQNHCSAINNSIPLMQGNLPTLTLSGKIRVTVTFFLFLLSATFNASFLLKLQKWTQKKEKGKKLSRMKLLLKHLTLANLLETLIVMPLDGMWNITVQWYAGELLCKVLSYLKLFSMYAPAFMMVVISLDRSLAITRPLALKSNSKVGQSMVGLAWILSSVFAGPQLPLHHPSFHHADLQCKNHLHPDTGPSSGPPRTTTESVQEQYTKSTAEDSKNDGCICHFIYCLLDSLLCPRNLVLV

SEQ ID NO: 871775 - protein, 328 aa, Homo sapiens
MANSASPEQNQNHCSAINNSIPLMQGNLPTLTLSGKIRVTVTFFLFLLSATFNASFLLKLQKWTQKKEKGKKLSRMKLLLKHLTLANLLETLIVMPLDGMWNITVQWYAGELLCKVLSYLKLFSMYAPAFMMVVISLDRSLAITRPLALKSNSKVGQSMVGLAWILSSVFAGPQLYIFRMIHLADSSGQTKVFSQCVTHCSFSQWWHQAFYNFFTFSCLFIIPLFIMLICNAKIIFTLTRVLHQDPHELQLNQSKNNIPRARLKTLKMTVAFATSFTVCWTPYYVLGIWYWFDPEMLNRLSDPVNHFFFLFAFLNPCFDPLIYGYFSL

SEQ ID NO: 871776 - protein, 383 aa, Homo sapiens
RARARGAGLGPGGAAAAPDMSGPRAGFYRQELNKTVWEVPQRLQGLRPVGSGAYGSVCSAYDARLRQKVAVKKLSRPFQSLIHARRTYRELRLLKHLKHENVIGLLDVFTPATSIEDFSEVYLVTTLMGADLNNIVKCQALSDEHVQFLVYQLLRGLKYIHSAGIIHRDLKPSNVAVNEDCELRILDFGLARQADEEMTGYVATRWYRAPEIMLNWMHYNQTVDIWSVGCIMAELLQGKALFPGSDYIDQLKRIMEVVGTPSPEVLAKISSEHARTYIQSLPPMPQKDLSSIFRGANPLAIDLLGRMLVLDSDQRVSAAEALAHAYFSQYHDPEDEPEAEPYDESVEAKERTLEEWKELTYQEVLSFKPPEPPKPPGSLEIEQ

SEQ ID NO: 871777 - protein, 383 aa, Homo sapiens; identical to SEQ ID NO: 871776

SEQ ID NO: 871778 - protein, 383 aa, Homo sapiens
RARARGAGLGPGGAAAAPDMSGPRAGFYRQELNKTVWEVPQRLQGLRPVGSGAYGSVCSAYDARLRQKVAVKKLSRPFQSLIHARRTYRELRLLKHLKHENVIGLLDVFTPATSIEDFSEVYLVTTLMGADLNNIVKCQALSDEHVQFLVYQLLRGLKYIHSAGIIHRDLKPSNVAVNEDCELRILDFGLARQADEEMTGYVATRWYRAPEIMLNWMHYNQTVDIWSVGCIMAELLQGKALFPGSDYIDQLKRIMEVVGTPSPEVLAKISSEHARTYIQSLPPMPQKDLSSIFRGANPLAIDLLGRMLVLDSDQRVSAAEALAHAYFSQYHDPEDEPEAEPYDESVEAKERTLEEWKELTYQEVLASSPQKLSWGCGSALERG

SEQ ID NO: 871779 - protein, 223 aa, Homo sapiens
VRRPALTPPATKVIGLLDVFTPATSIEDFSEVYLVTTLMGADLNNIVKCQALSDEHVQFLVYQLLRGLKYIHSAGIIHRDLKPSNVAVNEDCELRILDFGLARQADEEMTGYVATRWYRAPEIMLNWMHYNQTVDIWSVGCIMAELLQGKALFPGSDYIDQLKRIMEVVGTPSPEVLAKISSEHVSWCPPASSSLSWLSPQALWGRGWCGNAGTIWGTWDVVG

SEQ ID NO: 871780 - protein, 242 aa, Homo sapiens
RARARGAGLGPGGAAAAPDMSGPRAGFYRQELNKTVWEVPQRLQGLRPVGSGAYGSVCSAYDARLRQKVAVKKLSRPFQSLIHARRTYRELRLLKHLKHENVIGLLDVFTPATSIEDFSEVYLVTTLMGADLNNIVKCQALSDEHVQFLVYQLLRGLKYIHSAGIIHRDLKPSNVAVNEDCELRILDFGLARQADEEMTGYVATRWYRAPEIMLNWMHYNQTVDIWSVGCIMPSVSEQTGPS

SEQ ID NO: 871781 - protein, 67 aa, Homo sapiens
ARDTAGTRPASARNTGRTRPASARDTAGTRPASARDTCGNTPSLSFEILHQFFCSYIMELFLINRFN

SEQ ID NO: 871782 - protein, 520 aa, Homo sapiens
QAQRIPASVSCSSAAAFTMDSISTAILLLLLALVCLLLTLSSRDKGKLPPGPRPLSILGNLLLLCSQDMLTSLTKLSKEYGSMYTVHLGPRRVVVLSGYQAVKEALVDQGEEFSGRGDYPAFFNFTKGNGIAFSSGDRWKVLRQFSIQILRNFGMGKRSIEERILEEGSFLLADVRKTEGEPFDPTFVLSRSVSNIICSVLFGSRFDYDDERLLTIIRLINDNFQIMSSPWGELYDILDPRFPSLLDWVPGPHQRIFQNFKCLRDLIAHSVHDHQASLDPRSPRDFIQCFLTKMAEEKEDPLSHFHMDTLLMTTHNLLFGGTKTVSTTLHHAFLALMKYPKVQARVQEEIDLVVGRARLPALKDRAAMPYTDAVIHEVQRFADIIPMNLPHRVTRDTAFRGFLIPKGTDVITLLNTVHYDPSQFLTPQEFNPEHFLDANQSFKKSPAFMPFSAGEGRNQSLSGPISTYIPHPNSTCQILSLLPSTHSQLWMHRDIHSSSQLCSYRQVVTKILVKQGGEVD

SEQ ID NO: 871783 - protein, 513 aa, Homo sapiens
QAQRIPASVSCSSAAAFTMDSISTAILLLLLALVCLLLTLSSRDKGKLPPGPRPLSILGNLLLLCSQDMLTSLTKLSKEYGSMYTVHLGPRRVVVLSGYQAVKEALVDQGEEFSGRGDYPAFFNFTKGNGIAFSSGDRWKVLRQFSIQILRNFGMGKRSIEERILEEGSFLLADVRKTEGEPFDPTFVLSRSVSNIICSVLFGSRFDYDDERLLTIIRLINDNFQIMSSPWGELYDILDPRFPSLLDWVPGPHQRIFQNFKCLRDLIAHSVHDHQASLDPRSPRDFIQCFLTKMAEEKEDPLSHFHMDTLLMTTHNLLFGGTKTVSTTLHHAFLALMKYPKVQARVQEEIDLVVGRARLPALKDRAAMPYTDAVIHEVQRFADIIPMNLPHRVTRDTAFRGFLIPKGTDVITLLNTVHYDPSQFLTPQEFNPEHFLDANQSFKKSPAFMPFSAGRRLCLGELLARMELFLYLTAILQSFSLQPLGAPEDIDLTPLSSGLGNLPRPFQLCLRPR

SEQ ID NO: 871784 - protein, 265 aa, Homo sapiens
MYVGYVLDKDSPVYPGPARPASLGLGPQAYGPPAPPPAPPQYPDFSSYSHVEPAPAPPTAWGAPFPAPKDDWAAAYGPGPAAPAASPASLAFGPPPDFSPVPAPPGPGPGLLAQPLGGPGTPSSPGAQRPTPYEWMRRSVAAGGGGGSGKTRTKDKYRVVYTDHQRLELEKEFHYSRYITIRRKSELAANLGLTERQVKIWFQNRRAKERKVNKKKQQQQQPPQPPMAHDITATPAGPSLGGLCPSNTSLLATSSPMPVKEEFLP

SEQ ID NO: 871785 - protein, 265 aa, Homo sapiens; identical to SEQ ID NO: 871784

SEQ ID NO: 871786 - protein, 791 aa, Homo sapiens
  misc_feature (6)..(6): Xaa can be any naturally occurring amino acid
  misc_feature (34)..(34): Xaa can be any naturally occurring amino acid
  misc_feature (85)..(85): Xaa can be any naturally occurring amino acid
  misc_feature (89)..(89): Xaa can be any naturally occurring amino acid
  misc_feature (91)..(93): Xaa can be any naturally occurring amino acid
  misc_feature (101)..(101): Xaa can be any naturally occurring amino acid
  misc_feature (103)..(104): Xaa can be any naturally occurring amino acid
  misc_feature (114)..(116): Xaa can be any naturally occurring amino acid
  misc_feature (123)..(123): Xaa can be any naturally occurring amino acid
  misc_feature (125)..(125): Xaa can be any naturally occurring amino acid
MAAAGXARRVLLLLLLGVLSAGLRPGALATEHYXPLSLLKQELQHRQQQEAPAGGGGCSPQSGDWGDQYSAECGESSFLNFHDSXCEPXGXXXCDSLLSLXTXXILSQAKSIAXXXKFPFATXNXNTNEELAIAYVLIGSGLYDEAIRHFSTMLQILSPLGRINEAVNDLTKAIQLQPSARLYRHRGTLYFISEDYATAHEDFQQSLELNKNQPIAMLYKGLTFFHRGLLKEAIESFKEALKQKVDFIDAYKSLGQAYRELGNFEAATESFQKALLLNQNHVQTLQLRGMMLYHHGSLQEALKNFKRCLQLEPYNEVCQYMKGLSHVAMGQFYEGIKAQTKVMLNDPLPGQKASPEYLKVKYLREYSRYLHAHLDTPLTEYNIDVDLPGSFKDHWAKNLPFLIEDYEEQPGLQPHIKDVLHQNFESYKPEVQELICVADRLGSLMQYETPGFLPNKRIHRAMGLAALEVMQAVQRTWTNSKVRMNGKTRLMQWRDMFDIAVKWRRIADPDQPVLWLDQMPARSLSRGFNNHINLIRGQVINMRYLEYFEKILHFIKDRILVYHGANNPKGLLEVREALEKVHKVEDLLPIMKQFNTKTKDGFTVNTKVPSLKDQGKEYDGFTITITGDKVGNILFSVETQTTEERTQLYHAEIDALYKDLTAKGKVLILSSEFGEADAVCNLILSLVYYFYNLMPLSRGSSVIAYSVIVGALMASGKEVAGKIPKGKLVDFEAMTAPGSEAFSKVAKSWMNLKSISPSYKTLPSVSETFPTLRSMIEVLNTDSSPRCLKKL

SEQ ID NO: 871787 - protein, 502 aa, Homo sapiens
MMLYHHGSLQEALKNFKRCLQLEPYNEVCQYMKGLSHVAMGQFYEGIKAQTKVMLNDPLPGQKASPEYLKVKYLREYSRYLHAHLDTPLTEYNIDVDLPGSFKDHWAKNLPFLIEDYEEQPGLQPHIKDVLHQNFESYKPEVQELICVADRLGSLMQYETPGFLPNKRIHRAMGLAALEVMQAVQRTWTNSKVRMNGKTRLMQWRDMFDIAVKWRRIADPDQPVLWLDQMPARSLSRGFNNHINLIRGQVINMRYLEYFEKILHFIKDRILVYHGANNPKGLLEVREALEKVHKVEDLLPIMKQFNTKTKDGFTVNTKVPSLKDQGKEYDGFTITITGDKVGNILFSVETQTTEERTQLYHAEIDALYKDLTAKGKVLILSSEFGEADAVCNLILSLVYYFYNLMPLSRGSSVIAYSVIVGALMASGKEVAGKIPKGKLVDFEAMTAPGSEAFSKVAKSWMNLKSISPSYKTLPSVSETFPTLRSMIEVLNTDSSPRCLKKL

SEQ ID NO: 871788 - protein, 827 aa, Homo sapiens
  misc_feature (6)..(6): Xaa can be any naturally occurring amino acid
  misc_feature (34)..(34): Xaa can be any naturally occurring amino acid
  misc_feature (85)..(85): Xaa can be any naturally occurring amino acid
  misc_feature (89)..(89): Xaa can be any naturally occurring amino acid
  misc_feature (91)..(93): Xaa can be any naturally occurring amino acid
  misc_feature (101)..(101): Xaa can be any naturally occurring amino acid
  misc_feature (103)..(104): Xaa can be any naturally occurring amino acid
  misc_feature (114)..(116): Xaa can be any naturally occurring amino acid
  misc_feature (123)..(123): Xaa can be any naturally occurring amino acid
  misc_feature (125)..(125): Xaa can be any naturally occurring amino acid
MAAAGXARRVLLLLLLGVLSAGLRPGALATEHYXPLSLLKQELQHRQQQEAPAGGGGCSPQSGDWGDQYSAECGESSFLNFHDSXCEPXGXXXCDSLLSLXTXXILSQAKSIAXXXKFPFATXNXNTNEELAIAYVLIGSGLYDEAIRHFSTMLQEEPDLVSAIYGRGIAYGKKGLHDIKNAELALFELSRVITLEPDRPEVFEQRAEILSPLGRINEAVNDLTKAIQLQPSARLYRHRGTLYFISEDYATAHEDFQQSLELNKNQPIAMLYKGLTFFHRGLLKEAIESFKEALKQKVDFIDAYKSLGQAYRELGNFEAATESFQKALLLNQNHVQTLQLRGMMLYHHGSLQEALKNFKRCLQLEPYNEVCQYMKGLSHVAMGQFYEGIKAQTKVMLNDPLPGQKASPEYLKVKYLREYSRYLHAHLDTPLTEYNIDVDLPGSFKDHWAKNLPFLIEDYEEQPGLQPHIKDVLHQNFESYKPEVQELICVADRLGSLMQYETPGFLPNKRIHRAMGLAALEVMQAVQRTWTNSKVRMNGKTRLMQWRDMFDIAVKWRRIADPDQPVLWLDQMPARSLSRGFNNHINLIRGQVINMRYLEYFEKILHFIKDRILVYHGANNPKGLLEVREALEKVHKVEDLLPIMKQFNTKTKDGFTVNTKVPSLKDQGKEYDGFTITITGDKVGNILFSVETQTTEERTQLYHAEIDALYKDLTAKGKVLILSSEFGEADAVCNLILSLVYYFYNLMPLSRGSSVIAYSVIVGALMASGKEVAGKIPKGKLVDFEAMTAPGSEAFSKVAKSWMNLKRFYCSQELSLTDTVCEESSRP

SEQ ID NO: 871789 - protein, 312 aa, Homo sapiens
  misc_feature (6)..(6): Xaa can be any naturally occurring amino acid
  misc_feature (34)..(34): Xaa can be any naturally occurring amino acid
  misc_feature (85)..(85): Xaa can be any naturally occurring amino acid
  misc_feature (89)..(89): Xaa can be any naturally occurring amino acid
  misc_feature (91)..(93): Xaa can be any naturally occurring amino acid
  misc_feature (101)..(101): Xaa can be any naturally occurring amino acid
  misc_feature (103)..(104): Xaa can be any naturally occurring amino acid
  misc_feature (114)..(116): Xaa can be any naturally occurring amino acid
  misc_feature (123)..(123): Xaa can be any naturally occurring amino acid
  misc_feature (125)..(125): Xaa can be any naturally occurring amino acid
MAAAGXARRVLLLLLLGVLSAGLRPGALATEHYXPLSLLKQELQHRQQQEAPAGGGGCSPQSGDWGDQYSAECGESSFLNFHDSXCEPXGXXXCDSLLSLXTXXILSQAKSIAXXXKFPFATXNXNTNEELAIAYVLIGSGLYDEAIRHFSTMLQEEPDLVSAIYGRGIAYGKKGLHDIKNAELALFELSRVITLEPDRPEVFEQRAEILSPLGRINEAVNDLTKAIQLQPSARLYRHRGTLYFISEDYATAHEDFQQSLELNKNQPIAMLYKGLTFFHRGLLKEAIESFKEALKQKVDFIDAYKSLGQAYR

SEQ ID NO: 871790 - protein, 844 aa, Homo sapiens
  misc_feature (6)..(6): Xaa can be any naturally occurring amino acid
  misc_feature (34)..(34): Xaa can be any naturally occurring amino acid
  misc_feature (85)..(85): Xaa can be any naturally occurring amino acid
  misc_feature (89)..(89): Xaa can be any naturally occurring amino acid
  misc_feature (91)..(93): Xaa can be any naturally occurring amino acid
  misc_feature (101)..(101): Xaa can be any naturally occurring amino acid
  misc_feature (103)..(104): Xaa can be any naturally occurring amino acid
  misc_feature (114)..(116): Xaa can be any naturally occurring amino acid
  misc_feature (123)..(123): Xaa can be any naturally occurring amino acid
  misc_feature (125)..(125): Xaa can be any naturally occurring amino acid
MAAAGXARRVLLLLLLGVLSAGLRPGALATEHYXPLSLLKQELQHRQQQEAPAGGGGCSPQSGDWGDQYSAECGESSFLNFHDSXCEPXGXXXCDSLLSLXTXXILSQAKSIAXXXKFPFATXNXNTNEELAIAYVLIGSGLYDEAIRHFSTMLQEEPDLVSAIYGRGIAYGKKGLHDIKNAELALFELSRVITLEPDRPEVFEQRAEILSPLGRINEAVNDLTKAIQLQPSARLYRHRGTLYFISEDYATAHEDFQQSLELNKNQPIAMLYKGLTFFHRGLLKEAIESFKEALKQKVDFIDAYKSLGQAYRELGNFEAATESFQKALLLNQNHVQTLQLRGMMLYHHGSLQEALKNFKRCLQLEPYNEVCQYMKGLSHVAMGQFYEGIKAQTKVMLNDPLPGQKASPEYLKVKYLREYSRYLHAHLDTPLTEYNIDVDLPGSFKDHWAKNLPFLIEDYEEQPGLQPHIKDVLHQNFESYKPEVQELICVADRLGSLMQYETPGFLPNKRIHRAMGLAALEVMQAVQRTWTNSKVRMNGKTRLMQWRDMFDIAVKWRRIADPDQPVLWLDQMPARSLSRGFNNHINLIRGQVINMRYLEYFEKILHFIKDRILVYHGANNPKGLLEVREALEKVHKVEDLLPIMKQFNTKTKDGFTVNTKVPSLKDQGKEYDGFTITITGDKVGNILFSVETQTTEERTQLYHAEIDALYKDLTAKGKVLILSSEFGEADAVCNLILSLVYYFYNLMPLSRGSSVIAYSVIVGALMASGKEVAGKIPKGKLVDFEAMTAPGSEAFSKVAKSWMNLKSISPSYKTLPSVSETFPTLRSMIEVLNTDSSPRCLKKL

SEQ ID NO: 871791 - protein, 844 aa, Homo sapiens; identical to SEQ ID NO: 871790
  misc_feature (6)..(6): Xaa can be any naturally occurring amino acid
  misc_feature (34)..(34): Xaa can be any naturally occurring amino acid
  misc_feature (85)..(85): Xaa can be any naturally occurring amino acid
  misc_feature (89)..(89): Xaa can be any naturally occurring amino acid
  misc_feature (91)..(93): Xaa can be any naturally occurring amino acid
  misc_feature (101)..(101): Xaa can be any naturally occurring amino acid
  misc_feature (103)..(104): Xaa can be any naturally occurring amino acid
  misc_feature (114)..(116): Xaa can be any naturally occurring amino acid
  misc_feature (123)..(123): Xaa can be any naturally occurring amino acid
  misc_feature (125)..(125): Xaa can be any naturally occurring amino acid

SEQ ID NO: 871792 - protein, 673 aa, Homo sapiens
  misc_feature (6)..(6): Xaa can be any naturally occurring amino acid
  misc_feature (34)..(34): Xaa can be any naturally occurring amino acid
  misc_feature (85)..(85): Xaa can be any naturally occurring amino acid
  misc_feature (89)..(89): Xaa can be any naturally occurring amino acid
  misc_feature (91)..(93): Xaa can be any naturally occurring amino acid
  misc_feature (101)..(101): Xaa can be any naturally occurring amino acid
  misc_feature (103)..(104): Xaa can be any naturally occurring amino acid
  misc_feature (114)..(116): Xaa can be any naturally occurring amino acid
  misc_feature (123)..(123): Xaa can be any naturally occurring amino acid
  misc_feature (125)..(125): Xaa can be any naturally occurring amino acid
MAAAGXARRVLLLLLLGVLSAGLRPGALATEHYXPLSLLKQELQHRQQQEAPAGGGGCSPQSGDWGDQYSAECGESSFLNFHDSXCEPXGXXXCDSLLSLXTXXILSQAKSIAXXXKFPFATXNXNTNEELAIAYVLIGSGLYDEAIRHFSTMLQEEPDLVSAIYGRGIAYGKKGLHDIKNAELALFELSRVITLEPDRPEVFEQRAEILSPLGRINEAVNDLTKAIQLQPSARLYRHRGTLYFISEDYATAHEDFQQSLELNKNQPIAMLYKGLTFFHRGLLKEAIESFKEALKQKVDFIDAYKSLGQAYRELGNFEAATESFQKALLLNQNHVQTLQLRGMMLYHHGSLQEALKNFKRCLQLEPYNEVCQYMKGLSHVAMGQFYEGIKAQTKVMLNDPLPGQKASPEYLKVKYLREYSRYLHAHLDTPLTEYNIDVDLPGSFKDHWAKNLPFLIEDYEEQPGLQPHIKDVLHQNFESYKPEVQELICVADRLGSLMQYETPGFLPNKRIHRAMGLAALEVMQAVQRTWTNSKVRMNGKTRLMQWRDMFDIAVKWRRIADPDQPVLWLDQMPARSLSRGFNNHINLIRGQVINMRYLEYFEKILHFIKDRILVYHGANNPKGLLEVREALEKVHKVEDLLPIMKVTLASEWQSMFLEEKKTNSTFLKRTQNY

SEQ ID NO: 871793 - protein, 640 aa, Homo sapiens [sequence omitted]

SEQ ID NO: 871794 - protein, 640 aa, Homo sapiens [sequence omitted]

SEQ ID NO: 871795 - protein, 583 aa, Homo sapiens
MDSFSSSRTATLKKQPSHMEAAHFGDLGRSCLDYQTQETKSSLSKTLEQVLHDTIVLPYFIQFMELRRMEHLVKFWLEAESFHSTTWSRIRAHSLNTVKQSSLAEPVSPSKKHETTASFLTDSLDKRLEDSGSAQLFMTHSEGIDLNNRTNSTQNHLLLSQECDSAHSLRLEMARAGTHQVSMETQESSSTLTVASRNSPASPLKELSGKLMKSIEQDAVNTFTKYISPDAAKPIPITEAMRNDIIARICGEDGQVDPNCFVLAQSIVFSAMEQEHFSEFLRSHHFCKYQIEVLTSGTVYLADILFCESALFYFSEYMEKEDAVNILQFWLAADNFQSQLAAKKGQYDGQEAQNDAMILYDKYFSLQATHPLGFDDVVRLEIESNICREGGPLPNCFTTPLRQAWTTMEKVFLPGFLSSNLYYKYLNDLIHSVRGDEFLGGNVSLTAPGSVGPPDESHPGSSDSSASQSSVKKASIKILKNFDEAIIVDAASLDPESLYQRTYAGKMTFGRVSDLGQFIRESEPEPDVRKSKGSMFSQAMKKWVQGNTDEAQEELAWKIAKMIVSDIMQQAQYDQPLEKSTKL

SEQ ID NO: 871796 - protein, 168 aa, Homo sapiens
PSGAQAVISSVNETSLMLEWTPPSDLIKSLTAPGSVGPPDESHPGSSDSSASQSSVKKASIKILKNFDEAIIVDAASLDPESLYQRTYAGKMTFGRVSDLGQFIRESEPEPDVRKSKGSMFSQAMKKWVQGNTDEAQEELAWKIAKMIVSDIMQQAQYDQPLEKSTKL

SEQ ID NO: 871797 - protein, 610 aa, Homo sapiens
MSFFRRKVKGKEQEKTSDVKSIKASISVHSPQKSTKNHALLEAAGPSHVAINAISANMDSFSSSRTATLKKQPSHMEAAHFGDLGRSCLDYQTQETKSSLSKTLEQVLHDTIVLPYFIQFMELRRMEHLVKFWLEAESFHSTTWSRIRAHSLNTVKQSSLAEPVSPSKKHETTASFLTDSLDKRLEDSGSAQLFMTHSEGIDLNNRTNSTQNHLLLSQECDSAHSLRLEMARAGTHQVSMETQESSSTLTVASRNSPASPLKELSGKLMKSIEQDAVNTFTKYISPDAAKPIPITEAMRNDIIARICGEDGQVDPNCFVLAQSIVFSAMEQEHFSEFLRSHHFCKYQIEVLTSGTVYLADILFCESALFYFSEYMEKEDAVNILQFWLAADNFQSQLAAKKGQYDGQEAQNDAMILYDKYFSLQATHPLGFDDVVRLEIESNICREGGPLPNCFTTPLRQAWTTMEKVFLPGFLSSNLYYKYLNDLIHSVRGDEFLGGNVSLTAPGSVGPPDESHPGSSDSSASQSSVKKASIKILKNFDEAIIVDAASLDPESLYQRTYAGKMTFGRVSDLGQFIRESEPEPDVRKSKGSMFSQAMKKWVQGNTDEPGD

SEQ ID NO: 871798 - protein, 315 aa, Homo sapiens
MSFFRRKVKGKEQEKTSDVKSIKASISVHSPQKSTKNHALLEAAGPSHVAINAISANMDSFSSSRTATLKKQPSHMEAAHFGDLGRSCLDYQTQETKSSLSKTLEQVLHDTIVLPYFIQFMELRRMEHLVKFWLEAESFHSTTWSRIRAHSLNTVKQSSLAEPVSPSKKHETTASFLTDSLDKRLEDSGSAQLFMTHSEGIDLNNRTNSTQNHLLLSQECDSAHSLRLEMARAGTHQVSMETQESSSTLTVASRNSPASPLKELSGKLMKSIEQDAVNTFTKYISPDAAKPIPITEAMRNDIIGKQCLKLWQKKK

SEQ ID NO: 871799 - protein, 100 aa, Homo sapiens
PLGFDDVVRLEIESNICREGGPLPNCFTTPLRQAWTTMEKVTQNFKRIKLQEVLLVELIKYKVGKPSRIAQWKLKQSSKVIKSRGLESGLVCTVTCHITF

SEQ ID NO: 871800 - protein, 622 aa, Homo sapiens
MSFFRRKVKGKEQEKTSDVKSIKASISVHSPQKSTKNHALLEAAGPSHVAINAISANMDSFSSSRTATLKKQPSHMEAAHFGDLGRSCLDYQTQETKSSLSKTLEQVLHDTIVLPYFIQFMELRRMEHLVKFWLEAESFHSTTWSRIRAHSLNTVKQSSLAEPVSPSKDSGSAQLFMTHSEGIDLNNRTNSTQNHLLLSQECDSAHSLRLEMARAGTHQVSMETQESSSTLTVASRNSPASPLKELSGKLMKSIEQDAVNTFTKYISPDAAKPIPITEAMRNDIIARICGEDGQVDPNCFVLAQSIVFSAMEQEHFSEFLRSHHFCKYQIEVLTSGTVYLADILFCESALFYFSEYMEKEDAVNILQFWLAADNFQSQLAAKKGQYDGQEAQNDAMILYDKYFSLQATHPLGFDDVVRLEIESNICREGGPLPNCFTTPLRQAWTTMEKVFLPGFLSSNLYYKYLNDLIHSVRGDEFLGGNVSLTAPGSVGPPDESHPGSSDSSASQSSVKKASIKILKNFDEAIIVDAASLDPESLYQRTYAGKMTFGRVSDLGQFIRESEPEPDVRKSKGSMFSQAMKKWVQGNTDEAQEELAWKIAKMIVSDIMQQAQYDQPLEKSTKL

SEQ ID NO: 871801 - protein, 533 aa, Homo sapiens
MSFFRRKVKGKEQEKTSDVKSIKASISVHSPQKSTKNHALLEAAGPSHVAINAISANMDSFSSSRTATLKKQPSHMEAAHFGDLGRSCLDYQTQETKSSLSKTLEQVLHDTIVLPYFIQFMELRRMEHLVKFWLEAESFHSTTWSRIRAHSLNTVKQSSLAEPVSPSKKHETTASFLTDSLDKRLEDSGSAQLFMTHSEGIDLNNRTNSTQNHLLLSQECDSAHSLRLEMARAGTHQVSMETQESSSTLTVASRNSPASPLKELSGKLMKSIEQDAVNTFTKYISPDAAKPIPITEAMRNDIIARICGEDGQVDPNCFVLAQSIVFSAMEQEHFSEFLRSHHFCKYQIEVLTSGTVYLADILFCESALFYFSEYMEKEDAVNILQFWLAADNFQSQLAAKKGQYDGQEAQNDAMILYDKYFSLQATHPLGFDDVVRLEIESNICREGGPLPNCFTTPLRQAWTTMEKVFLPGFLSSNLYYKYLNDLIHSVRGDEFLGGNVSLTAPGSVGPPDESHPGSSDSSASQEDDIWKSQ

SEQ ID NO: 871802 - protein, 645 aa, Homo sapiens
MSFFRRKVKGKEQEKTSDVKSIKASISVHSPQKSTKNHALLEAAGPSHVAINAISANMDSFSSSRTATLKKQPSHMEAAHFGDLGRSCLDYQTQETKSSLSKTLEQVLHDTIVLPYFIQFMELRRMEHLVKFWLEAESFHSTTWSRIRAHSLNTVKQSSLAEPVSPSKKHETTASFLTDSLDKRLEDSGSAQLFMTHSEGIDLNNRTNSTQNHLLLSQECDSAHSLRLEMARAGTHQVSMETQESSSTLTVASRNSPASPLKELSGKLMKSIEQDAVNTFTKYISPDAAKPIPITEAMRNDIIARICGEDGQVDPNCFVLAQSIVFSAMEQEHFSEFLRSHHFCKYQIEVLTSGTVYLADILFCESALFYFSEYMEKEDAVNILQFWLAADNFQSQLAAKKGQYDGQEAQNDAMILYDKYFSLQATHPLGFDDVVRLEIESNICREGGPLPNCFTTPLRQAWTTMEKVFLPGFLSSNLYYKYLNDLIHSVRGDEFLGGNVSLTAPGSVGPPDESHPGSSDSSASQSSVKKASIKILKNFDEAIIVDAASLDPESLYQRTYAGKMTFGRVSDLGQFIRESEPEPDVRKSKGSMFSQAMKKWVQGNTDEAQEELAWKIAKMIVSDIMHQVSVLCLSASQRMWSLSIP

SEQ ID NO: 871803 - protein, 527 aa, Homo sapiens
MSFFRRKVKGKEQEKTSDVKSIKASISVHSPQKSTKNHALLEAAGPSHVAINAISANMDSFSSSRTATLKKQPSHMEAAHFGDLGRSCLDYQTQETKSSLSKTLEQVLHDTIVLPYFIQFMELRRMEHLVKFWLEAESFHSTTWSRIRAHSLNTVKQSSLAEPVSPSKKHETTASFLTDSLDKRLEDSGSAQLFMTHSEGIDLNNRTNSTQNHLLLSQECDSAHSLRLEMARAGTHQVSMETQESSSTLTVASRNSPASPLKELSGKLMKSIEQDAVNTFTKYISPDAAKPIPITEAMRNDIIARICGEDGQVDPNCFVLAQSIVFSAMEQEHFSEFLRSHHFCKYQIEVLTSGTVYLADILFCESALFYFSEYMEKEDAVNILQFWLAADNFQSQLAAKKGQYDGQEAQNDAMILYDKYFSLQATHPLGFDDVVRLEIESNICREGGPLPNCFTTPLRQAWTTMEKVTQNFKRIKLQEVLLVELIKYKVGKPSRIAQWKLKQSSKVIKSRGLESGLVCTVTCHITF

SEQ ID NO: 871804 - protein, 73 aa, Homo sapiens
SQKNSRIAFARPAPRLLQKLPETPWWATQPELPGAPREAERPVGSWDGSSRSLRRLHPLKEPVPTLPSRFPGR

SEQ ID NO: 871805 - protein, 153 aa, Homo sapiens
LWLCQTPGAAAPMELQDCYLSNVDGGEHPCPRLKIAPLESHHRPKRPDDPPGTLNPCPERGGAGVWIPAGSFGTGKNRGCSDRVFTKTCIRQDPGRMWVAPPLCWARRMCPHRSQILFPQWVVQDTLNFCMNWDIQNSLEQPPPSTLCLDISY

SEQ ID NO: 871806 - protein, 63 aa, Homo sapiens
MGSPAHLPKDAIAVFIVFPRVRHWLSGTRRQCTRRAPYVRCFKVPVLRKRSLVEEMSAEQITK

SEQ ID NO: 871807 - protein, 63 aa, Homo sapiens; identical to SEQ ID NO: 871806

SEQ ID NO: 871808 - protein, 63 aa, Homo sapiens; identical to SEQ ID NO: 871806

SEQ ID NO: 871809 - protein, 366 aa, Homo sapiens
MLLALNKVEGDNISGVCFVGLYDLDASRYFVLLPLCLCVFVGLSLLLAGIISLNHVRQVIQHDGRNQEKLKKFMIRIGVFSGLYLVPLVTLLGCYVYEQVNRITWEITWVSDHCRQYHIPCPYQAKAKARPELALFMIKYLMTLIVGISAVFWVGSKKTCTEWAGFFKRNRKRDPISESRRVLQESCEFFLKHNSKVKHKKKHYKPSSHKLKVISKSMGTSTGATANHGTSAVAITSHDYLGQETLTEIQTSPETSMREVKADGASTPRLREQDCGEPASPAASISRLSGEQVDGKGQAGSVSESARSEGRISPKSDITDTGLAQSNNLQVPSSSEPSSLKGSTSLLVHPVSGVRKEQGGGCHSDT

SEQ ID NO: 871810 - protein, 149 aa, Homo sapiens [sequence omitted]

SEQ ID NO: 871811 - protein, 234 aa, Homo sapiens
MGWYWWLVTDVEGGHLLLPQSTVVDVGEAFFELTQSDKIEKRILKNEQILLKKSCEFFLKHNSKVKHKKKHYKPSSHKLKVISKSMGTSTGATANHGTSAVAITSHDYLGQETLTEIQTSPETSMREVKADGASTPRLREQDCGEPASPAASISRLSGEQVDGKGQAGSVSESARSEGRISPKSDITDTGLAQSNNLQVPSSSEPSSLKGSTSLLVHPVSGVRKEQGGGCHSDT

SEQ ID NO: 871812 - protein, 651 aa, Homo sapiens [sequence omitted]

SEQ ID NO: 871813 - protein, 672 aa, Homo sapiens [sequence omitted]

SEQ ID NO: 871814 - protein, 567 aa, Homo sapiens
MEMFTFLLTCIFLPLLRGHSLFTCEPITVPRCMKMAYNMTFFPNLMGHYDQSIAAVEMEHFLPLANLECSPNIETFLCKAFVPTCIEQIHVVPPCRKLCEKVYSDCKKLIDTFGIRWPEELECDRLQYCDETVPVTFDPHTEFLGPQKKTEQVQRDIGFWCPRHLKTSGGQGYKFLGIDQCAPPCPNMYFKSDELEFAKSFIGTVSIFCLCATLFTFLTFLIDVRRFRYPERPIIYYSVCYSIVSLMYFIGFLLGDSTACNKADEKLELGDTVVLGSQNKACTVLFMLLYFFTMAGTVWWVILTITWFLAAGRKWSCEAIEQKAVWFHAVAWGTPGFLTVMLLALNKVEGDNISGVCFVGLYDLDASRYFVLLPLCLCVFVGLSLLLAGIISLNHVRQVIQHDGRNQEKLKKFMIRIGVFSGLYLVPLVTLLGCYVYEQVNRITWEITWVSDHCRQYHIPCPYQAKAKARPELALFMIKYLMTLIVGISAVFWVGSKKTCTEWAGFFKRNRKRDPISESRRVLQGLVQRVILLTLAWHRATICRSPVLQNQAASKVPHLCLFTRFQE

SEQ ID NO: 871815 - protein, 672 aa, Homo sapiens [sequence omitted]

SEQ ID NO: 871816 - protein, 104 aa, Homo sapiens
TGLLGLGILIPCFLLQGKFLRFLETISVAPHLRLLLQCHFSASFLTLPILLRLLYQYFIQIAGIYWCLLSHCHSDLLKNSELSYFYTLSKHNACGVGADQICSE

SEQ ID NO: 871817 - protein, 181 aa, Homo sapiens
MMPGPRPRKGPQARGQGVAAAKQMGLFMEFGPEDTLLGMDEAEDDEDLEAELLALTGEAQTTGKKPAPKGQAPLPMAHIEKLAADCMRDVEEEEEEEGLEEDAELLVVSARLVSQGSETELQEVLGVDEETEPLDGDEVADPGGSEEENGLEDTEPPVQTAVLTASAPAAQVGSGGGPLCL

SEQ ID NO: 871818 - protein, 855 aa, Homo sapiens
MMPGPRPRKGPQARGQGVAAAKQMGLFMEFGPEDTLLGMDEAEDDEDLEAELLALTGEAQTTGKKPAPKGQAPLPMAHIEKLAADCMRDVEEEEEEEGLEEDAELLTELQEVLGVDEETEPLDGDEVADPGGSEEENGLEDTEPPVQTAVLTASAPAAQAGASQGLHALLEERIHNYREAAASAKEAGEAAKARRCERGLKTLESQLASVRRGRKINEDEIPPPVALGKRPLAPQEPANRSPETDPPAPPALESDNPSQPETSLPGISAQPVSDLDPDPRALLSSRQREYKVAALSAKRAGELDRARELMRIGKRFGAVLEALEKGQPVDLSAMPPAPEDLKPQQASQAPTAPSVIPPAVERVQPVMAPDVPATPVAPTESQTVLDALQQRLNKYREAGIQARSGGDERKARMHERIAKQYQDAIRAHRAGRKVNFAELPVPPGFPPIPGLESTMGVEEDAVAATLAAAEKLASAEDSAPADKDEDEGTQGEPPAQAPVAKKPARPTVPSSQRLPEPRASSSKESPSPSVREQLALLEARKLQYQRAALQAKRSQDLEQAKAYLRVAKWLEAQIIQARSGRPVDLSKVPSPLTDEEGDFILIHHEDLRLSQKAEEVYAQLQKMLLEQQEKCLLFSKQFMHQGNVAETTRFEKLAQDRKKQLEILQLAQAQGLDPPTHHFELKTFQTVRIFSELNSTEMHLIIVRGMNLPAPPGVTPDDLDAFVRFEFHYPNSDQAQKSKTAVVKNTNSPEFDQLFKLNINRNHRGFKRVIQSKGIKFEIFHKGSFFRSDKLVGTAHLKLERLENECEIREIVEVLDGRKPTGGKLEVKVRLREPLSGQDVQMVTENWLVLEPRGL

SEQ ID NO: 871819 - protein, 855 aa, Homo sapiens; identical to SEQ ID NO: 871818

SEQ ID NO: 871820 - protein, 397 aa, Homo sapiens
PPLLALPVATAAAQGPREPRAVPGETRPGAPQGEPPAQAPVAKKPARPTVPSSQRLPEPRASSSKESPSPSVREQLALLEARKLQYQRAALQAKRSQDLEQAKAYLRVAKWLEAQIIQARSGRPVDLSKVPSPLTDEEGDFILIHHEDLRLSQKAEEVYAQLQKMLLEQQEKCLLFSKQFMHQGNVAETTRFEKLAQDRKKQLEILQLAQAQGLDPPTHHFELKTFQTVRIFSELNSTEMHLIIVRGMNLPAPPGVTPDDLDAFVRFEFHYPNSDQAQKSKTAVVKNTNSPEFDQLFKLNINRNHRGFKRVIQSKGIKFEIFHKGSFFRSDKLVGTAHLKLERLENECEIREIVEVLDGRKPTGGKLEVKVRLREPLSGQDVQMVTENWLVLEPRGL

SEQ ID NO: 871821 - protein, 118 aa, Homo sapiens
EPSPSLLSPPLPEFDQLFKLNINRNHRGFKRVIQSKGIKFEIFHKGSFFRSDKLVGTAHLKLERLENECEIREIVEVLDGRKPTGGKLEVKVRLREPLSGQDVQMVTENWLVLEPRGL

SEQ ID NO: 871822 - protein, 855 aa, Homo sapiens; identical to SEQ ID NO: 871818

SEQ ID NO: 871823 - protein, 507 aa, Homo sapiens
MMPGPRPRKGPQARGQGVAAAKQMGLFMEFGPEDTLLGMDEAEDDEDLEAELLALTGEAQTTGKKPAPKGQAPLPMAHIEKLAADCMRDVEEEEEEEGLEEDAELLTELQEVLGVDEETEPLDGDEVADPGGSEEENGLEDTEPPVQTAVLTASAPAAQAGASQGLHALLEERIHNYREAAASAKEAGEAAKARRCERGLKTLESQLASVRRGRKINEDEIPPPVALGKRPLAPQEPANRSPETDPPAPPALESDNPSQPETSLPGISAQPVSDLDPDPRALLSSRQREYKVAALSAKRAGELDRARELMRIGKRFGAVLEALEKGQPVDLSAMPPAPEDLKPQQASQAPTAPSVIPPAVERVQPVMAPDVPATPVAPTESQTVLDALQQRLNKYREAGIQARSGGDERKARMHERIAKQYQDAIRAHRAGRKVNFAELPVPPGFPPIPGLESTMGVEEDAVAATLAAAEKLASAEDSAPADKDEDEHCGQLQLCATVWALRVDCQR

SEQ ID NO: 871824 - protein, 855 aa, Homo sapiens; identical to SEQ ID NO: 871818

SEQ ID NO: 871825 - protein, 522 aa, Homo sapiens
MPPAPEDLKPQQASQAPTAPSVIPPAVERVQPVMAPDVPATPVAPTESQTVLDALQQRLNKYREAGIQARSGGDERKARMHERIAKQYQDAIRAHRAGRKVNFAELPVPPGFPPIPGLESTMGVEEDAVAATLAAAEKLASAEDSAPADKDEDEGTQGEPPAQAPVAKKPARPTVPSSQRLPEPRASSSKESPSPSVREQLALLEARKLQYQRAALQAKRSQDLEQAKAYLRVAKWLEAQIIQARSGRPVDLSKVPSPLTDEEGDFILIHHEDLRLSQKAEEVYAQLQKMLLEQQEKCLLFSKQFMHQGNVAETTRFEKLAQDRKKQLEILQLAQAQGLDPPTHHFELKTFQTVRIFSELNSTEMHLIIVRGMNLPAPPGVTPDDLDAFVRFEFHYPNSDQAQKSKTAVVKNTNSPEFDQLFKLNINRNHRGFKRVIQSKGIKFEIFHKGSFFRSDKLVGTAHLKLERLENECEIREIVEVLDGRKPTGGKLEVKVRLREPLSGQDVQMVTENWLVLEPRGL

SEQ ID NO: 871826 - protein, 937 aa, Homo sapiens
MMPGPRPRKGPQARGQGVAAAKQMGLFMEFGPEDTLLGMDEAEDDEDLEAELLALTGEAQTTGKKPAPKGQAPLPMAHIEKLAADCMRDVEEEEEEEGLEEDAELLTELQEVLGVDEETEPLDGDEVADPGGSEEENGLEDTEPPVQTAVLTASAPAAQAGASQGLHALLEERIHNYREAAASAKEAGEAAKARRCERGLKTLESQLASVRRGRKINEDEIPPPVALGKRPLAPQEPANRSPETDPPAPPALESDNPSQPETSLPGISAQPVSDLDPDPRALLSSRQREYKVAALSAKRAGELDRARELMRIGKRFGAVLEALEKGQPVDLSAMPPAPEDLKPQQASQAPTAPSVIPPAVERVQPVMAPDVPATPVAPTESQTVLDALQQRLNKYREAGIQARSGGDERKARMHERIAKQYQDAIRAHRAGRKVNFAELPVPPGFPPIPGLESTMGVEEDAVAATLAAAEKLASAEDSAPADKDEDEGTQGEPPAQAPVAKKPARPTVPSSQRLPEPRASSSKESPSPSVREQLALLEARKLQYQRAALQAKRSQDLEQAKAYLRVAKWLEAQIIQARSGRPVDLSKVPSPLTDEEGDFILIHHEDLRLSQKAEEVYAQLQKMLLEQQEVSRPLSVPPLCAHSLPVEEDLELRPHSPGLKILSSSTYSLCDLGKALSSLNYIFLIYEMVVIIPLSGWYKQQRRGKEHCDVRKCLLFSKQFMHQGNVAETTRFEKLAQDRKKQLEILQLAQAQGLDPPTHHFELKTFQTVRIFSELNSTEMHLIIVRGMNLPAPPGVTPDDLDAFVRFEFHYPNSDQAQKSKTAVVKNTNSPEFDQLFKLNINRNHRGFKRVIQSKGIKFEIFHKGSFFRSDKLVGTAHLKLERLENECEIREIVEVLDGRKPTGGKLEVKVRLREPLSGQDVQMVTENWLVLEPRGL

SEQ ID NO: 871827 - protein, 152 aa, Homo sapiens
SGTEAWSGTEAWSGTEAWSGTEASIYLQETLSKIFVFSLQFRLTSCALHPCVADGQHQERSQAATVQEMTFPALLASEAFVHKRCCYPSTKDLLSMCTTDHDSGLSCCWPLWGSTETGWVPGAHLPAVSPCPESGRGQGHFHSSVPWSPAAP

SEQ ID NO: 871828 - protein, 855 aa, Homo sapiens; identical to SEQ ID NO: 871818

SEQ ID NO: 871829 - protein, 118 aa, Homo sapiens
MPREDAHFIYGYPKKGHGHSYTTAEEAAGIGILTVILGVLLLIGCWYCRRRNGYRALMDKSLHVGTQCALTRRCPQEGFDHRDSKVSLQEKNCEPVVPNAPPAYEKLSAEQSPPPYSP

SEQ ID NO: 871830 - protein, 118 aa, Homo sapiens; identical to SEQ ID NO: 871829

SEQ ID NO: 871831 - protein, 150 aa, Homo sapiens
RVYSRVLCILTRYSHFTEGVRVAPDPTPNSPSIKNVYSLYLQSNPNKAHREFLIRAEEAAGIGILTVILGVLLLIGCWYCRRRNGYRALMDKSLHVGTQCALTRRCPQEGFDHRDSKVSLQEKNCEPVVPNAPPAYEKLSAEQSPPPYSP

SEQ ID NO: 871832 - protein, 105 aa, Homo sapiens
MPREDAHFIYGYPKKGHGHSYTTAEEAAGIGILTVILGVLLLIGCWYCRRRNGYRALMEILGWSAVVNMSHCSLDLLELKPSSCLSLQSSWDHRIKVFMLALNVP

SEQ ID NO: 871833 - protein, 118 aa, Homo sapiens; identical to SEQ ID NO: 871829

SEQ ID NO: 871834 - protein, 253 aa, Homo sapiens
MLSDELESKPELLVQFVQNTSIPLGQGLVESEAKDITCLSLLPVTEASECSRLMLPDDTTNHSNSSKEVPSSAVLRSLRVNVGPDGEETRAQTVQKSPEFLSTSESSSLLQDLQPSDSTSFILLNLTRAGLGSSAEHLVFVQDEAEDSGNDFLSSESTDSSIPWFLRVQELAHDSLIAATRAQLAKNAKTSSNGENVHLGSGDGQSKDSGPLPQVEKKLKCTVEGCDRTFVWPAHFKYHLKTHRGKASMCCRG

SEQ ID NO: 871835 - protein, 478 aa, Homo sapiens
MLSDELESKPELLVQFVQNTSIPLGQGLVESEAKDITCLSLLPVTEASECSRLMLPDDTTNHSNSSKEVPSSAVLRSLRVNVGPDGEETRAQTVQKSPEFLSTSESSSLLQDLQPSDSTSFILLNLTRAGLGSSAEHLVFVQDEAEDSGNDFLSSESTDSSIPWFLRVQELAHDSLIAATRAQLAKNAKTSSNGENVHLGSGDGQSKDSGPLPQVEKKLKCTVEGCDRTFVWPAHFKYHLKTHRNDRSFICPAEGCGKSFYVLQRLKVHMRTHNGEKPFMCHESGCGKQFTTAGNLKNHRRIHTGEKPFLCEAQGCGRSFAEYSSLRKHLVVHSGEKPHQCQVCGKTFSQSGSRNVHMRKHHLQLGAAGSQEQEQTAEPLMGSSLLEEASVPSKNLVSMNSQPSLGGESLNLPNTNSILGVDDEVLAEGSPRSLSSVPDVTHHLVTMQSGRQSYEVSVLTAVNPQELLNQGDLTERRT
